United States Patent Application Publication US 2014/0255922 A1 - sequence listing, part 2

SEQ ID NO: 4056 - DNA, 612 bp, Gossypium hirsutum
tgggcagagtgggaaattgaattttttgtacgtttggtgaaggaaaatgcaccaccttcagagacaatttctgcactacgtgcagctagcatttgtgttcaggacagccttaactactgcttattgctggaatcacaagggttgaaactctcgaagttgcttctggtgctcttgcgtccgtatcttgaggaagttctggagttgaattttaggagggctagaaaggctgtttttgactccatggaagttgatgagaacttgcctctgtcacctcactttgtgtctgctgtgtcggcttttgccacatcttcaaacagcttgctagtagatagtggaatgaaatttttgtatattatttcagtaagttagtcctttttccttgtttgaaattatttattttgctcttcgcacctctaacaccataaatgccctaattgatttaaaagttttaagaaactaggtactatgaccgaaaagtgatactcttctagtgatagatgctgaaaaatagggaaaatatttgtagaatatgattgaatttaggattttgaagaagtgatctatagttctttgtttatttaaatcacatagaggaagtgttctgtgcctcag

SEQ ID NO: 4057 - DNA, 628 bp, Gossypium hirsutum
  misc_feature (12)..(12): n is a, c, g, or t
atatagatgatnactaagaagcaataaaagggaaacttttttatctgtattgttgctcaaagtccattgattactggatttttactgtttttttttctcttattcctatattcctgtttgggtaattgttcttgggctcttggatttaatcattgtatttatttttaatcattttttaaaaatttgtttatgaacctaatgatgatgttgttgattaatagttatcatatgtactattatcgacttgattaccaggttgggtcctaatatgtgttttatgcggttcgcacgcttctatgagatcataagatgtaggttaccacaatcatataagcgatcccacatctagaaaacacgtgttaactctagaatatgatacttattgatcgacatatatgggaacctacctataatattacatccaaaaacagtaatcatataatataaatgcacagttaactcatctaaagaagatacactcttaaatactcaacatatatattattaattcatcaaatatgaatccgcaataccaaaggtgaatatggaaaacttataattgaatcccttttaaaataattaaattaaaagttactatatggtaaaattgtattttggtcttctcaaa

SEQ ID NO: 4058 - DNA, 306 bp, Gossypium hirsutum
  misc_feature (233)..(234): n is a, c, g, or t
  misc_feature (236)..(236): n is a, c, g, or t
  misc_feature (238)..(239): n is a, c, g, or t
  misc_feature (267)..(267): n is a, c, g, or t
  misc_feature (292)..(293): n is a, c, g, or t
  misc_feature (295)..(295): n is a, c, g, or t
tttggaagtatgaaaaacaaaatggcgtagaaagtactagtttccatcttttttcttctgtctggagtttaggtagattccttatagagcttgtctaggtgtggttctggctgtactcaatctgatataatgtgttttgtgtgtggaagaagaagaaaaatgttgtgatgatgaggtcctctggaatagtgtcataaataatactttgattactgtgttggttgattattcannancnnatgaccctgttgttcttattaccttttntagaaaaaaatcttctggggggggnngnattgtactact

SEQ ID NO: 4059 - DNA, 645 bp, Gossypium hirsutum
gtatgatgcttctgttgacaaagagagtgaatttcacctcattacaacttaaatgtgtttatggttgttggtaggaattttcatctgacatgggaagccgtacagtgaagaggatcgctgatgtttcaaagcttagaaattatcaaatcccacagattatgttttttgcatgacttgatagtgatctcatatccaattatatgagcagttatgttgaaactactacgaaaaggtagaattatatccttcagttttgacatacttgagagatgacttgcctttgtttctgtattgctcaggatgctggtcccatggctcatcctgttaggccgcattcttatgtttaggtcttaaattatctcccttatttattgacatttactacctttttgtttgctcataagctctcaaaagtttttgcttctaagctgttttccctttttccctttgacagatggataacttctacacaggcaagtttttgttatacctaatagaaatgtgtaatgggtgcaaggatcagttttctctttctatattgatttattttttaatgtgtgaatgttttattttgttgtatgatcttgttgtatatgaatctattatggggttatcaacaactgcagtgacggtaagccctatcac

SEQ ID NO: 4060 - DNA, 674 bp, Gossypium hirsutum
ccttttatcttcttgcaggaagagatgatcggtaaccaattgctgttgctcttgatgatgatgacgacgatgcttgtgagatggtgatgatgaccggatctccctgggagccgaattatcggcgtcgagaagtttgaacgacggcaatttcttcatagatcgttgattttggctctgcataacaacttgtccgttttgccacaacagctccatgatttcatcctctggtctgtttttgtattttatcagttcacaattttcatagtacatgagattaaaaagaaaaaaacagaggaaaaaaaatgaagattacctgggcggaggcttttcaactcgagttaaactaggaggtgaaaggattgcataatcgtcttccatttcgaaatctggaacgcagtgattcatcctatatatatatatatggaaaattaaaaataaaaaaggaaaaggtcacctaattgaactaattaagctaagaaaatcgaagaattgtttctctggaaattattttgaaaagaaaaaacggaaaaagggagtgttatcttggttgaagtatgcgctatacatgttttagctgttggcaatgaaattgatggtgaagaaaaaactagacacaaaaaggaaaacagaactgaaaatctgaatccatgtgtcgcctactgctgctgtcttat

SEQ ID NO: 4061 - DNA, 643 bp, Gossypium hirsutum
tttgatggcaaaatagtacaattcatctttctttctttctttttgtaatttcatcttctaaagcacgcaaaacgtccattgcatttgaaatagtatattgagagtgaggaaaagtgattttatttactgacttccttggactagccatactctcacataacttctcaatcagagtagtcaatgtattttttgacgattttctacttgaacttgattttttttcctttatcgtgtataaccccaagtgtttgctttcttatattaggagtttcatgagaagggtttgatggtgcctcattagaaggaataccctcattctcattactatgttcatctgaatcaccaaatccctcattaggtgtatcatctcccataggagccctacttggaagaacaccagatgaaggtgcccatgcatgctctctagtggctacaatgtcaccaaacattttccacattaactcattcaaatatgactcaattcctttcttcttaaatcctttaaaatcaagattttcctacataatatgttaaatgttatactaagatttttatatctgtaaattattaatttcaataaaatttatgcattaaagtattgatgaagttaatactaactgtgtttttcagcccaccgttcttc

SEQ ID NO: 4062 - DNA, 624 bp, Gossypium hirsutum
agttattatattttactcatttgctactggaaaatttgtataacaagtgctttgttcgctattgctggtcgaacttgtttagatcatgataatagattatgtttatctttcttgctaatccaactttcatttattagaatcgatatccaaaggataacctatgtgaatattttccttctcatgttgatggaaaacctagcagagacctttttggccttgcttgctaattaatttgttgtcaggatcttggcaagagaaatttcgtaagagtatctgatgcgacaggttagaactctaacgatctatagacatttagtagtcttataagtgatgtacttcaaaataattatctctataggtttctcctaaatggtgagacattgtatttacttgctttttcgccaatacagagtgaagatgccccagctgacgatctaatggagcttgtggaacaaattgttgctttccacatgaaggattagctatctgatcatatcaacaagaaattgatatatcacagaagaaaatttttttccggtacttgccatgctttccagtttctaacatatttgtatgttctgtacaacacaatgctgaatttaaagctgttgatctatttgatgg

SEQ ID NO: 4063 - DNA, 623 bp, Gossypium hirsutum
tgttgcagatctttagaggtttattagagccgatagttacgccagaagctttacaacaacaacctcaacctgttagctcattgttcgagatatgtcaaaagcaagggaagtacgttgacataaagcattggaagaatggcgtaaaaaacattgctactgtatttgttgacggggagtttattgcttccggttcttcggatcgaaaagacattgcgaagcttaatgcggtgagggaagctttgcaaaggttatcgacatccatggttgttgatgttgattcactcggaatcgacgagattaatgggtctttagaaatcaaagaagcgaagcaaaaactgcacaagctttgcatgaaaaagaaatggcccaaacctatctacgagtaaggcttttatttttattgtcatgatgcaatttcgaaacacgagtccgggttctgagttccaaaaataccgttgttgatacatatgttcattcaatgttctgcctatgttaaaatgtcttgtgttctttttctcatgatgcaaatttgaaggacaagtccaggttccaagttcggatacggttcttaatgcgaatgttcatccgatgtttttgaaggacaaatccgggttccgagttca

SEQ ID NO: 4064 - DNA, 615 bp, Gossypium hirsutum
tgcatgtgcatgtatataatgaagatctactttgtccggcagaggctggtgaaattaaaaatagattctctgaagttgtctaatgtttgaaattccataaaacaaaaatatctttctttattgaaggtataaagctcagttttgaagcgcagggaaagcttatcgagtttaaatgccaaacatgaattgctcttgctataatgcttgtttcccctaatgctaatgttgtctgattgtgtttgtttgaagggttctttaggagcctctatctctgttctcaatttgttggaagttgtcaatggaaacacaagtcattctggtgctgtagtgacggcttgtgattattttcgtactctgtgtcaacaatcctttcccggtccgttggttggtggaaatgtaagcggtaaagagttgaacaagtggattgatgaaagaattgccagctgtgaatcaccggacatggactacagaaaaggtgaagctttgaagcttcttctctcattgcttaaaatagcttaccagcattatggaaaacttcggtctccttttggtgctgacactctattgaaggtacacactatgattgtaatttaacttctctttcttaaccatcag

SEQ ID NO: 4065 - DNA, 609 bp, Gossypium hirsutum
cggacagcttgcaaggcagaaaagatgagtctattatgtgataatgaaataagggtaacaaactgtcggtgctttaatataatgttatgtgtcaagtgaaaaaattatcagctggaggtaaaaaaactaaatttgaatgtaaggttacaactacatgaaaatgcttatttatttttaaaatttcattttatgccattcttatttggatgaagtgcttatagtctgcaaccattgttgaacctcctactactctgttctaggctagcaaaaaactgaaaactgattcaaacagtagtgttctcttcggtttgcttttggttaggttgttaaattcagttagttcaaatttcagttcaaaagttaaataacctaattgttaaaattgaaccaaattctattctttatgtttaaatagtttatattttttatagaactaaaaaatattttatttcaaaattaaagaaaaaactttaaggtattaaataaaaataaaaatttaaatttttttttttaaactgaaaacccaaccaaatctaatcgggggaatttcattttgggccttttggtttcccttttgaattggtttctaaaaaacccaaaaccctgcac

SEQ ID NO: 4066 - DNA, 636 bp, Gossypium hirsutum
  misc_feature (628)..(628): n is a, c, g, or t
tcgagagtaagtgatcgaacctgaaatattaaccaacagaaaattaagagttacataaatgatgaggcaacattggtaccactaccgagtgattttttttccagagtaaagagttcatttcagtagaaaacgttttgtctacggaaacaactaatacaaactccaacaagcaagatcaagctactccttcattactgagaaccattgactgattaaacataagaaaatcaagagaaagaacaatcgataaataaaatactttagatttagagatgcaggattctcaataaggaatgcagaaaaaaggtaatatatataatttattaagtttacctttgatatgtgaacaccgagattacgatgaacaccggaacattcaatacaaacaagaacacccagattcaaagatgcccaatcaggttcaggggcaccacaatctgcacatttatcattgccgcatactctttgcagtacatcaattggcttttcgatttttatagaggaccttagatgtagtgaagcttttgattggtgttcattatgtgcattaacaaggtttctctctcagggatattcttgacccgcagtatgatcaaaatcagaactttcttacgaactctctctgggngatcgatg

SEQ ID NO: 4067 - DNA, 605 bp, Gossypium hirsutum
  misc_feature (53)..(54): n is a, c, g, or t
tatggcatctctgggataaaaagcttctgcgaatgacaaagatgaagatatcnncaggataaaggttgaatctactccaagttatggacctgtggaagacaaagatttgactcaaaacaatcccgaaagttcaaccatcattcaatatggtaccagaccagacttcaaaggttagtttcatgataaaaccccgtgttgaacacatacgtatacaacattgatacttgagtctcaggtttgattcgtttttttccccttcatttatgcagaaatatttgcatccacaagcaggaaatgggggaatgttgatgtaggtgtgctagtttgtggtccaccaactcttcaatcaagtgttgctaaagagatcaggtcacacaacataaggagacaaaaacatgacaccattttccatttcaacagtcatagctttgatctatgaaaattcctattagtccctcttaattcttagcactgcttgcatagtgatatgtatatcatgtatgtatatatatgtatatatatgtatagagagatgaagatgctatatgtacgtaatatataggtggagaaaaggaatctgcacatccatgacagatggttctgtt

SEQ ID NO: 4068 - DNA, 565 bp, Gossypium hirsutum
ctacctttttatatttataaaaaagacatatttggttttgacttctgaatattttgataacaagacgtttcttctgtcccccatttatgagtatcactatgctgcgatatctccttatttctgaaaactttaggttgctatgttacaaataatttatctcaagccctttggtttccattccctttctggattcggtatttacttacttttgtgctgtaagaagtctatgagagccaacactgtccttataaacttactgttgttggaggtgatctgtagcgaggtaggaaaaaagtgggttttaatcagatggactcaacgattaatatctaattcccggatccaaaaagtggggtgcttaaactcttttgttgtttcttttcttttttgctgaaaagttggtattccgatgttttcacaagtgcatatcgtttctgacaaagtattgataacatattgactattttcaaccctaaaagtccccaactattatcgcatgatatgatactttagagttgatttactggttccttaacctgattttgactgtttgtgtcaaggatca

SEQ ID NO: 4069 - DNA, 642 bp, Gossypium hirsutum
ttaagagtagccatttctgttggacattaaatggaagagagagtagagtagaagaaacaattatccttttcttgttttgaaataaaagtagagttgagaatttatcataatggtttttccccagaattaacagtatgccccaaattcaaaccattactaaaatggatttttgggtggtaactttcacctctgaatcctctactgaagaactcagaaacactgaatttttttcactctatttctctctactcttcccttgccaaagttgtaaaagtttaccatgagttcttgtagttatattctcaatcctcaattcatagtttgattatgtggtgtagtgccttaggaagatagatacctaaattgactaaagttttaaatgaaaaggaagtactcacctttttgtggagactctgagatattaaaaacttttactttcatgaacttgctagactaggatgagaaatattcatgtataggagagtgatatattgtctaaaatgaattataataggttgaatttcaggttgtgtattatttgtcttatcctgaatgttccttaatttgttataattgaacccgtttataatcataggtttcttggtttcatctttgagtttctaccagcatttgaagtttgga

SEQ ID NO: 4070 - DNA, 609 bp, Gossypium hirsutum
acaatagggccatctatcaagatagaaaatacaaaacgaacggaatgattccttctgaccaaacaataaattacttccacacaagaaacatgtcataattagaagccatttgaaataaaataaacataaagacatagctacaaaaacacaccgattgacataaaaacatgggaatctatccttcgaaaacacgaattcttcttacttatgtaatggcacatgagaaaaacaaaacaaagcaaaacatagacatagacatgaaccgcaattaacacagaaccagcgaaaatgccttatacaagaagttacgacctttccttcgagcagatagaatagaaagaaaaacataaaaaggagaaaaaggaaatttccacattcatcaaaaagaacacatcaaaacttgttttaaaaagagaaataaaaagcataaaagtgataaccacaaagctttgaccacacacacagacaaaacccagaaccggttaacattccttatggaaaattagtatattttgtgcccatattagtaaattatgcttttgctacttgttctatgttcaagattcaaagaaaataaaaagatttcccaatcactgttcttctgcatat

SEQ ID NO: 4071 - DNA, 627 bp, Gossypium hirsutum
actatgaaatctatagataattcagcagatagggataacgtccttaaaacttacttcatcaacctcttgaggagtaattataaatggtggagacatcattatgttgtcacctgcaacacgtactagcaacccatgcttctcacattgtgctccaaaatatgtaccaacccctatggaggaaatcatcaataatttgctgatagagggaataacaaaatatgaaatcatcacactcaattgcctttatattaaaccagcaactcaaatccataatcatgcagtaagacaaattattagtttcctctcaaagagtgaagtagtaagtagacagcagccttagtaaaaaaagagtaagtagagagaagaacttgccccattcaggagggaacggattgttaggcgacttgttgtctgtaaactcagtaccaagaatcaagccggtacctctgatctgcaaaatcagataaggataacaatttcatgtctcattgttactacatattgaccgcataaagtggatgtctcaaatgccgaacgcacctctccaacaataggactgtcagaaaaggattttagaccatcttgaaacctcggagaaatgctcttcactttctcaacaatatttct

SEQ ID NO: 4072 - DNA, 612 bp, Gossypium hirsutum
  misc_feature (601)..(603): n is a, c, g, or t
  misc_feature (605)..(605): n is a, c, g, or t
gggtcatcctgtctgtcaggaacactagaaccactataatgcccatttaaaaccactggataagagaccgatctaacacaaagcattataaggttcacccaccatgcatcaaagcctagttgaatcatcatttgtcaataaaatgccacttcacataattgtatgatttactcttttaaagcaaatgacctcttctcacacctactctttaaagaatgcataatttcataagcaacccaaaaacactctgtatttcatcaatacaatacccaagtacaccgttgaatatgtttactaaaactttggcagttatattgaaaattatattacatagactgataggtctaaaatgtgacatattcataaggttaggaacttttggaataagcgtaatattattatgattaatatgatgtagagaaatattctcgtttaaaaccgcagtacactattatgcaacttctttgccaattatgtgtcaatttttttatcattaccaaaagcttttgtaaggtgcacatcttttacagcttccacaatttcctcttctcaaaaatacgaaaagagttctagattcatttcatgtgtgatgcagttaggnnncncttgata

SEQ ID NO: 4073 - DNA, 657 bp, Gossypium hirsutum
aaggcagcggcaaaccaggcagccaaaacaacaaaggtagtggtggaaacactggtgggatgggaggcttcttcggtccagggcctggatttggattgccagggtttgaaaaagggtggggaaatgggatcgtaggcggtggctatggagctggcttcggaggtcctaccggagggtactcaaaaggtggtgttattagaactacggttgtttgcaaagaaaaaggtccttgttttaacaagaagctaacctgccctgctaagtgcttcacctattttaggcggtcgggaaaaggttacggtgagggtggcggtggcggtggctgcaccatggattgtaagaaaaaatgcagtgcttactgttaagagggtaccatacagtataagtacttgctatatcgtttaatatctagttgctaaaccatgtatgattatatatgagatgcatcgagtagcttttattaaaagttaaataatatacatatttaagggggtatatttaatgtagtaagagttctctgtttttatttttagaatgagctttccctgcatgaattgaaataaacaataaagaaggaaaataataaaaccttgaagcttaacttccagctaattatggttacaataatattcttggtcctaggtgaaacaacctgct

SEQ ID NO: 4074 - DNA, 571 bp, Gossypium hirsutum
  misc_feature (508)..(514): n is a, c, g, or t
  misc_feature (564)..(564): n is a, c, g, or t
tatgaggaaagaatcttgttctatagagcctgggaagctaataagtttgccagattcactcgaggatctcaggaacattgcaggtttgtaacttaagctgaaataaactggtctacaacatagcttcattgtaaagcaattaacttgaatcatttctaacaggcaaaaaatttgggatcaatgcgagaaatgcaactgtaacagatgaagcaggggacgaaattgattccattgaagtgattagagacaatgataagctttacattgttgaataacaaatataaaaccatatgtaataagagcgagttaaaacttagaagttcaattaacagattatgctttttcagtaatgtgcatattcccagaaagaaagcacaatctttatacaattgtaaaatacagttgtcagaaaatttgggaaatgtttttcttccctatttagaaattaagaacataatcttcaaatggcttgatcaaaaaattatcaaacttcattcaaggaaacaannnnnnnaattattgcaaataatattaacatgatatcctttataaatcaagtcaacncataaaa

SEQ ID NO: 4075 - DNA, 568 bp, Gossypium hirsutum
  misc_feature (519)..(519): n is a, c, g, or t
  misc_feature (526)..(527): n is a, c, g, or t
  misc_feature (547)..(547): n is a, c, g, or t
agtgatgccgggacttctgacaatgagtggaaatttagacatatatttcgaggcgagtgattaaaatagcttttttcaaatgtgttccaactttgtttttttgatgacttcccaaatttgatgaaccccttggtttatttggcattgtatttatttatttttggattaagcttaaattccggttaataactttatgggggggtggaacatttcctaacccgttgggggtttaaaagggtggttccaaaaattttaaaccaaaattcacaaagaaaaaattaattgaagaacccggaaatatccctggtatattccggaataattattggtccgggtaaatccgggctaaaaatccttggacctgaaaattaattattttccttaccggtacctccgaatcctaccaatgaagtttttttctgatgaataaggaaaaaatattggatgggatatttcttaataagatattacaaataatgctttcacgttggttgtgttggtggttggatgctctgatgntgctgannccacacgttctttttttaanaagttttagttgctcccctcc

SEQ ID NO: 4076 - DNA, 580 bp, Gossypium hirsutum
tatatgatgtttaatgaaaatccaaatgttccgcaatgtgggactggtgtcgctgttgcgctaacggcgagttctcttcatttattttgatttaaaacttcaacccacaataaggaaaaatcgacaaagtaagacaccaacaacattatagcgctttataaattcacaaataaacaattttcattttctcaattcattagtcgctacccatggttattggtcagtgttggaatcaaatatgcctacgcctatattcatgtcctatgtgcatgtggaatagagagcattttcctactccactgccaaacaggcaaagacaccaaaattcctcacataatcatgctggatactatactaatactagtttacagtatgcgaacctaaaattttccccatagtggccatattatcaaaactggcgatattaagtgtcaagtctcttctcaccaaaatccatggtttccaactcaggaccagtgcatgtggaatagcccttcttctgatgcaagccatgctctacaattatggttttgtctaatttcaccttcctttccccaggtccctataaaggggacaaaac

SEQ ID NO: 4077 - DNA, 608 bp, Gossypium hirsutum
gcagagccgcactacataccaccatttaaaatgaagagacggttcctcaccatcaatgactgctggtgccagatcactcctatgctgcaaagacccagcataatgtatttgtggcaaccgatctctaccatgttgagtagaatgagaattatttctcgaaaaaaattcatctaacaggtattgcaagtaatcaataacatcttttgtccagagctctgtacgagataattgagttttatcaggtgctccagacgaaattgcagaaccaggacgaacctgcaaatgataacaataaatccgctaccttccaatatcatgaataatctagcgcaattacagaaagcatgatcatatggtacaaatatattaaggctattgtacctgattaagatatgttactttgataaaccaagttgctttaagcaatggaacattattcctgataagaacctctattagtggtctcttcttataccctagaggaacttgatcggccaaagaacacaaaggcttgtgttgcagtgataagccctgagaaaaatatgaagataatgtcgagttcacgtatgaagcatagttttgcctttcaccaagatccatgaagtcaa

SEQ ID NO: 4078 - DNA, 607 bp, Gossypium hirsutum
taatcctttgctgtagtatctggaaaaaatggatttgcagaataagtaacaatggactttagaaaatgttaggtcaactgagaatgcttctgttcaacaaaatgtcttgttaaccaggatattgaaaccttgagaatagctctacgctgatcatcatttaagctcttctcggaccagatataagatattgctgggtcttggctgaatatgcatccactgtcaaatctaggagcctgcactaggcaaaacaatactaataaagatgatagaaggaaaaaacaatgttaacactagaaaaccatataagagagcaagaagcattcaccgcaaggtcaacaatcatcttcctgagatgagaactttgctcattgtctagaaacatttgaatgaggttgaaccttcagcaataacaaggaaaaataatgaacataaacacagtatatttctcatctctttatggtccaggtgttacaagagaacagaagaagtagtaaaagaagtcaaaatttaactatgatatggaaattaccgcataactgaaaaggaggtcatgatttcatccttgtcgatccgccagacctcctggagtagtttttctcgcattgaa

SEQ ID NO: 4079 - DNA, 556 bp, Gossypium hirsutum
ttttagcattcatgaattattttggggattgatattagttatgataattgctatggtattagtggctgtttaattagcagatttgaaattcggaaagactcattcccatttgatgattaccatttgatagctgaatctgcaaaagaattacgacttattttgttcacattttgggaatgattatggaatatccataagtctgcacaatctttttttatatgtttggatgatcgtgcttagtacatttttttttcttcaagcagttgtatattttcttacatcctccgctctgtataaaattgaaatcttaagtcaattacggggagagatttgtcaatcccgattagacaaaccgtgaaaagtttactgactaatgtgtgaaagaattatgggaatctgttggagagttgaaggaagaaggcacaggatatgagttgttagaattaacgaggaaggttgttaaatagttggtaaaaaatggtgtaaaggctattaagtcagttactgaattgacacattatcaataattcatttcatgtaattgttcttagtatat

SEQ ID NO: 4080 - DNA, 605 bp, Gossypium hirsutum
agtgtccatgggaagcgttattttatgtgagcgaacccagagaatagcaaagtactcctctttcagactttgtgccaacaccatccactaccaaactctcaacaaatgatcaaatcccataaaaagaaaagggttaaccataattaatcacataataaaggcaagagttatacatataaatgggaaattttgaagctgagaacgagccaaccaagcttcatgaaaccgatatatgtagtcaagagttgagagaaatcaaagaaaaggaaaaacccaaatctgaaatatatagtagaacagatcccagaaaggaaatctagtatatacaccccatggactagattctccttcttcttcaccttggggttcagaaaaagcgagaaaggaactcagaagctgagggggaaaaaaagaggagacggtgaaatcatatgtacatatatttagtaagtgaattagtttttgaaggaaagttgatgagtgaaaaaaaagaaaggaaaaaggaaaagaaagatgggtgggtttggtttggtttgaaacaagatcaggcagaatagatgtagaagaacagaagagaagattagagcatagaagttacctttgag

SEQ ID NO: 4081 - DNA, 655 bp, Gossypium hirsutum
cctatctggcggcattccctcgagtttcggattccttcaagccctggagcagctcatgctttacaacaattcacttgaaggtaatctccccgcttcattgatcggtttagccaacctaacaagagtcaatctctccaaaaacaaaatgaacggcagcattgctgcattgtgtagttcgagttctttgctttccttcgatgtaacaaacaatgcattcgatggtgaaattcctgaggagcttggtaattcacctgctcttgagagactaagattaggcaaaaacagattcactggaacaatccctggatcattgggcttgattcgtgaattgtcactattagacctctcaggtaatttgctcactggacctattccaggtgagctcaagttgtgcagaaaattgagtcatatcgatttaaatgacaactcgcttttcggagtggtaccgtcatggctcggcgttttgcctcaactcggagagcttaggctctcctccaatcagttttttggggctcttcctcgacaactttttaattgttccaagctgttggtactgcaacttgatggcaactcacttaatggaactctccttggtgaaataggtgatctgttgtctcttaatatactcaacctcaacagaaaccaactttctgga

SEQ ID NO: 4082 - DNA, 627 bp, Gossypium hirsutum
  misc_feature (621)..(624): n is a, c, g, or t
tagtaggtgagttttcatttgtcataattcataaagagtaagtagcttgtgcaccaaaaacattttgttctggaaaccaaaaacaaactggaaactttaattgttccctctatttcttttcttagtttggttgaataggagcacgtattatgccttatatggtatgcctgtatgtcaaaaactttaatcacaatttaccgcatgttctgactgacttacgttgcaaaaacttaatgatgtaacttattttttaatcaagctaattaaataatatataatctttgttaaaatttgagtggcattaatatacttaattttagaaaagatagataactcaacttttgagagtaaatatttcattaacgaatcttcttttgaatttattttcccaactcattcttctttcttatgatcaatgttggaagaaatgctaaacaacactgatctggcatcaatagttagacttgtattggctttgctttggatcaggccatttggccccaactgcaccttttatgctgaaaccagtgcaaatgtaattttcagagctatgtgtactgtgtttgtgttgtccagtagttgttaggcttttgtctggtgccaattggtgtcaaatgtcannnnctg

SEQ ID NO: 4083 - DNA, 537 bp, Gossypium hirsutum
  misc_feature (173)..(173): n is a, c, g, or t
  misc_feature (226)..(226): n is a, c, g, or t
  misc_feature (324)..(324): n is a, c, g, or t
  misc_feature (327)..(327): n is a, c, g, or t
  misc_feature (335)..(335): n is a, c, g, or t
  misc_feature (419)..(419): n is a, c, g, or t
  misc_feature (421)..(421): n is a, c, g, or t
  misc_feature (426)..(426): n is a, c, g, or t
  misc_feature (430)..(431): n is a, c, g, or t
  misc_feature (462)..(462): n is a, c, g, or t
  misc_feature (525)..(528): n is a, c, g, or t
tgcaatcctaatcctacatctccagatgatattgtggtaaggtttttctttttacttttaccctttttctcctttttggttaattattatttgttttattttgagtgtgtactgtgtatgtacacatgtattcatcgattaaatcaattgaattgaaaatttataattcaacnaatttaactagtaacgtataattggaaaaaaagaaaattattttcaaaccggntattttaaaatatattttaggttttttttaatgattttagctcatgttgttattgtccaaattttagaattttgtttgttaatttatctataactatntgncatatatncattgtggtacaaaaaattattataattgaaaatgatgaaactcaaatttaaatatctaaaggccattttaaccaacaagctanancctcnttgnnaggagaatttttcaataaaaagataatctanattattggggtttttcaatatatttttaaaaaattgtatcctatatttaatattatttattannnnaaataacct

SEQ ID NO: 4084 - DNA, 584 bp, Gossypium hirsutum
aaggttatgacaatctcacagctgagaacatgcatcttttgaaaaaagctgaatatatattcattgtatttaacagaaaagtgaatcaatctagtttgtttcatttataaatactaaaaataagtaaattaagacaagttttccagctagtacatgttccaggttgcttactgtaacctccacaaacaacccaaaaatgacattgcctaatccacgaatataagaaagtttacctgaataaattctatctaagacacgaggaacagcacagaagatacttggctttagctctccaatatcttcgaccaatagtttcacatcctgaagatgaaacaaataagcacttgctgatttgaatgaacccgtatttgttgtcagagtactaactaatcatgcttaccccacgccaaaatcctattgaagcaccatgcgaaataaataattcctcaatcacccggtcaaagatatgagcaagaggaagataagaaatatatacatccttcatagtcaactgtaaatttcacaagaaacaaacaaatgagaaagggaaaacaagggaacaatcatgtcaaattgggagaaga

SEQ ID NO: 4085 - DNA, 678 bp, Gossypium hirsutum
  misc_feature (550)..(550): n is a, c, g, or t
  misc_feature (600)..(607): n is a, c, g, or t
  misc_feature (610)..(672): n is a, c, g, or t
tggatttctttttgttgttatcagaggttaatttatgtggttgtcatgttttacagatcaaaggacttatatctccttctcatacaattcatatgccgtcatctatttctaggttggtgagtcttgatgcttttgtaaacctgctttgtagtcttgtttgtttgcttcaagtttattaactcctgctatgttgtctgacctcaagtttggtatcacttcaatcctatgatcaatacttcttggcaagctcaatggatggttcggtgagttccatttgtccatttaactcttgtactagattttgctttgcttacttctcactctgcatctaattttcctccctggttagttttttaaattatgctttgcatggatagatgtttcagttaccttgtgttgtaatttttctgatattggttgtagctgtgtcaggtgatattttagattaatgatttctcttgtgaatattatttttcataaggcgcaactttttttttttaaataaacttctataatccccgtctaactaaaaaaggggttgtacaatctnatggagggaatgtgatttcccatacccttatacagttggaatttaacaannnnnnnnaannnnnnnnnnnnnnnnnnnnnnnnnnnnnnnnnnnnnnnnnnnnnnnnnnnnnnnnnnnnnnngaaaaa

SEQ ID NO: 4086 - DNA, 625 bp, Gossypium hirsutum
gatttctaacataaatactgtcatacttgtttactttaagcatagaggtccattttcattggaatttgtataatacatcaacattttagtaactttgattaattaaaatttacctgaaaattctgttgttgggttccatcacttctgcaatcggaacacacaatttcagctttcactgtgctcatttctgacatcaatagtaactctccaagtccaagggtatacaactctttggagacgtcttctgtaatcattttcactgcatcttccttcatttcccttgataaaataaaatccttagaatcacactggtatggaattcccttgttagactcactttcttctagtaaggaaacatcttgtatacatgtatcagcatcaagttttttcttcgtgccgcattcatcgtcaatatccttgccagattgatttccttcaggatgggctttcaagttttctttcactagttgagcttctagatccgttttggaaggcaaaaacttctcattcgcaccactgtcgaacaaaaacttgtcctttgtcaaaactccatcatcaatacagatatccttgacaacatgatatgtactctctttataacaaactaccaattcaggcaaattac

SEQ ID NO: 4087 - DNA, 625 bp, Gossypium hirsutum
ctatgcagtaatttaggtgcaagaatggactcagaaccaaaacgttggagaattttgggtttgtgccttaattcagtttcttctgaatgtcaacgctacccatgtcatattgaatatttgaataagcgtttaatattgcagctgatgtgctctatgatttgggtactggtttggaagttctttcacctttatgtcctcacctttttctcgaagtagcagggctcggtaattttgcaaaggtgattaatctttgtgattactctgcttttacttctaaaattttccttttacagtttactctaagatgagcatatttagctacatgttaaatactactgtactttgttgaattttacttccctatgtgaagggaatggcagtggttgctgcaagggcaactagattaccaatatattcttcatttgccaaagaagggaatcttagtgacctatttgcaaaaggagaggccatatcaacacttttcaacgtggttgggttaggtgttgggattcacttggcatctactgtttgctcatcaatgcaagggaaggtattaagattatattggtgctgatttcagccatttattttagttatgttattgaagcaagataagggttactgc

SEQ ID NO: 4088 - DNA, 646 bp, Gossypium hirsutum
  misc_feature (514)..(514): n is a, c, g, or t
  misc_feature (549)..(549): n is a, c, g, or t
  misc_feature (597)..(601): n is a, c, g, or t
  misc_feature (611)..(612): n is a, c, g, or t
  misc_feature (627)..(629): n is a, c, g, or t
  misc_feature (633)..(633): n is a, c, g, or t
  misc_feature (636)..(641): n is a, c, g, or t
gtgtgggatgtgtaatttactcttttctatagagttgttgaaggccttttattttattttattttattctgggcagacagatgggtcattgtcaaatttgcaaagctcactgcaaacttctcataaagacatggatgataaacttaagaatctacggaagcgattatcaaatgaccatgctaaggttctgcattgccttgataatcttggtctcatatgtgcttatgaggtatgatgggaaggaaatttccattaaaagaaaggaccttaaaaagaaaaagggggtcctccccgtttttccttgcctaaaaaaattcagctacccctaataacttcccctcttttgaattccaataattacctggaaggctttggttgccaatttaactcctaaaattacctttaaaaaccaattaatgaataaaggttgaacaaaaccctggactttattccatccccctaatttaaaaaaaaaaaaaaggttccctgggctttaaggtggttccttccggcnaggcctcctggttggttccgaagggaaggggtttnaggtacctccttcctaaggtggtaacatttggccaaaaaaactccctnnnnnccccaaagannccaaaacaaattggnnntggnggnnnnnnggagg

SEQ ID NO: 4089 - DNA, 602 bp, Gossypium hirsutum
tgtttggtgccaataaatgccattgccaacttccaatcatcagaaaacatgtcatttttgttgaagctgtttccaagcagtttaggctaaactttcttttggagcttttctagcattttccttcggcgagtttatttttattacagaaaattttcttggcaacaccggtgtcatgaaacttacatatgcaaatatcctagacactgcttatcagaagagaaaggacattataagtaaaatacatttatatcctctagattctgagcttattccaagcagcttagggggccttgctcactgtactccgttagacttcaactttagtttcagaaattttttcctgttgctttagcacctttttagttaacctctattgtcagaaatcaaaataatcatcagggataatatttggtctatgctggctagatttgtcgttttctttttggtgatggagaagtgtctttttcaagcttttgaactgactactagagtgatattgaattagggatatgcttttcccccctttttgttggggttgggattcttaactgtgcttaattttttgttagaccttttgtctgcatcctatttactgggctatt

SEQ ID NO: 4090 - DNA, 595 bp, Gossypium hirsutum
tataatatcgtcattaccaaatcgtaagtaatggggcaaaaaagcctttaattttagtggaattaggtcgggggattaatatgtatataaattcattgattctttttggcaaaggaagaaaacccatatttgattgtaccctgctggcgtatatgttattaggtggttcaattagaggatgcatgcatgtgtctaagtatatattttgtattagcattgttgtcttgtagtatgatttttggcaaagctggctaaaagtaacagaggattattgattaaggttaaagttgatggtacaagagtgttgccaaatgaggcagttccacttgatgagagactattggtgggattttggctgatttccccaccaatccgatggatcctgcacaacaagacaattagaggcaaataagggcactaaaggcaaagatactcgtttccaaaaaatgtcagtcagatacctgaagaccccacaaccacaagcaaaaaacagattattttggtttgcttaactttctattattgaattgaaattagtagtaaaataactctgagcttgagcaccaagttggaggaacaaagtgtaattaactgt

SEQ ID NO: 4091 - DNA, 622 bp, Gossypium hirsutum
  misc_feature (613)..(613): n is a, c, g, or t
gtctggacttgatcccttgccggtagcatgcttggatgtcacactagtgttcacatgtaaacttggcttatgtgtgttaggtagacatctcattccctgcaacataatccagcagtattgagtgtagacatgattcatatcaaaagactaatacagtctcatacacgaaggagatggatgtcagtgggtacaacttgtgaaaattccatgtgaaacccatttagcatcctattcaactccagatatcttcgtattaacagttccccataggtattttttggtcgaagtcaaacttcttactaacagccaaagatcgccttaaacttttttaggcaaccagaaaaagagcagtagctcctgtttatcttttgaataaatgcttcaatcctccttagaaatgcatccttgatgggtggcagattcacatgataacaaataccaagtgaaagttgactttacctgacaaatataccattcagtagcatcgtatatcttgctatcagcacagacataggcagagggagcttccacctagaccgacaaccaattaactttatgtaaaaaaagtagaaacagatcttaagaatatcaactcacacaagacttgaccctncactaaaaa

SEQ ID NO: 4092 - DNA, 625 bp, Gossypium hirsutum
ttagcaaatttaagatgaaattaagagatggttaatgacatttgtagcccaactaaatcgtatagaaatcttgtagattcagcatttaatcattgatgagactgagaaattagtagcagttacatagcaagtaaaaaggaggctaatatacagaactcttacacaaacaaaacgtaaaacaagtctcaaagcggaagattaaacttgaaactattttgtccaaattcaatgggacaaagggctttccaagtcattatcttacggaggtgcaattaaaaacatatttcttctttctacaacttcaaggaaaaacagaatcaaggagtaagtgtcctcaattttttttttctttctttaatgtaccacaagagattacctgactagaaagtttcttttcccggacaataaaatataatgttgcaagtaataagcatattccatgcccccaatcaccaaacatgacagcaaaaagaaaagggaatgtaacaatagtgtatacaccgggatttgcttcttgatactttgccaccctgcaattaaatcagcaaggatattaatgcagaacatacagacaaaacacatactcccaaaaaggaaaccagtgcaggagccctatttataggtg

SEQ ID NO: 4093 - DNA, 615 bp, Gossypium hirsutum
ttcatagtattagtcattaggttttggtttgaagtgtttggagaagtgaattagcttcaagtggggtgccagattgtcttttttcttgggctgttagagaaatcggtttgaagttcatgtttttgtgctttttcatggaatttcctcccctggttcgggtgcttaatatgggtctgaaatgcattctgggctgtgttgtagcctttaatcaattttacgctcaagaaacttggaataagttatgattcttttggagtatgactactgtagtttatgtcaaaggatgtatgcaactgtaccaactattctaaatgagtattaattcattgcacctgtcatcatgcttattttggttaggtttctagttaactgggattttatcctgttttgcaatattagtacactgttatatgcttctgcttttttgggcgaaattttttttcctgtatggatatgctaatttttgtatcggattttagtattctgttattttgagtgccatagttaatacttctagatgattgaattatcattttgggggatgttgtggcagacgggaaaaggataaaaagttttcctcattgtcagtgggatggtttaaataacatttaaggt

SEQ ID NO: 4094 - DNA, 644 bp, Gossypium hirsutum
agccttgcatgatacgttttctgcatttgggaacattctctcttgcaaggtagccacagactcctttggtcagtcaaaaggttatggctttgttcaatttgacaatgaggaatctgcccaaaaagcaatagagcagctgaatggcatgctaatgaatgataagcaagtctatgtgggcccctttgttcgcaagcaggaaagagacagttctatcagcaacgttaaatttaacaacgtctatgtaaagaatctctcagaatccacaagtgatgacgatttgaaaaccatttttggcgaatttggtctgattactagtgctgtggtgatgagagaaccggatgggaaatccaagggctttgggtttgtaaactttaagaacgcagatgatgctgctagggctgtggagtctctgaatggaaagaaatttgatgataaggagtggtatgttgggaaagcgcaaaagaaatctgaaagggagcttgatctgaaacttcgatttgagcagtcaatgaaagaggcagcagataagtttcaaggagcaaacttgtatgttaagaatttggatgacagcataagtgatgaaaaacttaaagagctattctctcaatatggtatcataacgtcatgcaaggtttgttagcatg

SEQ ID NO: 4095 - DNA, 350 bp, Gossypium hirsutum
atcctcagttgagcatttctgttcgaatttcttttcacttcatcttttcatccattgcccctgccttttggcagattataatttatactttttgaataaaaattttatgttgttgtggcctaattacaagcattcttcattaccaagaagatgtcataatgatttattgaaaccagaccaagatgtcaaacaaacatcagttgtacaacattgttatttattgaacgaacacgactctgtaacaacggctgtcttattcatccgatcaactcctctgctcaggccatgcttttgctggtagcagtcctaatgatctgaaaaagagctgtcaaagggaaaaaaaaaaaaaa

SEQ ID NO: 4096 - DNA, 580 bp, Gossypium hirsutum
  misc_feature (561)..(561): n is a, c, g, or t
  misc_feature (563)..(564): n is a, c, g, or t
  misc_feature (566)..(566): n is a, c, g, or t
tccatataaagtaaattgaaacaaaggtaaattaaagtcctttcttttcttatatttatatattactaattatttgttaaccccaaaactttcattaaatcaaagatctaaagcttctgccaggatgagaattactgtaatgactgcagatgaacagatccttagcttggatgttgatcctcatgaaactgttaagcaccctttaatcccttcttttagttctttactcctttttgctgatttttttttacttgttttattagattgaatttgttttgaaagctacccctttttcctcaatctttatacttattttgctgattttggtattttcctttgtttctaataggttgaaaatttgaaagctttgcttgaagttgaggtaagagattattaccctttttttttctttatgtttcctttttaaattatttaatccttttgggggttaactgagaccattgtctttctttagttttggggttcttgaaagttgattattgagattcattagcttacgttagttgataaaagatacaatttttatcccttccttccccnannanaagttttgagtgtg

SEQ ID NO: 4097 - DNA, 657 bp, Gossypium hirsutum
atgactcaagctccaacctttttgtcggacttcaagatcggtcattacatgaagattccacctcaatcaatgttcatggcacaggtcagttctctgtttacaatcctgaaaaacatcgatctcttgaaaatgtaaattgataatgtcgacatataatttggcattgcaggtggtgggaacacttgtggcagttttggtgtgcaccataattccatggtggctcatggaaagattccccatctttgtgatacctcattgttgccacctgacagtccatggacttgcctgatggaccgcgtcttctttgatgtgtcggtcatatgggggttcgttggaccccgtagaatattcagaaccaaaggtgaatacagtaatgtcaattggttcgttcttacttcttagtggagcagtggcacctctcctagtatggctagcacacaacgcgtaccccaataagcaatggatccatcttaaacacatgcctgtcctcttaggttcaacagctctgatgccaccggccaccacagtgaacttcagaagtcggtttatcattagcttcgtttctggatacgtcattttcaaataccgaccggattggtgatgttacaagtatgtcctctcgggcggtcttgaagctgggaccacatttatgactgt

SEQ ID NO: 4098 - DNA, 646 bp, Gossypium hirsutum
tgctgtaaaaactctcgggtcagtcatgaagctgctaaatgttgaatcggaaaacatcttactagagtcctgtcgctgccttgctgcaatatttctttcaattaatgagaacaaggatgtggctgcttttgctcgagatgcaatgtctcccttagtttcactttccaattcttcagttctggaagttgcagagcaggctgtatgtgctctagcaaatcttatgttggatgctgagatatcggagatagcgattactgagcaaattattctgccttctacaagggttttacatgaaggaactgtttctgggaagactcatgcagcagcagccatagcacgactgctccattcaaggcgagttgattatgccattactgattgtgtgaaccgtgctggttcagttcttgcatttgtttcttttctaggatcttcaagaggtggatctgctgccattggagaggcactagatgctcttgctattctgtcaagatcagaatcagccagtggacaaataaaacctacatgggcagttttagctgaatttccagaaaacatatctccaatagtttcatccattgctgatgcaacacccttgttacaggataaagctattgagatattgtcacgactttgccatgatcaacct

SEQ ID NO: 4099 - DNA, 402 bp, Gossypium hirsutum
  misc_feature (397)..(397): n is a, c, g, or t
gttggggtattatattgttattctacagtttgaagtttcagttgcaggccagggactataattataacccctttctttcaattccctgtagggtaattcccaagacactgatgccaagagaggtaaaaatcaacactaattgaacttgcgtctcctgttgattatcaaaaaccttttataaaaatttggattgtttaatttcagataacaggcgagaccgtgggagaagtaagagctgtatcaggaatgcaccaacgtaaagctgaaatggctcgtcaagctgatgcctttattgccttaccaggtttgttagtttgtttttgtaaaatcccaattttgtttttaattaccaaaatttgattttatttcaactcccaggtggttatggaaccttganaagaa

SEQ ID NO: 4100 - DNA, 606 bp, Gossypium hirsutum
aatcttgtcctctataccagcaacaataggatcctaaaaagaaataaaagggaaagtaagcatcacttagctcaaatatacaaaagtcaaaagcaaaaccattgcaatgttgagtgcctccttaagagaattgatggataacttgtcatattgaacccttcaaaccatcattagtatatgttttcatcaagataaccctatattaccaagactagatgaatgtcagatatgagtttgtgttcgacacaagtatccttaatttttaagtttctccacatatttggataatcataaaaccgttcctatatcctagaacgcaaattttgagcacaagtacttctgagaaaacgaagagttcggataagataggatcacataccataaaagccaagcctatctatctatcgaactattaatgtagttatcatttttatcaaatcctacctaaatagttcctctgtaattaatggagtacccataagccataagtataggccaacaacttagactaccataattggataaaataagattgggaaacaacaactacaatctacaagagagaagataaacgtctgaacctttcccttaggaatgaacatccct

SEQ ID NO: 4101 - DNA, 653 bp, Gossypium hirsutum
tttagtaatatgcatagacaaaatatttcatattccattttattttcacctacctttggattttgttttgtttcacctaacttcataaacaggagtcttaagtcatcaagtattgaattataggatatagtagaagtatcgagcttttagagaatgggtactactttgtatatgtccggggtcacattcatcttggtatcccatactgacaaatctgttttgcataccattgggatggagtgatcttgctggtttactgacttctttaatcaaaataggattacttgcatctatcttgtgtaaatatgggttcctgctaaccagaaatgcatatatgtttctcatatgttttctaccaaaaatattgaaatatattgcaggatagagtggcaaaagttgatggtgcaattgaacttgtagttcgttccttggggcgtcgcacagatgaaaggaggttagcagtggcattacttttggatttatcaaaatataacgtcttaagagacagcattgggaaggttcagggttgtattctccttttggtgacaatggcaagtggtgatgactatcaagctgccagagatgccgaggaaatattggaaaacctgtcatattctgatcagaacgtcatacagatggcaagggcaaactat

SEQ ID NO: 4102 - DNA, 653 bp, Gossypium hirsutum
taccaagaatcaaatccatggaaatgaattacctaatttatcttttaccttttttcacatctctcgctttcaactttgaaaatgtttacatatacgaaaccaacacctgctttcctatcacaatgtttatacatgttgcttacacgtcacatgtgtatatgtaacactttttttttctttttgaaaatcatgtaaagttttaggtttagattcacacaggtttgtcaatattttacaccaaatttagagattcagcaaaaataaatttctatgaggttcaaagaaaagaaaaggaatttaaaatatagttatagtgagtcaaaaactcgaacggctcccccattaaggaaggtgacgacagaatcaaagggagtccacttattgaatggcctccatcaatttctccagattcctctctttgatgctacctaattatatttgcatttgctttcacatttgctgtccaatgagttgagaaatgcacatgcatgacttcaaatttaatgtgaatccttgaagcttttggatactgaggatcaaagaaagaaataaaagagaaaaatggacatgcaaacacaccagcctagttgggaacttttggggtcctattttacttctactactaatctacaatacaggtcattgggcattcc

SEQ ID NO: 4103 - DNA, 620 bp, Gossypium hirsutum
aatcttatcctggcaacagtactataagtccagaattgtggcatgtggcattttgccttccatcctaaagcttctggacactacagtcacagaatttaacatgcttgctctgaagatcctatggaatttatcgaatggcagcaatgttggttaccatattacatatttgggttatattccaaagttggtttcttctcttgaagacccaaatgttgcagggtattgcgttgggattataaacaacatacgtgacattgaggaggctagaattgaagctgttgaagctggtttatgtacttcgatcgccacaatcttggaatccagtaaaaaggaagaacaagaagttggtgttgagttgctcctgtttctatgctacgagaacacagggtattgtaaaatgataatgacagaaaacataattcaagctttgtctaacatatcagtgaacgggagttctaaaggatccgagaatgcattgacactgctggagctcatggactggatgaatgcttctcaatgttcaagatctggaagcagatggagccaagaaaattcaaatgtctcctccagcaccagcaataactcaagactcaaaatatcatcttaccagaccttgggat

SEQ ID NO: 4104 - DNA, 636 bp, Gossypium hirsutum
tgtgtcttggttactcaataaacttcagcatttcagagtgcctaatgtatgcaaaaaggcatatagtatgaatcccttctatataatttataaatatgaacagatgccatgcgagggtttaccaagaatttagtggttgcatttagttatgctatagtccatgctgtaatttactagcatcaacaagcaaggttgcttcaatacatcttgtaatgttgacacaagtaagctttcttagtcttagactggcttctgtaaggcctgtaagaatatcgtgaatgaatccaccccttgaatgcacaagaccaccgtacaaaatcccggaacttacataaattctagtctttatgttgagttatatttagaaaactttagtttcttttccctctttgcaatgttctcttgattttggataattaattaggtgccacaaccaggggtggccttccccatctcttattcacttgaagatccctcttactttgaggggaaatgccaactgatccttgggtcattggtacctcgggaaatggtaaacgtcaatctcttttttctaagttgataatcataaggtgtcatgcagggactatatgttagatatttcttttcattcttctccttgcacttaatgtgaaa

SEQ ID NO: 4105 - DNA, 425 bp, Gossypium hirsutum
cggtagtagtacttgcattaggaacaatgttttcatttcctggttcctggttttcattctttggactccaaattttaaccaccatacttggtaacagttcatccataattgtaaatgctatccccagaatagctagttgctcagaatctgtttcagctctaaaaggtattgtctctttcagctcagtcaaactgtcatcatcagaagggccaggcagtgctctaattagagcatccatatacttgtcaaatagctgtgaaattctaggtagtacgtttccaccaaaatgcgaaacaactagtggcataagctgctccagaatatcctgttgatcacaatttaacttcagcattgtatcactcaaaaccatttgagcagcaagagaacagtaacttattgtttccatctctgaagacagacaagca

SEQ ID NO: 4106 - DNA, 645 bp, Gossypium hirsutum
tcctttctttctcgacctcaagatcaggtttgtgatctttagagagattgtatgcctagacaaaaggaagccatttaagaacacaaataaaatagaccattaattcagacagaaaagtgcattccctacaacaacactcatgttcgatgtctcgtaattaaaagtacaaaagcctatcgatccactaacaattaaattgattaacaaggataatctcgatttttagaatctggctgagaagaaattatatcattaatagaatattacctgaccctttctagatatcacacaacgtgagtcgccggcattagcaacgataagttggttatttctaataactgcaacacaggctgtgctaccggaagtaggtccaggaaagtcagaatgagggccctgattacaattataaaaaagaaatataaactaaacacacaagttcttgtgccttaattgtacaaacaaattaattcatgaaaatcatggatgaaccatattatcatgcaatcacagacaaaccctgattgtacatttatgatacctgcctcaactgaaaaggtaaaatgcatagtaagatattaatgttcaagatggaaataaactctccataatataatctgcatagacacaccaaatcagctcaaacta

SEQ ID NO: 4107 - DNA, 646 bp, Gossypium hirsutum
gcattgcaatttacaagtacggctaactttgattagtttgtttcatttcttattttaataaaaaagagttacaaatattgttaatgattcagtcattttatttctgtatatttatctcctttttccctatcttcaacagtatgtgtgcacacaccagtcacaaatatttatctcaatgaacttaagatgacataactttgtttttatttcagttttacaggaaacaagttaaattgtggtaaaaatttttctcacagttgtgtgtcaagcggaaatggttcaggtagttggattaattattttgactgaattacattgttttacgatgttcaatggtttcaaagccaccgtatttattcacaccataatttgacctgctatctctttgattccaggttcttcgcggaatccaaaggttggaattattattggaattgttgtgggatttataattctgctttgtggtagcttgctgtttttcctgttcagatgtaggcataaacgctacaaggacgaagtgtttgtagatgttgcaggttaccactacctttaatacttctgaatgaaaactggtggctgatggttttttgtctattttaaattttctctcttcacattttgtatttctttttaagtcttgtctctg

SEQ ID NO: 4108 - DNA, 628 bp, Gossypium hirsutum
  misc_feature (77)..(77): n is a, c, g, or t
ctccaaaccaaaatcagttcagcagtgtgtgtgcttttcaatgtttttatccttttaatagcaatgtgacgttattnttgtcagttttcccatctgggtccttcatgttgaaccttggataggttgagatgtccaatgaatatcaaacgagcttacaactgactaaaccagtaagaggagatttatgggttcaagcatggaaatgaaagtctatggcaaaagcaacaatttgacatctaaattattggcactaacaaacatgtagaaatgctttcatatctctctttttttctttgctatacctaggttttagtctctatgcagcatcatttaatcttagttatcttatcttgcaggcctatttttgatgtttccagtgatcttactattgaggtaggagcatcaagctttgcacttcacaaggtatggtgaaatctgttttggcatcttttagcagcaaatgtttaattatcatggtgcctacaagtatagtattatgcttcctttgaaccacaaaaacatgggaatcctttttgtgattgtgcaaagtccaaaatttaacaatgttttactatgcattctcaaaattgaaagatctctaccttgttgtggcctaaaacctggttaa

SEQ ID NO: 4109 - DNA, 513 bp, Gossypium hirsutum
atacgtactatagggtcatgagcaatttagttccgttaaaaataaacggaaacggggcaatttaatctctgtattattctaaagtgaataaataaagataaaagatggcattaaccatttctgttaataaaatattaagttaagaacaatttggtctttttcaaagtagatatttggagttacaaatgtggctgcagcaaatattgtgttttttggctcagcttttgcagaggaaaaccttcttcagatttgttttggcgcgtttcacatatatcaggataactatttaaaactgaacaaactacagcttcgaaaattttaaaaattaaaaataaaaattattcaatattcaaaaagatttttaaaaatcaaaatattttcattttcgaaaaataattctcatttttgaaatttgaaaaacacattgcataaataaaaataaatatttgtttgttatatagtttttttttaagtgaaatatgataaataaactaaaagtttatacataccaaa

SEQ ID NO: 4110 - DNA, 635 bp, Gossypium hirsutum
tttttttcttcttttactggcatacgaaacataagctgattaaaagcgataaagagaaagaacgcgaattcccgtttagtatacggtatgactgactttgacgaacaatcgtgtaataccatcccgattctgctggttccatttgtatgaaataagaaaactattataagaaaaaaaaaatgaaaaaaagaatgtagcagatgtatggttggtgctgatatgtttgaactatttgcatctctgtttttttcttcttctttttttgtatggggcagtttggtcttttaggtgtttcagcatttgttttgacaatttaggttgtttctgaacttttctctttttctatttgtttcaatggtaattttgagctgttaatttatatgaaactgttgtggcaactccaaatctctttcactttttgcaagacaatcaacaagatgcttccaacagtgaaaatgaagcacagttataccaatcagtacaagtctggatgcattggtctagatcaaagagaattaaaacgcaatgaaatgattgcaacttatagaaatttacactgaaataaaaataaaaatttgatgttttgatttattatcggaataagacattttggtcttatcagcggtattgataca

SEQ ID NO: 4111 - DNA, 612 bp, Gossypium hirsutum
ctacttttcgctggggagggggttattttatattgattattttattaacggattattagaatttataaataagattaggataaaattattagtttattacaagtatttaactattaaatagtaatcgtctacattttttaatgaataaatttagtttcgatttttttttacatttaaatagatttggaattattttgacaaattagattcccaaatatgtttcaaattcccaaagaggccattaaaaggattttttttttttgaagggaaaaaaaccctcaaagttaaaaaggaacccccttacgggcccggggttgaccgggattccctttcccgggggtaaaaaaaataaaggggggtttggttttttaagggtttccggggaaattaaaaaccgggaacttccaggggccccgtttcaaaaaaaaccctttaagggccaatttttttccaaaatgaaaaaatgggttaaaggaaaattttggagggccaccgggtttttccaataagggaacaaaacaacttggaaaaaaagaataaataaggggttattggaccaaaattgcccggaaaatggttgaaaaaaccaaaaaaaaatggccccaaaggggg

SEQ ID NO: 4112 - DNA, 652 bp, Gossypium hirsutum
ctagattacatcatatctacaattagggcgaaaaatatatgaaataatttttaaaaaaatttattaatatataatgaaatataattttgattaaaatgataatgtcaaaatatttaaaaattataatgttttaggtttaaatccctattttcacaatatctaaaaagcatcaaatagattgctttaattaagtttaaaaagattcttccttgttagaaacatgttttaaataatttaaccctgttaaaaagttaatttctcattagaaacatattttagatagttaaaaaaaataagaaacaaataaactttaaatttataaataaaaaaattttgaagcaaatttttgaaaaaaatggcatcaataagatctgtgattatgaactttacttttacatttttttacagaattataaaatttattctataataatttataataaattcttatttattggcaaataaaaaatttcaataaattcttattttcaaaggaaaaaacttataaatcctcccgagtctaactccatagatgttgtcgatcatgtacatacggaatcgaggcggtaaactatttagtcaacaaacaaattcatgatgaaactgtttttcagacaagacaagagtatggaattgaagtacttcactagct

SEQ ID NO: 4113 - DNA, 621 bp, Gossypium hirsutum
aaactcctttgcttcccgagcataaggagctggcttttcatctctacgaggattgcccatttttggacatctaatgcttgaaagattgactcggcgttctgcaagaagactaccgtatgggatagaatcatcagacacaataatgcagtccccactaacaacctccacaacctgtgaaaaatccatacaattataactaattacgaaaaccaagaaccttatattattgttacgatacaacatgaaaatttaatggcaaaaacttttgctagtacctttcctatgaagttttgatcatggattgccatggagtttgtgactgggggtacatagtttgtccagatcctcaaccgagtcttcttggcttgaagctctgcagcctttaaccgtcgcttggcatcatcttccatcatattagcactccattcaacatattttgctagaccctttggttggagaggtaatggttaggttgagagaggagcaagacaatattcagaatacatgagcataagttcaagaaaagaaagacgtttgattaaaacattagtatgaaaagaagctttataagcaaataaaagatttggttgattatagaccaaggctggacataacatagca

SEQ ID NO: 4114 - DNA, 630 bp, Gossypium hirsutum
  misc_feature (56)..(59): n is a, c, g, or t
  misc_feature (592)..(592): n is a, c, g, or t
gctgattttctaaatttttactttcattcttggctaacttggtaatgtaccagaannnnaatcactaggttattgctcatgcttcacatttatgtccttcatacatcatgttgtgtttttcagctttgttagatgaaagcaagattcatgggcgaactgttgtaagaatatgttatttatttgcaaaattgtgctctgtactgaagatcacccccggttctatccagtctagtgatggaaaagtccttgatgggtatgcaaatgccttcagatcatgttctggaaattccgaagaatcacttgacgggggtatcagaatttggacaaatagcccaagaaaagtagattgcaaggatttagttttcttgtggggattcaggaacaggctgtctgctggaatgcttaagagcctgcttcaagggtcccatgatgttttctctgaagaatttgatgtctgtttagttgataagagctgtgccattctggttttctttcatcctaatttatctcaagctttcctggatgtaatgaatagtgaagaaatcagtggatcattgagcgaattggtctcagaaggcttaagggcagcagnttatgatacatacaagaaggcctgtagtttgggtttat

SEQ ID NO: 4115 - DNA, 639 bp, Gossypium hirsutum
ttttttctaataatatatatgcttgactttgtgctttcttattctctctgttttcatttcactacattcctagaccttataaaaactaaatggtactttattacaaactgtattctggttggttgtgtatagaaggttctaatttgcatatatatgaaagtaaccatgtctgaatgtcatcattcttaaataaactctatttctagaagaaggttcaatttttatatttctgtatttccagttaaaacaggaaaccaaggctgaacactttttattaatttattaatttagcttagtgaacactttttctgttaatcttgccttgttgtttgtgaaagttctgttgtaaaagaatttccctcagagagtgaagtatcagaagagacagaaatatttatcagtgtcatataaatttgttatactggaaatatttgccgggaaaaggtttaagatcattgcccccaccccccttcttttcttttggctgaaatgcatgagtttcaatggagatattttcgttgaaattatggcactaaagtttttccttttttctttcagaatttttcttgaagcaactagcttttagtttactttatgaaacatctatgccttttttatgttttatcttgtccaatgcta

SEQ ID NO: 4116 - DNA, 630 bp, Gossypium hirsutum
tgctccggctgatgcagccacatcaatagttgaaggccctaatccgccatcgacctgcaaaacaaagccagacaagcttcaacggtaggtcacttcagctatgttactcggactcctctttaagtgtcagatatgggttttatccatgtatttggaggattctattgtatctccttacctatgtccatggtaaaagtaccaaggaggccctgatactagaaaccggattgcactttgccgcgtctactaaaaaaatgggtaataactagtcactattcgttagataaggtacatgtgaactatctggttattccgttagccacatcaattttttaatagtacaaatagatgaaatttttaacagaaaaaaacaaatttgctctttaatctaacgtgtagggactgatttgctcattttttgagtaaatggggcaaaatgcaatcttaatataggggcctccatgattcttttaccatatgtctatatatgtatcggacaagggtacattaacgaaaaagaagagttattgccaaatccaagtgatgaaaatgttatagaagattacgaaggtaaaaacgttagttacctctatatcgagagatggatacttgttccttagcatgcgtacc

SEQ ID NO: 4117 - DNA, 595 bp, Gossypium hirsutum
gctgagattgcttgcaaaaggaagctttcaaaggaagaagttgccaggttcagaaccgccatctctaaagactattacttccaaatgtacttcgacgaccttccgttttggggcttctttggcaaagttgataacgtaggcaaggccgatccaagcgattgcaaatattatctctataagcatctcgtattccagatattttacaataaggaccgtgttatcgagattaatgtcagaatggatccacgcgcggttgtcgatgtcaccggagacgaacctgttgatgtggatttcatgtacaccgttaaatggaaggaaatagacgtcccttttgagaaacggctggataagtacaagtcgtcttcttccttgcggcaaatccagtggttctcaacccttaattcatgtgtcacccttttgttattgaccgctttcctcgccaccattctcatgcgaatccttaagaatgatttcattaagtaagaataaaatttctctgttttgatgcatgaaaatccacatttaattcaaattacacggttttatatatcggttaaaaggtatgcacatgatgaggaatcagcggatcaggagg

SEQ ID NO: 4118 - DNA, 640 bp, Gossypium hirsutum
agttggagaacccctgcagaagtagtaaagaaatgcaacatcaccattgccattttgtctgaccctgctgctgctctttcggtatttaatttacaaacattgggtgcacgtacagttttcagttcaaccattgccgtcctgattaaaatctcgtcatcataaactatgtatttgatgattgttttaggttgtatttgacaaagatggagttctagaccaaatttgtagtgggaaaggttatattgacatgtcaactgttgatcccgagacttcttgcaaaatcagtgaggttagctgatactttcttgatacatggtgtttctttctttaatgtctcaaacttagaaagtgagagtgtcgggtgagcgtcaaatacgggtatactgtaatataccgtctaaaatggtaattttgtggaactgtcaagatactttatcaatgaaatgaatacactgatttcttacttccatgggatatgtacaggcaattgcattaaaaggcggccacttccttgaggcacctgtttctggtagcaaacagcccgcagaaactggtcaacttgtgattcttgcagctggagataaggtcaattggcaatactatttttttttttattctaatttcacacggaccaggaaaa

SEQ ID NO: 4119 - DNA, 608 bp, Gossypium hirsutum
gctgacccttttttatcttcttagtcacccatccaactaaattccctccttcaatctctttaaattcagggcctgttggctctttcccagtcaccaattccagcagtatcacaccaaaactgaaaacatctccctttgtagtggacctaccgctctgtccatattctggtggaatgtaaccaaaagtccctgctatatcagtactaacatgagtttcacaagcactaatcagtcttgccagcccgaagtccgcaacttttgcttcaaagtcttcactgagtaagatgttgctggctttgatatctctatggatgatgtggggaatgaaaccatggtgaagaaatgctagtccccgagcagcaccaacagcgattttgaagcgtttggaccaatcaaggacatcaagagctccactgcgatttctcaaccaaagatccaaacttccattgatcatgtattcgtaaacaaggagcttctcctcacccaaagaacagtatccaagcaatggaacaagattttggtgcttcacctttcccaaggtttccatttcagctatgaattctcgattgccttgtgttttggcctggcttagcttcttaactgcaaca

SEQ ID NO: 4120 - DNA, 639 bp, Gossypium hirsutum
  misc_feature (635)..(636): n is a, c, g, or t
tagattatctctttgtttgtaaaatactggaagctgaaatatgagaagggatagctcagaaaatccattaaacatcatatggaccaccccgaagaaaaggcatgagaggtagaggttgccattaatctcatctaccggatgcagttttgttcttaaaaaaattgtgctcgtgacaaaagccacaaatgcaaccttaaacacgtaatgcatttattcaaaagtgaaatacatgagaaaaacttcaaaacaaaaattaatgacaaaaaaaattcataatatttagtcatgtataatacacagaagtttattactgaaaaatgaaaaagcataatacacagaagttctcacttcatatatcatcaaattatagatggttaagaatgtcagtgtcaaatcaagaaggaaaaactaatatattaagaactaaaaactctacaaaattaagcttagttaaaagtagacatggttgatagcagaagatgatgtaacataagtcacaaactatacactgtttcttaactttgtcataaatattagcacaaatgaaaaaagggaaatgcagttaaacaacttgctatttacattcaaatttaaagacccatacgatagagtctaaaatagcaagcatacccaanntct

SEQ ID NO: 4121 - DNA, 617 bp, Gossypium hirsutum
aacgttagatcaaacaatttccctcgtcttctcttccttccctaccaatttgatgatattcacctgttttccaggtaagtgtagaaatttcacaatgcatgatccctttctccgataacttgaaaaggagggaaaatgagcaacttaatgcagaattgaatgtttgttctcgttttccttctcttaaaccatttctacgccaccgtagttgatatgtgtgacaggtgctggtgatagccatgtctgacatggttagattcaatcttcaattgtttggattatgtagagtccaaaagagacataaccatatcagtttgatgtgttcaatagtttcccttttggtcaggttttcaaatagctattgattacctgtgtcacgattgatagaagagttagaatcaacattgtgctctgtaaaatgatttatattccttcagaaagggtgcgatgtcaaaccaatatgtttcaggataacatggttttactgtccttgttgtggggttgttttgagttataatgattattagaaggctaaagggccaaaaattgcttgaaatggtacctagttaaaactgatctaactgctaatctgttttgaaaatgaaatcctaccatgt

SEQ ID NO: 4122 - DNA, 620 bp, Gossypium hirsutum
ccaacaccaaccacaacaatgtcagcttccagaactctgccatccttaagttgaacttccttcacctgaacagaggatgaaggtatcaaagcattaaaatgatttgaaccctccaaaagaatactaaattatcagccttctgaaagatgaccacttacctctccattggagttagaggtgaatccaaccgcaactgtcccctttataattttgatccctttattagcataataaccctcataaaaagcagctatgccagaggtgaaaagccggggcactacaagaacaatcataaaattagaaaacaagaatccaccagaaattaatttagttagtttatcatatgtcctcatgcccatatttcaacagtaggcatctacttactgcaccatggttccgggtacaccatgctgacatcaagattgttaattttcaaggctgcaccaagctcaagaccaatataacctccaccaacgataacagcctttccattcttctttgctttgattgcttctaccaacttatcagcatcatcaatttctctcaaatagaagatgtttttagcatcagctccttgcactccaaaatctgtcaatttgataacctgcaggaaagatgtg

SEQ ID NO: 4123 - DNA, 624 bp, Gossypium hirsutum
ttagaatatacctttagatgttaatatataaaaccagtgtcagtggggtacaattatgatattgcatgtttgtttatgtttcatgcattatacgaatgcaatatgcctttagatgttaatatataaaaccagtgtcagtggggtgcaattatgatattgcatgtttctttatgtttcatgcacgaatgcatcttgttcttcctgctttttgtgattttaatcaatcattattttagaagctgtttccttatgaagttatggtctaagacactcttctcttgtatcgtatgaacttcagaggtagtggcaatcctgtgcagattgtgcagaggcaccatttcgcatcgcacctgaagcgaatggcagttgttgttcgtgtccaggaggacttttttgcttttgtcaaggtctgttagctatcgtcttttatttttatttttttaaagatgtatggttttgctaccagcttcttgccaagtgccaaccataccctgttcatggagctgaggtgttataggttcctgaaatgcaataaaactaccgtaaacatttccatgccaaataagaagcatctcacctgtcacaaattttttttccttaagaatatttggagcactgttaccc

SEQ ID NO: 4124 - DNA, 635 bp, Gossypium hirsutum
agttatgaacaaacacgcataaaaggacaagttctccctactgcgtccaaaatttgttactgaaactgtactcctttgtttttctttttttccccttctttctttatagatttaaaagaaaaatcgcagtttgaagataaaaaatatatattatagataccgaatcccatttatttaggttcacaaatatgaagttaaaacaaaacccagggaagttttcgctttgtgcttgccaacttgcatctatatcaagttacctactttcgtggatagggaagatgggaaatgttactactaattaaagaacaatgatgtaatcatgtaagaattagtgctccccattaagtaaatgagtggctaaaaagcacactacaaatggagaacaaagattacgtggtcaagatgaagctgcaatgcaacactactctgacttaagtcaaatttactattaggttaaatttgctattagtccctgtatttagtaaaaaaattgtgaatttagttcttatacttttatttaatcaatattaaccattgtactttttaaaacttgaaatttcacctaagtagtagcagttaaatcaaattagttaaaatcaattactagttttgtcctatgtgtgcagttgtggatt

SEQ ID NO: 4125 - DNA, 606 bp, Gossypium hirsutum
  misc_feature (576)..(580): n is a, c, g, or t
  misc_feature (583)..(583): n is a, c, g, or t
  misc_feature (588)..(588): n is a, c, g, or t
  misc_feature (591)..(591): n is a, c, g, or t
caaaaataatttgatccaatgggttttaatcaaattctgattgaagaaaaattaggttcgaaacttgccgtgcgttgcacgcaataattgagcttcttatttgttgtacttgtaagagaaagtttgttgtttcagatgagaaatggcttttcttcgtgatcagttagttagttaaattaatagcttaatctttttttattatttattataatcctgtttgcatcaattttaggctttattataaaatataaacccaaatcatcaaaagccgaaatccatttttcgtaagcacaaatttcaaaatcttcacttttttgacatttaggggctggtaatcatggatccaccaagtaaaaacaaggattatattaaggttactgttatttattgtttttttttggggggggggggttttttgcagggaaggaaaattttttttcaagggaaaggaatccttttttttttttttttgtggaaaaaatttgaattgggaaggaaaaaaaaaagggaatttttttgtggtttgaaaatgaaaagggggtggggaaaaaaaagaaccccgaggggaagggattnnnnnttncaagnccngttctgggttaaccc

SEQ ID NO: 4126 - DNA, 613 bp, Gossypium hirsutum
ctgctgactccatatcctaaattttcttcctctaatgtttgtttacttattggtatacttttctatgcagttgctcgcttaaaggttaacaaccctatatgtggttctacattgattgattatgtaagattcttatagtacaatggtcttgttttcttctgtcatcagttaagtttattttaaaccttggaagtaattgtttgtatgtcttactttggctttcttagggtcatatcgagcaatggattgattttgcagccatggaaattgatgctaatattgcaaaatggttctatccaagacttggttacggtgtttaccttcctccagtaagttgtactgtctttcctcgcagattcttttgtcattttaattgggcttgatttgctggggccatacttagtctttgtttctttctaattataagacaataggtcccctgttaaaattggaataaggcaacttagtcatcgaaatacaaaatattgagggaatggtgaagggaaaattggcattgattacctgtctatgattcttgttttatttattttagagaggattagttagacaacatttattacatgcttaatgtggtagtgttttcccatgcata

SEQ ID NO: 4127 - DNA, 417 bp, Gossypium hirsutum
gaaaggagcaaatgatcaatcctattaacgctcatgacgggaataatcagatagggtctcgaaaacttttgattttcgagattaaggattctaagaacgaaagaaagggacgttcgctcatgcatgaattttcacttcctgatgaacaagaagtacgttcatttgctgctgcttctttttttaatatttttgttatcaaatattatgcctggtatataagttcgattattaatattttatatatgctttttttctaataaataataataataataaactacggcatcttaaacctctgtttatactttatgaaataaaaaaatttattaatatatatatttgttatatctatattttatctctcaaatttctttgtgagggatggaaatagtgggagatgaataagatgaagatgga

SEQ ID NO: 4128 - DNA, 721 bp, Gossypium hirsutum
  misc_feature (622)..(718): n is a, c, g, or t
ttttctcttctcaatttgaaatctctaaatttcccaaatttcttaattattctccattttttccatttcactcctcggtcacatgctagctagattgtgacagattaaaccttatggtaacttgatccgatcgataaaggagaaaaaaaaggttgctccttggacgttattcagattacaagttagatgtacaggggaaaaaaaataaagatttaacaatgtcattgctcattcaccgtattcaatatatgttagcatgcggaatttcttcaatagatatttaaactaaacttatattcaaatataagtataatcatctaaatatataaaaacaaatctttatatcctgcaccttgacttcatcttttcaaaaaacagccaaaaacaaacatgaccatctatatccttaattccattcaaataaaaatatgagaacattaaatatacgttttaatttgctttcaaaaaatccaaaagaagtttctttacatatttcaattgtttgcttctctacttttttttctaactaatataatacacaatgcctgcttatgatattcacattttaccctcaaaatctaggtacaaagtaacaagttgagccttcatgaattaaatgcannnnnnnnnnnnnnnnnnnnnnnnnnnnnnnnnnnnnnnnnnnnnnnnnnnnnnnnnnnnnnnnnnnnnnnnnnnnnnnnnnnnnnnnnnnnnnnnnccc

SEQ ID NO: 4129 - DNA, 602 bp, Gossypium hirsutum
aggcaggcaaattgctttctggacacatgggttgacaacttccctccacgccaccagtcaatacttttaccatcacagtcgtcagctgtaacttcagaagcaacagactgcttcctacgtcgccttccacctggcccacgctttagagggaatcccacagtggatgaagtgctttgaatcacagaagaatctactaaccaatcatccattagcttgacccagtccaaagaaagagcattaagagaaatgttctcctcaagctgaaaatgtaaaccaaaagccaaatcaactaaaatatagagaatatatagatgttgatgatgcatatcatctactacatcagaaaccaaaaaccacatctaccaagagcaatcagtcatacagctcatggcttctcatcaaatttcatgttacaagttcacatgggtttgcaagagaccttttaaccaaactatgtatattttcgcaataaatttttttatataaatggtttatataaagatgagttcacaaaaaatgtgagcagggaagagaaagcaaaataatcaagcgaccttaaattattattagttgacaagcaaacaagagtgaggacagactaa

SEQ ID NO: 4130 - DNA, 660 bp, Gossypium hirsutum
tctgcaaatcctttttccagcacaagtaccaatccatttagtctaaaacctccatcctttaatagtacaggttttacaacctcagcaactacatcaaatccttttcaatcgacttcatcaagcctttttgggcaaacttcatcaatgacaacttcaatatttagttcatcttccactcctacatttggaactgggtcttctctttttagttcatctgtcactccttccttttcaacttcgttatccatttttggcactagtgtaactccggcaacaacgcctacatttgctactggtttaaattttagcagcagtcagacatcccccctgttcagttctacccctgcaattgggcagacaggcaatgcttttgggcaggtgacctctacatttggacagaatactactaattttggtcaaacaagcattttcaacacaccttccgctgggtttggtgggaatatgttttcaagctcactatctttcgctccttctagcagcccagctgcctttggctcaacaactgtaagtagcttgtgaaatctttacaatcattcttcttttcatcatatttatgttcctttgttcttgtgatttggtttatagaatgaggctttaattttggttgttttagtcttcctagatgtctgatttagttgg

SEQ ID NO: 4131 - DNA, 512 bp, Gossypium hirsutum
atttttttacatattttgaagtttttttaggatgttttcttttagtccttaaggttaggttacttggtgttttgaactttgacctattcatatctaattaatgaactggattgagtcatttctttatgatcttttgttggccaaacttcgtgattagcgttctcgttttgttggttaattaatctaccggaagggaattaagcgatctataagttctacctactccagtgactgtaatggctcaaaccaccattgtcgctgctatgaggtggtctaagttttttcatagttgtcgcataatcaaaacatgtttttgttttaccaaaaaaaaaaaaaatttttttttttggtaaaagggggaaaaaaaattaaggtttttttttttttaaaatggtaaaaatgaaggggtttttttttttttttgggtgggggcccctaggcaaaataaaaaaagggggggaaatttttttttaaaaaaaacctttaaaaccccccctttttatttcccaaaa

SEQ ID NO: 4132 - DNA, 624 bp, Gossypium hirsutum
ctgaccggtacaaacagtgtataatttatattatgcgccggcttgcttttgcctaataataaatgctaacgtgcgctttagcttaacccgaccttcccatcctactcctccgtctctccctctctcacgggtttgtttataaaattgggcttcatttaatgcgttcccatccaaggtctacccaggttactcttactctgtactttttacttgattatttgggctcaacacgctcccaaggctaaccactaactagttcttggacggacctgaacaaattcagaactggaggccgatgtcagaaaatattcgtttcagtataaacagggaaactatagtctatagaatgtattactacagtattatctaactaaaatagatagctccagttaccatattcttaatcatttagcgttgtcctatttattgtttgcatttcatatagatttatttcctctgattattttttatcgttcttcaaaatatttttttcaagtcatttcttgatcacgtaaacaaaaccagatcaaattggaactatcgaaagcataccaagaaaataacagtcttgtagcttcaataattgtaacgtggagggatcaaaagaaatacaaatctagcgag

SEQ ID NO: 4133 - DNA, 664 bp, Gossypium hirsutum
tttctctcaacaaatttgtcagcaatgtttctgatttaagctccgttcttagaatctcctaaaaagtttaacaaaagcagtgagtatgaatttaaaagaaaacaaataaccatgcttgaaaataagaaccaagtttcatgaataaacattcctaaacaggtgatgagcagtgaaacctctgattcgatatatattaatttcaacccttggctttatcaggaacttacttctgaagattggttattgagtttcgtagattccgagtcagactctgaggcaactggattggatttctccagcagcaaagcggaaattgtctgcaaactccttgttaagctttcaattccacgtttaaagcattgcacctttacatcaaattcaacaataaattgactatctaaaccctgctgagtttcttgaagctgactggtttttcctttgatgaactcaattaacttggaagacaaatgagtgctctcattaagcatagatagtccttgatcctgcaaatagtatacacgattccgcatttccttgtcaagcttgaaggttaaggctccaacgtctttgccattaccttttaagcgattcagtaaatctatattctcatgtcgaagagaatcaacttcatgcctacaagactccacttcccttcttaatagcc

SEQ ID NO: 4134 - DNA, 642 bp, Gossypium hirsutum
aatttgacaattgcaggtcctcagatggctgcataacaggattacgaattcaaacagaaaatatatacatgttagaagcaaatagactagaagaagatgcactagaaataggagttcaaatggagatatgaatcatttatggaagttatggaagttaaagcaacaaaataaggagcttcacattcattgatttgcttatctacaaaacttcgaagttcaacttacagattgtttttcagcaaattctttagcatcactgcttcctctgtgttccccaagcaaatcatcttggattctgtactacaggtgcctaaatcagaaatatgaaaaagctggcacctatttgatgtccagggaattgatccttacagtaattacttctaatactgccttacaacaaggaatcaaataggcagataaaaccagtaaacccagataatgttggcatgtcttaaggggaaaagataaaacacctgctctcactgtcagatatggggaaacttttagaaggaagttcagatgccagccgtctggcctggtcattgaagtcagagcgattcaaattgatggttgccaggaaaggtggtatattatcctacaaaccacaaaaataagagtaggttataatgggaaaggatcaca

SEQ ID NO: 4135 - DNA, 631 bp, Gossypium hirsutum
ctaatgaagaagaaacgaagaaggatagagagtttgatttagggattttggtttggggataggaaataggaatgaagatttgatttgggaggaaatggtggggcaaatgggggaagtaaaagggtttttggggaatgtaaaattattattaattagactaaatattataattttaaaataatatagtttggtattcggtttattcaaattattcaaatccaaaaattcaactcaattcaaactcaaaattcaattgagttgatttaaattttgttcacccctatctccaacccttaaataaaaggataatgcacttcaacgcatttaaacccacatattcttacactgacaacaatatcgatgctaatcaaactaaaactcattcgacaaaaaataatttttttaaatatatataatataataagcaatcatatagtaacttagaatgcccttttaacacaattatttttactatttaatcattataatatatagtttttttggggttgtgccagggaataatatgaaagagctttggtgtggaaaagttaatcgggcccaactttggtcattatacataattattgtaatagacttgaggtttgaatgaagttacgcaaatccctcactc

SEQ ID NO: 4136 - DNA, 636 bp, Gossypium hirsutum
tttagccattgctgatattcattgtaatctttggttttgagatgacaatatatggttgacttactcaacttcacctcaaaaggaatgtcattacggcaaaattttccatacttttactaaaattgtttcccatgtatttttgaagttattctttaagtagaagctttaataagtggccttagggaactcattagtgagacccattatttgaactctctgaaaatttccatttgcttgtggacctaacatagaattttccttttacattgttaataggcgatagctacaattgcagatgaagatggaaattatttacaagaggcttgggagcatattttgacatgtgtgtcacggtttgaacatttgcatctattgggagagggtgctcctccggatgccactttcttttccttttctcagaatgaatcagaaaaatctaagcaagctaagtcagctggtcttcctgttataaggaagaagggttcaggaagaattcagtatgctgctgctgctgtgatgaggggctcatacgatagtgctggtattggaggtaatactgggacaatcacatctgaacagatgaacaatttagtctctaatctcgacatgttagaacaagttggaagctctgaaatg

SEQ ID NO: 4137 - DNA, 637 bp, Gossypium hirsutum
  misc_feature (563)..(563): n is a, c, g, or t
actttttaggtgcccatatgaaatttaagaatatcagcgtatagatagtgaaaaattagatagcttgatgccttatttgatcaattttcacatcaattgtttataatattaaagaaatagcattagcaggtttataatttattgagaaattttcaattaggtgtctgaagaatattataatcttagaaactgaagtgtaacaactggatgagatgatatatgatgatttttgtctttttcctgaattctttctgtggctgtctttatctgtgtgtgtgtgtgtttgagagagagagagagacagatatcccttttttcccaaggagttaatccttctcctttgcagcttatggttttctgaacacacaaaccttactgtgttcagaaatatgtaaatagatgagtggaaactacttagtcaaactatagctagaagataatatctcctgaggccaattagttaggataaagttgcacttctacttactactactagttgggaaacctgcatttgatgctttttttatttctttccgaaggttttgcagcatcttggtgatttnccccagcagctgtcacaacactggcattctttatgtgattatgctcctatgccaccacttacttctccagatat

SEQ ID NO: 4138 - DNA, 625 bp, Gossypium hirsutum
tcatggcttttagcagattctccttctccgcttcttccttgtttgccttaatccgtagcttctccacttgatctaacagagtagattcttgttctttctgatagttcagctgctcaatcaagtttgtcacttcattccttagtcgcttcttttcgttctttgtctcttcgacccaatgttttgcaatccttagctctttcgatgtttcttcaatgcattccttgtagctgctacacttctcttcaaatttctggatgactgcttcaaatccagccaaggtaatattcacattctcggagatatcagtgatcatcttgcaataggcttcgttgttggtagcaattattccagataatactgagatcctttcttcaagcagtctttgttcttccaggtaccttgcttctgcttttctgtagctttcttcgttctcagttagtaactgttctgtgactctaagtttttggtttgacaaccggagcttaacttcaattgttcggacattctcaaccaaagtactgagctcatctcctttcatttctatatctcttttcaagtcttcaatagtttcctccaactcagcaacaatttcatccttagattgaatgttcgtattgtgctctcc

SEQ ID NO: 4139 - DNA, 686 bp, Gossypium hirsutum
gaacaagttaaggccatgatgcaaaaccaatatttgatccaaaaagaatcaaaatctagcttgaagtcgagtttataacagtgaacaatgatactaaatttgtctgttttgtttgttttgtttacagatgggaactaatatgagaccaactatctttaatgatagagttgcagctgcactaaaaaactggcatcatacagcaaagaaacacactaaacaaagcaggctgctacattccgagaatacgacaccattttcgagcaggccggcaactccgactcatgggatgtcaccggttcatattctgcataaacatcctcaaagatccgaaacctatggtatatcttcaggacattcggttgatcactgggatctagggttgttccattctccactacacagtcacgaaatcaatgaccctattcatgatcatgatagaacacagatagaaatgagggatgtagataggacagttcaagagtctggctcttcacaaatggatgctgagacacctcaaacaattcgaacacaacacgagattgacatcattccatccgatttctcgttcgcaaaaaattaatcgatccaatgaagatcagctcggatgaaagggacaatgctcctaacttctgccatttttttttgtacatgttacatggatttgaactgaagccagtatacaggga

SEQ ID NO: 4140 - DNA, 601 bp, Gossypium hirsutum
agcatctgaaatgctttgacttttggttgccatacaacaacattgttagtggtaactgtttgtgaggaaaatgatacatttctgatcattaactttatagttcaacacaagtattcattaaacatatcaaaattctccaactcctgcataacaggtgtatatatacaacaggtatattaaacatgccttgccaactttagtagtcattataaatttataattgacaaaccatgataaataattcaaaaattcttcctgtattctatgcattatcaaatccttcttcttttctgtaggtttgtgcttcactctatggagatatcattaatgttcatggcaatgatctgtctcgtcaaagatctcctcctgcatgtgcaaaaataaaataaaaaagttaattgagatatccattcatgaaaacaaaagaagaaatcatttacttgcaaaagctcttcaatgacatcttccagtgttataatgccagtagcttccccttctccagtggtcgctgggagcgaatcatctttgaattgcagtatctccgagtggaagttccttccccatttcttgcttttggacgacactctccctgaatttcctt

SEQ ID NO: 4141 - DNA, 579 bp, Gossypium hirsutum
tccggctcaactggcactagcatgggttctccagcaaggggacgatgttgtaccgattcctggtgagaggctttctttttattgtctccattagctatcaatcatcttataggtaaatgagggaaccaaacaagatgtaaccaagggtcccttagaatatgatatgataccattattcggaagatcatgttctcatactcatatccatatatgcattgaatattgcttccaattttcgtaggaacaacaaagattaagaacctggatcagaatattgactcgttgagagtgaaactcacttccgatgacttgaaagaaatcagagatgctgtcccgattgaagaggtcgcaggcgatcggaactacgatagcatgaagaaagcttcatggaaatttgcagacacctgcaaaagatgttggggtttcaattgaataaggcaattgaaatggttatggcatgtttgtttcatttatgggaaaatgtgtggcatagatctttttaaggttttaaaaccatccatacttgcgtttgggacaaaaattatagatggttttgatatgaaataataaagagagcaa

SEQ ID NO: 4142 - DNA, 624 bp, Gossypium hirsutum
ctggtgcaactttttattttcccagcaaacgctgttgacaacattgcacaaactggcaactcccgaccagaggcgtagctaggggtggcaggtccccaccatggaagtttttaaaaaaaattaaaaatgataaaaattacgatttaatttcgatttttttaaaaaaaattgacttcggtccctgttctggacgtacacgtgtatcttggagaacaaaaacccagaatttttttttgtcacgtttaaaagcaaaaagatatttgtgcaattaattctggcctcacaaagcgttgaatctttcctgaatcttccaaagaaaagtagtgttccacgcgttccaataactggtttcgtcgatgctttgcaaattatgtgttcaaagatgtccatttcaggtttaagagactctaaattggtttgtttttatagtttttacaaaagtgaactttgaatgttcatgggatggaggagaaagaaacaatttttggttgatcaattttggtaggtcggatgataaataaatgacaagcctttgctggtcttgcttttggcagtttctgtttatcaaaggggaatttccatcctactgttccgcttttacacttcaaaatcttctcccttcag

SEQ ID NO: 4143 - DNA, 576 bp, Gossypium hirsutum
cagcattgtgctggcttaattgtttagctgtcctacagtcgtctgcctctgatggatgtaactatctcttcactggaagccgtgatggcacacttaagagatgggcactgggtaaagatgctgccacttgctctgccacatttgagtcacatgttgattgggtaccttctattttgcctatgacagtttacttttggatttgtgcatgaccaacatactttagctgataactttctgttagaagttgtaaagatttaatttatgttcaatttttgatctagtagaactatatcttgatttataatcaaattgcacttcacttacatcaatagtcaatttaaatgttgagtgctcttttatcttttgtttccttcagtaccatccaatcatcttacacatatataacatatctctgttactgcctaagttatgaatgagcataaaacaattttcttgttatacaggtaaacgatactgtaataactggtggcaatacacttgtttcctgctcttcacacaccacactgaaggttttctattaattaatgctgtacctctggctgttttttttttttt

SEQ ID NO: 4144 - DNA, 631 bp, Gossypium hirsutum
  misc_feature (623)..(627): n is a, c, g, or t
ctctttcttttctatttattgttttgatttgcttgctctaataagacgaagaagagttcttgtgaatagtctctctttaaaatcagccagaaagaagattgtttgtcaaaagccttttgctaagatatttatagacggcaattcggtaattgcatagtttggatctggaaaagtataggttagtctggaagggaagaagaatagctagagcaagaagaattgtgcttaaagcgtgtgagcctcagcctggccctcgaagcttccaatgacagtcttatctcttaagaatagagaattttagtgcgtgataatgtcatcaaatttcaactaaacgcgttaaattccaatatcaaagtgccgcttttattgtttcttacctctcttgctcgcgtaaattgacccggcagcaatggctatgctatccgaattaaaacctgaagaaatagcatcaggccgaggctatagctatgtaaagtgcacttgcaaagaaccacccaagaccaatcagcactccaactaatggcccgtgcgtaccatttctggagcccagttaaattaatggacctggcaccattattttaaccagttttttatggttttgttgtcggtgatgaacctaggtnnnnntggg

SEQ ID NO: 4145 - DNA, 560 bp, Gossypium hirsutum
ctcacagattttgtaagcagcgatcctagctttggaagccataccacgagcctccccgcgagcaaatcttaaaaggctggcgttagaaaccacagatccagcagcagttgaagcagtatgcgtgccatgaccttcagtgtctcgtggagacttggattctttcgtttcatcaattgaatggccaagatgtgactggtagcctttgtaaaaggctcttgcacctattaccttccggttacaagctgaagcagggaagtcaggtcctgtttcacatatacctttccaagtatcaggaacaggagacagcccggagtcggtaaaactggggcgttccggccatattccggtatctaaaactccgattataacaccgtcgccataataggagttttgccaaagaccaacaccatcggaaaggcctaaaaagtgaggggttcgagtagtgtggatctgacgaacctggtccggaatcactgaaaggattccgggaagtcccctgagcttatctgcctgagcggccgtaaggcgagcggagaagccattgattacacgttcgtagg

SEQ ID NO: 4146 - DNA, 660 bp, Gossypium hirsutum
catggattttatgaattgcagatccatagcttgcaatatcgcattcagcatgaaagcatctcgttgagtgaggagaagcgaatccttaaagaaatcaaacatctggagggaacccgcgagaaagttattgctaatgctgcaatgagatcaaagattcaagattcattaggccagaaagaagacattcaagatcaagttaaagtaagaaaattctattttctgcctttatccatcggagtgagcctctttttatctctgaatatagagcaccattgtgttacactaaagaaaatgctatatttgtttattgtagcttatgggtgttgatttgaatggagtaaggaaggagcagcatgcagtctggtccaaaaaaaagaaaattaaagataaattggatgaaactgagactaaaatcgagtctttacaaaatgagctgaaagctgtgaccctgaagagggacaaagcttttgaaaacattcaggagctgaggaaacaaagtgatcagggggtatcaccttttctttgcttcaactcttaagatatctgctttgtatgtatacttgaccatgtcggaacattttcatttatgcatcaataactagtgtcacttaagatattaaatgatacatattatgtctacttccaatattcctgtgcatg

SEQ ID NO: 4147 - DNA, 565 bp, Gossypium hirsutum
tatatgcatagagatagttaaagcatctagcaagttttctaattaggcataatgacttatttaacctttcaactttataaaaaaaaaatttttagctctctatgtaatttttttgcctcttttaacccttgaagttacgttatttgtgaaatcaccccctaatggattgaaaagttaacgactattaactttgctgatgtgtcatacatgtggattgcaacgtgagtgccacattattaattaattaatttaaaaattcaaaattcaaaaattataaaaattattaaattagttgttaacattattaaaaatgtataaaaattaaaaaaataaaaaaaaaatttaatttttaaataattaattaattgttgacgtggcatatatgtggatatcacgtctacaaagttaacaggcattaaattttcaatccattctagggtgatttgacaaataatgcttatttaatggctagaaaggaaaaattaaataagggttaaaatgagtctttttgtaaagttggaggaccaaataattttaattacggaatgtgcaatcaagtcctagg

SEQ ID NO: 4148 - DNA, 613 bp, Gossypium hirsutum
  misc_feature (30)..(33): n is a, c, g, or t
attatttgttcatttttacaagttttccannnnatttggaggatttttggaaggtcatatcctcttacttatgtccaaatatgtgttggacacgtattcccaagaaaaaaaatgaagagtcggagcaaagtaggagacagtgatctagtttgatctctaaagtacttccatttatgtgattgttgatcttttcttttgctgcttcgttttacccagttggaattttcattagatatacaccctgttttaactaagactgtgaggcaagaaccgctggctgcacaatgatgtatttgatattatctttaatatccgagtcaggtctttatgtgtgagcaaaagttatatactagagaacaactggataagcatataaagacaggtgattctgtggttgatggcactgaaagtgaaaggggaggttttacaggacatcctatgtgtgagttctgtcaaaatccattctatggcgagaatgagctctacttgcatatgtctactgaacatttcacttgccacatatgccaaaggtaagccttattattgtgatataattatagttcagagattgcatatgttaggtattgctagttctctcatgcattcaactgac

SEQ ID NO: 4149 - DNA, 653 bp, Gossypium hirsutum
  misc_feature (592)..(592): n is a, c, g, or t
  misc_feature (595)..(595): n is a, c, g, or t
  misc_feature (599)..(599): n is a, c, g, or t
  misc_feature (606)..(606): n is a, c, g, or t
  misc_feature (639)..(640): n is a, c, g, or t
  misc_feature (644)..(644): n is a, c, g, or t
gtacataatgtcgctaatactctcttttcttttctttttttctggatttttcaagagaaaatgtctatcagcaatcatatttttatattgcaggtgatgacagacccagatgttcctgggcctagtgacccttacctgagggagcacttacactgggacttctcttaatcaaactacatgtataaaaatacaaaatatattaaccattaatactaatatataacttccatagggaagctgacaatgatctatctatctatctatatatatataatgactgttagggctcataatttccttggcttgataaagctaaaaaaaaaagaaaaaaaatttcttcaaaacaaaaaaaaaacaaatttaaacaatctactgaatatttgtacttgaattgacaatctcccaggatagtgacagatatcccccgcacaacaaatgccacatttggtaagaatcctcttcattcttcttacagagagagagagagagagagagagagacagagagagagagagagctttatttgagaaaaaaaaaaatatttttgatggttaaaaatataaataaaaaatatatatacacacgggaaggnaantggngaactanaaaatgcccgccccacacatagggctccccatnnttgngccccccca

SEQ ID NO: 4150 - DNA, 594 bp, Gossypium hirsutum
attccatttgactttaggacttgtttagtttgctttaatatgcctttgttcaatgttttgaacagcctccagaaggaatcaggtctgtttttcagcatgaagtactttgaggacctgatcctcggcggaaaatgggaggaggttgagcggtacctttctgggttcactagagtcgacgataatcgttattccatgaagatatttttcgaaatccgcaagcaaaaataccttgaggccttagacaagtaaaattaatagtcttcttgatttttttaataaattttacagtttgattatcttctctgctgccagtttcattgaattatcatttctatgctttaatgatatttacattgatcaggcatgatagggccatggctgtcaaaattcttgccaaggatcttaaagttttctcctcttttaacaaggacttgttcagggaaatcactcagctcctaacattagataattttaggtatatgatctgttgaagtttttcaagtttcgatgtttcttgttggttaaaacacaaagaatattgccattaggcgtactttaacaaatttcttagtttctgcagggagaatgagcaat

SEQ ID NO: 4151 - DNA, 432 bp, Gossypium hirsutum
agcatctttcaagtgtgaagagcataaacaaatgcattcaggaactgcgggtcagctgaatgttgtggagagagatacaggaccaaagggccaaaaaaccaggatgactgcccagatgtatcaaagactttcatccaggtcatgccacagattgcaacaatttgctctcagtagtcaatctaagtgatgttggttaggcagaaccatactcgatgtcagcaatcaattcctggatgaaacatctacaaatataattatatgtaaaagcaaccataaagatcacaagttgtttagtacaaaactttgacttcatgatttatttcttaccttcgaagcttgtgggtggatctagggtacagtttcatagatcctaccccaaaatcatccatctccttgcaagataccaggaaaaaactttgcagagacagattt

SEQ ID NO: 4152 - DNA, 565 bp, Gossypium hirsutum
  misc_feature (533)..(533): n is a, c, g, or t
ttgccaaaaacaggttctcgcttgatgtatagctaactgtagcatttataacctttgaggatataggccgagtcgaaaagacaacttcacagtaaaaccgattgagccgagagtttaaccaaatgatgggaacagcaataatgcaagctctatgcatttaaagggggggggggtcgcagcagaatattcaggcttaggcaatgtcacttaccaagaactctcaagatcttcagaaaaggacacactgacataaccagctcattgcttcaacatctcaccttggttttgccctaacaaaatggaactttattatattcagatttcccatttgaaaatatttacccattctacatcaacagacagatgatataagtatattcggatcaagcttaccatcttggttttgtcatcacaatcaaatcaagaataaacacatgcaaatttccccaacaactttcataaagagaaaagcacacaccatgtgaattacagaaaggtggaacaaaggcacaaattgaacaatcaagagattngacacaaaaatagcaacaaaaagaagaaaact

SEQ ID NO: 4153 - DNA, 598 bp, Gossypium hirsutum
ataagtatattcacttagtagctacgtaacaaaaaaaaatgatgttgtaatgagtttaaaataattgaatttgtatttttaaatctaaaaagttgaaggactaaatttttaaaaataaaaataagagaattaaatttcacatatataaaaagtagagcatattttaacattatctaaaatagtcttttacaatttagcatgtcctcctataggttatggatacacagagcacgtaaattccacctttgcttagtggggttttgaatttcgtgatgccccaaacataagccatgtgcttatcctaacaaacaaaaaccttgaagtttcaggcatggctgctagatttgactttgccaattggtcacctgtaactttccttttcacccccataacatactaattttacttgcaacgttattttcatgaaaaccgctttgttgtgtgaaatttggttagagagcgtcaggattagtttaaattacaaaattttctccatgatttccctccgtgtaaaaatccaggggacatgtttagaagcttgtaatagtatatattatattaccaaaaagcataaggctataagggagtagtgattaac

SEQ ID NO: 4154 - DNA, 667 bp, Gossypium hirsutum
aattttccatttcatacttgttattctacaaaaaaggtgggttctttctttatttgaataatttatctgcttttatcgagacttgcattcacatgcaattctcgacttaacaacgccttttggttttctccaatgaacacaatgcgtatgtttgaactcatgtttcgtgcatttttgttgatatttacagggtttaagtttcagttcaggggtccattgaatacttttcacgaggtctttagctggagagaaacaagagatgatcaaaccgaagctagacactatcttgaatctgatgaacaggctgctgaggcaacacccgaccatgcatctcttgcagttaccgaaactgttccttcaggtgcagcagtcacttatagatccttcttaattttctgtttagtttatgtttcagcattttagattgccatttgttgagcctaacaaaagctaaactaaactttattatgttggtgaggccgatgtttcaaactatattataatgtttaatccatttgatttaacccaattctttagaaaatttgatttctgtttcttggaattttcagcaccttcacataagcagaatctttcagcacctacatataagcatgaacgcattgtggtacctgttgctgtggattctactcaacaggaagctttgtcg

SEQ ID NO: 4155 - DNA, 799 bp, Gossypium hirsutum
  misc_feature (574)..(579): n is a, c, g, or t
  misc_feature (599)..(604): n is a, c, g, or t
  misc_feature (607)..(619): n is a, c, g, or t
  misc_feature (628)..(630): n is a, c, g, or t
  misc_feature (636)..(641): n is a, c, g, or t
  misc_feature (645)..(647): n is a, c, g, or t
  misc_feature (650)..(656): n is a, c, g, or t
  misc_feature (659)..(661): n is a, c, g, or t
  misc_feature (665)..(666): n is a, c, g, or t
  misc_feature (673)..(677): n is a, c, g, or t
  misc_feature (679)..(689): n is a, c, g, or t
  misc_feature (695)..(703): n is a, c, g, or t
  misc_feature (705)..(708): n is a, c, g, or t
  misc_feature (720)..(720): n is a, c, g, or t
  misc_feature (722)..(726): n is a, c, g, or t
  misc_feature (734)..(738): n is a, c, g, or t
  misc_feature (743)..(743): n is a, c, g, or t
  misc_feature (762)..(772): n is a, c, g, or t
  misc_feature (774)..(780): n is a, c, g, or t
  misc_feature (782)..(783): n is a, c, g, or t
  misc_feature (785)..(786): n is a, c, g, or t
aacttggtgacgtggaacactatgatttgtaagtcgaatctttgtttgggtttttcttatttcaagaaaatgttgataaacaaggtaggttttgatcatataactttgaatactttgctccatgcttcctctgaggtaaagggcgttgtttttggtagagaattgcattgctttatagtgaaatgtgggtttttgtatgattcttttgtgagcagtgctcttgttcatttatatggggaatgtggtctggttgaagaagcgaggtgggttttcgatcaagtattttgtagagatttggtgttgtggaatgtgatggtttcttgttatgctttgaattctttaacaaaagaggcttttgtggttttcgatttgatgaagaaggaaggtgttaaaggggatggttatacgttttgttctttgcttaaatcttgctgtatctggggattttatgaacttggaaggcaggttcatggtctcatcattaaactttgttttgatttagatgttcctgtggcgagtgcacttgtcgatatgtacataacgaatggcaatttgtatgatgctcacaaaagannnnnngaatcatacaaacaccccannnnnnggnnnnnnnnnnnnnatttttttnnnggacgnnnnnntttnnnaannnnnnnaannnaacnnccctttnnnnnannnnnnnnnnnggggannnnnnnnnannnnttttgaaaaaancnnnnntttttttnnnnnttttngggaaaaaaaaaaaaaccnnnnnnnnnnncnnnnnnntnnanngtgtccccccccc

SEQ ID NO: 4156 - DNA, 643 bp, Gossypium hirsutum
ggggttttgagttgttttctcattctcctgttaggagagtggaaaagccagagcagccaggtgccaataagaaagaagagaaattggcatttgagtctcttgatctttctcttagtttaccaaatgtcttgttgccaattggtgctcgagaaacagatgaggttcctggctcccctagccacgggaggagtgtgcagtctttaacaaatacatttcgtaccaactctgatgggtttactgcatctatgtccttttcaggttctcagtcattttaccataatccaagttgttctttgactcagaattccatggactatgaacaatctgttcacagccgtcccatatttcagtgtgttgatcaactttctcagggagcatcgcagtctcaaaatgagtctcggcataaagacattcccatgtttcagagaattttgatgaatggcaatgggtctttcaatcattcttcagaattacagggcaattcaaatagtcaggctgtgcaggcaccaaatatgcacactttagatggaagctcaaagattcccaatgtacttgagcagcagttaagtttacagaatgatgtcaggtctccttcacagggttttgggtctcatgaaatcgcttcaaagtacagctttgagaa

SEQ ID NO: 4157 - DNA, 642 bp, Gossypium hirsutum
ctcttgatgcaagtggtggaggcaacggagacacaatggtatgatttttcacgggcttaacatgaataaacttttaaaattattgtttgtcaaatattcatgtgattgacgggggtgcagaaatcagtgtataaaaggtcgagatttcttgctgctgtgcataatgaaattggattggtcatatgtaaagtatttattatatatttattatagcaaatttatatttgttcattaccattcactaaaatctggagttaaagcctgttttcatttcaatcttaggaattataaaatatgaacattggtagtgcatttgttaatgttatgccactcactcctaaagcaactggcagacagtcaagctcagaattataccaatctttatgaattgtgaatttgatgttcactgttatgtggacatagatgaacatgttggatggaacctagctcattaacattcacatgtctgtgatgaacccaggaattctagaagccatacttgtttaaaggcgattaaatttgtattagaaaaatgatggaggggagccagacccttcttaaggagtccattgttttaatttatgctgctgttttggagatctatcatctaggctcctacgaagaccctctgtttctctcaac

SEQ ID NO: 4158 - DNA, 666 bp, Gossypium hirsutum
tctctttggcactggtacctctcccaacccattccaatcagtcagttccagcttcagaaacatgatgaataataacagaaaatgactttctcttatctcaagcaggcggaaaatatcccacaaaatagaagctctgcaactcaatcgtctcactcaaagcatttgggcaattcaggtccagcaaacagcctcaattctcaaactggaaaaagcctccgtgctgagcttcaacggtatgttgattcctttgttgaacttttgaaagtaaagatgcatgatattttcctctaccaattgaacatgacatgtttctaacattgtaataggcctcaacgggtagaacccctcgataaaggcaagaaaatattgtttgctgatgaggttgaaaagaaaaagggaaaccctcgttccaatcgcaatcagcgagcagttcactacccaaatttgttccctcaaagcccagtgagtataaatattgtttgctttaactcaagattattatgggtcgcattttctcgactgaatttgaaataaatgataagcagactgggatcagatttctgaatggagaatctacccaaaccaaccagccgccagcccctactaggttctgtaataaagagactgatctttataggtctttggcaccagggtattgaattgata

SEQ ID NO: 4159 - DNA, 636 bp, Gossypium hirsutum
tgtttgtgattggaggaatgccggaaagttgtgacggttttcttctgaagaatatggatggtgatttttgggtaattatgattttctgcagacgagatattctggaaaagaagttggctgatgctgaagtttctgaagaagaacacaataacttactcaagtattttgagaagaaggagacagaatacatgcgccttcagaggcataagatgggtgctgatgattttgagccattgaccatgattggaaagggtgcttttggagaggtaattatatctttttcaatacctacaacataatttaggtgcttcttttgcttctatttctggccttgcttgaatctacttggcagaagttaagaaaattttgtatttaatttgtttaccctgccatcagaacttgttatcctgggacaatgcttctaggaagcttttagacggacaggcttctacgtattatactgcttagtgtcattatttattttcagctcttgaacatctatatctcctttttattgattgattttcactttccccgcaaaagaaggaatttttccacaactacttttaacttcacttttttctcattacaggttagaatctgtagggagaaggcaactggtcatgtttatgctaa

SEQ ID NO: 4160 - DNA, 623 bp, Gossypium hirsutum
cgcatcacatacatatgcttggtcatgtctttttatctgtttttgacggtgatggttgattctttctagctatatacaagcgatcaactgtacctgtatttaaagctcatggaatggcccaagcttctatgtccgactgtgtaacagaaacgttttctgcaattcgaactgtatgttcttaaaatgctctggccagctacctactgatatggatatctactgatagaaaattgatttccttgaactccaaaattgacaatgtcatcacttgacatccttgtgttacattaagaaaaattcttggtgaaagctttgatgcaagcttgatgattgaaataataacgttggttgtcataggtaagatcttttggtggggaaaaacgtcaaatgttaatgtttggtagccaggtaagatattaatcattcgctattttatgtatctcttaaacttttattgtctctacataagcttggttgaatgttcttttgtgcacacaacgtatactttaaagggttttggcaggttcttgcatatcagagaagtggtataaagcttggcactttcaaatccataaatgaatctttgactagggttgctgtttatatttctttactggccttat

SEQ ID NO: 4161 - DNA, 601 bp, Gossypium hirsutum
aaaatctataccatcatatgtgagctctaaaatgagcaaccaaagttttagaatgacctcttttagcaacaacgcttattggcaaaactcataggaaaccagtaaaaaactattatgaaagtctggggttaataatactaatatgattttgtttaacacctgcatgagtgtaaaaaagtaattacaacaaattaaaaagtgtagaagtggaaaattgttgagggcaaacacaatattgacaaactgagtttaaaaaattatactaattcatctgcaagaacaagtttggtgtaattcttttaccttatatttgattaatttgtaagcttgacacatataattggaaattattattttgctggtcacctactcagactttctcagtttctatgcataaagtagtagaaatgccaagtaactaatgtgctatttgcaatttattcttttctgttggataacctcatgcaaatgttttagtgcgatcttgttttgcttacaccttcaacttcctattttttcctttttctggtcctggatccaaacaaagcctaaaaattttataatttaccttatcttgacaattttagaacttaccaaaaaa

SEQ ID NO: 4162 - DNA, 635 bp, Gossypium hirsutum
aaacaggacatataaggttttctagatatttatgtctgttgtgagcataaacattcagctaaaacaatagatttacatccttaaacaatattaacatcttgcccaagtcagctgaaccaaagtataaattgcaggaaaagaactaactgaaaaaatgagctgcagataaacctaatacctcttctttggcagctgctagctcagcttctctagtacttagcatctgggtttgcagagatgcctctagctccagctgacctatccaacaagtaaaatggaatttcattctcttgcagatgagtaacaaatacagaattacaatagttccttctgatatttttatacttctcattttagcagcttctatttcagcacgaatgcagttactctcagcaacttccagttttgttttaaatgccagagaggcagcttcccagctttccttttccttttcctgaaaatatcacatggtttgtttgataataaggaaaacaaatgttaacccactatatttgtgtataataataattttgttctcattaatggcattattatttaagagtttgattcatacgtgctcatgtttcagatgggcaagctctcctttaatagattctacaatagctcttaatcgt

SEQ ID NO: 4163 - DNA, 627 bp, Gossypium hirsutum
ccttctttatttttctgaaaatttttgtaaaatatttttaaagactcgttggtttttaggagtagatttttaaccgagtcaagtcaatgcccttaaatgattgctcgccgaaacataaatgcttttcctttaaaccaataattcatttagtgaaaggacacaagggtcatctttggaagaggaatcttattttcttttagggaaacgtggagttttatacagaagatgggacaattttcttctttctttttttttcaaataaaagtcgtgtttagataaatatgagcaaacagggatgtcaggcttgtttgagttccccaccaactcttcatggccacacaccaggttaattaatttacttcgatgcaaccttgcctgcttctttaatctccagcagaacccatgagtttttttttatatattacgtgtaagttcaatgcatgttccttctgcaaaacaattaaacaataggcaaattgtattttctcaacctagtacacccatgtaatccaagctgctggtagcagtgggaactgtgaatttcagtttttcacccttaaaaaatggaagaaaaataatcctaacatggatgggtttgcccgttgctggttccatttcgtctaatac

SEQ ID NO: 4164 - DNA, 630 bp, Gossypium hirsutum
tctgaaccttgtctgttcatttattctttatttgatgtttaagagaaacccatctttggtacatattggctgacgagcagaagagtttggctcttctcaatcagtattctgaaatattatcatgtgaaggagaccagctgaagaaaagagctctgcttgctcaagccttgccactgccagacgtaggtattctttcattttcttattattttgttcatgttattcttttatcttaggatgtgatcaaagaccctcaaaatcaaaccaaggttgatactgatatgttgttacttggtccatatcacattgctaagtctttcaaggttggtacttatatgctgtttgtttactcagaatcaaaccaacttcttaaatttcccaagctgaaagtgctcattttttgttcaataatcacaccatcttattgggtttgaaaagagctgctataattctatctaacacgtgatctgattttctcttcaccatcaagctattatttacgattctgcactggattcacacttccaattaggggtgagcattcgatcgaatcggaaattttcgagttaatcgaattttcgaatcttattttatcatctaacttaatttgaagttttctcgaatcgagtc

SEQ ID NO: 4165 - DNA, 647 bp, Gossypium hirsutum
gagctctctactctgaaatcaggagctgaaatctcatattgagaatgccttggcagtaaaaagttctcttgaagatgaattaacagagagaaagaagatcactgagagcttagaggtggaaatctcagaaatgaataataccctttccgaaatgaaagataccatagagttcttgagtagtaatctaaatgaagtttcgggtgaaagagatgagcttcacatggaggtgcttagcttggaagaaaagcttagaaaggcacaggctgaggcgaaacaaagtgaagccaatgcaatggaagctcaacaggtatggtctattttaacattgtgtaaaatattatttctgtttccttttaatatataatcttatcttataattgtatggatacaatttgatgatagatggctgaatcaaagaagacctatgctgaagagaaggaagctgaggtaaaactattagagagatctgttgaagagctagaatgtactataaatgtattggagaacaaggtaagatgtcgaacaatgataaagctgtatgaaggtactacttctatcaaaaccatgttaataaatcccaaacttgttttaggttgacattatcaaaggggaagctgaacgtcagcgattacaaagagaggagctag

SEQ ID NO: 4166 - DNA, 570 bp, Gossypium hirsutum
aaatcgtttcctacagaaaatatttttttaatctttagggcatgagattgatacagatcttaattgacaactgctacatggaaatttgtcctcctagtttggaagtagggtaattttaaacttttaaaaagaaaaagaatcttgcaaggtggtctcttgcgctttcttattgaaacaattaggaaatataaataaaatatgtacttaaaagattatcataatagcattatgtagtcaggtaagagtaaaattctcaaacattatgaatatagggtgaaaattaggagtcaccttggaaagagcacatactaaagatggtatacttcagtctaaaaacaaactgtaagtatgccagacatagtttacaatattgacagcatgaaaaaggttcaactgcatatgcttgagtaaatgagaaaagggagcatatgcttttgatcaatgaaaatctaaatattgtcttaatttatagttgagatgccacgaacaattgactcttcaagctatggtagcattttgcaagaaatgggttaatacaaaataacattaagcatgaagattgaccagagt

SEQ ID NO: 4167 - DNA, 636 bp, Gossypium hirsutum
ttttatttttctttaaatggtttcaaattcatcacctggaggaccagtttaggatgaacaaagtccccaagaagcttttgaagcttaagccttacaaaaggtaacctgaaaaaatcatgcatacacataaagtgtcgttgtttttatttgaaatcaacagagtattttcggaacagaaaagataaaagaacttgccttttatgtgatggatcggccaggatttcagttgcgagttctgtcaagacctcttcccatccgagtggaataggttggtcatcagcaaaaggatagctgcaatggcagagtatatgacattcacatctaagaacaaatatggagcctttatatcttaaatcaatttattggagatttgctttaagttcttacttgtgtgctttgcaggcttcaagtgccatgattgctttcctcaggttttgctttgacttggcagcaatctttgcagcaaagttcgtatgtagttcaaagtcttctttccttgcaatttggataagtacgtccatgacctgcagaatcaacagtcgtagcagtgacacgattagatcttaaagcattttgtaaggaatgttatgatctgatcaaccctatacaccaacatttcacatgcctgatcttagc

SEQ ID NO: 4168 - DNA, 606 bp, Gossypium hirsutum
attataattataacaagtttagatatcttcctcctgccatctatgattgaaatgaaaagaaaaaaaaaacggggttaatagatcacacaagtattgtttcaagattcaattttggctcggatttatgcagccaaatgcaacagaactttaatgttcaaaccttaaaatgaaagaatgaactcaaccattcatagcctgctaacatatgaaatttagtagatgccttgcaaggcaggaaaatttagcttctaattactaataacataaaggaagttagcttacctaattcagaatgatggagacgataaaagaactctaaacttccactttgatccaaatgtgaaatatcaaccaaatcttctgtccacatcatgcatccaataccggaaacaaatgcatatgcgttacacgaacaatttcccaagcagcttcttccgcaagcatctaagttgcttgcagacaggaacaagttcgataaatcgggtaacttgatgcacttcaatcccttaaatccatctggttcaccggtaccattggtcctctggcactgcaactcgatcttccgttcacatccacctgaccagttccctctactccattgatccg

SEQ ID NO: 4169 - DNA, 615 bp, Gossypium hirsutum
ctgcaaatataaagcaggtcatcttaaaagagtcagctgtaccagcaaagtcagtaatacaggcaaaaactttgcataaatgggaaaagttgcctttgtacatttcatcatattggacgtcattaaagctggctggtaacgacattatattcccgaaacaatcatccattaatgatgtaaagttcttgggaacaaagaagtctagtaccctaaagcctaattctctccataaatattaaaggccatccttctatggttcaattctatgcatgtcagtgtaaaagaaccatgttatgatactatattcctagaatctcccattcagaatttatcttggtagcacacatggttaagctggcaataagattttcccaaattatgttcggttaaaggcaacctctattgctgtatgcaactcattatgcaaaatcattcaatcttagctataaagaaaaagggctaaaatactctcatgcaacttgtccaagaaaagatattaagttggcaactgtaaccaagcccagtaaaattagtatataaaatgagaaggatatttaattatattttatcatagttatgctacaagaaaggtaacctttgacatttttaatacat

SEQ ID NO: 4170 - DNA, 581 bp, Gossypium hirsutum
ttcttttcagatttaagaaggaattcttttcagatttaacttttacatctttttttcttttctttttttaatttttatctttttagttaaaaaattatgtgttactcttgttgaacattcgtgtctagcatcttaacttttgggtctagtagtgtttatggtcgttttcctaatgaatttttttttaatcacagggaggttctcttggacttttatacaagttcaggaaagaggaagcctgatcaaattatcatattcaggtttttctgtttctcatgttcaatctctataaaatataacatattctaactcaaatggaatagtacattttcaagtaacttgtgaagacaaaattttggtgttcctgtttcttaattcgcattgcttctctgcttggaaactatttgtatagacttcttagcaattatatatttatctatcaaatcatcttttacttgcgaaacatgtaacagttatttggggaatattgtatgttcaagcatcttttatctgcatggtgtttttgtgctgcttacagattatacaagttgaatgtcctttttaaacttctaatcatcgta

SEQ ID NO: 4171 - DNA, 630 bp, Gossypium hirsutum
aggagtgtcttgagaaagttagattaccccataccagcctatgccatgcaagcttttccttttagggccttaccttttcccacactttatttgccttacaaaaagattgaaatccaccacaaaggcaacagactcctaagttgtagcaatgtcttccaataccagcattgcccttgtgaagattgaagttgcagtatatctctaccttttaatctgtaagtttcaatccaggaaacacacaaagagcctgacttgatccacacggtccaaagattgccaaaaataccagctttattcctagagttgaggtttaagaccaagtcaactttcactttttggatgacaaacacttggagctatttatgggtcgagtcaaatcaagacttaatgtcaaaaaatttgtattctcagattcatttttgggccgacccactcaaaaaactcattttactatttaaataataaaatattaaaaatatttttaattaatatttatatatattttataattaaattaaaattttaaaaatatttttatattatttaaattgaatttgggttcaactggatgtacagaaagtataaaaaattaaaaatattagtccaaatgagttaccagatccttggaca

SEQ ID NO: 4172 - DNA, 613 bp, Gossypium hirsutum
  misc_feature (589)..(589): n is a, c, g, or t
tatattctttgtcttcagtccctctagagtgtcttggattactaatttcctatatgttttcttgttacatattttacaggtcattactggatatttgttagcaggatctcttattggacctgggggttttaactttgtcagtgaaatggtgcaagtatgttgtatatttcattaaaaaaaatttgccataaacatttatagcttatttattaaaccctttgtaactgctctgaatgatggtttcttgatcataacgctattgttcactctttttcatggagccttattatgaaaaatgagtgttgtttctaatctgtgttccttcatctcatttaatctagttattatgattcttttagagttcatctgaagcctaaaacaaaccacagctcttagtgatttgttgttctgaaatctatgtcttttctttctttaaaatttttaattcattcattctttttttttttttaaaaaaaagaatttttttttttaaaattgggaattgaaggtttggggcccaaaacaaaatagggcaaaaaaaaaaaaaaaaaaaaaaacaaggcaaagattttttgccccaaaaaaaaantggcctattggacccccttaaacc

SEQ ID NO: 4173 - DNA, 619 bp, Gossypium hirsutum
  misc_feature (613)..(613): n is a, c, g, or t
  misc_feature (615)..(616): n is a, c, g, or t
tttccttcaagtttttaatttaaaaattaaagttccttttttcatcctcccccattttgtggagctttttatatattgatttcaggtcataggagatgtgctaagaattcgacaaattctcaccaacttaatcaggtattgaactatgagaagtcgtgatttatgtttcaggtttcctatagactatcatgaaaacatcttttgtagctgattttttagagaattaaatgacatgtgcttagttctttttgttatttggaaaagaaggattctaacaattatgctgagaagatctttctgaattattacttctcattactttaatttcttgcatgttatgtgaacaacctttctttttcttcagcaatgccatcaagtttacacatgaagggaaggtaggagtaaaactttatgtagtaccagagcccccttttgcaaaagaaggatctcagcacgggtctgatggatcaactgctaatcaaaccacaactaatgtaccaaaagaagagacatgtacatcaacgtctcaaactagcggtgatcagagaggatttcatggtaagaaacacgaaggttcttgccaaaaacgttctcaaagtgaacccagcactcncnntat

SEQ ID NO: 4174 - DNA, 617 bp, Gossypium hirsutum
ctttgtgtatatatatacattatcaatttcaaaattgaacaaattaattcctctacaaaataatttctctctcttaactttaacatgagaatcaggaaaaacaatcaaaaccaaaattcttaagaaaaacatatttcagttttttttattgaatcatattataaaatttttcaaaaagaattttatggtcaactcaaaatttagactttcttttttggtgatttttattccagactaatttagtatcacttctaaaaagcacttttagtataaaaagcacttttaacataaaaaaaatattgctaaataagatgcttttaagctcaaaagtgcttttgagaagcaatattaaactaagcttttatttacttcttcattcatgattaaatttatccaaaaaatcgaaaaaccaaaaaagaagagaaaactccattccagcttattacacactttttcaagatccaacttaatgaccatagcacaatttttccctttcatctttttgagcaagtgcataatcttttagacaatagtgacattattcgaggagtgccttccaggaacaaaactaccctgaaatggagaaattatcctatataaaaggggccttagtttct

SEQ ID NO: 4175 - DNA, 631 bp, Gossypium hirsutum
  misc_feature (587)..(589): n is a, c, g, or t
  misc_feature (594)..(595): n is a, c, g, or t
catgtattagaatcagatcacaagtgcaattagaatgcgcataacaaattataccactgccaccactcaaaagactagagtaaacaatcatgatcaatctcaaggctaacttttaatgtgatcaacaacttaggtgactactctaatcaatttagagattacatgtaggtactgtgaccacaaggaagctgatttatagaatccattattgaaaatctctctccagttttgaaattttaaagaaattatgaaggggatgtatacagtctaatgctctgcttagttgcataaataattgcctatagtcagaattccaaaatgtcactagtaccagataaatatcctatttattacagaaatgaaagcacagttggcctaaaaatgaacaagccccaaaatttaaacaatgatatggtgcagagaaagagtaacaaaatggctcaatgaacatggcttatgcactcagatcacaaagatgcttcactttcaatgcaacaaacattggcaccaaaattctttctctagtttgctttacaacaaatgagaactgattagaatttcatcgactgccttcttgtttgttagannnaaganntcagccacaaatgaccgaaaataagaccaaagatgg

SEQ ID NO: 4176 - DNA, 600 bp, Gossypium hirsutum
ttgcgcgttcgccattgcatggatggccactttgcaacatgtatatacatgatagtttttatgatatacccaatgaaaaagtaagcatacttgtatcttctacttacagcagtggggatcttcttaagaaaaggcatagctgcgacacacccatcaaccatcagtgcctgaagaaggttactgagacgttgttctttgacttcaacaggtaaaagcccatcgatttccttatccacgtcaagtatggtgccatccacaggtgcatcaatgcagccagttgttaacattaatgaaagacaattaataatggttgccattaacattaatgggagacaatcaataatgacaaccaccaactttggaaaagtggcaagggataatttttttttggtccttgagataatgggctatttattgtttggtccttaaacctcaactataaataggccttctcatttctcatttcaattcatcccaaccaatctttctctcttagttttctttttctcccatttgagaattcttaaggaattctatttgtttgtaatactttgaagatagtaaagttatcatctggtgttagtgcccgaggacgtacgt

SEQ ID NO: 4177 - DNA, 633 bp, Gossypium hirsutum
ttgctcctctctttcagtacctgtggatcttggggctagcattattactggagttgaggctgatgtgtcaactaatagaagaccagatccatcctcattgatttgtgcacagttggggctagagttgactgtgttgaatagttcctgtcctctttatgacattgtatctggtcaaaaggttcctgctgatctggatgatgctctggaagctgaatacaatagtcttcttgatgatatggtgtttcttgttgctcaaaaaggtcaaaaagcaatgacaatttctcttgaggatggtttagaatttgccctaaaaaggcatcggatggaagaaataggagctgatattgaagaaatagaatcacattcttcagtggatgctgtctatgacttgaaagcaagcaatggaaaaaaatgttctgaaggggagattttgagtcctcttgagagaagggttatgaattggcactatgcccacttggagtatggctgtgctgctccgcttaaggaagtgtctcttcccaattggaatcaagatgatgtttatggcggctttggaggagcccattgtatgattaaaggaggttacagtaaggtggttgagtctcttggacaacgacttctgatccacttgag

SEQ ID NO: 4178 - DNA, 795 bp, Gossypium hirsutum
  misc_feature (504)..(504): n is a, c, g, or t
  misc_feature (519)..(523): n is a, c, g, or t
  misc_feature (568)..(570): n is a, c, g, or t
  misc_feature (591)..(596): n is a, c, g, or t
  misc_feature (599)..(599): n is a, c, g, or t
  misc_feature (608)..(613): n is a, c, g, or t
  misc_feature (617)..(617): n is a, c, g, or t
  misc_feature (620)..(620): n is a, c, g, or t
  misc_feature (622)..(623): n is a, c, g, or t
  misc_feature (633)..(633): n is a, c, g, or t
  misc_feature (636)..(639): n is a, c, g, or t
  misc_feature (641)..(641): n is a, c, g, or t
  misc_feature (645)..(651): n is a, c, g, or t
  misc_feature (653)..(653): n is a, c, g, or t
  misc_feature (655)..(655): n is a, c, g, or t
  misc_feature (657)..(660): n is a, c, g, or t
  misc_feature (662)..(662): n is a, c, g, or t
  misc_feature (664)..(684): n is a, c, g, or t
  misc_feature (691)..(698): n is a, c, g, or t
  misc_feature (701)..(706): n is a, c, g, or t
  misc_feature (709)..(715): n is a, c, g, or t
  misc_feature (718)..(718): n is a, c, g, or t
  misc_feature (723)..(726): n is a, c, g, or t
  misc_feature (729)..(733): n is a, c, g, or t
  misc_feature (741)..(745): n is a, c, g, or t
  misc_feature (747)..(749): n is a, c, g, or t
  misc_feature (754)..(755): n is a, c, g, or t
  misc_feature (763)..(768): n is a, c, g, or t
  misc_feature (770)..(787): n is a, c, g, or t
taaacgccgctaaagccctgagcattggcggcactttcttaaaaacgttgctaaatccccgaaagctcagaaaacggtgtcgttgggcttaggtttttttgcggcgctttctcaaaaacgccgctaaatccccgaaagctcacaaaacaacgttgttgggcttaggtttttttgctgcactttctcaaaaacatcgataaagacctgagcattagcggcgctttcataaaaacgctgctaaatccccgaaagctcagaaaacggtgtcgttgggcttaggtttttttgcggtgctttctcaaaaacgccgctaaagccctgagcattagcgacgctttactaaaaacgccgctaaatccccgaaagctcacaaaacaacgttgttgggcttaggtttttttgcggcgctttctcaaaaacattgataaagacctgagcattagcggcgctttcataaaaaggccgctaacgcccctaacgcacaaacgacggtgtctctgggantacgcggatttgcannnnnttgtccctaaggctgtccgcgacgcgaacataagtggcgcgctcnnnaaaagagagttagagccgctnnnnnnacnacagatctnnnnnncganatngnnaataaaatcntgnnnncngatnnnnnnntntnannnncncnnnnnnnnnnnnnnnnnnnnnaacaaannnnnnnnatnnnnnnctnnnnnnnccngctgnnnnccnnnnngatcgttnnnnnannncgtannacactcannnnnnannnnnnnnnnnnnnnnnnaagtttcc

SEQ ID NO: 4179 - DNA, 643 bp, Gossypium hirsutum
tgaaggagcttcgggtttttactgtaagcccttacatggagtcggtggatcccccattgaacaactcttgatccgagtggagcagccccctcttgccgatgaggttgttgaagtacttgttgtcaaaatatgttggagtctggatgtcaagcggtgacaaattgttgtcccctgacccactcgatcttgggcagttgctttgcttggttttagcaaaggaaagatcgatgttgctctcgttgtatatgcgagccctgaaagatgtgcaccttgcttgtccaattgtgtgtgctcctgaacaatttacagtatgattctacaaatattgatccaaaatacggaatataaacatttatatttagagagaggacgaacccgataaagcaaccaagtccccggtggaaagaccaagagcattgaacctggaaatgagtcggttcaagttggaagttggcgcaggaatgccattatttgcagcagcctggcttgcactcctggcatctcttcttccaagcttcacgtcccaattgggtcctcccaactaaatacatatatataccaaatgagtattattaattctctcaactaccctttccttttatatatactaagtaagagggtttacaattttaacagagtccct

SEQ ID NO: 4180 - DNA, 567 bp, Gossypium hirsutum
gatttttttttcttgaattttaagaaaactgccttcccaaaatatttgaaaatttttctgttctctttgaaggtttttcttttaaatagaaaatcttaattaaatccctcaaacttttaaaatttctcatcatactttttaatgtttttgaaaatcttaattaaattcacttaaaatatttaaaattctcattaatcttacaagaattttaaaatttttaattagatcccaattcttttaaaaaaaaattctcattgaacttttacaatttttgaaaattgtattagccctcaaaacttagttttaaaatccagattttaaccaatattcttggatccaaatcaaatcggttgaattagaaattgattaatatattggtctatacaattgactttcaattgaaccaataacaattaataaaaaaaattaaaactagaacaaaaatcgaccattaaactaatttataattttttaaaatatttttttataattttttaattatttaagtaattattattcaaatcaattgtattgaaaataaataatttttactgatttggtcatccg

SEQ ID NO: 4181 - DNA, 926 bp, Gossypium hirsutum
  misc_feature (238)..(238): n is a, c, g, or t
  misc_feature (332)..(332): n is a, c, g, or t
  misc_feature (406)..(407): n is a, c, g, or t
  misc_feature (577)..(585): n is a, c, g, or t
  misc_feature (647)..(647): n is a, c, g, or t
  misc_feature (834)..(834): n is a, c, g, or t
  misc_feature (898)..(898): n is a, c, g, or t
  misc_feature (922)..(922): n is a, c, g, or t
cacctacaaccttttacattcacttatattattttggccgaaaacaactgtttttatgatcatgtttttaatatattaataattgcatttttctctaataaacttcctataaaatcttttaaccagaggccaattgcgctcagaaatttgtaattttgtgatttttttttcttgaattttaagaaaactgccttcccaaaatatttgaaaatttttctgttctctttgaaggtttttnttttaaatagaaaatcttaattaaatccctcaaacttttaaaatttctcatcatactttttaatgtttttgaaaatcttaattaaattcacttnaaatatttaaaattctcattaatcttacaagaattttaaaatttttaattagatcccaattcttttaaaaaaannttctcattgaacttttacaatttttgaaaattgtattagccctcaaaacttagttttaaaatccagattttaaccaatattcttggatccaaatcaaatcggttgaattagaaattgattaatatattggtctatacaattgactttcaattgaaccaataacaattaannnnnnnnnttaaaactagaacaaaaatcgaccattaaactaatttataattttttaaaatatttttttanaattttttaattatttaagtaattattattcaaatcaattgtattgaaaataaataatttttactgatttggtcatccgctcaattttaaaaaattgtttttaacttcaaaaataaaaattttgtcactaatatatctaattattatcatttaataattttatatatatctgaaacatttatttttncaattatagtggtttttttaatacatttatcatgacattatcttttaatttttaaatcatgttnatagaatccaagctcattttgttngtaa

SEQ ID NO: 4182 - DNA, 644 bp, Gossypium hirsutum
ggctaggccatagtctccaagtagcagttaacacaggggcatggagcccaattcgactatccagatcaggaccagccttgtcacatctcttatttgccgatgactttgtgatattctcaaaagctgacataaaacatagcctcctactaaaagaaattttggaacgtttttatagatactcggggcatcaaatcaacacacgcaaaacaaatatcttcttctcgaaaggcgtagatgagactattacttaggaatcccactcctacatagtcaaatcactaaagctacattagagtttgttattgaaaaagttagagctaaactttgcaactgggatgtcaagtaactatcgattgcaggaaggctcactctagccaaatctgtcattctctccatcccaaattacttcatgcaattcatacaaattccaaaaggagcatgtgaagaaactgaacgattggcgagacaatttatatggggagccaacacaggaaatcgaaaaatagccctagttgattggaattctatttgccatcctcacaaaactggaggattgggcattcggcagctcaaagatcaaaatgcctcttttcttctaaaattaggtttcaatcttatttctaaaagggaatccctgtgggtac

SEQ ID NO: 4183 - DNA, 573 bp, Gossypium hirsutum
acccgggttcgattcccggctggtgcaattgttatttcagttttacgatattttgtcaatgaaactctcttacagtttctgacatggattttgttttatcaaatgctggctcttgttttcctgatctgattctgtagattttataccatactgcattttcgctagcatttattttatcctccttcacctttgggtttttcacgttattgagtttgacattagagttgatattgggccgggccgggttgggtcgggtctaagtaaaagtttaggtcaatttgttaagtttagtctaaaaaatgagcttaaaaatttgttcaagtccgactcagataaaaatgctaaaatttcggcttgactcgacccgctcatattaattttttcaaattagaaaatgtctctaaactaataataaaattaacaataaaactaatgttatacaatatccaaaaaataacaacaaaatagtagcaacataatagtgaaattgtagcaaaatcaagataaaacaacaagaaaatatcattaaaataacaaaaaaaatagcagatttttttttcatttaggaatcgg

SEQ ID NO: 4184 - DNA, 617 bp, Gossypium hirsutum
tatttcttttgtattttgtttcttttatttgtttcaggcaaagatctcgatgctgttttgaaggcaacactggtattacttgagaaagaagctaggattatcatagttcaaatatttcaaggccttgtatacttgaataaaagagcacagaagattatccattatgacctgaagcctgggaatgttctctttgacgagttaggtgtagcaaaagtgactgattttggtcttagcaaaatagtagaggatgatgttggatcccagggtatggaacttacatcccagggagctggaacatactggtgagtaatgcagtttgatgctcttccttggaaccttgaatttgaaatgtctaagccttctgctttctctcctcattttttctgcaatttcctcatatcttataataattttctggccttaagaggacttgagtaaagaaaactcttaggttctttgtgctgtatgttattgaatttgatgatgtagaaatgattagatgattttgaaatattctcagaaacaagagggctgatgtcatgagaacaaattttgtaaatttatttatgagggtaaattattggaaaaaaaaatctccttttctgtggttctgatcc

SEQ ID NO: 4185 - DNA, 621 bp, Gossypium hirsutum
ccctctcacttccgccgccctaaaccacactccgaatgcttcttaccagaagcggtagtcgcaaatcgtcaagttgccgggaaatggtgtatccacagagtttcttcggcatttcaggtgagaaaaagaagggcgacaaggatttaagtggtcgcactttgaaggatttattcgtatcatcaggaggagaatacgaggaggaccaaggaaaagtggtgaaggagaaatttggcgggaagggggaagttgaagtggcgacgaaacttggcggtgtgaatgggttgggaggtgaagcgggatcggcacgggcagggtggattgggtttaggcataggatggtgttgaggaaggcttggcgtcccatgcttcagaccatccctgagtaatcattttatttgggtgaggcgtttaaatctcttcttaaagccaaaattttgcttttcttcttctctctcccttgtatccaaatgctgggcttcagattgatatattgttaaaagatgacacgtgtgatgatatttacatttttttttagatattaaatgtttgttcttattttaatttatcaacattcacatctgtgtcaaacctaaattttcaaccttcacataccctgaaaaa

SEQ ID NO: 4186 - DNA, 579 bp, Gossypium hirsutum
  misc_feature (516)..(517): n is a, c, g, or t
  misc_feature (547)..(549): n is a, c, g, or t
  misc_feature (571)..(573): n is a, c, g, or t
aattttgcttttagttcttgtgttttgtgaaagttgtgaatccctatactttaatttaatcaattttagtttttatactttttcaaaatgattaatttttatattaatccaaataataatagttaaattcgtttgagtaaatttaatttctaatgatgcaacatgcactatgcatacaattaggggagatatcaattcgatttagtcgggttttttagattttatgaatcgtacatcataattctcaattcagttgggtcaattctcgattttcaatattaatttttagttttagatttttagagttattttgatcaaatgtgctttgttttatgcttttaaatattatttgactaattttttttaaaaaaaatataaatatttctgaattttctttttaagaaattataaattattttcaatattttaaatataaaatatttatttctatataataaaaaatttaaaaataattatatattaaataaaaaataaaatttgatttgatttgatttnnaggtaacttcgatttttaaacttgtattcnnntaaatcatttaaacaccttagnnnagatcg

SEQ ID NO: 4187 - DNA, 613 bp, Gossypium hirsutum
ttatgttgtagtcagatatgattttactttactctttgctcttaatgtctagaaatttcgaagtagcagatatcaaaataaaaactgaaaagcgcttaattatcttgtcttgaaagttttctccccaaaatgcgttggactacttaaaataacagtggcttgctgcaacaaagaccgaagatggtaccaacatgtttatatttgtttataaaaggcattacaggcatgaggaagtttaatagtgatagcttaacacagccctgaagctctttctgccttataagtttctaaaatttagtcctactttgataatgtggtgcataatttattgctaatcatgcaaaagggaaagctgcataaaacctatgtttaacataagaaacctaataatttctccgatttggtagaaaagttatagacctagaagtttatttaatgtaacgcttaaaaatataactaaacactcataatctatgttgatacttgaagtcattatttttaaatgtgctcgtgtttctatgaagacttcattttagatgtgctttttgtatgtaacctattagacattagctttttaagaattggttctgtctattcccgtcacaatattggc

SEQ ID NO: 4188 - DNA, 628 bp, Gossypium hirsutum
acaatcccagagcaagacccgtttgaacatcagtgatgttgttacagaacgacaaacaaccagttgcgtaacattgtccgtagaaatcttgcacgacagcatacgtgtcgcaaccgattgcagtaaacttgttcttgttattgtttattgaaaattcaaaaaatcggaagtcgtaaaataaccaattcctgtatgatgtgttgtaacaatcatagcttgtattacaaagggtgcgcaactgaccatcggtagatatgttgatgacttcgaagtcacccaagaacggtttgtggggtatgaaactggtgtcacagttgatgaaaaagcctgcagtgatgttgcaatcgccgccggtaccaaacgggtatgggatgataacatctccgcagcgccttcggcagccaggttttgctaccgctggtgttgaagcttttaccgtcaatataacattaagcaagattatcagctgcataagcactagtgatctgatggaacccatggatgttttttctagactgggggataccaatgcttcaatttacaaattcggaaacatataaaaaatgttagggaagcctgcttgaccttactaaatactaacaatagggaggatgtaaagtgacccaat

SEQ ID NO: 4189 - DNA, 615 bp, Gossypium hirsutum
ccgcatctttaaatgttatacatcaataatctaatccatgagcatcagcagttaacattcatccaaaagcatgacttatttaacaatttgatggtggccaaaccaagcatgagttatttaagaaatttcccctaaaacaccaaccttctctgccaacatatatttccaataaaatctccaattcatgaatgaacacgcagttacactccataacatgatgcccaatccctcttgcaaattccaattccatatatatatatatatagtaaaatatctaacttgagcccaaacattcaattttatttaaacagtaaccaagctaaagtttcatttcagaaaaagagaagagcaattcagccttaaagaaataaaaacaataaggaacaaagaaaccaggctttaaattaccaagagcaattaggaaattaaaaaaattaggttgataccaggcctatcttcagtggcagaggcgcttctggtttcactgaagacttgttgccgattctctttgacatcatcgtcaacggcagcgaaacaaacggctgttctaaaacctttcccgcgccgggaagcagcgaattccagcttccctctccttgaatgcctgaatttgag

SEQ ID NO: 4190 - DNA, 618 bp, Gossypium hirsutum
  misc_feature (611)..(612): n is a, c, g, or t
tatgttctatattaacctgttgttttgcagattccgaaaaacaatatctaggtgattcatggactataataaactcttttaattgaagaaaacgaagggggggaggggaagttattattctcacactgaacaatatccagtctattagaagccacattcatatttcctgaaatatcattgactttcccttcaggaatagaaactgacaccatattattagttattgccatgacagtaaaggagtaaagagctcttgaaagttccttaaacctacatgaacaaaagattatgttaaagatgcatcactagaatgacacgattgcttcaggtactgcatgcttgggatattcatatgcacctgccttatgagtctccctccattcacttctaccacagaggccccgaaaccaaaaactggctttgtgaactcaactattatattgatattggagtcctttgtaacattttccgaactcgtacttaacccaatcccaggcttcttgcaatcttagaggaaaattcatcaattagctctcaaaaaggcagtagggacgagagtgtaggctaagaacattttgaaagtgccactggcactttcggagccaaacaannaagaaa

SEQ ID NO: 4191 - DNA, 613 bp, Gossypium hirsutum
  misc_feature (606)..(607): n is a, c, g, or t
gctccactcttaatgtgaggtgatgaaccagaaagatatcccattatctgaaaagtaagcaacatatttggtcattagcatcactgatagtcatccgttggggcaacaagttgacagtaattgtttacaaatgcaactatccgaaggaaattgggacaagttaaaagcagcataaaatttagacagtcatgtatgtcctaaacataaatgatgaacataaaaaacaacaaatatatgtccaacttgggttagacatcaacattttggcctccagggatagtttctaacttccctacttttatcctggaattctcatagcactctaaaactcaattgcctgaaaaagctactgcttcgagactactacttctagacaatcataaatgattcattatatagatttatgacataattctttacaacacttaatgtcagggtaatgaagtctaacacatttaaaaaaaataattacaaaatcctcaccatgctaatcagtttgtgatagggtggatcagattcgagatctgacgactttcttaaggtagaactcatctttagtaatatatcgtaagttgttttccttgtttcttcctttccctgcctatnnactcag

SEQ ID NO: 4192 - DNA, 702 bp, Gossypium hirsutum
  misc_feature (619)..(624): n is a, c, g, or t
  misc_feature (627)..(627): n is a, c, g, or t
  misc_feature (629)..(637): n is a, c, g, or t
  misc_feature (644)..(648): n is a, c, g, or t
  misc_feature (651)..(654): n is a, c, g, or t
  misc_feature (663)..(669): n is a, c, g, or t
  misc_feature (671)..(674): n is a, c, g, or t
  misc_feature (676)..(676): n is a, c, g, or t
  misc_feature (678)..(684): n is a, c, g, or t
  misc_feature (686)..(688): n is a, c, g, or t
  misc_feature (697)..(697): n is a, c, g, or t
cggttcgcagagcgagagtgttttcgccgggaggttgccacctacgaccacttgttgtgcgcgtccgacctggcatggcgctaccactctgggaacccgcgtcccaaggggcactcgagccgaggccgggtgacaaaccttggctcaacccgggaagaataccgacctgctgaggggtctgttggctctggatgtacaacactttgtagacttctccggaaggcagccttccctcaacagtttcatatatctttcatgccttatttggttcatctagtcagttgtattatgctttatttgttttcatttcgcttttaatatatctaaaatttaatatttaacttttaaagtttgaacaaccctaattataaatcccaattggttagcatctgttttctttatttgaaagtttggatgaagtttacctcactactatatggtgttcttttggtagttaataattttttggatattttccagtaatctgattgtcagaatgagaatggaaaattaacttcttttgatgcaagaacctacttcttttgagcagtttagcaattaacttgtttcataacagcctattatttgctttatttttgcagcgatttcacctgttatnnnnnntcntnnnnnnnnnaaaaaannnnnttnnnncggaaaaannnnnnntnnnnanannnnnnnannnaaaaaaatnaaaat

SEQ ID NO: 4193 - DNA, 617 bp, Gossypium hirsutum
atgctttgattgaattaatggaatataaatataattaggttaaattatgttcaagtcctttaattcttagtacatttggaatttaatcattttacttttatttttaagaatttagtatttctattttttcagatttaaacatgcaagtcgttagcatggttaaaagccttctattaaatttttgtttattattacatcattttattagttagagttttttttaatttatattttaaagtgtcacatcaacgattttagtaaaataattttaatggagttaaaaattaaatctgaatttttaaatttaaaaagtagatggactaaatttttaaaaataaaagtaaaaataggatgactaagtttgaaattgtaaagagtacaaggacttgaagcatattttaaccatataactattatctatttaacttataaaatgctgagttggtgtgaaaaattaattaaacagttgaaaaaaaattaaaatttaaaaacaaaaagtctgtaattttgaataattttatttatgtaattaaattatagagttgttaaaataaatgagtgattaagttgagatttataggaattgacattggttttcaccaatcacgagaatgttt

SEQ ID NO: 4194 - DNA, 612 bp, Gossypium hirsutum
atatcattaacacattatgacttaagatagaatcatagttcaaaaaaagttagcccaacaaataaatttcagcaaaataaccaaactcgagcagctgaacactgccatttattttactatacctccagctgagcaacagactaaaaagatatataatatatatcaataaattaaatatcaatctcaccgagattataacttaagataaccaacactacttaactggctgaactcaatgtgatctcaaatggaggatacttatagatcatagtagtcggtaagaaagcattcccatttgaattattccctaatcgttgctcttgtgttcctagaattttttaccatggcacaaggatacgaataattgccttcaacttcactttccttacttaaattaaatccaagccaagattgaaacaaaccagaaaaaagcgagacaaaatattatctcagttaaattcctcaatgtttcttcatttttttgactaatcaacataatctagtttcatcaaatgaaatgctccgtttaacacagtaaagccagtttaagctcaaaaattaccaatttatcctctaattcctcaagtttacatctcaatcctacttaattcg

SEQ ID NO: 4195 - DNA, 648 bp, Gossypium hirsutum
  misc_feature (51)..(55): n is a, c, g, or t
  misc_feature (622)..(624): n is a, c, g, or t
  misc_feature (636)..(639): n is a, c, g, or t
catctcagggtcaggtgctgatgagcacattgaactatccatgtggctaannnnnttatagccctggcacaatgatgcattaattatcaggggcgcgctttaccactgagctaatagcccgttgtgtgggcctcccattgggggccgctatgccaaaagcaccctccattatagggacttaatcaaattttaccttctattaatagattaatttagtccatgtattattaaatagaatgattattaaattacataaatttaacctataaatattaaatttaaaatttcataccaacaaaatcaaaatttacatataataatatataaaagaattataatgcattggaaattgaagttttaattaagtcttaatatttgaaacaatgatgtataacattagtaaatcatgtgataatatattatctaaaattaataaaactaaatccatttaacttcattttaaataatgtgtcgtcatctactttattgatcgtattattgtggtcatcttcttaatcactccactagaaggatacatatcatgtaaacaaaacccatcttccagcttcacatattagggttcctatcaaactccgttctaattactatcgattccggcttnnngcaagctagttnnnncctgcaatc

SEQ ID NO: 4196 - DNA, 619 bp, Gossypium hirsutum
  misc_feature (615)..(616): n is a, c, g, or t
gtatctcaaattttctacttagacaaaatgtaaatggcggcttttctcttactatgatcaccgaactttactgttcttatcgaaaacctgatcttctaatgcataatgttgttggttttgtacaaaacattactatgcatgaggtttgcttgtaaacggaggcaatgatacaagttacgtgggtgagtttgctatatcttgtatgcatttccaaaagattattcttttggttttcgactggttcattatagtgcaagtcgatattgtaccgacctttgaccattggaaaccactttatcagcctgataccagaacagaactggtggaggcattctgaatctggaacgtgttagtttaatcagtcctgatgttttcctaatccatgaaaaagaaattagcctaacatgctcggtagtgccatctaataacaaatgttgtaactcgatactactttgatatatttttatgatttaaatcgagcaataggttaaaatgtgttgtattttatctttccaactttcatccgcaatccgtttacttgatatttctaaattttgcacacttgtacatggtattgcagtttaatagcatgaatgcaaatcggttatacattanngtc

SEQ ID NO: 4197 - DNA, 600 bp, Gossypium hirsutum
gttttcggaaagtcataccaacaccagctactaagttttttggtgttctcatgtgctgtggcatagaaaataatggtggccacactaagaacataaaatctcaagttcaaatgatggcatacaaaaataaagacaaaatagtactgaagcaaaatccttcatcaagaaagactaaatctttgcacccttcaggataaacatggataaagcattcaactactccagaaaaaccattgactctgaaaacagaaaaaaaaattataaaaggaatgaaaattacctttgaggcatcgttctttgcaagcaggcaagtaagagtttgtaaaacaaccaaaaccaacctctcttcgtttgcttcatcaagattgccatttagcaaagagactacatgcaaaaagcattctccatctcgaaataaaacctggtaatgctgatgaaacatgaaatgcataagatatttgtataaaactcaatggccaagcttccaaatacgcagaccttgggaaaaggcaagtcaaggtgagcagttcatggaacataccagtggatcagtctggagtatatctatcattccaatcaatagcttaatagacaatcagc

SEQ ID NO: 4198 - DNA, 615 bp, Gossypium hirsutum
tatgggaagcattttacttgtgcagcgaggggagggagatttattggtggcattgctaggaatgtccaagttcacactagcagccatcctggtttagttacatttacaacacggacatctttgaaacatttttgttccgtagtgtgctttgagttccctgtatactacgttagattgctaacttcattaaaagtactctgtttctgtgatgatgttttttgtttccttcaatgaacaccctggtttagtaatttgtttctactccattcattgcttctctggtcctggaactcaaaaattcatagaatgatctacttccttcagtgcttgaatatcaagagtaacattgggaaacctttttgtggtgttggtagactaccttccaccaccaaattaatggggggcagctgaagaaaggatatgctggtggaatatgccgaagtaccttcatgtccatatcaaacatgttgcacaacaacagcacaataaactgagattttatttatttatttttgagatgaaaggataatgaaaaatgggtacactaaaaatctttttttaagtaaaaggacaatgaggataaggtggcagtctaaggcaggatctccaacaacc

SEQ ID NO: 4199 - DNA, 832 bp, Gossypium hirsutum
  misc_feature (344)..(344): n is a, c, g, or t
  misc_feature (384)..(384): n is a, c, g, or t
tatataggaaactttccttatagttaggatgtggctaattgaagtcttcatgtgatggtagcaatagtgtaaccacataggatgtggttggattaaccagtaactggtctttaggttgaccaataatgggaagcattttacttgtgcagcgaggggagggagatttattggtggcattgctaggaatgtccaagttcacactagcagccatcctggtttagttacatttacaacacggacatctttgaaacatttttgttccgtagtgtgctttgagttccctgtatactacgttagattgctaacttcattaaaagtactctgtttctgtgatgatgtttttngtttccttcaatgaacaccctggtttagtaatttgtttcnactccattcattgcttctctggtcctggaactcaaaaattcatagaatgatctacttccttcagtgcttgaatatcaagagtaacattgggaaacctttttgtggtgttggtagactaccttccaccaccaaattaatggggggcagctgaagaaaggatatgctggtggaatatgccgaagtaccttcatgtccatatcaaacatgttgcacaacaacagcacaataaactgagattttatttatttatttttgagatgaaaggataatgaaaaatgggtacactaaaaatctttttttaagtaaaaggacaatgaggataaggtggcagtctaaggcaggatctccaacaaccacaaacttatcaacaactcaagacttgctttcttccctagtggatcccatcaacaattcttggcttcatatatagcctttttcgaatggctac

SEQ ID NO: 4200 - DNA, 535 bp, Gossypium hirsutum
caatgcagacaagaaagatgttgattgaacagcacctttaacggcaagccaacaggcacgaccaggtgtatccatgaactagaagtgtacaatgatgatgcaaaattaaaaaatgaaaaacaaagataaattccaaaaaatgaaatttcattgtaacaacatctacgcatagctagaaaatatgtaactgtatatatgtgtaacatatgctcaaaaaggaccaaaagaaacctgtaaaatcaactacaagagattttgtctcggttacaaaactgtcaatcggttcttcgattttatacagcataactgcttttactcaactactcaactataggaagattaaccaagaaaaaaaccactcaccaacattactataccagacatttaagtaatacaatattaactaaaccggcttgacctttatctcgagacatccaaacatcgaagctaaattaagaaaacagggaaagcatgtcttgagatcaatctcgagacataattacttcgaagcaaaaaaaaaaaaaaaaaaaaaaaa

SEQ ID NO: 4201 - DNA, 590 bp, Gossypium hirsutum
tgaagggtgaaatgatagttgaaaagaaagatgaaagggtggttgctgtttttagatttcaaggtgagtaaagtttggtagaattagtggaatcacaataaccccataggtatgcatgaatacccaggtagaccaccttggctttgaaggagtcaggctagtctcatggaaaccccttgatctatgtaaaattaattaggtttataaggtgtgcaattactcaaaattgcaactctgcccctgaactgccacaaccctcttaagattttaagaaatgctttctgttcttcttggtagttgttttacagtcactgttcggtttcattattgtgttttgcttgttgtccaggtggtgggcagttgtatatgtggggaaaaataaagaatgctggtgatgactggatgtatcctaaaccactcatggatttaaggtttgactgtgctatgatgattggttgattttgcttacggtttcagtatcagcattattctgtctcggttactgctcttttgatgatcatcaagctttgcatgaagttttcttaatataatctactgtttaacttagcttggaagcttctattctcttg

SEQ ID NO: 4202 - DNA, 602 bp, Gossypium hirsutum
atagtggcaacaaattcatctgcagatgaataataaggcatgtgtatctctgttcattgttttttatcgtaaagaaaccaacaggcatttttcaaataaattaccgtagatatttactatcgtttttctctcagcattgatgacaatgactaattaagagatatttggtattaaattattgtcaaaataacagatgtcgtctatgaactggatgctgtggtataaccaaatttaaatgcttgacttgatggagctaccattgactaataatttagagattatataatttgaacatagacttttctgtaattgttcttttcataatatgcaaaatagtcaattatgttaaaagaaaatatttatccacaacgtctttcattatttgcacaatgtaaagttatacaaatcaaagattcccaatacaactgacctaatactcaatcatgctacacgctttctgcctttataccgttttgggtcagtttcaacgataaatcacccttcacccgcccatggtttcatacatagggatgtgaaataagtggggaggtgcggagaaatccccgtcaagaatttttatctctattttcactctggaacct

SEQ ID NO: 4203 - DNA, 607 bp, Gossypium hirsutum
  misc_feature (34)..(34): n is a, c, g, or t
  misc_feature (505)..(505): n is a, c, g, or t
  misc_feature (517)..(517): n is a, c, g, or t
  misc_feature (526)..(526): n is a, c, g, or t
  misc_feature (543)..(543): n is a, c, g, or t
  misc_feature (551)..(553): n is a, c, g, or t
  misc_feature (566)..(572): n is a, c, g, or t
aaagcttctacaaaagttagaggctcaaaaggtngagtattctgctcttgaggacaagttcattgaactgaaggagaaacaaaagtcatatgattccacattgaaagtggtgaataaatgttgggaagcagtaagcccctatgctaactgttagacaattttatgcattttctgcttattagaaaagatggaagttgtacttgtatcttttaggtctttgttttatatggaaattgacattaaccttttacaatagctaattactgacttggaatcacattccaccaacacaagagagtctatcagacaagttgttggacgtgcagccaatacaggtgaggatcttctgccaagttttgctttcttttattgttgttatgggcacttgtaatggactgttaacagaattccaaggaccatgctttctttcttgttataacttataatttatatggttgagttggattttttgtttaattcttctggtgtcatatatatgtgtgtntatgtatgtatntatatatanagagagagagagagacntgctttgnnnttatacttgctgnnnnnnnttttgtggcaccatgtatatgaggctccttctcct

SEQ ID NO: 4204 - DNA, 627 bp, Gossypium hirsutum
gaaaagtgctgatgtgattgcttaaacttgtttatttaattgatgaaagaacaccaattagcgtttatgttagtctaatccatattttgtctggtttgtagctggaaagtacgaaatttagagctaatagtgctcagaaggaatcagagcttttgaaagagcagctacaggatcttaagaaacaacttaatgaggtatttcttgtgtcctggttacttacagtttacaatcttaattgattcttgtacttgattttgactgcgtatcctcttgcaactttaacactcatattttctattatcaaatcgcttgttagcttttttgttttgttttgttttgtttttgctgaattactttggatttttggtgttgtcatgaatttatcttatggttaaatgtctgattctttaagtcttactatttaagatgctacctatgcgtatcttgcaggatgtagtttagaattttgtttttgtttgttcttttttttttaaaaaaaaatgcatcatacattctgtggttttgcagtgtttgaaccaaaagagtgaagtagagaaaaaaatgtcaagtttcacctttcaagaagttacttcctccgagagcagtattttaattaagcatttgcaa

SEQ ID NO: 4205 - DNA, 617 bp, Gossypium hirsutum
tattgtcctctggggcacacttgtcaaccaagataggatcatcggcacataggtcacttccaactgaatctatatttccagtttcaagaccatggctggacatcctgggatcatcagaagccatgcttgttccatctttgagtgagtcattatcacctgaagtgggaaacaagctatcatgaatgcgagaccacggatccttttctaacattctgttcttggtcaaaatatgtaagcctttatcatgaatgcgagaccacggatccttttctaacattctgttcttggtcaaaatatgtaagcctttctccttctccctcaaaataccaaatttcttcctactatcagcatcactagtaactccaagcacttcatatcgtggtttttttctacctccatattcatcagcagtatgaggcactatatgatcatcggtagcaccaaaatcatcccaaacattatcttcaagctgtaacatcaattatacaagttcagtaataatcattcttcaccaaaggaagttcaaaataaattagaggggtcataggttttccatcccttcactagcacaacacaattcttaaaatagtaatacaaccaaaaacattaaagtagct

SEQ ID NO: 4206 - DNA, 610 bp, Gossypium hirsutum
ttatggaaacactgtctgaacccacagttaaatcaatgcataaatccagttttccaaaacttgtcctctgctacccgtggattttccaacacgtatttggacatggggtatgagaatatgattttccatatatatgaaagaacttgacagaattcaagtctctcatgtgttggacacacataaatatccgaaacagacactgaacctcaagtccggataacataaaggaagcagattagagcatatgccgttatgttactctcatcggtagttcatccgactgcatataaaatgcgacgaaagcatatcgagggaatcgagtggtaccttatggaattccaatgtgtccccctttgctttccgcaactcgaccatatgtaaagaaggtgccatttgaaatatctgattgacataataataacaagttgcgtaactgcaaaaatgtaagcctggatttgaacaaaaatgttggtgtaagttacctccgtcgccacgttaaggtttcctttcctcccggcttttgaactctcgagtctcatctaacataaaatcataagaaataagtgaagtcagtatagagattttgataattgccttcatagcatgtttc

SEQ ID NO: 4207 - DNA, 640 bp, Gossypium hirsutum
gccttctacggtgctcatgaattttccttatggcagcacatattgcttcatcacaggtctcgatctctttgctcttctctgcatttgacaaaagagcagacaattccctctgtatggggaagggcaaatcaactaagacatcatagcatacattcccaacaggactattccccgaaagcttgaccttatgctccaaatgtatgggtggtggtcgagacaaatgctgtgatatcttcagtggaaccatggtaaattttactttttcttccccaaaaactttatgaagttgtgcgtcacaattaaaggaagtcggatcatttgggctctgaagttttctagccttcacataatgccaaattgcagcaataattctggggcgcgtatcaacttcaataccaaggacttccattaaagcagaagaaagcttaaatttctcaggtacataattcatttccagccgtatgttcacagtgaactccttatccccttttctcttcacctcaaaaccttcattaggtgtcggtgatcgagcatgctcccatataatgatatgattatctggatatagtttttggtccaatgaaattgtcactctcttgaagaaagatgaaaacttcgggtataaagggtttgttctttg

SEQ ID NO: 4208 - DNA, 561 bp, Gossypium hirsutum
  misc_feature (541)..(547): n is a, c, g, or t
  misc_feature (552)..(555): n is a, c, g, or t
cttctttatgaagcgtgcgatctcagtagcctcggtgacatcgaagaaatcgagggctttagcagctacatccagagcaacctgctgcatggtttgaagcatatcggtttctccgacgactgccttgccttccagcatggctgaacctgcaacaaaaaagaaaaaaaagaagaaagctttgagctgattgagtgaagcaaagtaaagctctctttatactgcgatatatggattaaatacaagtggtggtggaggtaattctgagctgggaataaaagggtaaccacgcaatggaacttatgctgatgagtcatttggtagtgcagaaccagaaactagtggaccattttgattgtagattttgttatagtgagccactactttggagaacagctcatggaatacaagggaattgggagggttggttttaggttagtcatgctaaaatacaacaccatggtggtccaatttagtgcatacacatggagttctccttgtggctaggagatactatttatttgtctacttctggaaagagttnnnnnnngggannnnaagtga

SEQ ID NO: 4209 - DNA, 620 bp, Gossypium hirsutum
gggagacttgtcagaccttcaaacctttagtgccatcacttaccttttctgtgaaggaactacattcattgttgaccacacttgcgcgaactgctagtctccatgctgggaacctgcataaggtacaatccagtttcagtactattaataatgatttagattatatgaactatagtatggcatattgatgataccaagagtaataataattcttgctcactttctctccaggctcttgaaggactgggtgaaagccaggaagtaaaatcacagagcattagtttgtcaaggccagatcttgccagtgatgccactgaatatgatgaaagagggggtgagagcatctcaacatcaggcagtgggagccccaaagatattgttggtctaactgggctttctttgcaagagaaagaatggatatcaccaccagatagcattggcactagcggtatggaatctagtattacctcaaatggtactagtctttcagatagcatcaatgacccagtagtagagatgatggaaaagatttcacttgattctagtcagaaaaaggataaaggtgatccaaattttgttccgtcttctgaaagtgaatacgatgaaatctcacgttgtgg

SEQ ID NO: 4210 - DNA, 633 bp, Gossypium hirsutum
aactattatttaaactactaatttttctttggaaacagttggctaccaattagataggaactacaatgcaggattcctgatagatcatctatgcccactcccccatgctgtttggtttgggtcaactgattgtattgaattcttacatataactaactgaatgggtagcacactggttgaaatataatgaagaggctttctactacatcaaatgtgctgttatcttatggcaaatacagaaataagttgtgctttttctggtgaacaaccaactcctctaacgctgctacactgctcttctatactctgggccttccaaactaggcaaaataagattggaagcattatggatcaacggcctgctaataatacaggattcatcttcaacctatcttcactgtcctttgctgctggatttgccaaccaacttttttcttgtcctcttatactcagttcttttgaattgaatcagattcatctatggaaattattggactgaaaatcaatcagaatattgatttagagaaagatataaactaagttaaaaattagttggacaaatgatggattgattcaactaatttttttatttttgtaaataattaaatcgattaaatcaacaaattggtaaac

SEQ ID NO: 4211 - DNA, 616 bp, Gossypium hirsutum
tatttttaaatggcttaattcgatttttaacgtgatcatcgaatatttttttaatattttttcataaatcataagaaagaaaattatttgttgggctctttacatggttggatattagctgtcaaatattaagaaagagcaaatcaattcacatatttttcattttctttttttttcctcataatatttataatttattgctttaaaaacctttttttaaaaaaaacaaagcctttccctttccatatagatactctcccaacttcttcgagccttcatctattttgggtttaaggcaaaaaataaaaataaaaataaaaaattcttcattaaagttttcaacttctttcaatactataaaaagtttcaatatttaactaaaaaaaaaaagtttggtgttttttaatgctatggtgaaaaaaaacaaaaaaaattgccttttggactttgggtttttgttgaaaaactgaatcataaagccttaaactttggctttcacatcaaaaaaaaaaagggttttttttttttttcaaactttccccttttaaaaaaaaaaaaatttttaaatttttggtttttgttttttttgcaaaggggggttttttttttttggggg

SEQ ID NO: 4212 - DNA, 626 bp, Gossypium hirsutum
ttttttactatttgttttcttttagagttccatgatgtttggactgaaatcaagtttattgtatatgcttaggcaaacatgagcttcaggtttagttggccaccttaagggataaatatttattggtctctctaataactaagtgggtatttctgtgacaactatgggaggatatatgatattctaggatgtggccagactatcaaatatgtttcattcattgcacactcattgaataggacaggtgcagcctgtgaatttcattccagaatatctcctcacagcatcaatattgctgatctcccttgtattcagcattatgcatgctttgtacgtagaattttatttgagtttactagggctgtcatattccttttcttgtttgtactcttaaattaaagctatctttccttagaacatcctttgtctcttctctaattatatttcatgaatatttgtagttaatagtttccatttttttttggcatgttataatgttgaaaaggcattcactggcaagtttcataattaacatgttctgacagggttatggagtgaatcaggggcaacatgagcgtggctttccattagttgatcattgcaaagactcaccttcaggagtccga

SEQ ID NO: 4213 - DNA, 616 bp, Gossypium hirsutum
acgctcgtagctgacggttctcacattcaagcaaagcctcaaccaatcgttggaacggcatcggctccgatgaaagagatgcgaggaaacaacagtatcaaactcatatggtaaacctgcaagcatgacctgagtcttctccgcctctggaattctcgtgccagaagcttccaaaagagcacacaaatttttaatacgagccacataattcttgacagaaagagtacctttctttagcgagtgtaactcgtgatgagtccaggactacttagcaccagtgttggccgcaaagagactcatcgctgtgttccacacatcgcaggccgatcgagcatccgtggaggaagaaaaacacgaggtactagtcgtggataggagccacgaggtaagcaactgatcttgttgctcaaacaccagtgcagacggattagcaacgagggaaccgtccgatgattgaacgaagcgtgacggctgaggtagagtgccatctataaatcctattagaccataaccacctaaaattaaacgaacctattgtttccattggatgaaggtgcctttatcaagtttcgcaacgtcatgccgagggaaagaagtcaccactctatcgccacta

SEQ ID NO: 4214 - DNA, 620 bp, Gossypium hirsutum
  misc_feature (8)..(8): n is a, c, g, or t
tggtgatnagatccatatcaatagttcctttaaagagaaaggaacaaaaggaaaaaatggaaggattcattagattgttcttatggggaaaaatgaattcacaataaagaaccatggctgaaacattacctgtggagtgatcagttgctgattgctgcatagcaacctccaaaagccggaatgcctcagttacatctcgcatttcaacctacaaacatcagaatgggttgtcattattctgttcatagtgaaatcaatttagatgttaagataaatctaagctgacttaactgtttccgagaatcgaatacgagccaaggcttcactaaggcgtatcagactctcaatttgccttggtgttgctgtgatgacctgttgacatatcgaaacacagcaaaagggttgaaaaaagttagcaagctggtatgccttagatcatgtacttaatccataattaatcaattcagggcggcatctttctagcaatcaatgattacacagaaaaattactaacaaagaaaagaatgggggagacaaaaagtaaatgcatcttacctttttactgctgcctgggaaatttcctcttttcctcatttcaacatatcctcgggttagctctt

SEQ ID NO: 4215 - DNA, 608 bp, Gossypium hirsutum
caatcctcctttgttctacgcaatttgaatcatgacagacacctcctccgatctccaaaaatacggcgtgccgttttacggagccggatgggttccttacaaccacatcaaatccaagctcgcctcacaagaaaagattgaagaggataagaaagaagaaaaagatccaactccatccaacgatgacgagatcactacacccctaaactacgtcgttctcgctggcggtggcggtgaaggccgtagtggcattcccaatgcaatcgttgtttcccacgttaatttcacctccaattctctctctgatcaacctgtaagtagatttcgaggatttcaatttagaaattattggaatatttttagttctttggttgacgattctagaagtatgaaatctagatcttgtagttcatttattttgaattaaggaaatgtccttaaattctgattgtaagcaactacttcttttttcttctttcgctcaaggattatactaatgtaatatatttttagataaattttttaatgtgtgtgtctgtgtgttttctggttttttttttttgttaagggggttaagcaggaaacgggttctgatttgccttatcgat

SEQ ID NO: 4216 - DNA, 618 bp, Gossypium hirsutum
gacaggtctttttgattgatttttgtttcaaggacttggaattcataagaaaggtaaaaagaaaatgaaacgaaattaagtggtaagtaatctcaatataccagtttatatttaacctagcaactctacaaaggatagatttctatatacacatatatttttatttgataagattcttttgattttgggtttccctttcttcatttaactcgaaatttggcttcatgcttaagcggtgcacattagcacgtgtagatggtccccatcaattttctgttttattttcattttagcataatgtgcaacccattatcatctctgccattggtgcaatcctttccctggtccagtttattggatatgcgaatacaaaattaggtattgctgatacctttatagctccccctttgatgtgcatcttaccaaagccaacagcgtggttatgggatgataaatagatgttagctagagatgataatgcagccaaaacatctcagacgcagataattttaaactgagagagtaagaggagcaacgggttcttcacaatatcaaacatcattattcaaaaattatccaggaggcgtattctgatatatggaagccatgaaacagctg

SEQ ID NO: 4217 - DNA, 657 bp, Gossypium hirsutum
ttgatgcttattatgagattttctgcgattaagctataccaggggaagaacagatttatgttacttttgaggttaatgacccttcaaaactttttttgtccctgtatttggtctcccagcattggtgccaatcgcttgaaacttgcttgtgctaacctccgtcaagcttccgatgagcggaataaggaagggtgagagtttgggaatcctcttttcctattcattcttcaatattaaagataccatacaaatacttacattcatgtagatgcaatcgttggcatatgtacacccatgtagaaactgctaacactgcttctttccccattaataaataaactgctcacctcttatataacatataaatccgtggtctatgtcaggtgtttgcaagctttacaattaatcacatgcgaatactgtcttttacgcagaaaatttcaggccctgttgcatgtaccgcttcttctcttcaaactctgttttactgcactcttattctaatttttggcaaaattgaacgtgatattttcttgtttctaatatatttccccatttctgatgatgcagttagagaggagtattgttgagcttgagaccaaccaaaaatgaataaaatggagtgtgcatttggaggaacagttggatggacatttg

SEQ ID NO: 4218 - DNA, 628 bp, Gossypium hirsutum
tattctgttagcattttccaaatacaaccatgaagattgatataacacacccaaaaaagaaagaaagagatttaagcaaataagaaataaaatttactagtacttagaaggcacgttgcaagtgttatataatgtatgtatgtatgtatgtatgtatgtatgtatgtatgtatgtatgtatatgaaaatcatccttttgaatgttttggtttcatttcccttttcttacggtaccattagagctttcagtcaccagaacagatgaaagtcattatagcacatctgctttctctggaaggttacagtaaggtacagcattgattggttctcttggcctgcttgtagaacatctgtttcaacaagcataagtagattaagatgataaactcttaagaaaatcgaaatgtcacatgcctaccatgttcaggagcatttgaagacaaaatatgggtatactgacttgccatacagtatacataacaaaaatttccaaaaggacaagaaagaagcaggaggggacaaaataaaaactaatactagaagggcgactactaataaatatgatatctttagaaaagattcctgaacccttggtttcaaggacaagtttcaatcccagggcactata

SEQ ID NO: 4219 - DNA, 610 bp, Gossypium hirsutum
ctcaagatttgatggaattgatcgtcatgatagatactgaaatcgaaatgttgtgttctttgatgtaagcttatttaatttcttcccttctaattacctgtcatttctttattctttcaaaacctaatattgtaaaagtaaaccagatcaacgtgaaaggattagatggcatacaaggaccgatatatgttggaacagggtgtgttttcagaaggcaagcactttatggttatgatgcgccagttaccaagaagcctcctggcaagacctgcaattgtttaccgaaatggtgctgctgtctctgctgttgttctagaaagaacaagaaaacgaagcaaaagaagacagtgaagaaatctaagcaaagggaagcttcaaagcagatacacgctcttgaaaacattgaagaaggaatttcaggtaagggtttacgtatgagggggcaactgagagtccccataatcttactatgcttcttatttgtttttgaattaaacgttccaaaccagaaatctttgtgctactgtcagactccatctctcagaagtcatctgaggcatcacagatgaaactggagaagaaatttggtcaatctcctgtttttgtggct

SEQ ID NO: 4220 - DNA, 625 bp, Gossypium hirsutum
tctgattaacaaatgacagtgagctttgatcagaaaagacatcctgggatgaagaaacccgtggcacaggtgggcatttctgtggaactttgtcaagcccctttggcagcattgaaggtaacctatcaataacaagaggatctttatacagctttgcaaataaagttcaaaaaagccaagtcaaatgctaatagggagatgtatcatagatgtgtaaattatcaaaccaagaacacaacaaaatcaacacaaaatatccagtattgactcctacccattgtcgtagcagcaaatttagtcatgataatggacattaaatagtagtctcttatataaaccatttagtaaaagaaccacacctatcattagaagcatcttctccagctgacttatctactccaatttcatacccatacaacctgccacttccatctgcaccatttcacatttaagatttaattcatataataaacagacatttacctaagttgaaaaaggaataaaaaaatagtttggcagattaccggttccaagagaactatgccggctatggatgccacttggtaggtcaccacagtccaaggttgcctctacttgttctaatacattgtcctcagaccctgac

SEQ ID NO: 4221 - DNA, 651 bp, Gossypium hirsutum
  misc_feature (635)..(638): n is a, c, g, or t
ggcatcccaaataagaaactagtgatgtcttgcattaactggtttgctattagaatatacatcttgattggaagctaacagttagtagttgaacttctttttggctagctcttctggtggccctttcttgttttttacatttgttattactataaaagtgctttctgtgcttcatatgtttctccgtggcgcttatcctgtggcaacagggtcaagcttcagaatgggctctgctgaggcgacattcatccgaggatttgtttggagtccagatatgtggggcatatcctgacactgtagcacgtactgttgaacttatagaaaaggagtgtacggtggacttcattgacattaatatggggtgtccaattgatattgttgttgataagggtgctggatcttttcttctcacaaaaccattacatatgaaaggaatcattcaagcagcttctggcactgtagataaacctataactgttaaggtacttgctggcatttagattattagttcatttgtacatgcctatgtcatttacatgtgtgctcatttgctcacacatctggatctcttttttttttttcccatttttttttggaaaaatttcccctttttccccttttcttaaagggccttnnnnaaaaaaaaaaaaa

SEQ ID NO: 4222 - DNA, 642 bp, Gossypium hirsutum
tccttaagtagaatggtaattggtagtcctcatcctttctgctatataatttctttggcactttaggaaatattgatgtgacttaagatcagacttaattatatattaaaaatggggtaaaaacatggagctaaattttatttttttatttaaaaaaatgaataaattagtctccggttagattaaagagtaatttaattttttattaaaaatttaatatatttttatggcaaaaaataatgaaatttttaataaaaaatttgtttattttttttatctaacacatagatattaatatactatttttttttaatataggcggcaaaatgcatttagatcattaatataggtgcttccacaatacttttactcaaatattgtcaaagatagaaagttgcggaactttttcccctttatgctctacccttctcctttcttaacatgtctaattaggtatctcatatttttttcataatccttgtggactgtatattatttcctggattactcgaaagatggtttgaaaaattaggtggatcattgatctagatatcagatatcttgttcatcaccgttgaagtagccactgttgaagtggcaaagttgtatgttgatacaaaagaccagggttcaagcctaggt

SEQ ID NO: 4223 - DNA, 611 bp, Gossypium hirsutum
aaatatgcagtgcagtattgattcattgctggagcgcacaatcaagcacatggtctttctgcaaggcatcacaaagcatgctgacaagctcagtaaatgtgctgaatcaaaggtattggcccaggcagtttactggttaacgatcgtttttgatcgtaaattagaaactgagaagatctcaatgctctgtttgagtattgggggtaatgaattaaatgatctcatttgagttctattggaattatttttttgggggtgggtttaccattgggcttgtaggcatatatttgtcatgaaagggcaacataattactttacacccgctgaaataaagtattgtcacagatttttgagcccctcttactgcaaaactcgtttcaagttgtcataaataattagatgtagtggaaaaacttacctattggaagggcctaccatgttttcttctatcatacatcttactgctgattttgtagatgcatcacaagggagctggcatgcttggatcatccaattatgaacaaggttcaagctgggcagtggaagtgggaagccatctaaaagtttgctcaatagtagtggagaatataaacaaaaatgggcagatgctt

SEQ ID NO: 4224 - DNA, 632 bp, Gossypium hirsutum
acgacgagatcttgtaacatgtggatcggcagctggaattgctgctgctttccgtgccccggtcggaggtgtgctgtttgctcttgaagaaatggcatcttggtacataaattgatacatccatttgcagcaccattttgatatattattaactatcctttcatcagtgtactgagtgttactgcatactgttcttagttggtattttgaaggtttcacacttgtctcattttctttttccctttctattgtttgaccaaaaacagaattgtattagacaatagtataggtcagccttctgattttagttcagtcttcaaattctcatatccatatttgttgtttcataaatcatttattctcctttctgcaccgatggttgattaaattgtcttaattaatgttgtttatttctaagatggcaggcagaacagatacagggtcattatagtccataatatgccgagtaatatagctctttgccatccatctatagctagttcattcaaaattgccgaggtagaaagaccaattgtgattcttctatgccgttgatataacataatttactttgagaatcaccttccttcctttaattcatcatgcacatggtgttcatggtctctttcaaa

SEQ ID NO: 4225 - DNA, 607 bp, Gossypium hirsutum
agtcctccaaatcatcaaagttctcctcaataggttctcgatttaaggtgtgctggtatttctatttcttaaatgctgattgttaccttttctttccagtctaatgagttagaaagtggtgctctttttggtattatacagcaacaattacaagcattacttgaaaccctgagttccacagagccacattacatacgttgtgtaaagcccaataatcttcttaagccttcaatatttgagaataaaaatgttctacaacaactacagtgtggggtaagaatgatgacgttctatgaggtttagccgaaatatgaattttttttttaattagttctgcttgcttattttatccacgtttatttcatttcagggagttatggaggcaattaggattagttgtgctggataccctactaaaaaaccatttgttgaatttgtagaccgatttggcctccttgcacctgaagttttggatggaaggtacagttaataattttcttggctctctaaaggtttcttcaaaacgttactctgacctgtttactatacatgttagttctgatgaggttaatgcttgcaagaaacttctagagaaggtgaaacttca

SEQ ID NO: 4226 - DNA, 600 bp, Gossypium hirsutum
caattatacgcttacttctctgtataaggaatttaaatcttctagtgaatttatcttttccttgttgctaagagttgtccagaacctgagcaattctaattctcttcacgctcttcaaagatttagagctcttcaactatttgcacagtctatttgcaatgggattttatctgattaccacagcacccgacataaagtggaaggtacaattttctctatttattgctttgaaattcggtaaaagtgtcatagaggcccttgtatcaggagtcggattgtgttttgccccctctactcaaaaaatgggcaaattagtccatgtatgttagattaaagagtaaattggtcattctgttaaaaatttcatctatttctactattaaaaattggtctctatacctcagcatgaggcacacgtagtatgccccttgttattgtttggttattctatcagctatgacagtttttaatagtaggaaaggatgaattttttaatagaaaagactagtttgctttttgatctaatgtgtagggactaatttggcccattttcttagtgggggcaaaatgtaatctgacacttagtacaagggcttccaa

SEQ ID NO: 4227 - DNA, 584 bp, Gossypium hirsutum
aatttattacgaaaatgtgcatgttgcatattaattacgagaataatagattttatagtaaaattaaatattgttatgtgtcaagtggtattagctataaaatattttatttaaatataaaaaaataatattttaatctaaaaaagtgacccaatgtgctaactttttattttttaaatttggggtgattgtagtataattttgaatttcatacctctattttatagaaattagaagttagtccatgtattttaatttattataatttgatcttcctatgttttcgaatttaaaaagttaggcaaaattatttactaccattatacttgatcatcaaattacttactacaagaccaacggtttattaaatccatatacaatgaattaataaaatcaactcaataatttattattaaataatttaactaaatttttaattttgaaaacatagatcaaattacgatgaattaaaatggactaacatttaggtcaccattttttagattaaaatattgttttttaatttattatttttatttatttttattaaatttttattttttatacgtggtgctaggaggcac

SEQ ID NO: 4228 - DNA, 634 bp, Gossypium hirsutum
  misc_feature (26)..(27): n is a, c, g, or t
acaagtattatttggggcctgctccnnttggaggaaatggctatgtaaatattctgttcctttctttttgacctttttcaaccttttgatgaaaattttatgttactcatggatgttagcttttcaggcaaattgcaactgctgttggaccctgtggaaacaatagagattatcttttcctgctggagaaggccttgtttgacataggttagtctttctgacatttttctattttcttcatcaaattaaaaaacattacgttgaaggttgcattgtgtttctgtaaataggtcatgaggaggacatggttatagagctggcaaatgaagtaaggaaggtgcttgcaacattggggaatggggtttccaaggagaagcagttagtaggatctcctctaaagatgccactaaaatcccaaacccagtcctacatccttacaagtcaattgcttctgcttcccaaagctgttgcaatggactcctagcttttccacgaactctctagtctctaacaaaagataaggccagtaacttaacgagaagggccaaccattaagtttctgtttctaacctattccttcagtctaaatctagttcttcaagtagagaaaatttttttgtccaagtatatatcc

SEQ ID NO: 4229 - DNA, 615 bp, Gossypium hirsutum
tttgaaatgaacaatgtaagctaatctgaagaaactgtaatattcaatcaaatccaaacttgcttccttcatttcttgcaatgaaaaaccctttaaaatcccttctacttttcttccacattattaataaatcgcctaacaatgcaaagttggataaaagcaggggaaagggaaggtctccagggaagcaatgttcagcattcccagagggactatgccgacaattctcacttgaggagattaaagctgctatcaacagcttccgtgaagactttctccttggtcgtggtggttttggagatctatacgaaggaatcattgatgatgggactatgacagttaatattgagcgctttgggccatttggactgcgaggaggtcgtgaattccgaaccgatgtgcagttactgtgtcagctacgacacccgatcttgtctctttcatcggattctgcgacgaagaagatgaaaagcttctggtttatgaatatataagcaatggttcacttaataaacatctttatggtaatcgtcctaatgatccactctcccggaagcagaggctaacgatatgcagtggtgcagcccgtgggttgcattaccttcattcatgaac

SEQ ID NO: 4230 - DNA, 622 bp, Gossypium hirsutum
ggccttgtactctattttggtgacatgttggcatgtaccatttcaaaggttagttagggttgctttatcacactggactcaggctgctttggctgaaaaggtcagcagtttagccttttagtgttaactatattgtttgaacaggtttgtagattgttggtttctccagagttggtgtctatacgttatggaattaaaagaagtgagataggtattatcatccaggtatgaatcctcaagtgatgaaattatttggaaaatgatctagcttgattgtaaaagttgcttttttctatgtagggtgtgctgcttggacttcttattttttcagcagtctttaaatttgtcatccacttatgggaatacttctcgcgtgctgacaactctgagtcaaggaaaaacaaagaaatcaggagatctcttatattctttgcttcacttggatttaccatgattgtggtttccccatcttggatgatgattgtcctagattttgatgtacatcctatactatggtatatctttgaacaaacacttttttcaatttgatatttattataatgttgtttatcaatatcttgttttgtcgacttttatctatcctctttacatcttgcaagtg

SEQ ID NO: 4231 - DNA, 617 bp, Gossypium hirsutum
cctacctcaaagatcgtgaacgagaccttgaaggactgcgaccgacacgccttgggctctttgacctgctgctcacatgatctctctcatcttgtagactctgaccattctccctaggactaggggatccctgcttggttctgtattccctgtccctgtcaccatgtggagaacgtggagaaagagaccgagaaacagatctagatcgcctgggagagcgataatcatcttttgccccacgatcccttgacatggatctggaccgactgggagagcgataatcatctctcatggcacgatcctgagaaattgatctagaccgcctaggggagtggtgataatctttccccctctgatccctgtctctagtttcatgtgaaaaaagaatgcataagaaactaatacagcaaaaaaattaacacataatgactgtcagggcaagcagatatattcagttcatatagaaaaattaaaaagaaagtataaaaggagcatttccattcttcataagggcaaaccttcttccaatgacaacgaaaacaattttttactagcatcctcgcacaaatcagcggattaaaatattgaccttcacctgtacctttccagtgtttctg

SEQ ID NO: 4232 - DNA, 651 bp, Gossypium hirsutum
  misc_feature (618)..(618): n is a, c, g, or t
  misc_feature (620)..(620): n is a, c, g, or t
  misc_feature (629)..(632): n is a, c, g, or t
  misc_feature (642)..(645): n is a, c, g, or t
tctagcttgttggtcttcctagattctttccattccgtgtcgtgacttgtaatgtttttcctttatgtagcataggaaggagatactgtggaagcaggtgccaagattgctgtcatttcaaagtctggtgaaggagtagcacctgctgctcctgctgaaaagaaatcagaaaaagctgcttccaagccatctcctccagctgaatctgtgaaggaagataagccaaaagctaaagttgaagcttctcctgctgcagagaagcctaaacccccttcttctccacctcccaagcaaactgctactgaacctgtacttccaccgaaggaaagggaaagaagagtaagtcttttcattcagtttatatccaaattataactttggtgaaaaattatgttagcatcatagaaaagaatcctgaatgtattgcttcatgattacaggttccaatgacaaggcttaggaaacgggttgctacacgattgaaagattcccagaatacttttgcaatgttaacaacgttcaatgaagttgacatgtgagttcatttttgccacatacattagttctttgtatcaggtgttagtcaccctgcctgcctgtgctacccgactttctgancnatttctatnnnnaactttctgnnnnatttct

SEQ ID NO: 4233 - DNA, 632 bp, Gossypium hirsutum
agatgtttctttcttctttagtcataaattcttgtatctgacatttctcaatggttatcataaatttgtcatcccatgtttctcaaagtgtagatgttgcttttgatgtttaccttttacaggttaattacttgcactgtcatgggattgcgcatacagagttaaggctggaaaatgtacatataagcccggttgatagacatataaaggtatttaccaattttctttatgatcattgaggaggtttgtgtaaatggatatatgtgattctagttttgcttggcacaatagcacagcttgattcctttctctattttcattcttctctcaattgcataattttttaaaccggtgttatcaggtaggaatactaggaaatgctgctgatttctatgaggatggttccaatagaagtgcatcggatagcaacatggataggagacaaatgatgattgcatttgacatgaggtatggtgcaaataaaagacaacgttgaacatgtgaaacatcgtcttgaagctcacttaacttcatgtcttacaaaggtgtgttggatttatgatggcaaagatggtgctaagagaactcatggatcccgtaatctttacaaagttcaaaaccttccttatgaa

SEQ ID NO: 4234 - DNA, 620 bp, Gossypium hirsutum
cttcgagcctcgggtccaagatcagcctgaacttcttcatatcagagaggtgtggcctgacccattccaagagtttttgttcagccttgggacgattccgatccaagggacgcctacctgttatgagctcgtaaagaaaaactccatagctccacacatcactttttgccgtgaggcgcccggtttgaatgtattcaggagctgcatatccaatggttcctacaacctgctcaaaaccgggacaatttgatacctctatatccataaaaacaagcatgcttctgaaaattcggaaatatttgaagaaactggaccagagtaggaataaaaatctggaaatgttcaaaaaaaagaaaatgaaaagtcagagcaacatagtttatagcaacttcgaacctaccgcagtcgaaacatggcttaatccatcagaaggccctagcctggccaacccaaaatccgagagctttgcgttccaatgctcatccaacagtatgtttgaagacttgaaatctctgaagataatctgtagcaaccataaaccaaaatttctttagcctaaaagcaataatgaggtcattccaggtttcgattgtaaaacgaggcttcgaggttattgattt

SEQ ID NO: 4235 - DNA, 599 bp, Gossypium hirsutum
gattacagaagtcacttgatcataagagttccagaagtgatggccccaaaatgaaattaaatgatggagaaggttttttggaacatacaactcccatgagagacaagcgaaagcatgagagttggagacaccagcattccttgaaacagagggtcgtggttgaaagtgatgatgagtatgacccttatccaatatcagatgcagagggtgattggaaaagatactgaagagatggaaatctcactgaggaagaatggaagcatcaccgtggtagacctcacggtattattgaccagaagatataccctgaaaactgctatgaagcttcccctttatcaaatgcgagggaactctgttataaagattactcatctgtttactgtggcagacggaaggaaagattgaaagatcatgtttatcatgataaagaaacttcctcgtattacagggagaaagaaccttgtgttaaccgcagtaaaaggtttactgacagccatctttgggctctcagcagaaaagctcatctgcgctatcactttgttagaagaaactggaatgagaaggagttttatcatgaaagacgagctggcgtagctaag

SEQ ID NO: 4236 - DNA, 628 bp, Gossypium hirsutum
taattctacctccttcctcttctttcttgtaatctttttattcttaatttgacgatatctttgggttttaactaataaagtcatttaagtcaactttatattcagcttctccccgtaatatactactgcatactttttctttatgactttatgtgattgaatgaaaaatgtttttttttaaaattatgttagaaaatatcttattcgcttaatgtaataaaatgtattattttaatgaaattactagtatatttttttattttattgtattatattttataatttttttaaaagagtctcaatttattgttttgtcttagactcaaaaatataaaaaataaatctatagatataacctaacattctttggactcgtatttgaatgcgatccaaactaaagaagggacttttgttgagataaattcacaatctttttgttggagaagggaaatcctcctcactactcatccttccaaaatagaaaccatttaatacagctcaaaagtttgaaatctatgacacatcctcagtcaactttgatagagcactctttgaaaaattttgaatgataggcatctttaataattaattatatatataaaaaaacacatctctagtacaaatgtct

SEQ ID NO: 4237 - DNA, 489 bp, Gossypium hirsutum
  misc_feature (298)..(299): n is a, c, g, or t
  misc_feature (301)..(310): n is a, c, g, or t
  misc_feature (312)..(317): n is a, c, g, or t
  misc_feature (319)..(324): n is a, c, g, or t
  misc_feature (326)..(329): n is a, c, g, or t
  misc_feature (339)..(339): n is a, c, g, or t
  misc_feature (344)..(344): n is a, c, g, or t
  misc_feature (348)..(348): n is a, c, g, or t
  misc_feature (351)..(351): n is a, c, g, or t
  misc_feature (369)..(372): n is a, c, g, or t
  misc_feature (386)..(386): n is a, c, g, or t
  misc_feature (391)..(391): n is a, c, g, or t
  misc_feature (415)..(416): n is a, c, g, or t
  misc_feature (421)..(422): n is a, c, g, or t
  misc_feature (436)..(437): n is a, c, g, or t
  misc_feature (444)..(444): n is a, c, g, or t
  misc_feature (446)..(446): n is a, c, g, or t
  misc_feature (448)..(449): n is a, c, g, or t
taataattcttgatctttcaatggattagctatcaaatatgtcatgcatgaagcttttttggtgaagttcttgtatattgttgttatcatttgtttcacatctcatgctgtatttatatgtcttacagctggaaacgctcctaaaattattccctgtgccatcatatcaaaatctcaccctccaatgtctaacagaggtgtttttttttaaaaaaaaaaaaaaaatatttaattaaatgaggtaatttttttttccctcaaaaataaaatatttattttattttatatttttgattgnntnnnnnnnnnncnnnnnntnnnnnnannnntaatattgtnatgtntgtnaanataaaaaaaaatcatatnnnnccggtccagctagnggtgngttggcttttatattttaatttcnntattnnattttcacattctnngcttacnananntaatttttttttttttctgttttgccttttttttttttat

SEQ ID NO: 4238 - DNA, 626 bp, Gossypium hirsutum
ctatgattaagttttggctttgtatgtcttctctagcaactggcatgtacattgcactattaggtgcaaaaaagtattttatgatacaatctgcattcacatatatttcgaggatcttatcctcatacccacgtctgaatatgcatcagagaaaagtgtcaaacatggttactaacataggtctccattagaacattcctctcttgtagtcggttttcggccaagaacacagtaccatgtaagtaaagtgtccatagatagagagagaaagggttaaaaattcagtggaatcatatacatgactataaaaccagtttcttagacaaatatacataacaaggaaaattagtcttccagttcctcagctgtgatattttcttcttcaggaaccaacagaacatccaaggttttagcattgtcaatgcaagtttgttgtcagttatcactgtagtcttctgttcagccacctctctccaaagaatcacacacgaaacagctgttggcgtgtgcacatatattatattttgtattttcatcggtgcgagccgaaacattagctaaatgcagctttggaggatcgaagattacttcgaaccactcatgggtcaaaaccaatcaacattttg

SEQ ID NO: 4239 - DNA, 620 bp, Gossypium hirsutum
agaccaacgcatctaccaaacgttgtaacggtaaaactccaggtgacaaccgagcagaggagataaccgcctcaaagtccgacggcaaccccgccagcaccacttcgatcttctcttcgtcggagatacgagagccagacgcatctaacaaagcacacaaatctttaatccgagcaacatacgccttaatagaaagattacctttcttcaatgagtgaagctcatgccgaatccttgactgcttggcacccgtatcagctgcaaaaagattaacagccatactccatatgttgcacgctgtgcaagcatcatcaaaggaggattgatgagaagaagttaccgtagacaaaagccaggacatcaacagctgatcttgctgtgtaaacacctgagccgccagatttggagcacgagaaccatcgggtagaataacaaatcgggatggcggagcaacagtgccatctaagaaacctgtgagtccatagccattaacaatcagttttacctgtttacgctattgaaggtaagtaccttcatcgagtttgaccacttcatgtcgaggaagaacggttgtgactcgatcggcagtaaacacaccagagctaggttcaccagataaa

SEQ ID NO: 4240 - DNA, 645 bp, Gossypium hirsutum
ggaactgcattcaagaaataaccaattcagattatcatgactttgaggaaaacgaaggcgtagtgtcatgcataactatgagattaaaacaggatgcaatacatcaccacccaatatagaggaagacgatggagaatatatgacgtcatgtctatctgaataagaatgacagtttagttaccaaggctagaaatgcttttaagccttcatggtacaagacctaaacttaaactcacataccatctcttgccacccaaatctgaaaaagaaaattaaagatgattctccccatttctacaagaaatgatgagcgttcatattctactactcagtttccttaaacaactccaaaatcagttaagctatgacttcctttcagtctcctaggttgatgtagttgaaccacctcaaaagattggacaaccaaatcctcccacgttcttctctcacaaattctttctttcttcctttactattctcctttacccttcagattctttgttttcaccatattttctgcctattttacgcatgatcaaggaagcaacaatgcagcaaagtgtagacaacaaatacattaaacaactacaactagaaatgttgagctcaaaatgagataatatgtagaacatgggagagtaatga

SEQ ID NO: 4241 - DNA, 632 bp, Gossypium hirsutum
gtgttgtacacagtgacttcttaaccaatcaatcctttgttacatctgggttcttgaatagcgtattaaaactttttattcaactatggattctgacacaagtcctaatgatcaagaggtaaatccgcggccaaccatagtgtttgctttccacagaaaagatcgcacagctactttggcgtggaaatatgtctttctcattctcaaaacgcatagattgcaagtttttgtagatgggactattctcataccctcacaaatggttacagacgagtcagggactcctgtatgtgtactatgtaagtccctcttggcacattcatttgattggtcaaagtactccctttggtatttggagtgctctcaatcaaatcttttggagtcagtctcataccaaaaggatgaagtttgagttcttgttgtataacacaaagaaacttggtaagcctatgcgaaaatgtattgctgaatttggacatatctatgacacgttgtctagctgtgagcaagtaatttcaggcgatgtacaacagtcaaccattctatatggcttaccactagaatatgagaacattgtttctattgtgactaccagtcaacaatcagatgatttacctgggtggtgtcaactt

SEQ ID NO: 4242 - DNA, 639 bp, Gossypium hirsutum
agagtaaatcatctccttgagattgagtaactgagcaaagatcgagaattttggttttggcaggaatgtcatccatggagaacccaacaagtatcgagtatgttacataatataactcaactcggttaaaaggtaacttgcattttgttacataatagtggagaattagaagaatttacatctgtctttgctattgatttgtatgaaaatatatacaaatgttacaacaatttacaaggaaataatcaacccattaaattgctaataatttgctagagcatttctgttcgttcgtgacttttcttcatataaaagtacccttcttgctccttgttacttctacccttaagaagtacttcaattgccccaactcttttttgcgaaatttggtgtgcaaggaggacttaaaagaagagactcccacattatcttctcctgtaataataatatcatctacatacaccacaaaaaggatgatacaaatttctattgtgtatagaaaatgactggtcacaattacgcttttcaatccaaattcttgaaccacatcattgaacttgccaaaccaagtatgaggactttgcttcaacctatttagagatttcttcagatgacatacctgcccatactcctcttgag

SEQ ID NO: 4243 - DNA, 601 bp, Gossypium hirsutum
gctagcgtgttaaaaataatgaaaacctagtgttagttgacactctttcttatcatatgtattaaacaaaaaataggagatgtaaataacctctttttctttagaaagcagctcatattttctgtttagagaagccaagtagccttcagctgccttttccctaaggtgataggcatcaagaagagaactcggagcttctatatctttactgggtttatcctgcagcaaagtaaaaccaaatgttgttttgtatcaactctgatagaataatgaataagtatatgtacatatatacctatataaatatctatatatttgaagtgaatacaggagctgctcaggcataaaagaaactttaatccctcagatgttgcaatcctaagcccactttttaggggatcaaacctccctataaagctttttcttgcccagaacataaaaagggaaatgcaagttctttgccacctcaaatgacagtcttttccccatttaaacacacacataatgctcaaatgttgcaatcctaagctacgcttttgggaatcaaaccttggtataaagccttcccttgccaaggaactaaacaaagaaatgcggtgac

SEQ ID NO: 4244 - DNA, 626 bp, Gossypium hirsutum
gcatgctattgattccaaaatgctcgaggttctcaactgccagattgcggttgaggaggagtgtgccactttgctccatggtttctctgaggtcagtcatccagccatcaatggcaaaattgcccaatggcttatcgtattaatctttcatagatctaatttgcttatatatgtagtgatttttttacaagtaattgctagcttatgtgttatgagggggattccactattacatggttgtgcttttcggttctgatccttgtttctcttcccataggatgctatgagtaatgctgattcggttttcaagaaatcagaagctcaatcttcagaagaatgggagaaatggctttcttcgactgaagccttggagttgaacaagatagaattacaaattgaggcacatttagtagacaatgctcgtgcggcattcaacacttcccttgacagcttgattgaagatgataagagagaaaaagaatttctctgtgatcaaaaggatatcttgaccgatgaactgcaaaaactaattggcttagtgaaagaaaaggaaaaggaaattgctgaaaatgaatctaaaatgaaacaagtagatcaaaggattgctgatacaatctctgggtttc

SEQ ID NO: 4245 - DNA, 632 bp, Gossypium hirsutum
ctttaatgtagcttatacgagttgttcatttttcaaattttccttctttcttttactatgatgcatgcggagcgtttgatacattggttggaatatatttcattgatttttggatgatcatgtctattccagactcgatggcagtttgaggataactactaatacagttcaatcaagacccatgattgatcaacctgttctgtcatcttaaaacttcccctttttgacaaggttgtttgactaccattctttgttgctttagtataagctttttcttcattggatgttcatgtagttgaatattattatgtttgcaagatcatgtttaatccggacttgatgtgaactaggggataatactactgggttttatgtgcaatccgaatgacgctaggacatatattttctttcaatttcgagacaaaaaacaaactttgtgcttgggtcacgtggaacagttgttatgagagtgagaacgtgaaattaaaagaaagataaaggacgggagaaagagagaagaaaataaataaaaaaaactcatttggacttgtaaattgttcaaaacatactcgaatttgtcttaataactcccttttatcacaatcatagtgatgatgggaaagcatagattc

SEQ ID NO: 4246 - DNA, 608 bp, Gossypium hirsutum
ggattgtttatgtttggtggcatggaaatagttctagccagtagcccgccaatgcatagataagattctatcaccaaaaggctagaagatagttagatagataaaacggattttatttttaaggaatctatagcatgctggctgcggcttgtttggacatcccaaaggaacattcgtgacatgtaataacatgaagagggatatagaatgtaagaaaatgcataccatttcatcagttaatcgtctgagatacgttgatctatatttgtccacagttggcaaaaaaaaaatactagacattgaagcttcacaattccctagttcaacaatcagcatagagaatgaatattatggaaagcgcagtataaaacacaagataaattacagtcactattgattgattaagcatgaacaaagaaagcaagcatgtaattcaacgagattattattagggtttttggtgtatgattccaatttccaacaccaccatttcctatgctattgcgctcctcctgggtacctcatctcactaaaaccatattcttgaagcattccttgttgcatgactccatattccgaagcacaaggagggccaaccagagagctag

SEQ ID NO: 4247 - DNA, 509 bp, Gossypium hirsutum
tcgtagtggcagcccccttcgtgctcttcttgtcatctctgtgagggttctttttgtttaattttttcaaatttctttgttaaacgatttctttctgcctttcttctgcttcagaattgataattgttaaaggaaagaaaaaattcttaatcatcgcattgcttgaccaaaatcatgtgaagtttgtaatattatttctatctatttgatttactgttcttacaaaagtagagtaaggtagaagaaatcccttggtgaaatcattttaagcaagttttaaattttttatggtgtaatacatttttggcattcttttttcgtttttaatcaagtatgattttgttttagagcaattgttaaagaagcaggaagcaagaacaacctagttaagctttaatgagtataattttgccgggcactggaagattttcatcacttgagtgagagatagttaaattggcagacttgtaacacaataggaccacttttgattttgataggcactgatt

SEQ ID NO: 4248 - DNA, 592 bp, Gossypium hirsutum
  misc_feature (587)..(589): n is a, c, g, or t
ttaagaattaaatttcaagttatggatcaatctgagaatttgagacttctaagcatatgtttttcctctataaatgaataattcaacttaaagagtcaatggtgtacaacttaagctggtaaacatggtttaaattccttcttacatttttttttttagtttcttacctgcctttggaccagaactgtctctatgtaagagaaatatgctggagtggctcgagtagatttcatgtagatagcttcattatattttcaatatatgcatcattatcagctgagtgacctgccaaatcttgttgctgaacagtttgtcttggacatgcattttctggtggaaatcgtcaagtatggaggatacttctccaagaaacccttggttctccaaagccttgttgatacagcgtttacttctgctggacttgatcctgagaggtgatatttcaaatcattgtagaatatctgatggtagaaacattgggtcccccttttcgtttacagatttttccatgcttaaaagagcctccaaaaaagtattctctcatctgatcctagcatagtatcgtactatgagataaaaactactcnnncat

SEQ ID NO: 4249 - DNA, 619 bp, Gossypium hirsutum
cacattcttcttcaaacttcaatcattgcacccacaaagccagaaaccattacatggtaagcaaaacctacaactctaatctatttcacatcatctttctttttgttatgttttaatgacatatgatcgatgctaatcagcatttgataatatacatatacaacaacttactaatgcatttggcagctcatagtttaagaattatggtaggtttaatctgtaataccttgggatgcactcttgtttcgggtgttatgtttatgttcattatggtttgtctgtttgttgggagctgtttagtgttttttgtaaggagtttggccaggcgatctgttagtgtttcatggtggtctccaccttattaataaatgtcaatttctctgagcaaaaaataaataataataaagtcttaccttgaccaatgcaacatcaaatatcacatatatgctctgccgcctgccgtcaagtttttgaccacggaacattatacagtactctgaatattgaccatggcattgaacacatattatattatatgctgtcatgaatggggggggggtctccaggggttttataggctttggcctttgatgaagctggaacttaaagacatgggcaa

SEQ ID NO: 4250 - DNA, 617 bp, Gossypium hirsutum
tcacaaagtgttgaagggggctccttctctgtcctgcactcagtataaaacagaagtaaacaaataactcagcataaatgcatgcttgtgtattagcagcaaaacaagaacatacagaaactttacagacaaccataaggaataatcattatgtactcatttaagagataacacataaatgctacttgaatagacaataagcagtaatactcgaatatgcactcaaaaccaccaaatatctaaatattttgatgctgtcaaagcttactacaatatcacacaagggctggaagtatacattacctctaagggtagacaaatctaaatatttatttgatttaggacttgatgtactttatcacgggttgaaagtatatagtacctatcaggatatctcccattaatcctaattgaatgctccaactcaagaataagttgctccaacatatctgcctgtataagtgcaaacagggcaggaaatcagtcctaattaaatcaagctctgaaccagttgcaagcagttaaggagaattcatgtttagaaacttgattctatgttcagaataaatgcatgcaagcaaaaataccttgccagggtgatcatacaaaaggagaaa

SEQ ID NO: 4251 - DNA, 587 bp, Gossypium hirsutum
  misc_feature (566)..(566): n is a, c, g, or t
gtaccttaatttgtaaaaatgtacaaaaataaaaattagaaatacataatatttttcctttaaagttcttatataagattttttttaaaacaaccaatttcaatattaaaaaattatattaaaatacagaaacttctgttcttaatagcgaagtttttttttttggaaaaactaaccttaaaaaaaaatttttaaaaagggccttttttagaatttttaagcccaaacctccaaaaaacccccattaccaaggtttaaaccccatccaaaaaaaaacccccaaaagggaaaaaagcaaaggggaaaataaaaaaaaattttggaactttggaagcaaccaaaaaaggccccaaaggccattccaccagcaaaaaaaaaccaaccccggtgaacgcccatcccttggaagggttaaaaaaaaaaaaaaaaaaacaaattgggaaaatccttgggggggggaacaaagggaaaaaaacccctccccgggaaaaacccggggaaaaggggaagggattttgaaaccaaacccttgggcaaaaaaaaaaaaaaaagggggagggaaaccnccggggaaagggggttgaaaa

SEQ ID NO: 4252 - DNA, 615 bp, Gossypium hirsutum
agatacatgagcagctttcagagtttgcttgcgtggggccaccactatgcgtgctaaccaatttttttaaaccggaccggaccagtccaattaaaaaattaaaaattcaaaaaattaaaaaacctggttcaactggttttttgccagttcaatcggtccgaattggttccggatctaaccggttcagagccactctccgaatcagtactccggctaatttcttggtccaatcggtccaacaggctgggccaatccagttcaaataacattggcgctgaccaacacgtggatattttcacagcagcactgttcaactccattcacctcaatgcggaaattcatcaccctacaaatttggtgttagccatgagccttgctagagcatacgaaagaaagctccaatctactgaaggggcaccccaaatttacaatgaggcaacatcaagatgaactcagaatattgtaggaattaaaaaagaataaaaaaaaatagcaatacagaggaaggagaacaagctcaaccgtcattcttcatcaaacgcttgagctgagatgaaatggaaggactctgggactgtgctataattgcaatgagacacagacaagtggtcacaa

SEQ ID NO: 4253 - DNA, 692 bp, Gossypium hirsutum
  misc_feature (612)..(637): n is a, c, g, or t
  misc_feature (639)..(643): n is a, c, g, or t
  misc_feature (646)..(647): n is a, c, g, or t
  misc_feature (650)..(651): n is a, c, g, or t
  misc_feature (658)..(659): n is a, c, g, or t
  misc_feature (664)..(670): n is a, c, g, or t
  misc_feature (676)..(676): n is a, c, g, or t
  misc_feature (678)..(682): n is a, c, g, or t
  misc_feature (686)..(687): n is a, c, g, or t
gcaagttttgccaaagctttatggaatgttttgaagcaatataatgaaaaactgaaggtgagttgtgggtggtttgatttgataatcttccactgaatcttatgaagcttagtatggattttaagtatgaactcaatgataacttaattataggccatctgtcataatcaggttgcagagagtgaaaaccagattctaagagaaaatcttaggaatgagaagaaaagatctattgagatggagaaagagctgaagaatttgagatcctgttgtacttgctctaaggacaatttaatggcaacaactatagtaaaagtaggcgagaattttgagtctatggtgcattctgaactacagacatcttgtggtattgatgaggtatatgtaattaggtattatttaaaatgttttacaaaatttctagtaactgttttcttacttgcattaacttggtatttggttcctgcataataatactaatagggaagaatttgatttgaacttttatctattgtattaggaaaaattggatttggattcttccgaccacgtcaaatctgaatgcagtagcagtcccagaaaatttgaatgtactccaggagacgaccagtnnnnnnnnnnnnnnnnnnnnnnnnnnannnnntcnnttnnttcctcnnttccnnnnnnntttccntnnnnntctnngtttt

SEQ ID NO: 4254 - DNA, 635 bp, Gossypium hirsutum
tatatgaaagttcctttatattttttcaaattttaattaattaattaattaattaattaatgttacttatttcaggataggctatgggaagctgttgatgaagactggcttcaatgtcttagtaatgaatctgttgaaagtcttctccttattccttctggaattgtccaggtgaatttatttctttttgtctaattatgaatttcatccttttagtttataaaaactgcgaaactaatccctttaatttgtcagaatttggtccttatactttatgagaaatgagatggtacaattgttagtaaacatatgaacttgaacagctgatttttgctaatttgttgtatatttagttcctttacattgatttttgctaattccgagcacataagttgctgaactgctaattttctagtcagtgatgtaattgcaagtttaaactcttctagccaattggattaacgtatcagttttcgtaaactaaaaggagcaaattctgacaaattagagtaaaagaactaaattcttagttttcataatgtaaaggatgcaattcttaattaaaccacattttttattatgatttttgttcatgataaattttaataattaattgtatctaattattttttatg

SEQ ID NO: 4255 - DNA, 887 bp, Gossypium hirsutum
  misc_feature (101)..(101): n is a, c, g, or t
  misc_feature (146)..(149): n is a, c, g, or t
  misc_feature (193)..(193): n is a, c, g, or t
  misc_feature (247)..(247): n is a, c, g, or t
  misc_feature (268)..(268): n is a, c, g, or t
  misc_feature (527)..(527): n is a, c, g, or t
  misc_feature (601)..(601): n is a, c, g, or t
  misc_feature (604)..(604): n is a, c, g, or t
  misc_feature (645)..(645): n is a, c, g, or t
  misc_feature (658)..(658): n is a, c, g, or t
  misc_feature (666)..(666): n is a, c, g, or t
  misc_feature (841)..(841): n is a, c, g, or t
tggattaaagccattgctgatttcattaaacctttctctttcttaatcaatgctcacgttgtcaatttcttcaaggttagctgaaatatatatgaaagttnctttatattttttcaaattttaattaattaattaattaattaatnnnngttacttatttcaggataggctatgggaagctgttgatgaagantggcttcaatgtcttagtaatgaatctgttgaaagtcttctccttattccttcnggaattgtccaggtgaatttntttctttttgtctaattatgaatttcatccttttagtttataaaaactgcgaatctaatccctttaaattgtcagaatttgatccttatactttgcgagaaatgagatagtacagttgttagtaaacatatgaacttgaacagcttatttttgctaatttgttgtatatttagttcctttacattgatttttgctaattccgagcacataagttgctgaactgctaattttctagtcagtgatgtaattgcaagtttanactcttctagccaattggattaacgtatcagttttcgtaaactaaaaggagcaaattctgacaaattagagtanaanaactaaattcttagttttcataatgtaaaggatgcaattcntaattaaaccacnttttttantatgatttttgttcatgataaattttaataattaattgtatctaattattttttatggtaggatcattggcctacttcgcttaaggagttcgttcttactttgaaatctcttgtttatcctcgcgaacaagcggacttgaaaaaggtaaatttcttgactttctttaaaaaattntgtgattgagtttttggtatttgtttttctattattatgaaaaaaa

SEQ ID NO: 4256 - DNA, 959 bp, Gossypium hirsutum
  misc_feature (591)..(592): n is a, c, g, or t
  misc_feature (682)..(683): n is a, c, g, or t
  misc_feature (742)..(746): n is a, c, g, or t
  misc_feature (748)..(753): n is a, c, g, or t
  misc_feature (760)..(769): n is a, c, g, or t
  misc_feature (771)..(793): n is a, c, g, or t
  misc_feature (800)..(801): n is a, c, g, or t
  misc_feature (808)..(822): n is a, c, g, or t
  misc_feature (827)..(833): n is a, c, g, or t
  misc_feature (835)..(835): n is a, c, g, or t
  misc_feature (837)..(837): n is a, c, g, or t
  misc_feature (839)..(841): n is a, c, g, or t
  misc_feature (843)..(844): n is a, c, g, or t
  misc_feature (878)..(878): n is a, c, g, or t
  misc_feature (881)..(883): n is a, c, g, or t
  misc_feature (885)..(889): n is a, c, g, or t
  misc_feature (891)..(894): n is a, c, g, or t
  misc_feature (898)..(902): n is a, c, g, or t
  misc_feature (904)..(907): n is a, c, g, or t
  misc_feature (913)..(913): n is a, c, g, or t
  misc_feature (932)..(943): n is a, c, g, or t
taatccttcctctcttttcccttgttctttgcaggagaaactgttccaatggattttgaggcagcaagaggaaggatcacgggttacaacaactgatatagtttcatatttgcaggtatcttctgtgatttcttgatcttattgttttgatgaatctgcttggctaatggtggttcttttactttagcaccattcttatactcaattttatatcctttatattaaacttaatgcttcaaccaacagtgtgtttctgcaccactccggtgaattcaactgtagtgtccaaacagtaagcacttaaccagatcggtgtattttggagtgtgtagaataatcagagtaaaatgataggtgagaggatgaggacggtagcataggatagaagagaagagaagagactattggttttctagaaatcctaattaatagatgcttgatcctagtttagaagtatgtttggtgttttggatagaaatgagagtaacatagtgtgtgggagaatgaggtgatggaaagacttatcattttctgaaccccctaatagatacatgattgtgcacgataagtcgttacaatcactcattctcnnacacactatgttactctcatttctatccaaaacaccaaacatacttctaaactaggatcaagcatctattaattaggatttctagaaaannaatagtctcttctcttctcttctatcctatgctaccgtcctcatcctctcactaataannnnncnnnnnntattccnnnnnnnnnnannnnnnnnnnnnnnnnnnnnnnngggtttnnacactannnnnnnnnnnnnnnaatgnnnnnnnananannngnnggtttgaagcattaagtttaaataaaaagggatnttnnnannnnngnnnnaaannnnngnnnntaaaantaaaaaaaacccccctttnnnnnnnnnnnnaaaaaaaaaaaaaaaa

SEQ ID NO: 4257 - DNA, 621 bp, Gossypium hirsutum
ttcttcgtctttacaaaaacaaaaaaatatattttaaaagaattaaaagaaaatgggcgaacgacgggaattgaacccgcgcatggtggattcacaatccactgccttgatccacttggctacatccgcccccctacaattactatactctatagtattttttttacttgtttaaatatttcaaatacaaattgcaacgatttctatcagtcatcattcttttttttatcttatttctgagatccaatatatagaaaattccaatctatatcttttatttttaccctaaaataaaaactttacaaaagtttggtaagagcttttttacttattttttatattttatataaaatataaaaaaaaggtaaagaaaagaaagaccactaaatcgaaataaaggagcaataccaacactcttgctagaacaagaaagtggttattgctcctttattttcaaaaactcgtatacactaaaaccaaagtcttatccatttgtagatggagcttcaatagcagctaggtctagagggaagttatgagcattacgttcatgcataacttccataccaaggttagcacggttaataatatcagcccaggtattaattacacgaccttgac

SEQ ID NO: 4258 - DNA, 643 bp, Gossypium hirsutum
aaattaggagcttaatccagcaaaaataagcaaaaagagacgaagtttgaaaggggacgaatatcgtatgatgcgtacattcggaggatgttgccgatggtgtggtcttctctctcgattgtgaaggtggccgcatttattattttggtgtctctctcgtaagaaaccctaaaaatttaaccaacaaatatgtagcagtgagtttgataaacagaggatttagggataaagagcctactttttggtcccctcggggacgacgaatctctcgtaacggtcgggggcgttcatggccttctcactctttctcttctcttctgcaaactcttgctctcaccgccgccggagaaaatcaaaatggtttggtggctcagcctcggtgccagtgtaactgttgcatgaaatgggaagaccccgtgggaatgagtcattacgatgtcgtttcaacttgtgcttaagaaaaataatatctcaaaaattaattttcctccctctactctattggttaaagtttattacaagtccctctatcatatcatatcatcaagttcattttaatttctatatttgaaaaactaacattttagtccttacacattaattttattgttaataaaatgacgtgatttaacgatgactgatg

SEQ ID NO: 4259 - DNA, 613 bp, Gossypium hirsutum
cgagcagcggaattagcgccatcatcatcatgcagtgcaaacttgtccatctctgctttgttctgctcctcttcatttcaatttatgtacaacgtgaatgtgaagtgcgtttgtttaatcaagaaaaagaaaagagcagcggaattagcaccatcatcatcatgcaatgcaaacttgtccatctctgctttgttctgctcttcttcaattcaattaaattcggtaaagctattgttcagacaataattagaaacgtatcaacacaaactaagctattgcttttggtttttgtcatccttttagattattacactaattgcttccttatatcgtgaaaatcaagctgcatttcatattgcctacaatctcgtatttcaccaacgtaccaatcatatcgaaggtggttttctacgtctttcttctgttggctgatatctttactaaacctctttatggtcctgcttttcaaacatttgtagccacatcttgcggggggatattacggtttaatagttagttgtttgctgatattttgcttgtttaaatattttgagctgcaacgcttcttttcgcaaaataacaataactaaacaagtgaacaccatacgttagc

SEQ ID NO: 4260 - DNA, 612 bp, Gossypium hirsutum
  misc_feature (548)..(549): n is a, c, g, or t
  misc_feature (554)..(554): n is a, c, g, or t
  misc_feature (597)..(599): n is a, c, g, or t
tatcagcgtcgatgcaattagtacagataatagagcataagccacttcttatgtctctcaatgcccctctaaaaaaaataattgctttatgaaaaaaaggcagaggtggatttcttttcttgtaacgaaggcctctgtgtattttcacaccataccgcctcacggaacttgataacttcctacggcaccatattcaaccgaccaagctcttctatttccaaaccattcagatctttatgattgttgttattatccaactctgattttattttcctctatcaattccatatatatatatatatatctacagtaccatcaggtttttcattccaatctttgagggccaacttcaaactcctcatcttccttgataataagtagtttaaataccacttgtgcaaaataaaaaataaaaaaattaaattaggtatcaaaatttaaaaaaaaaagataaaatttaaataccaatttataagttaagcctaaaaatgaagaagactttcaatattttatagaaactaatgttataacttgatatattttttccnnatcantataattttccttcttattacaagaaaagaaatatacaaaccnnnatataagataaac

SEQ ID NO: 4261 - DNA, 393 bp, Gossypium hirsutum
attgctaaaggaagcagacataatctgagggtttaatgtcataaatgagacctgggtctagagctttatttggatctacatggccacctccataatcaaatgggtcagcttgcttgtggggtgctccctcagctactgtatgttggccatattcatccttcatagaagcttctcgaaccgataaagaaaaaaagaatgttgcattaacaagttgtaaaagcaaaccagaaatgaaaaaattatgttttcttacctgttgttactagtgcagacttaattgctgcagggctccacttgggatggattcctttgagaagtgcaacaatgccggatatatggggacaagccatggaagttcccgaatcaagtttaaagttaaaatggagatgcttt

SEQ ID NO: 4262 - DNA, 541 bp, Gossypium hirsutum
attggaaccaatttgtcgctcaaagaccctgaagtagtacagtagataaagtccaaacatcagttctggtgtagatgaaaaggcaaagactgatgtgattaacttccatatgctaagttttgtgaaaatatcctgttacaaagatggaacaaccagtaagagttatacacaattaacctagaagatcacatttcatctttgactccccaaaagtaaataaacagatgcaatgccattcgacttaattttggtgatgagagatcagacacgtacaccatggcatgacaaacagttactttaccagcatttaattttattatatattttgcagttttagagcagagttaagaccagaccccctcacccacctcaaattaccataactttactatttggctttctggacaagaaatcatatcacattacccccccccaagcctttttttcccatttcagagacaagtaagcttttggaaatggaaagcatacttcctgaatttgttttatcaagcatataaatagatgcgcttaagctagggaa

SEQ ID NO: 4263 - DNA, 375 bp, Gossypium hirsutum
ctagaaacagcaactcaccgttgaaccagttgcaatgatcaagatttgatacttgaatgtttctccagcggcacttactagagtattggcaggaagatctgctttcactatttctgtgctaaggatcaattcaattcctgcaagcatgcgtacatgaaaagcatattgatgagaatagtacagattattgaataaacaaagacaaatagttaaattcccttttcgcatatcatcatctattactgcagcaattaaatttcacattaaacaaattcacacaaacatgtcgctaacctttttccttgtaccactcaggaagcaatctctctccgccacttccaacacagacatggaaaccagcaagtctagcaactc

SEQ ID NO: 4264 - DNA, 662 bp, Gossypium hirsutum
tttaaatatcaagactaaattaacgtaatttataaatattgaaggtgttacgctaccgcccttaatagttactgactaaaaaatataattaaataattaaataatcacttcataaatttacatagttaaataataaaaaaatattaataattaaattttttatatttaaaattcaatatatatatcccgccatgaaatatataattttctttttgtaggttcaacaaaaattaatactgacaccttaaaaaaattaatactgacatatttagggttttttttagtagtttttggcaaatggcaagcatgctttataaatgtcaaccttgcaaaacgcaattttaatccattatcaaccttatgctaactcaaaccgaccaactataagttcaaaaaacatgaccaagtataatttagattattggaaagttcattaactaaaagtcgagtacaaataattaaatttaaaatcaaaccatttaaaaatatttttttgaaaaataggttttttcttcttctaaaaatatgttttgaataaaatttaactttgaattgcgtaattgaaattgaatttttttttaacctaaaacaaaaattttgtaattttattacttaatatttagggtgttttcattctctaatagcggatgactatacacgtc

SEQ ID NO: 4265 - DNA, 637 bp, Gossypium hirsutum
acttgtatgtcttaccacaagagccttgaacctaatcaatctattgttctcacataaagcagtttccaagtgagtggcatgcaattatgagtattaagttgacaaaatcttcaaaggtgcaagaaatggagaaaaagaacttactctcttactgtattgactttcatcccattgcagttaacaactagccttacagtcataccaatatcctcgctgcacacatatagaaaaagcaccataagaaaataggcaaagaaaagactttagtctgcatagacaaaaagggaacaagaaaacaagactgagcttgaaatccgtcccaactcatggctttgaagttgaacacacagtttatgaatgttccaagtcctcaatagagccttgattggcatttgggagcagttaaacttctaaactaaccgtcttgagcatggaaattcttcagtacctaagaagatcctgataaagttcattgtgtttgttcagttcatccactggaatagaggcatactttgcacccaatttcttgcaaacagagtatggatgaatatctataaggggaaaggaaaatcaagaataagtagttgaagcactaggaaaagcacatcattaataacacaaggtaggaggaatgaag

SEQ ID NO: 4266 - DNA, 710 bp, Gossypium hirsutum
  misc_feature (624)..(626): n is a, c, g, or t
  misc_feature (644)..(648): n is a, c, g, or t
  misc_feature (674)..(676): n is a, c, g, or t
  misc_feature (680)..(682): n is a, c, g, or t
tcaatctccaaaattgccaaaccgatctaatgctcctccctcattccctggaaaccccaaaacctcccctaaaccctttaaaccaactctccttcgagcaaaactacagaaacatctgcaacctactcctctctttaacccacacaaggtccctcccaaagggtctccaactccatgcccacatcattaaatcaggcattcaaaccatccctctcatatctcatcacctcatcaacttctattccaaaaccaactccctctcttctcccgtcaagtcttcttcgaagctccacataaaagctccactacttggagctctgttatctcctctttcgctcaaaatgaattcccttcccttgcaatccagtttttccggacaatgcttgttaataacattaggcccgacgatcatatctaccctagcgctactaagtcatgtgcgattctaggaaggtctgatattggccaatctatacattgcttggagctctgttatctcctctttcgctcaaaatgaattcccttcccttgcaatccagtttttccggacaatgcttgttaataacattaggcccgacgatcatatctaccctagcgctactaagtcatgtgcgattctaaaannnacagatattggccaatcnnnnnattgcttggagctctgttatctcctnnntcgnnnaaaatgaattcccttcccttgcaatcca

SEQ ID NO: 4267 - DNA, 660 bp, Gossypium hirsutum
tagcagtgtacacatgtgaagagtgtggctatgaaattttccaggtaactaattcttgtcaggtttgcagtctaagtgttgaatatttctctttggtttgagacaaccttttttcccctcaatttgatagttgagtagtcttcaaaaagaacaaatcaagtattccagatatacttaccatagtcatctttctaatgatttttaaggaatcttaaaatgccaatttggccgcttcttctttatactaattttatatatttttcttcccattatgagtcaaacaggatgtaactactcgagtattcatgccgttgtttgagtgcccatcaaagctttgttttgtgaacaggaagaaggggaaccttatccttcaacttagggcatccaagttcttgaagttccaagaggttttagtttaacatgatatattaatataatagtaagaagtcactctgcattttctataatgtataagaaaattctttccaggccaagatccaaaagttggcagagcatgtaccaaaaggccacattccgcggtcaatgatagggcattttaggggggaaatgactggaaaggttggcgttcatgttaattttattgtagctaaaatatctaaaaagattgcatgaaatttctttgtagagacattgcaccca

SEQ ID NO: 4268 - DNA, 634 bp, Gossypium hirsutum
ctccctcctttccctctctacttcacgcctcctttgctctctctcttcctcttctctttccctttgttgcctctcacgctccagcctctcttgcttttctctaacttctctattcaaagcatcttgcatagctctctcatctctatccatatgaccagcttctttatttctagcagccttcagattctctctctccctcatttccttagcatgcctaaattttgcctcagccctatccattgcctctttcatggctgcagcagaagcagcagcagcagaactggtctcaaaatcatcaccgggaaaaccttcagcccgttcaaagttattctgggccttacccattgcaaaatcttcaagttcatcaatttgagaggtaacagagctacttgctgcagcataagctgattgagagttgtgtgagtactgagttgaatttgggaaagaagaaaactcattgaccttttttgcattagtggaagaaaatgagcctggcattggctttgaaacccgtggtggccttggaggtggtggtcttgaagggggtggggcgctagtaggttgtgtaaagaggggaatctctgatacagtgagccacacatcatcaaatgtgtcgaaagtctcagaatcttgg

SEQ ID NO: 4269 - DNA, 622 bp, Gossypium hirsutum
gatgtggtggcagactggggcatggtgtggattccaatgtctcccatccaaaacttatagattctcttaaacatataaatgttgaacttgttgcatgcggagagtaccattcttgtgctgtaacgctttctggtgaaatgtattcatggggtggtagctcaggcaattttggtttacttggtcatggaactgaaacaagtcaatgggttccaaagaaattaaatggacctttggagggaatacatgtttcatcagtgtcttgtggaccgtggcacacagctgttgtcacttctgctggacaattatttacttttggtgatggaacatttggtgttttaggacatggtgaccgcaaaagtttgtctgtacccagggaaatagaatccctcaagggcctacgtactgtccgagcagcttgcggtgtttggcacactgctgctgttgttgaagttatggttgggtcttcaaggaccagtaattgctcttcaggaaaactttttacttggggggatggagataaaagtcgtcttgggcatggtgacaaagaagctcgattggtgcctacttgtgttgccgctctggttgagcctaacttttgtaaagtatcctgtgggcatagcaa

SEQ ID NO: 4270 - DNA, 616 bp, Gossypium hirsutum
tgcatattgagcatcaaaatctttggtggctctaatgatctcttcatacaatattcttccattaaggggagtgacagagaaaaatatttcatcacttgcattgctttgtctttcttcatctgtatctatcttcctcttcttgaaggcaaacaacaaagcaattgatgaaatcgagagaccagaaaccaataaaagagggaacataactacgaaaagggttttgttgttgttgtgacccttcttagaaaaaaggtgtgcaaggcggtaatccactagcattgccacataattctttgtttcctctcaattattgtactgaagcatttagaaatgcttggcagttgggaatgggaccctggagctcattgtatgaaatgttaacagtgtacaagccccggagatgctccaaagaggctgggatttcaccagagagattgttgtgagaaaggttttacgtctccaagatctgcaaactttgaagttcccccggaatctcccctgaaagcatgttgtgactcaaatctatatgaaacagcctagttaacttgcctacttgaattggaatattttggctaaactgattgatgctcaaattcaagtagaatgacatggacag

SEQ ID NO: 4271 - DNA, 615 bp, Gossypium hirsutum
tttctgcattcgttttgcatcagtggacagtaagtaaaaaaattattaattaacttttctgtcatgtatctgctaaattgaaattggatcaatgttgtttcaattctttatttagactaagatctggtcctgcacattagggtttaatacttcaattaacataatggtatagagttgagctttgagcttttctactagcagtttcattgtgacttctaatattttacctaatttttgttttgttcttaactgtgttaattcttgattgaacacagttcaaaggtttatggtttaattctaagctattgggatcaaaattgtgatcattctacttgaccttgtatcggtttaaaataagcatttactgtaaaaaaaagactgcattacgaatttctggtaagaattggcatactgctttcaccttttattaagacagtcaaaacataggaggcggattgttgttgattttgcatctaataacaccatgcatctgtgttaggaaattatgatatttaaaagaagctattgtatatggtttttttttgtgcttattaatggctgcaataatttattgaaatttaccttttgtttctttatgggcacttctccgtcttt

SEQ ID NO: 4272 - DNA, 735 bp, Gossypium hirsutum
  misc_feature (627)..(634): n is a, c, g, or t
  misc_feature (636)..(652): n is a, c, g, or t
  misc_feature (654)..(659): n is a, c, g, or t
  misc_feature (661)..(665): n is a, c, g, or t
  misc_feature (668)..(671): n is a, c, g, or t
  misc_feature (675)..(677): n is a, c, g, or t
  misc_feature (679)..(679): n is a, c, g, or t
  misc_feature (688)..(696): n is a, c, g, or t
  misc_feature (700)..(701): n is a, c, g, or t
  misc_feature (703)..(708): n is a, c, g, or t
  misc_feature (710)..(710): n is a, c, g, or t
  misc_feature (713)..(715): n is a, c, g, or t
  misc_feature (718)..(727): n is a, c, g, or t
  misc_feature (729)..(732): n is a, c, g, or t
atctgcaatgaaaggaagtgaacaacactattagttccgatatttcactataatgtaccaatctacaagaacattaatttaagaatgtagattacctgcttcagattttgagaaaattgagcaagtggaagcattccattatcattaatattgaagcacttctttatgtcaagaactgtaagttgcttacatcccacagcaatggctaatagaccaattgatgagacaccaaggcatccacgaatctcaagtgcttttaacatccgacattttgacaatgatactaatgaattatcagtaattttatcattataagctatattgatcatctcaagtgcaggacaaccatcaccaatggcagcaatgcccgcatcacttattgccacggacctgaataatagaaagacaacaagatcaacacagaaaaagagataacatgttctttgcataagggcgcacctaatgtcttttagaccctcagaaccctcagcttgacaataggaacattttgtggtttgaactaacaggatctctgtcattattaaagttgatgctaagggagtgttgaatggccatagagattaaggtgctcatttagatgcacattcatacggttgtcatttctgnnnnnnnntnnnnnnnnnnnnnnnnntnnnnnnannnnnaannnntatnnncnttcaaactnnnnnnnnntaanntnnnnnngnctnnnatnnnnnnnnnnannnncaa

SEQ ID NO: 4273 - DNA, 767 bp, Gossypium hirsutum
  misc_feature (625)..(629): n is a, c, g, or t
  misc_feature (631)..(650): n is a, c, g, or t
  misc_feature (654)..(654): n is a, c, g, or t
  misc_feature (656)..(676): n is a, c, g, or t
  misc_feature (678)..(685): n is a, c, g, or t
  misc_feature (690)..(696): n is a, c, g, or t
  misc_feature (698)..(701): n is a, c, g, or t
  misc_feature (708)..(708): n is a, c, g, or t
  misc_feature (713)..(714): n is a, c, g, or t
  misc_feature (716)..(726): n is a, c, g, or t
  misc_feature (728)..(738): n is a, c, g, or t
  misc_feature (742)..(745): n is a, c, g, or t
  misc_feature (747)..(749): n is a, c, g, or t
  misc_feature (751)..(755): n is a, c, g, or t
  misc_feature (758)..(764): n is a, c, g, or t
ctttgaagattatggagagattttagtgaataggattacaaaatgatttaagtgcttatttgtttccttcaattgtcattgttgaggatccttatctagagtagttttccagcaaactaaaattgaaaattgtcgagattttttactctattgtgaatattaagtaactgataagtgcttagagagctaattttacttgtttgttttatatttggcattggtaccagcacataagttttatatattggaactaaaaccatttaaaattgttctcctttcatggataccataagctttgcctcttagtcttccttttataattccttctgaagacctcataggaggtaagggaattctgttttgcagattctaaagggatcaaaaattcaaagagtaaaaagaagaacagaagaagaaaagatcagcagaagaatacatctgccaatgaagccattaaaaaccataataaggtgtgaacctctagattattctttttttctgttggaatattgacaagttactgaagttcctctcctgttccaggagccaaatggtcttaaccaagtgtgctgtagtgccgaagttggtcagacagttcgggctggtgttggtgctacctcatacnnnnnannnnnnnnnnnnnnnnnnnncccngnnnnnnnnnnnnnnnnnnnnnannnnnnnnactgnnnnnnnannnntcaagangttanncnnnnnnnnnnntnnnnnnnnnnngtgnnnngnnnannnnnttnnnnnnnttt

SEQ ID NO: 4274 - DNA, 630 bp, Gossypium hirsutum
agatcaggattacctaaccccgactcggaagcatcctcagttccattttgtagctttgatcctttccctttcttcatgggtaagactcccgtgtttggtttcttcagagtcttaactttccccttattgatgggaggtttctcaggtggagttttccccttaacattgggttttgttgatgcttcagagtccagttgtggccgagacactttcttcacatcacctgaagaaatggattttacagctgtgggtctgggcttgtccagcagccctgacttcttaccactcgatgagcttcccttcttagaagatgaattactacgactatcatcttctggtttatccacctcctgttcctcccctttcattatctcaacttctgtactctctcctccagcaagatggtgcaattccgaatcaatcctggactcttcaccatatgatccaaagctctgcctcgaaggtgactgatcagaactctgcatatcacatacattctcataaagctgctcaatagaggtctcaacctgaaccatcctatcaccacgagggctttgcggacttggtgttctcttggaaaccgaattttccttaacatgtgcagaagtccctttcatttcattcatcaca

SEQ ID NO: 4275 - DNA, 662 bp, Gossypium hirsutum
tttcgatatatctatataatagtctatgggaaacctagactctaaatgaaatattcctttgcacctcacccacaaacaattgcacagcaaatgccatatttgcaatttaacacctagcttctcaaagaaatacaatatactgactggctgatgctttcaatgatgcagccagattgatacttaaaaggaagttttcggttagtaatgatagtatcgcatttcctaattacaattctatttatcaagattcttgaactggaaaatctataacttatcgtaaatgtgaagaagttgaaagtaaaaagtctcatccactctattcaatatatcagactaattgcgggagagtatgggaaagaatagaacttatgaattagaaaatcgagcaaaaggagaaactggcaccatccaactgaacaaaagaaactaaaaacaatgaaggattccaaagtgtacataagaaaatttctgggagtatatagttcatcaattgtaatgatcaatgtaatcagtacatcagcaaacatctaagataacagcctccggaacttatttcctcccttgaagacaattccaagaaaattaaggaagaagaaacccatatgactagttctgtgttcttaaaaagctttcaacaaactctaatggcaacctaccaatgt

SEQ ID NO: 4276 - DNA, 418 bp, Gossypium hirsutum
gcgctttttccattgtagatgttgctgagctgttgcaagtttctgatggggggtaattggtggcagcgattgttgttggggaagcggcggtgtatgtggtggtggtgattgaaagtcggagtggttgagggtatgaaatggtgagtctggatgcaaggtttcatttgcagaagaaggtggtggttgttgctggtgcaattcaaggttgggtggtggtggtggcggctgtgacgagtgtggtattaataatataggacatattgagacaaaaaatgccttcaatttgtttagcaagtccatgtttaaggtgttggtgaaggtgaaactgaggatgggcagagttatttatatgtgtgggattggctaaaagaaaaaagttgatgttatggaaagaaatgaaaaattcagaaaaaaaaaa

SEQ ID NO: 4277 - DNA, 628 bp, Gossypium hirsutum
aatataaaataaattagggataaactataaaaatagtaatttctgtttgattcaaattacattttaatcacttatgtttgaaatattacgttttagccacttacgttattgttttgttacgaaatgatcactttgctattaaactctattacctccctaacaacaagcctatgtgacagtctaaataagttttaaatgccaatttagatatccaactaaaacaagaataggcttttaattaaataagctcaatccttttggattaactccgaattaaaaaaaaattataaaaaatgaaatttttggtattgagatagttaggcagtcattttcttaaacatggataagtttttaaaaaaaaacatttaaaaaatagtgtcttagaaagacatttaacttcgaaagaaataacgtgaaaaataccattgtttgaatcaagttatgtacaaaattggttagaattttattgtcaactctaaagagataattatttaatatctaaatataaataattattagaaatattgaaatagtcaaccttttttctctactactaattaaggaagaaaatattggttaaaattgggtgtttaaatttcagttaaaattgaattaattgacctaattc

SEQ ID NO: 4278 - DNA, 635 bp, Gossypium hirsutum
ctgtccattactcaaactggttccttggtcatagctctatcaatgcccaccagtggcaaactagtataacttagggcctttcctacatatttcttgagttgagaaacgtgaaaagtaggataaatctgataacccaattgtagttttagcttgtaagccacctttcccacttttgcttctataccataaggaccaaaaaatttgggagaaaaacttttggttgaagattcttcttattgtatgatgcctataaggctgtagcttaaaataaacataatccccaacttggaattctctgtcattgctcttgtggtctgttgtttgcttcatgttgtctttggcctttttcaaataaaacttaagcaacttccttgttgtctctttctgttggagacttctatccactatgtcaacagaagatgaaccaactaggtaaaataggcgatgaggaggatcttagccatatagagcctcatatggggtggagtgaatggttgaatggaaagtggtgttataccaccatttaactaggggcagccaaagcatccaatcaccaagtcttttaccattcacacacttgagatattcctccaacactcattgagtacctctatctgcccataagattcaagggc

SEQ ID NO: 4279 - DNA, 593 bp, Gossypium hirsutum
aaactctatttctcccttctcttctataatttagttttttttccatgaaacaactttagatattacgaatctacgaaccaatattcaaacagcttttttctctgatctctaacactaactgtcaaatcgactttgatcaatgtatgttcttctagttgttgataggtattaattcacggttgtcgaatcgtcgcttagaacccacgaacggaactttaaaaaagaactttacagtttagtaacttaaataaaaaatttaaataatttaatgacttaaatgaaaatttttgaatagttcaatggcaaaaaatttataacttttttagttaaatgaccaaaacaaaaatttactcatagtttacaaactaatggtgtagtttactctaattttattatttaatatttgtttttttcatttttataacattatcttttttatttctgattttgatttagcccttggccagtttgcgctcggtttctatttaggcttggattaaaattgggtatgagtttgggtttaatttgtaaatggattatgggattttgggtatattatatttaataaatacattaggtagattaattcggtt

SEQ ID NO: 4280 - DNA, 647 bp, Gossypium hirsutum
  misc_feature (9)..(9): n is a, c, g, or t
cacgccgcnacagtggggacccgccttgtatggtgctcaccaccaccaccacccagcagttccccatgcaccacctcacttctgtgcatcaccagtgccacaagagttctacaccactgccgcaaccccagctctacctccacctcaccacaccttccagcaccaactccacaacatgtacaatgcacgaaactcaccggaacctgacgtcagggaagcgggagatcggtcagagagcattgaagatggcaagtctgagagtggtagctggaaaggggagagctgtggggatcagagaatagggctagctgcactgagagaagaaggtgaagaaagcaatagaagtgagatcactctaaaattctaatagtgtttttagggtttagggtttcagtaatggttcatgctctatattattttgaaataaaaaaaaatttaatatcttttgttctaaataagtgaagcgaggagaaaagagtgcattaaagaaaaagcaatcgtttgttttgtacttctcaattgattttcactctctttgctttcaatgtttatttcagaataagattgaatattggattatctgtttttagcttttcttttattttcttttcttgtttttgtgatttttcgctttttacccaaagtgt

SEQ ID NO: 4281 - DNA, 607 bp, Gossypium hirsutum
caggatgacatatatggcagattaggtttagggttgagaaataatgaagtatctaacagttgctgagaaaatgtactttgctattagattctttctttaagccattattttacagtttttttaatataaatgtcaaagtgtacgctacccataaacaagagttgaaattttgacagtcttatatattttattttgaagttgacaaaatgtggatgatgatatcaatacatccaaacacagcctactgcaaaagcaatggttattgaccatcaatgatctctattcaaaagcttcttttttgggaaaccatggaatttgcacctcaagtatttgtcttaacaaaaagaaaaagctatttagttcaaagcaatcttcaacttcatttgttttcgccttctttttgtttctaaaacgaccaattgggaagccttctgtttcggagactatgaatgttgtcctccaaaccaactccggacataactggccagaactggtggatttactcatcactggaacccgtcaaaccctttgctaccatgcaagtttaatacatgataacacactggtgttgcaggagatgcttcagttcacggtagagtaagctctg

SEQ ID NO: 4282 - DNA, 596 bp, Gossypium hirsutum
  misc_feature (543)..(543): n is a, c, g, or t
  misc_feature (547)..(547): n is a, c, g, or t
  misc_feature (551)..(551): n is a, c, g, or t
taaatgcagtggctgctagtaccctaggaagtgaccacaatgcttatgaaatagagtcagacacaatattccatgaaataaaagtaaggctcatttctagttatcaaaatttaactcttgctgcaggctaaaacatactttacagtgaccattttgtttaagacgaagtaagcaaatgcaatgttggatataaactgaacagatcccaaggctgcaagaagtgactgccaaggagtaagaagtaaggaaaatgtgagaaaaaaaatgcagagttactaaaatacaaagccttgcacaatggtaataaccaaaaaaaaaaaaaaaaaaatttaaaccccaacccccttttccccaaaaaaattaaacaaatttttttaaggggcccccaaaaaaaaaatttccccaaaaaaaaaaaaagggaaaaaaatttgcccccttcccaaaatttttttcccaaaaaagggggggaaaggaaaaatttttccccccccccccaaaatttaaaaaaaaaaaattaaatttttttttttaaaaaaaaaaacncccnaaangaaaaaaaaaaaaaaaaatttttccaaaaatggccccattcaaaa

SEQ ID NO: 4283 - DNA, 608 bp, Gossypium hirsutum
aactcgatctttcatgtaggataattataattattgcccttgagaccattgaatcctatctcaccttcgggtttcaataatatttttcagggatccagtattaaaagagaagcaagggcaccgtggttgaatttttattatcgagccagttcacaacaaaggggctatttctggcatatctgaaaaccggaggagcgaggtagtttgtttttttttcctttggattaacatgtttgctctagctttgatttagtgaaacatcggaaaaacattctaatttttgtgaactcgaatgcagtagttttggtatttgcatctgttttttttttctctaggcaaagcattaacgatgaccaagtttaactataacaacaatgatagctttgctgccattaggtagcattaaaatgtaaaaaagatatttgtgctcgtaagatactcatggattgaaaaaactcccatcggtttggccattgccttagctgagcttaaaccctcgagaacagcttgcagctcagcaaaaagtacaggggccatactaatcctcctcccaatactgcatacccccttccctcatcccttgagcatcccgaattctccgttaccca

SEQ ID NO: 4284 - DNA, 593 bp, Gossypium hirsutum
  misc_feature (21)..(23): n is a, c, g, or t
aacttgggtcatcatccattnnngagaaggctcttcaacttccaatactaaatctaatcgatcagatgcagttgttcattcgtcttgcacaggaggggatggcactgccaatggaaatcatttggattccattcagctgcaacatgaagaatctagtgttgggagtcatatagagatgttttcatctactgatgcctacatgctgatgtacaatcttagttctaagaagaatggtgccagcaccatggaaatagaaggggatgcagttttcttacatgatggaatttcacttccatctcatctttgtgaggaaataacaaacttgaattcatcatatgttgatgcttgtgaacaatacaaattgaagaagaaaagagaactagatcacataacagaaaggagacaggaagtgagatcagtgctgtctgaagctcctgttcattcagttgaagaaccattctattggatttccacagactggcttcgccaatgggctgataatatttctccaccgtaagtatagtgctacattttatttgaattcttccttttttatttgctcatgcatgtacggatgttaaataattgacctc

SEQ ID NO: 4285 - DNA, 520 bp, Gossypium hirsutum
agatgtgcgattcatcttgtttgatataaaacgaataaccatcaaacgatatggtcagagttgagagtaagaaagaagaaaggaataagaaggaatggggtgagcagccttaagaaggaattccttgctatctagtttttacagttcttatatacctttagtcccttatccctagacaccacatgactaattgccattcgcgtgtcaagtgaccaagtggtatgattgtacatggctaagtaaaattgatttaccctgtgtcatctcaaatgggatgttgtgacaagaatttaatgtggcgattataagggctcacgcaattgttggcccgaggagtctcccctgaggagcttgaggggtttgtttgagcggttcttccaaggagattgtccgcaccgtttataggcttactgcttggtccaaacaatcaggtataacataatcaaattctattgtgtcatgagggaaaatacaggttcttaatatactatattcaagccagctttgtccgagtattatt

SEQ ID NO: 4286 - DNA, 640 bp, Gossypium hirsutum
  misc_feature (546)..(546): n is a, c, g, or t
  misc_feature (581)..(584): n is a, c, g, or t
  misc_feature (612)..(612): n is a, c, g, or t
  misc_feature (614)..(618): n is a, c, g, or t
gatccttagccagaacagctagattaagtgattcacttttctactcattgtaaccatcagtgcaaagcctaaagccaaataattccttctggcaagctcccaatttccctaattacaaatttcagtaccaccagctattgcatctttgttattcaacatagaatctaataatatctttctcgcttcaatattatatatataacaattctaatactccttaagcaaccagtttgcaaaggaaaatttaaaaatgtcaacttaacaaaaatacatattaaaaccccaaatttgtgaattggataaatgaaaaagattaaattttgactttctcaaaaggaaaaggaaaaaaaaacagaatctgactgtcaatgtcaaaaaaataaaagaaatacattccctgtccgggaaagagaacgaactactcctcctcctaatcataacgatcacgcttgctctggaggagcagaaggacaagaaggagaggggggcacatgtcaaaatcacaaggcaggaactcacggacactgaacgtgccacgactctggnatttgaccatactctggtgccggaactctatcacnnnntgcaactccatgtgggagtggatgtccngnnnnntgtacatgtcttgtagcttgtt

SEQ ID NO: 4287 - DNA, 644 bp, Gossypium hirsutum
ctgtctggcttgccgtgaaatcgaaataacttacatgctctcactggtttgtcccccttcttgtctccctctcacaatactaaataattcatcaataaccatagatacataccgttccaatcttaattaagtatctaatcttgttcgaagtttgattatctagttgttttaaaatggttggtagattagccaatagccatgtaggacattagaagggatatatatatggaaagagaggttggttatgcagaaaccgccatttaaaggatgcattggaatatttgtattccagggttggttcttttttcctacgataaattttcattaaaaaatttcccatacgacatgcaccaatctcgttcggtggtgattgcgtccgtcccacacgattgagataggtttccattcccatggtgattacgggtggaacaaatcataaagaaaccaatttagatttgggggagcttcgagaacgtcacctatccaaataataacaataacaatatgcattggaacaatatagtaatctaattgcaagcatgtggttcaaactttaaactacgctgattggtaattaagttttttcctttcttttcttttccttttttcctgatatccatattttaatttacataattttcacg

SEQ ID NO: 4288 - DNA, 534 bp, Gossypium hirsutum
acaaaacaagtggtactctctcgtcactgatttggttagtacatatttgtaagcttggagtattaaataaataaataaataaataccttgagagaaaggcatgaggaggagcaaagacaccagaagaaaagtcttgaaccaaggagctgctgccatggctgatattttattaaatgaatatgtggaataatgggcaagggaagctgtgcttttatattggtagctgaggttcaatatgcatatatctatgtccatggtgagaatattagacaggacagcaagctaaacttaaggttattgtatgcagttgtgaaggtggtgggctgggtgcactgcatatccacagtcctctcagaccccacccaatagcaacagaagaatgatggtgtgcattcattccccccacacaattccttcaaagtcaactacactgtttctatatattgtctacatcataaaatggcaaaaccattttgtatcattttatacaaaacaccacaagcacactggttaccccccttttcctttgcatgg

SEQ ID NO: 4289 - DNA, 639 bp, Gossypium hirsutum
atcccacatttgcactctttcctctatgatctcctttgtatcaaaaaagaaagtgaaaaaggaaggtatgcaataggataattcaataaccatgtgtaccttgtacttgtgatacccatcacaagctatgtctccattgccttcgttaaaattccctgaggcaattaatcagacatagttaagcctcatatcatcatataatatctcaaatttatccctttagttgaatgatgattgataaaagtatcgttggtatttaataggtttgtaatttgagtcttagtccatggagaataaaaggatttcctagatattccaagacctcgctggtttcaagcaagtcccccaggggggaagaaatattgagaaaagttcccccagcatatgcatatgagaaatctgtttgtgtttgctctatgagcaacgatttgagattggaattgcttccctatagatacaaccttctgaactatacatacacagagaaagaaaataagacataaacaaagcaatatgaaggaaatttagaaagtaaaaatcattcaaaccttcagcatggacaaaagtatcccatatgctaggcgtcctaccatctttatcagccgcaccttcatactttttcatttgtcatttggcagc

SEQ ID NO: 4290 - DNA, 588 bp, Gossypium hirsutum
  misc_feature (579)..(580): n is a, c, g, or t
ctttgtgtataaacctttgtttaccttactgtcagcttatttacaattagtgtttgcctttgttattcttttttgcagagatcaactctgtgctcctttctcactaccgtaatcaggttaatatgactctttccatattttaaaacttatctgtggctaagggtttgatgttgatgactataagtttccatcccttcggttttgtagaacataattagctttgctgcatgtgttaatgttctttagtgcgtggtatatctttagtttgtgaaggcaataaagaaaagttcaagttgtctaacagcttgcttttttatatgcagtggtgcggtggtagcattctatatgtataagcttctatcgaaggacaagcctcgcttggaacctgggactggaaattgatgtgctcttttgaggttagtttattttggtatgcatgttctgcgccctctgtttttttcccaacaggtatacatgtacgatatgttctatcaccatctatggccactgtctggttcattgtaggaaacttgtctgttcattacctcttttcttttattataagagctcaaatgtgcnncatataga

SEQ ID NO: 4291 - DNA, 643 bp, Gossypium hirsutum
cggcgcctaaagatgtcaagtctaacatcgcatatgatctaacattagaacaattatcaagtctcttaaccatatcaactctgaacaacatggaaatggatgattggtataccaatagatgtaactgagtcggagaaagaagttcgaggttttctccttataaaacgaagaggctcccatttcttcttttcggtgccagttttatcggaactttcagcactacaagtggggggaaaaggacaaacaaatgatatgaacaaacataaaataagaaaaaacaaaggcagcatgaaacaagtgaagagcaggcatggcaatggctataaacagacatgagcatagatcctgtccgaagaaaaaggaccagagagattaaaagagccattgaataggcacctgttacaaaagatggatatgaaactcaaggcaggggcaatcttaaaacaatctaatgcagaatagaagatataaaagaaaaaagcatggggaaaaaaagcatacatatactcttatccaaacgataaatatatttatatatacacttatacatacaagcattacatgtaaaagagatttgaaatcataaaagcgcagacacatcaaaacccaaaagcttagatcttccaggttgtggtaatccttc

SEQ ID NO: 4292 - DNA, 630 bp, Gossypium hirsutum
ctgcagcgtttgagcaatgcctggtatttgcggatgtcggcatcactcacactcctacgagcaaacttcattgattcctcaaaatgagcaggcttgatttctgccacttcatcctccacatcttcctccatagcttcagggttctccgctctcctcctttctctctcaatatcctgagaattacataagatatctaatgttataatcccaacctcatgagatcattgcatattctaccatctacagcacagaacataaatttagcatagtcgaaccttttcaatgttctctctgatggcatatttacatgcgcgctgacaaatttcagtaatatcagccccactaaaaccttgagtatacttggcaagagctctgaggtcaacctctttcgcaactggtgatttcctcaagcaagccttaaagatctgatggcgagaatcctcatcagggaggggaatgtaaatcaactgatcaagacgacctggtcgcaaaagggcaggatcaataatgtcaggtcggttggtagctccaattataaaaactgttttcttggcagacatgccatccatctcagtaagaagttgattcagaaccctatcagcagcaccccctgcatcacctacactgctt

SEQ ID NO: 4293 - DNA, 589 bp, Gossypium hirsutum
ttgttaacatgaatatattttccccttgaatctttccccagatgtgtcgtaagtgggtatggaaagattgcaatgcacgttctggaaaagcttgttgctaatggtgctcttcccattacagtatcaggtaattctccacccacattctgtacattgggaaagccattacatataatctttccgtgcactggttgcataattcctttggtttcattatcattctagcttgaaagatggtcacggtgctgatttcacttattttaatgaaaaatgctcataatgagacagttgcaccattaatgcattgatccttaagctaaggatattaattggttttaacctggtgttcctcactgctattttttcaaagtatacatcgaccttatccattctgttttgcttcagaaaagtgactcagcaattgtattcgagttcatttttcttgtttccaagttgatatctaggtcatcactagttttgtgtatacctttttaaattgatttaggaaaatagtcctgatggtaaacatccttatttttgcttttttactatgtggagcgaaacttgaaaatgcatatcacatgatgta

SEQ ID NO: 4294 - DNA, 650 bp, Gossypium hirsutum
tatgcttttggtttattgtacatgcaggaaaatctgctactcagtctaatcaaatcatctcttattgtcatgttggcaaccgatatcgtaaagcttgctcgtgcaattaaaccaacatcttttgtgggcatatcattgcagaatcaatcaaacacatttcaaatgatgaaatttttttaattattattaaaatttttcacctcgctgatttgatcactattttaattttaagattatatatttgaatgtaaaaattagtataaagccgataactaatcaatttatgaatattatttttaatgtgtggaagcaccttaattagtaaacaaagttcaaacttgcatcaaattatactcccaaaaatatacaaattttagctaacctttcttctttcaatccgctctgcaagacttatattaggaattagcaaaatttggttggatttaaaaaaattaaaaattttcaaatttaaaattaatcaaattgatttattcgagttattcaattttctcgagtcaactcagacaagtaattctattttcgagttcgaatcaagttgaattttataatttgaataactcgaataatttaataatattttggtataactactcctttagtccccgtcaagtttaaaaatgagcaaatcg

SEQ ID NO: 4295 - DNA, 632 bp, Gossypium hirsutum
atagaaagtaagtacaagtaatgcaaagttaaacgtgtaagagaaactaattatagagttccaattgtgcaagtatcattattagacacagtacacttgcttcaaccaacaacgaccaaaaaaatgtagagccaaatatgaaaaggcggcaggagatcaagtattttcaaaatcctatgagttcagataaattctaatctcaagcaatgacagatataagcaaaagtagtaaataaagtaatcagaatttcaactttgccactgataacttttcaaaataactaaagccaactgaaacaaagggtttcatgtgaagctcatcagcagcagttaggtatattcagaattgaatggccttaatatatgatctttgatatatgtaaagccaatatataagtatgattctaatcatttagtaactttaacaaagagagcagtgaaacctaatctcaagaacttaactatacaaccaaagggttttttttttcttttaaagctcttaggcttacctactgtgcttccaacaagctaaaagttctcttacacttaccgatctactaatgaacagtaaaaaagttcagttgtttataaatttccaaaacatagacccttagaaatcaactaaacaacag

SEQ ID NO: 4296 - DNA, 604 bp, Gossypium hirsutum
agatacgacgaaaggggagtgtataatatatagtaaaaagttttgaaatgaaaggcatttttctagatgggtccggcactcaaacctaggttttaatttgagtgaagctgaaaggaaaaaccctaaatgcttgaaccaggaacctaattcaaaaccctagtgagagaaatcccatcaaattttccataccaagcttgtaattaagacatcaaagttgtatttagttaaaaaaatccaattgcttatcaccaaaccattcacttgggtgttcaaattagcctaaaaggaaaatgtacattgcaaatttgatatctataacatctgtttgaagcaagagatttttctatattcaaccaaattcacatgaattggggcgaagcctgattgatcgcttttttgtccactatttttattgttccgttttaattcttctgtaaaaagaaattagggtttcctgtggaaattcagaaacgttacaaattgagaaatagctgacaattatagaatttaataagcaagctccatttctactaataattaatttcacatgaaaatatttcaagtttacaacttcactaaaacatgaagactgtgcaaaagatca

SEQ ID NO: 4297 - DNA, 618 bp, Gossypium hirsutum
ggctttttgcttttatttttcccccttaaataattacctcacttccatcttataacattttcctaatcaggtatataaccaattatatcatataaaaattgattatcatttataaataaaaaaattctcaaaaaaacactgctaatcccatccttagtcaatcaatcattgtcaaattactttcttttgctataaataatttcttctttcttttttatttgtctcattataaccattttaacggttacactctacatccctcttcacatagaaagagtgaaagaaacagagagaaagcataagattaatcaaggaaagaagctgtttgtataggttttaggcaaccagaaaaaacacatccagatggaatttagctcctttttgacgtccttagggacttcatttacgattttcataattttgatgctgctctttacttggctgtcggcaaaacgagggaacgcggtggtgtattatccaaatcggatcttgaaaggtttggaaccatgggaaggcggtttaaagacacgaaaccctttggcttggataagagaagccttatcttctactgaacaagatattataaacatgtccgggattgacactgctgtctacttt

SEQ ID NO: 4298 - DNA, 595 bp, Gossypium hirsutum
  misc_feature (584)..(586): n is a, c, g, or t
tgttctgcacattcttgtatgttaaacaaagtttcggatttaacggtatatgaacaaatcaaggtaattttttcttgtttgttgttatagtggttgcaagagttcctatttctagcctttagacatgatcatttttctttcatatatatatatatagtttctcttctttgtcttgtttacaaatccatatcctttgaattatatagatgaacaaggcatattttgattttccgaggaaaggcggtccatcttgtgtgaagtggtccttgcatgtatgttttaaaccatgaaatgccatattcttttcaagtgtacatactgtgcgaatgcttgataacggaaaggggcctctggcattgcagttaaatgctgaaaagaatgtaaataccaaagaacctttgaggctaacatctaaagcaggaagcttagggaaatggtgatatctttgttcatggatcaactcatgcttgaatttaaaatttatgcctttggcaggctgtttgtgattaaattctggaagttaagggtcagtcataaacctcgttacttcatggacatgcctggaaactcgagcaacgcgttgnnnccgaatggt

SEQ ID NO: 4299 - DNA, 647 bp, Gossypium hirsutum
tctttgataacaatgcatgcatggagcattgaagtctaattcgtcattaaaactgcacaatctcattatcactctctttcctcactgatttgagaaagaatcaaataacacatagcaatggtgaaagatcattcacataaacaggattacctcagtttcaaattttaaattttagaaaagaatggatctgactcaaaactatattttcttagaattttctagaggaagagtctcaaaaacaacccttttagaaacattttgaggaaaagaataaaaaacaacctttcttacagaaaatgagaaaacaaaagtgagatatcctcatattagagttctaatttatgggttggaacacagatacttcagttttacagcaaaacttatttcctgtagagtttcttattttcacacgaaataaaagttaagaaattaaaataaaaaaatattcagcaatcctgaaatgcctttcagccttgcaagaaacaaatgataagaacaaggattcctgtatctctaacataactatagttccaaaaaagaaacttcaacaggagaagagaaaaggataacagaaaaacatgatggacgctcaccaaacagcaataagcatgcctgccaactgcctaaatccaccgctcaaatttctc

SEQ ID NO: 4300 - DNA, 661 bp, Gossypium hirsutum
tatggtaaaatggttccgatatatcataacaagcatattgtcttttaagagaaattgccacactgatgactgtattgtagccaccagtctaagtggcatcagaagcaaaggccttcagaatctatctagtactcttttctctttctgctgctttctccctggggaaagattaatcaattggctaactcgatcaggaatggaaacggagaatatgaaatgggctctcaacccaggccttgtaaggtttcctagcctagcctatatcggtgtcagacaccgaaagcataagaaaaggggatgccatcaagaagaggttgggctggttttgagctgcccatgatttaagtgaatatccacagtctactttccttggtaagaaaattgtaattatttttctttctgcttctctaactattttacactcctctttccatgttgttaccttccaatatgaacatgatcagaactacttgttctttaataaaaaaaagctggcaacagagcaaaaagtttcaacaaagaatacgcacctttactttcaaaacattcaattcctgtaccaagcgtgcatataaaacatatggaatttccatgtcttggtaaaacttgaactttggagtcgaaaatggaacgaactgagcaagcactgattcgcttacac

SEQ ID NO: 4301 - DNA, 604 bp, Gossypium hirsutum
  misc_feature (568)..(568): n is a, c, g, or t
ccaatttagttacggctagctgggattcaaggtggatgctgacctatgaccattcaattttaagttgaatgctttaacatgcaatcacagccagaagttttcgttgccccatttctgccagtatttgctacctcatttccatagtcaacttgataggcctatttgtgtatattatcaattttgggacttaatgggagtgtcagtttgtgttgtccacagtatttaactttggagaatgttctcgtgtcatattaaattggtgcaaggttgaatgccttaacagtcttaaaccaagcatgcaagagtgactatgtcttgataacaagtgtagtgattaaaattttcattttccattcactggcaacggaattcatattaacgaaaggaagatatctgttaaacaagtctacaggaagttttcaacggaattatcacacataaaggaagatgaagctatagagatagatgatggctaagaacctggcttttctatagcagactggtatatcataaacgaaaaaaatgctgcatcatgcacaattcatggtgttgaaaaaaaaaattaaanaaccttaataaccaacaaggtgaacacataaaattt

SEQ ID NO: 4302 - DNA, 615 bp, Gossypium hirsutum
  misc_feature (519)..(519): n is a, c, g, or t
  misc_feature (521)..(521): n is a, c, g, or t
  misc_feature (541)..(542): n is a, c, g, or t
  misc_feature (576)..(582): n is a, c, g, or t
  misc_feature (585)..(586): n is a, c, g, or t
cagactgctgttgggttttgttatgatcttgtcgagaatcaaaggttccaagcgacaaatgaacagcagcagcagcagcatctttgtactttgaagaaacagaagatgaagaaggggatgaaaatgggaagttattgcttgaaatttctcttatcatcaccacttcttcatcatcttcctcttgatcttcattgttacaataataccctttttcttcttcttcttccacaaagttcatcataatttaaatgaaaaaaagaaacccacaaaataaagttggttcctaaaggaaatatataatttaaaactaaaaaacaagaaactgacctgcaaaaaaaaaaaatttttttttttttttaaaaacccaaaaaaaaaaaaaaaaaaaaaaaaaaaaaaaccaaaaaaaaggggtttttcaaaattttttttttggtttttaaaaggggttttggtttaaaaaccaaaaaaaaaaccccccttttttttccccccttttttttttaggttaaaaaaaaaaantnttttttttttttaggttccnnaaaaaaaaaaaaaaaaaaaggaaaattccccaannnnnnnaanncaaaaaaaaaagggttttttttttttttt

SEQ ID NO: 4303 - DNA, 205 bp, Gossypium hirsutum
cgaccatgcaggcgtgtacttggggtcttcccagaatatgttgtggcctctggctattatttggtggcctctaacaaactccaacatttggtcagctaaggtgtagttggtcttcccttgatctggttctgttgcataccatttcagttcattttcaaacactgctgcattgaatcgttcaacaaaccagttctggaagacaaaa

SEQ ID NO: 4304 - DNA, 568 bp, Gossypium hirsutum
tttttcttggaatgtatattccaatccaatctgtgcattccctctcctgcattacatcctgatatcactacttttctcactctctatgaaactagtggacatgcatgcctactgatcattcagtgttggtaaaattaattaaaccattgtggtgagttactttgaaaaattatatgaatcacttgcctgatattttaactgctgcaaacttattactcacactagtcattgacctcatgccattgagtgcagttcatcatggtggttcatctttaaataactgtacaatagcttagcacttgcagaggagaattatatacaatcaaaacattgtacaagaacttcaaacttaattttatctagttaactatcttaaaatatgctcgagtttcatcattgtgatttcttggggcaaagattgattcgtaatagcagttgaatctcttcattcaatcatcaattacaaccaaaggaagctcctcttatcataacccttcatttccttccttatgtttcagaggacctagacatgcaatttttatctgcctctttctcattttgcagaaaa

SEQ ID NO: 4305 - DNA, 445 bp, Gossypium hirsutum
atatgaccagtaatactagtattagtgatgcttaaaaccttgatgttcattaacttttcaatattctgagggatggaaccttcaagctggttattaccaaggtacaaagtttccaaattggttaattggtacaaggaaaaaggtattgaaccaaacagtctgttgtcgtagacatcaaaataagttaagtttgataagaatccaactgcagatggaatagatccattaattttgttggcccaaagaattaaagatttgagatttaataactgacccaaagcagaagggattggaccaacaattccacaaccacttaggcttaaagtctcaagacccctcaaattccacaaattttgagggattgtattattaccatcatcaaattgattcctatccaaaagtagatgcctaaggttggtcaatagcccaagaaacggtggaatgc

SEQ ID NO: 4306 - DNA, 645 bp, Gossypium hirsutum
actctataaatggcctccggtgaagtccccaaactgttaggaagtgtgaaacaaaaatctgacatgctagatgtgaatcactcaaaatcaagattcatgactaatcttctttaaactaggtctgattagccacccacaatatctatccaattttattcaagggatcctgaaaacaacgatttaagtctactttgtacaattatgtgtggaaagaaattaacacccttacgttcattttcaattctccaaaacaactaaaagttgatatccactccatgccccaattttttttccaaaaatgatttataccgaattaatcaaaataaaacttgattttaaataaaaaaaatattttcaatttgatccccttaaacacattaacatttagtttctaatactaaattgagaattcaatttagtcctaaaattaaatatgaaactgaaatcgagtccaaaaccattttgaataaactcaaaactccattgacaatagaacacaaaatttgggtgaagtgggtatcaaatgaaaatatttaaacgcaaaagcgaggcaagttgcgggtgtacaaaatttgtccatccccccgatgtcaaatttttgccctgattcagtacacaactttcctaaacagatgttcatccatc

SEQ ID NO: 4307 - DNA, 634 bp, Gossypium hirsutum
  misc_feature (532)..(532): n is a, c, g, or t
  misc_feature (560)..(560): n is a, c, g, or t
  misc_feature (577)..(577): n is a, c, g, or t
  misc_feature (579)..(579): n is a, c, g, or t
  misc_feature (581)..(581): n is a, c, g, or t
  misc_feature (590)..(590): n is a, c, g, or t
taccacaggatcctaccctttttaatggaactgttagatacaatttggatcctctatcccaacacactgaccaagagatatgggaggtaaattttaatttcttttgccaatgattccttccatcattttaacactatgaatataatggatagttgatatttcatctgcattttaaggttcttgataagtgtcaacttcgagaagctgttcaggaaaaagaagagggactgtactccttacgtaaatttcctgaaacttgatcatatcctttccttttttgtttaaatggtgaacaaaaccaattggtcctgaaattggggaaaaaggaaccaaatggaacatggggaaaccaacactattttggttaaggccgggtccggttaagaaaaatccaagaatggtggttgaagaaacaaccacatccaatgataatggaactgaatttattcctccaaaaaataattgggcttaatttgcaaaatggactggtatccccatggcaccccagaaaaccaatggatgggattgcccnacggtaattgacattttctatggtgagnatctttaaagctgaccngncnatcaacctntatttacaaacattctttttcttgcatgttcttctttcttttga

SEQ ID NO: 4308 - DNA, 873 bp, Gossypium hirsutum
  misc_feature (713)..(725): n is a, c, g, or t
  misc_feature (728)..(781): n is a, c, g, or t
  misc_feature (783)..(789): n is a, c, g, or t
  misc_feature (807)..(808): n is a, c, g, or t
  misc_feature (810)..(824): n is a, c, g, or t
  misc_feature (826)..(834): n is a, c, g, or t
  misc_feature (836)..(838): n is a, c, g, or t
  misc_feature (851)..(855): n is a, c, g, or t
  misc_feature (859)..(860): n is a, c, g, or t
atcgaaactcaacatgtgctcttcctagcttcagattctaaaaataaaagactcaaaaacctggttcatttgacatccacaacaatcaaaaacaaggtaaaagctttattttctttttatgacagtaatgttgcagttatctcctgcatgttaaacaaaagttggtttaagtgtttagctaccttcatagacttcatttcatcaagcgcagcaaggatatccatctctctttttgaatccaacgttctgttctccaaagatttcatcgcatcccccatttcttcagattcccttttctgtttctctttctccgcttcctaacaaaaggaaagatgaaagaatattattatacatatccagcaatgttaaaagaactgtagctacatttagcttgatacacaaagctctcacctcatcttcagcacgccaaggttcaaaatttcttgttgcacccgattcaacaacataatctgaattttgtggatcagtctttatcgtcatctccgcagagcacttggtgcatttgaaataaaacctaaatatttggattcccaaatatgtctgcaaataagagaaaagtaactaaatgcactaaaacattaagctctcaatcattaattagagagaagtgaaaacctgaaagttgtgtactatctacagcatttaactacgttatttggactaagtgtgagtatagtacaaggcatgtgaannnnnnnnnnnnnaannnnnnnnnnnnnnnnnnnnnnnnnnnnnnnnnnnnnnnnnnnnnnnnnnnnnnannnnnnnaaaaaaaaaaaaaacacnnannnnnnnnnnnnnnnannnnnnnnnannnaaaaaaaaaaaannnnntttnnttttttttttttt

SEQ ID NO: 4309 - DNA, 453 bp, Gossypium hirsutum
  misc_feature (412)..(412): n is a, c, g, or t
  misc_feature (433)..(436): n is a, c, g, or t
  misc_feature (441)..(444): n is a, c, g, or t
  misc_feature (447)..(447): n is a, c, g, or t
ttgaaaactgaaacaagatacatacaatgaaaagcttaaagagtttaactaaattatatcttgccacgcggcccaggcttgggtgggagttgcggacctttcttgatcggtagaaggtcatcggaagcagtggcactgaggtaaagaccgagggaaccgcctcccaagatcaggaacttgagcaacaatcctctcttggtaaatggagctgcaaatgtctcaaagaacttgctctgcaattccaaacatttgaccatacttctgttagttaatgcaaataattcgtttcttgagttccactctcaataaaaccaaacagcatcagacttcattcatttatcaatcaactaaagcaagaaagccaccaaatattacagtatggcctgtataaaattactctgcaaatcttttntcagataccaaattcatcaannnnaaaannnnggngaaacc

SEQ ID NO: 4310 - DNA, 616 bp, Gossypium hirsutum
cttcatttgttaagtaaacattttgtgatgtgtctgtgtctgtgtgcggtgaagtttgacatggaacatcttaaggatcctgtttttagctagtataaataccatgtctaaacccaacattgacaacaagaagagatgcttgtattgtttggtgggctatcaacttagttcttatgggcactcttattcagatttagcgatcttcacatgagaatatacgagtgtgcaaactagatagattcattgataaaagccatccatttgtagtaagtagcaactgttaaaagttagaaataatttccaattatctagagtagtttcagttgtatatcgcagtctgttttcttttgaccgatttatgaacaaccgactatgatgttccctttttaggatcgacgagaacatggatgacacgttagcaaatgtggaaggagcacagggagctttgcttaagtacctaaacagcatatcatctaacaggtggctaatgatcaaaatattttttgtattgattgttttccttatggttttcctattctttgtagcatagtcaataaagtaagatggctggttagaaagataaaaaaaaaaaaaaagggggaaagaaaaaaaaaaa

SEQ ID NO: 4311 - DNA, 637 bp, Gossypium hirsutum
aaaaaaatgttcctatgatgatatggatcgtgtgtcatgtacctgtatggatctattccagttgcggccactgcatcgattgctctctctattatgtttttgataacttgttgcagatttcgagacagataccggccttcagaagcgaaaattataacaaattccatatccagataaagctgcattgaaatgaaaaggaagatataatatgattatgttaattacaagcacagtgcattgtacatgaatttgctttttccctgttgtgtgtgattatgagtatacctgttgaagaccgagaggacctaaaggagtcggaccctgctcgatctcttcccaaaagctctggtcatcagacagccaaaggatcactgtctcagtttgtctcattaatagaagtgtggcaaacctttcccttcccacaaacatatcagttgcaattgttgccatcgttgtcagtttttcaaacagttcctggaacaacataaaaccactatactagtgagagagaagatcaaacatttcatttttgtgatgattaaagactagcatttatgttgctttacacagaaaatgatacagatttatattatgctccttttaagattatagtttgcctttctacacatactgaacg

SEQ ID NO: 4312 - DNA, 594 bp, Gossypium hirsutum
tcagtaagttcgatgatgggttggtttgggacagagaagaaccgtttgtagattcatttgacgttaatgtctttttcacataattttcatcatcaattcttcccgtgttctcatcttcagttatatgagccccatttctacccgattgaggaacgtccatatcatcactgccacatatattatttaactcaacatcagtatgagaaaccaaaacaggctgcttttctttgagataccagacttccaggtccttcttgttcttagttgtatcatcatcaacaaaagaccccaatgtatcagatcctttatcaagctgaataacatcagttttcccttcaacaacctcttctttatttccaccaagtttatagctgtcttcggcaacatgaatacacgaagcatctgcctcattgtctttatccagctgctttaatgacaaagtatcacatatctcctgagaaacaaggtctttgacttcatcttcctcatcaactattatttcttcagaagctaaggccctcgattgaggcaatttcaccgtgttatgatctttaaaactctcatgctttagcgcataaacacttacatttcctc

SEQ ID NO: 4313 - DNA, 644 bp, Gossypium hirsutum
agcaaggtttgcgcagttcttacgtgctcattgtgatggtgaaacactaggagtggctgattcaaaacttggaaatgcaattaaggaaaaactggtctgttaatactcttcaaatcatgtgaggattttccgctgttccattcagttgaatcttattttaagtggaactacttgtatgcagaaaattgattgtgttcacaataatgctgttatggagctgcttagaggggtgagaactcaattgacagaactcatctctggtctaggtgcacaagatttggctcctatgagtcttggtttgtctcatagtctctctagatacaagctgaagttcagcgccgataaggtacttttatgttatgttaatttcttgcaaacttgatcaaacattatctatttcctttttgaatgggagggtttgtgccaaaaaattaccaatggtagaaatatgtaattaagcttatataagatttggaatatcagaggagggataactttagtgagataaaaattcattttacagtgtactaggtcgtagcatttgtttgatttgatgctaatgacctactgattactgaatgaaagcactaaaaaacgtaaaatgagttaaccattttatagagctaatcctttaatgctgattg

SEQ ID NO: 4314 - DNA, 665 bp, Gossypium hirsutum
gaaatatgggatatggtgaggattaaaccggccaacttcctggcttgtaaacacggccccactgtgaccaaggaaaatcttatccaagaaggataatcggtaaaagtatcatagagacctttatattaaaagttaaattgcattttattccctctactcaaaaaatagacaaattaatccatatacattaaattaaagaataaattgatcattttgttaaaaaattggtccatgtatatcaacataagatacacatcacataacacattacttatcactgtttaattattctatcaaccatgccaatttttaattatagaaataaattataacataaagggctaatttgcttttagatataatatacaaagattaatttattcatttttaaactaggagcaaaatactattttacacctagtactgagacgtcctttatatttttaccaaaatcacctttagacaaaaacaacgtagatagatttttaaaaataaaattgaagtaatggaattcatcacaaaagcatttcttccgactgcatcctagcactaagcagttgtttattcgaactgttcctcctaccatatatacacatcttgcatatgagatggctgtaactattcggtttcagtctaacactatacattgaacggtttccttggag

SEQ ID NO: 4315 - DNA, 613 bp, Gossypium hirsutum
tgcattgacatgctttcgcttaaagctttactcttgatgttaactctttttctaaattgatttgactgttttacagtgatcgagaaattggggtgcatgtaaatgaactttcacaacacttgaaagctcctgtagagaagatcaagtatcttttctgaatttccttttttttaagcagttttacttataggcgtgttatatttcattttatgattgaatttattcgttttccttgtatcttctttgtatgatagggatgctattgagtttcttgaaagagaaggtttggtgtactcctccattgacgattaccactacaaggcagtggaaggttgctaagtttgtgagtgcagctttaatttagcttggaattgcgttttttgggtccgtaatgattgaatgatgaagtatgatactcacatccctggatatttttgatagagcatacatgtatgcgtgtatatatataatgctaggagtgtacgggatgcttcattctatctaggctggggatggatactgttgaaattttatattaatttgatcatatatttaggtgctactaattttcatatttgtcagacattgagtttgcgtcacgtttgtgataaat

SEQ ID NO: 4316 - DNA, 618 bp, Gossypium hirsutum
ttatattgtggataccagtgggcgccataaacaggaggctgccctatttgaggaaatgcgtcaagtctctgaagcaacggtattgttcagattttaaatgttcattttgtttcaggataattgatgctaatattcccttaattattttttacttctgttttatgttccagaaaccagatcttgttatttttgttatggatagtagtataggtcaagctgcttttgatcaagctcaagcatttaaacaaagtgttgcagttggtgctgtaattgtcacaaaaatggatggtcatgcaaagggtgggggtgctctcagtgcgtaagtgttatgactgttcttgccttcattttttatgtcctactcaagatagcatttgccttgcttccattaggttgggttctcctgatttgtgtgcttcttgatttgtgacttctaccagggttgctgctactaagagtcctgtcatatttataggaactggagagcacatggatgagtttgaagtgtttgatgttaagccatttgtaagccgtcttttaggtatatatctccttttcctgttatgtattcttttaaatgcagaagtcatggatttcaaaatggtgatgattgttgaa

SEQ ID NO: 4317 - DNA, 621 bp, Gossypium hirsutum
tatctatatagcactgagttgtagaaatatcatcataaccatgtattgattaactgattgtttcatgtcttctgacacaaatgcctctgctccagttcgattgacctgtcaaacatcacagctgaagtatatagcactgagttgtgtaagaggcttaccagtttccttgctgcatggcctccatcttgtcctgcatcacatgttaatgaacttttgattgcaattgcggatttcgagagggatcttgagtcatggaacatcaggtttttgaaagaaatcttatttgaaatctctttgtataagctggaataaaatacttcaaatttgccaaaaatgagcactagaatcctgtatgagtatctaaatttgggttatggccttgtatgtagagttgaagctctttgtcttacaaattgtcttgcctgtttcagccctgtgcagggtggagtagactcaaggagtttgttccacaattatataatggtttgggttgaggatatgcagcttaagttactcgatctctgtaaggctgaaaaggtataacttgggttctttttcataaacattatcaagaatctgaaacaacttacctggaactgttgaatattgactttgggacat

SEQ ID NO: 4318 - DNA, 652 bp, Gossypium hirsutum
tcccttatgttctgatatttgaaattcattttctatcatggaactgaaggttggatatcggtgatggcaaagaactaagccttaagaagtgtcaaagaactagtctacaacagcaatgcattaattatcttggaccagtgagtcttatttagttctatcccatttgaaatgctccaattctgtttaaagttgttttttgtgtatgtttttaatcataatcatatctgttttttcttgcttgcagaaagagagggaagcattcgaagtgattgttgatagtggaaagcttgtttacaagctatccggattacttgttaacaccattgatgattccaagtggatttttgtacttagcacatcaagatccttgtatgttgggcagaagaaaaaaggtgtttttcagcactcaagtttcctttccggtggggctacaaccgcagccggaagattggtggtttctcaaggagttcttgaggtaaatactgtgcagactgcaattccaaataccttgcaccggatttttttccctttagactttgtttcgttataaatttatatgaagaagagtaatcaacatgagatcaactcatatgcacaaaagacactattttaatgaagtttgggccttgttgcttacgtccatgaatgagag

SEQ ID NO: 4319 - DNA, 562 bp, Gossypium hirsutum
  misc_feature (468)..(468): n is a, c, g, or t
  misc_feature (503)..(505): n is a, c, g, or t
  misc_feature (520)..(523): n is a, c, g, or t
  misc_feature (525)..(526): n is a, c, g, or t
  misc_feature (528)..(530): n is a, c, g, or t
  misc_feature (532)..(535): n is a, c, g, or t
  misc_feature (545)..(552): n is a, c, g, or t
  misc_feature (555)..(557): n is a, c, g, or t
tgtctcgatggcataagaaccgaatcaatattctccttgaccacctttgatgacccgtattcacccttgcgaatgctgctcagaagcctaagccaccgctttgagacgcaagcacacaagctcctttctctgccactaggaagtcgcttgaagatctcaaaaatacattcaccgggaaggtcattgattgatggttgcttgttctgctcaaaatcagtttcccgaaagagaaatggggcactaatacgaactcttttatgaggaggccaatacacatccgcttgggaactgattgaacacaatctgcccaactctatggagttttttctaataaaaaattcatcatcacctgaaattccagtagacctacaataagtggtttccgtataaagcataaacttcaaacaatttaatcaaaccccaaatttttaaataaacctaaaaaattctaagttaatttttaacccnttatacacgagaagaacacatataaaagagaatannntagctgtgtttatannnngnncnnntnnnngagactctcnnnnnnnnccnnngtgag

SEQ ID NO: 4320 - DNA, 612 bp, Gossypium hirsutum
ttcttctcatgaggaagctctgaaactttaattgcatctaatatgcgagcttctagattgttctatggtagtataaagcgcaacttttgtcagccgagactggtttaatctggaattttatgcaaacaaatgctcgaagcaatttgacagtcccaagtgcctattgacttgtaacttcgcggtaattttattcgggctctcgttataattattccatacaaaaaggcaatgttctgttaggccatgcctctgcatggtagggtttcgagtatggtttcctccacttgttttaatcatccatttttgtattgctctttgatagatttgttaatgattacacagcatccattgaattaattcagtgtataaaaaaagaactagataaatgtttaagtggtaaaaaatgagctcaacagctaaaaaattggtttccaaattctttttcaaagttgtatttgtaattaattaggttacactattatttcaaaaaagaagattacactattaatcttttagcatattaaagatatttaaattcagctaaatgcattttagatggtaatttgccttttggccaaaaagaaaaggatagtacattgccatattagtctc

SEQ ID NO: 4321 - DNA, 1117 bp, Gossypium hirsutum
  misc_feature (589)..(626): n is a, c, g, or t
  misc_feature (628)..(629): n is a, c, g, or t
  misc_feature (631)..(665): n is a, c, g, or t
  misc_feature (670)..(681): n is a, c, g, or t
  misc_feature (684)..(684): n is a, c, g, or t
  misc_feature (686)..(707): n is a, c, g, or t
  misc_feature (709)..(717): n is a, c, g, or t
  misc_feature (720)..(732): n is a, c, g, or t
  misc_feature (735)..(735): n is a, c, g, or t
  misc_feature (740)..(745): n is a, c, g, or t
  misc_feature (747)..(751): n is a, c, g, or t
  misc_feature (753)..(757): n is a, c, g, or t
  misc_feature (765)..(773): n is a, c, g, or t
  misc_feature (775)..(797): n is a, c, g, or t
  misc_feature (799)..(808): n is a, c, g, or t
  misc_feature (810)..(812): n is a, c, g, or t
  misc_feature (814)..(815): n is a, c, g, or t
  misc_feature (817)..(824): n is a, c, g, or t
  misc_feature (827)..(831): n is a, c, g, or t
  misc_feature (834)..(843): n is a, c, g, or t
  misc_feature (845)..(846): n is a, c, g, or t
  misc_feature (849)..(849): n is a, c, g, or t
  misc_feature (853)..(854): n is a, c, g, or t
  misc_feature (857)..(889): n is a, c, g, or t
  misc_feature (894)..(894): n is a, c, g, or t
  misc_feature (896)..(916): n is a, c, g, or t
  misc_feature (919)..(925): n is a, c, g, or t
  misc_feature (927)..(931): n is a, c, g, or t
  misc_feature (935)..(955): n is a, c, g, or t
  misc_feature (957)..(958): n is a, c, g, or t
  misc_feature (960)..(966): n is a, c, g, or t
  misc_feature (980)..(983): n is a, c, g, or t
  misc_feature (993)..(999): n is a, c, g, or t
  misc_feature (1025)..(1038): n is a, c, g, or t
  misc_feature (1061)..(1062): n is a, c, g, or t
  misc_feature (1068)..(1070): n is a, c, g, or t
  misc_feature (1075)..(1077): n is a, c, g, or t
  misc_feature (1083)..(1095): n is a, c, g, or t
  misc_feature (1097)..(1110): n is a, c, g, or t
tcaacttttgctgaaagtgtcggtgctaataaacaaaaaaacgtacttcgtgaatgttaatgctacttatcctttttttcactttaaccaattccttagatgtattctctcaaaaaaaaatccccagatgtatattacttcaatttgttttatgacattcattttgatgtcacctcaaacctggatgaaatgaaatgcttgtgtcatgcatgtgcatgtgtaaccccgagggtttattgaataggaagtatttggaagatccttgtgtgtgggtagaatcaaacaccaccaccctgagcattctatcatcacatgctgatattggacttggctggcttctacttgtttccttgttcttgtcagttgctgatatcttttttctctttttggttcatagttccctctaagcttatacattccatgacctctagcttctctaatttgttgaaattttctattaaattttgtaggtggcaacgcaacattgtacaaacttttatgtactggcaggtctgtaacactacttcttacttttcatgtatttacctttttgtttattagtgattctttggatggcaatggcatgatnnnnnnnnnnnnnnnnnnnnnnnnnnnnnnnnnnnnnntnngnnnnnnnnnnnnnnnnnnnnnnnnnnnnnnnnnnngaatnnnnnnnnnnnnaanannnnnnnnnnnnnnnnnnnnnnannnnnnnnnggnnnnnnnnnnnnnccncccannnnnnannnnnannnnnccaaattnnnnnnnnntnnnnnnnnnnnnnnnnnnnnnnnannnnnnnnnntnnnannannnnnnnnaannnnnttnnnnnnnnnnannggnaaanntgnnnnnnnnnnnnnnnnnnnnnnnnnnnnnnnnnggggngnnnnnnnnnnnnnnnnnnnnnttnnnnnnntnnnnnaaannnnnnnnnnnnnnnnnnnnngnnannnnnnntttttttttttttnnnngggggggggnnnnnnnaaaaaaaaaaaaaaaaaaaaaaaaannnnnnnnnnnnnnttttttttttttttttttttttnnttttcnnntcttnnngggggnnnnnnnnnnnnngnnnnnnnnnnnnnnagaaaaa

SEQ ID NO: 4322 - DNA, 575 bp, Gossypium hirsutum
  misc_feature (517)..(518): n is a, c, g, or t
  misc_feature (566)..(569): n is a, c, g, or t
atattaaagagtgatcagatgcacttcaatatgaactagacaatataggttactttgttattgttattaaagttttgctaatctatttctatcgctccgcaactcaattatggcagaaatgcaccttagccaattgtcatttgtttgccaagaaacacccttggcactttatgtgtatctatgcacattcttatttctttcaatataatttacctgcctggaatctggcaatatttcataattttgtgcatgggtgcataaagaaatgtccctggatgccaaagaaccatggtgcctttgcttgtttcctgggtagggcactggtttatatggaagtttcggtaacaaagggactgaggcttaactgttgtaacttgctaagcattgaatctctttgtataactttgcatttttttcaaccgcaagtatcaagttaagtggcaacaataccaccagactgtttctaggcttactatacattccaaaaatttaatactggaaaaatatcatctttttnncatatacttatactgcacaggctcaatatgacttgtggtgtccaccannnncaggag

SEQ ID NO: 4323 - DNA, 623 bp, Gossypium hirsutum
tcagcagcatatagggaagtttgccaaagaacttaaggctgtttacacaatttattgaagaaaataactttcttttcactatcctctattctttctaccattcttttcacgatagatgctctgaatggaaatttagagtgcatttaaaaagccatctggtaattgatttgtatgtagtaattgctagtaattacacacttatgaaatgtttgggtaggcactacaattattgagtctcactgaattagatttaattagagcaccccaattacactctccaatttttagggagagggtgagaattgtagtacataccccatggcttttcaaatatgctcatacatgagttaagtttaaaaaggtaattttatacaataatattattttaattttagaatatatatattttttgttttttaaaaatatgattatatgttattttactaatcttgtttaaataatttgaaatatttattgatgagagataattttttatatattttgacctactaaatgattaactaaattacactgtattaattaaaaaatatttatactaaatttaattaaattacatagtatttataattaattatttatacttggtcaaagatccatcgatg

SEQ ID NO: 4324 - DNA, 642 bp, Gossypium hirsutum
tacataaaacgtgcataatgctatataccggttcagaaccccttgtcaagacaaatatacctggaaaagaacaagcacttttaactctcgtttcttgatctccaaaagaattgcatcaagtagttgtaatttgccacttgcttttatgccaacatccaaaaactcaacatctttaaggcctttagtgagccgcatttgaagggattcatccacaacataaggatgatcacaacactgtcaacaattaccatgaaacacaatattgactcatcatagaagtaaacttttacacatcctcattctaatgcatatatcatgagataaaaaaatcaactcaaatacatatactataattatgataataataaaaagataaaacagggcatttggaaatccaaaataaataaaaggaattaccatgaaacacaatattaactcatcataaaagtaaacttttacacatcctcattctaatgcatatatcatgagataaaaaaatcaactcaaatacatatactataattatgataataaaaaaaaagataaaacagggcatttggaaatccaaaataaataaaaggaattcaaacaagtgggggatgattaaagattctaagtttgagctgtagcaatttattccat

SEQ ID NO: 4325 - DNA, 608 bp, Gossypium hirsutum
aattaaatatctcaacaataaactaatcgattatgccactatgacttaatagagataacggtgaaataagatttacccggttgttaagacgtggacactcatctcgattccagatggaagtttcgtcctggcctgtgatgattgcttgaatgattcatttatctcctttgatagttcaatatcctgcataaaaatcacaaggcaaggtcaattgcattaaagttgcattcgtattaatctcatattactaaatttcctcaaaccaaaagtataagtaaaatgatttgactgtataaacattctggtcataagaatccagtcacatagtcattagtcagatcctaagttgaccaatacaagagaaggtaatccaagaaatgaaagataaatttaacttccagaatccttttctcttctcttcccaacttcccccgtgattttattacattaatatatttacctgcataatccatcctcaccaaggttttcaaaaccaaaccagtggtcgaaccagtcagaccaccggttcccagttcgaccaactcaattgaataaattatcaaaaaatattaaaaatagagaaaaccagttcaatcggttccagtggt

SEQ ID NO: 4326 - DNA, 626 bp, Gossypium hirsutum
aataaatggggactccgcgaacccgagacagtcagcactgcaaattttaacaaacacttatatgccacacctttgagcaccagatattgcaagcaaagggaacaaaggctatccaaaagccaaatttggttgatattagatactgataatgagcacttactcagcacattcactaaatttcccggaattctggctctcaacaatctttaagatcaatgacttgttctcatccagatactgcatgcatcaaaatgaaatcattgaacaaattgtgaaagatgtaagaataaactcaaaacaacgttccttgacattgatcaagctaataaccattttgattcataaaccagttttagtaattcaaacagaactaccaacattactattccagggaaagataagttagatcatcgctaacccggattttagaacaatggagtaaatactttcctagaatctgagatgaagttccttgacatcaagcaagttggtaaccattttgaatcatataaacagtcttagtaattcaaacatcaatacaagcatgtttattaggtggggaaagagaagttagatcattggtaacccagattcgagcaaaagcaaacaaccgatctcagcatcca

SEQ ID NO: 4327 - DNA, 618 bp, Gossypium hirsutum
tgaaatactcaaaaacatgctgccatcatgccatcagcatcattaggcaaatcaggaaagacagattggatgaagagtacatcaattacaatcttgttaccttcagactatcaacccattccatgttcaagtgttctggcatggttgtcatccagtcaccctttgtatggcgtagaaacatcccattttctgcggccaaccacatatcatactccgcaaagttctgtgagagcaatcaggtggttttgatagaggacaaaatgaggatagagcagaaagaaagaaaattccaagcgtaccttatccaagacttcacttttgctcccactaaggacaactatagttgtctttttatcattacagagagctgtcaagtgttcttttaattccgggtgcaaattaggattcttttctctgatttgatcacttctattcccagaagtatccacaggttcggttaatgttgaattaaaaccctgagttttgggccatccccaagatgaggtcaacaagggaagcattaatgacattaatagtatgcctccaggaaaagattgcaagggaaaaagaaaatcaaagagctagcaatcacattagcaaacatagatggcaatggtc

SEQ ID NO: 4328 - DNA, 593 bp, Gossypium hirsutum
attttgatatgtaaaatcacagtcaaataaaacagaggaaattacactggcattctaaatatattatcttatatcatttgcttttcttttccccttttaatgcccccttcaccttcactttcatttacatctttagctaatccatgtatcaaccaccataagattatcatggacatgtcaaaacaagtatttattaacattttaccggtagggaagaagatgaagaagaaattatccgcaacttgaggcctaactgacaggaccggaggagcatagggtttatattttctgaagcatcaacaacaaccgccgcccgctttagcctctgctgcatcaggttgtgggttatcttctgacggtagaaccacggtctttccatcaaatgaagaagaatctggcttattcagctcgtgagacatcataactttcttgcttaatatgttatagatctctttaacaactgtctgaaaggcagctgctacattggaggaatcaagggcagacgtctccatgaaaaacaaaccctgtgcctccgccaaagacttcccttcagcaatagatacttccctggcatcccggagatctgacttgtg

SEQ ID NO: 4329 - DNA, 640 bp, Gossypium hirsutum
ttgatgcttacaatagcatgccttaattaatcatgcatatttgtttttaaattttaaattagtagaattttccaaatatatattaaaaaatctagaaaagtatcctgacagagcataattcagttaaaattaacataaatccaaaggtatagaaatcgacatgacaccaacgttgtcaaataatcaaagccaccatagttgagtttggttgaaaccaatgacttgttccatccatcaaaccatataatataatattccttatatgtatatatatatattattctcttgtttctttgaattatttcccaatattttctcattatctatttcttctctaattccttagaacacccttttgactcttttacagcttttgaactttctctttaatttgatttcattttttgttcatcttatttcatagatccaatacttacttctttcaacggtacatttttctttttaatccctttatttttttaaagtttcaatctttgatccagtttttgtttactattgggtttaagctctcaaattagatcatctaaggaattttgttttcatttatgattccttttgaaaatcccagattttaaggattaaagttcatgtttttgtttatggctccaagaaagttgta

SEQ ID NO: 4330 - DNA, 606 bp, Gossypium hirsutum
acaccattcaacaaagacacaagtaaatcttacctgtaacttagattcaaagtcctccggagaccaatgcattacattacactcatgatttaattcaatttctcctgcaacaacctgtgatcaaagtgttattgaatcaggaaataaagtaatattataaaaaacatcaatcaaaattcatgccaatgtggatgaatagagccattcaaaacgatcttagctttaacatccatctacaaaatatttggctactccgcaagtaatcattgagaccatgcacaaactcaaaggtattacaaacttagccataaatcatcatcctaactccacatatctggcatttgctgttaaaacttaaaagattactgtcatgttgaagagaatgaactagtcttttattggtatttggtgctccttaaaaccccgcaatttatgtttaattcccctttgcatctttgtgataaaatccattggctatcaaagtgagaaactggtggctctcctctcctttcaaagcatcattttccaagacatatgagtacgaacaatcagacacaagcacattatgcttccaaagtgaatgtatttacttcacaagaattgagg

SEQ ID NO: 4331 - DNA, 634 bp, Gossypium hirsutum
taaaaaaaactggctgctaattcaaagaaaaacctctttaacaggaaaaatcaaaggaaaaaggtccacggttttcatcctcttcatatattacttgtcattaagaaaaaaaaagttttatctattttatcttaaattgttgccgcgtttgccatttttattgattacaaacatgattaaggtcttatatagtaataaaaattggcatgttaatatttcatgtcatttagacacattcctataattcggtcactctgtgcttatcgtttccatatcagaaaattgtgcagtgttaataacagccgattataacaaaaacaagcacctttcaccgtaaaggtaaaatcatcctcttcaaaatatacaggttcaatttgatatggtgtctgtcaccaaacgaatattttaataagaccagattcataccttgagagaacagcacatgatagcatcggagtgatgccacaaggtcttaaggacagattcacccccttcagtgccagatttgagcaactcgacacccatgtagaccctgcaaaataatagacaaatcatgcattgttcaaaaggtaatggcagtcattccaatcacaaagatcgagcgcatgcaacactttccaaactgatggtatag

SEQ ID NO: 4332 - DNA, 634 bp, Gossypium hirsutum
gagaggaaatctgattcaaaattaattgaaccttccgacagctctcatgttgatgagaaggaagttgagactataccagatcgtaaacatgacagcaaggatgacgctggttctccatgtcgagatgtgtctgttgatggggatgtatcctctggaaatagaagagagacagattttcagcattcctctccaaaagcaattgaggataaattgactgatgttgcttcccaaacaccaagtggtactgtagttggtgatggtcattccaaaagggtatcaaggccaaaaaagaaagacagcgtaagcaaggagacgtcgtcttctgttgatgatgtctctaagaaggcgtatgaaggggcaagtgattcagaagcaaaatcaaataggcgaccaggaaaaaagggtgctactgttttttccaacaaggataatgctccagttagtttagataaaactaagaaagaaagtgacactgcaagtgattcggaggcaaaatcactaaagaagacatcaaagaaggtagattctagtggtaacaacttagataaatcctctgtaaagcaactggaggataagaaaaggcgaactcaggggaaagttgctcctgagaaggatggaacaaaaaactcaacca

SEQ ID NO: 4333 - DNA, 619 bp, Gossypium hirsutum
tagcataacttcagtccatggtttgcttacaaactgaccttgacatgaacgacattgtcaaaaggtataacagctgctgatgagaaagcattggaagatagttcatagctgccctacgaacagcagcttctttagcaacttgaagccactgtggagttccaaagtttgcagcttccccgcagttaaaacctgtttagtaaaacaattgaccacaacaattgatgagaattagaatgagagaacaaagcctatggtaaatgtatgttcaattttttcatagatttcaaagtatttagagggtcctaggaggaccatgtacccatatgaatgtgtggatatgcattagacattggtacttcgagaataatgaagagttggagcaatataatctaagacagttttcagatgtaggttcacgatgaccacactgaaaggtctctctacattgtgatggactggtggtttatgtaatatagatccagacttataacttctagttggtcctaattccattcccgggtaaaatcacatacattataaggatctttgcaagtaagaagtcctacttcagaactcattttgaataacttcttaacatactcgttaatgagatcaccat

SEQ ID NO: 4334 - DNA, 645 bp, Gossypium hirsutum
acgtaccatcgaatcctctggtaactagttctgacagcttggcttctgtacctatttctacatcaggtcgttctgtcgcaaatgcatcagctcagttgtctgtttcttgtgatgaacaacgtgaagctttgcctatagttcaatctgatgcttcggtccggaccattgagaatattcatcctatgcaaactcaatttaagtctggtatttataggcctaaggtgtttacttcagttgtgactactagggatccagtctctatagaggaagcgttttagagttttgagtggatagcagctgcacaagctgagtaccaggccttgatttccaattacacctgggatcttgtgtcattacttgaatgtagaagggcagtcagatgcaaatggatattcaagattaagaggaatgctgatggctcggttgcgcgatacaaaggtcgtttagtagtgaagggatatcttcaagaagctggcgttgacttccacgagacttttagccctgtggtgaagcctactacaattcgagtggtcttaacacttgcagtgtccttgggatggtcgcttcgccagatcgatgttaataacgctttcttgaatggtgatctaagtgaagagatatacatggtgcaaccaccaggtttct

SEQ ID NO: 4335 - DNA, 668 bp, Gossypium hirsutum
  misc_feature (618)..(633): n is a, c, g, or t
  misc_feature (635)..(635): n is a, c, g, or t
  misc_feature (639)..(641): n is a, c, g, or t
tggttgtaccgtggatttatatcatctatcatgtcaaatattggaactcaaaatgtatcattgtctatgtacatttaacaaatgttggtaaacaaaaaagggttactcaccattctggctgcacgcatctccatcatgaaagattcttgtgaatttcgaactggtggatcatttacctacaatgaggtgcagccatgtgaatattacattaaagatcaatctatcaccaatgaaatgactcaaacaattccataaggttccaaatctatagaagaactcctcatggaagcctatttctgtctctaaaatttcttccttgatgcaccccactgatatacagtaagtttatccaatatgcttaaatcagttcaatatgcgattagggcttaaagaaaataacattttaggtttttattgcaacagaatgtcaaggagagtacatatgtctaaaatatagaaccagaaaattacatccgaacagaaaatgagaaattaagaaaagaatcattcgcaaccttataatttgaaagccactttaaaaacataaattaccaaaatatcaactctaatacagactacaaagagttgtataaaagatatacacggaagctcgaaagnnnnnnnnnnnnnnnntncgannnattttttttcctaatttcccaattttc

SEQ ID NO: 4336 - DNA, 607 bp, Gossypium hirsutum
  misc_feature (536)..(536): n is a, c, g, or t
  misc_feature (596)..(597): n is a, c, g, or t
  misc_feature (599)..(603): n is a, c, g, or t
gagcatactcaggcaacctttaggtgtgcagggaacaaagagcggttcccttcctctcatggagagattccccatatttattggatggaagccatccacgtctttttctaaactcaccagattcaaaatcttctcctcatccaaatgctgtaccaggaaacttttacaagtcatttgcagaacattgagggttctcttgtaaaattcaagatagtattacaactgaataagaccatgacaaagatgaggattagatatttctttatatactggctgtgttgcataatggaaaaaaaggggaaaaaaaaacacccaaatctagattttatcttccaataagagattagataattctttataaactggctgtatagcatattggaaaaaaggggaaaaaggaacacccaaatctagactgtatcttccaggagaagtggtgtacactcaagcgatacatatgctacaagagaaaggtatctccaggagcagtaccagtaactgacagtagactagaaggcacgcatcaaagggacagngagaaactttgggctatattaggaggataccccatcaacgagattaggctatagcatcanncnnnnnaaaa

SEQ ID NO: 4337 - DNA, 616 bp, Gossypium hirsutum
tttattatcatggttaatggtgggttgttttccacaaatatatttatcaattgaaatgcaatcataatgtcttgttctactgaagaaacaatttatggatactgtttgacagccctgtgtttaaacaatgtctattgcaagttcagttttcctgtgtagataagtgtacaatattcagtttcaatctttttttcttctgttaaaataagtggccgaagtaaaaataatatgttctcattcattaaaacagatggttttttgaaatttttttataggtgtgtacccatataaatttgttgattgggttagtgaacttcagctaacatcaccttcgaaattcagcactttatctgcatctaaatgagtgatagttcatactctaaccagcataatttgaaatctttcatctgcatgcatgcaaattctacaccactctttcccttgtccttttgttaaagatgcttgtttccccatttctattgtggattatttttaccttatttgttgatattatgtcatgattctggcttctttcagatactttagttcggcaggaagcaatggttttaaagtgctttctgttaatgtattacaagaacagcagaggcagaaatta

SEQ ID NO: 4338 - DNA, 616 bp, Gossypium hirsutum
ccctggaaaaaccagacaaccaaagattacacctcaactcaaatagccacatatcccatctgaagctccaccaatgatagagtacaacagcaaaaactgcatcgagtaaagagtgatatccaattcattactctgaatagaatacctgtgcagccctctcgttgcaaggcccaaaatttgtgtataagcagctggattctgtcttaaagaatggttattatcatcctcaatctgaaagaaaaataggcagttagtttaaatccaaaacttaagaatgtaaaacaacaaagtctgcaaaagtcaatatcaaaaggaatacaaagaagatgcttccacaataaaattcaaaaagagctgagtggtgaattgacagtgacatcaagaactaagcaaataaaatctagagacatttattcattctcatctgacaactgctccctccaatgtctataacacatctctctttccaatcagatgtgtatctaacacaaaagcacccctctcagtatcattcagcttatattatgactaaactgtccttgtgaacttattatcaaccaccatagaacaacaccgcaccctacaccaatcacagacagaagctaagattatggat

SEQ ID NO: 4339 - DNA, 595 bp, Gossypium hirsutum
tcaatacatctactgatgaatttgaaggtacctgtgcaaaatgaacaaagcagaaataaaatatctcaacttacaaacagccataatcaattatgataaaataaatatatctgaaactagaacctgaacttaatcacagaatatgcagtccacacataatcagtgccttgaaaagtaaagtcccagaagtaaacaatgaatcttttatatttttcataactcttataatgcaaaataaaaaaataaaaaaaagggaactcccaactccagtttcattaatgtagcatatgcacctaaaatctagtgatgatgacgctctcatatatgcccaaacaaatcatgcatgcagaataggtaaaacaaatatcatagatgccaatattaattccaaggtaaacccatacaggaaaggaagacttgagtgaaaaaaccatatagaaaccataccccatttgaaaccaggaagattcatcaagccttgagaaggatcaaaaaagatatcaagggaagacgaagctaagtcatcaaatatcgatgcaaaagctgggggcagtagttggctacctttagcaatagaaatggacctcatggcata

SEQ ID NO: 4340 - DNA, 605 bp, Gossypium hirsutum
ttattctgtggatattattggtcttgggaactggaccggagttggagaagatgctcaagtatgctgaaaatgtttcttctgctataatatttggaagagagcttgtgaattcaccagcaaatgtacttacccctggttcgtatgggcattattcttaccttttatatttaatcctttctctttatgattattgtttcaggcaaaagtacaaaactgaacttcttattgtcggttatgggactataatagggctttgtttgagaaggatgatataattcttagcctttgatctaatgtcttttaatgctgcagctgcactagcagcagaggcttcaaatattgcttccttgtacagtgatgttctatctgcaaacatattgagcgctgagcagtgcaaggaattgaagatgggatcttacttgggagttgctgctgcatctgcaaatccccctcatttcattcatttgtgttacaaaccctccagtggacctattaaaaccaagttagcattagttggaaaaggattgacttttgacaggtaatttcgtactatgttactccgactctttattttccccattgtacccttgtttgatacccgtgtt

SEQ ID NO: 4341 - DNA, 609 bp, Gossypium hirsutum
tttctttttgtaatgttcgattctgtagcgatgaaaacgaatcgaatagctacaaatatccaaatcgacactatttgttatcatctctatccaagcatgttaagtgttctatatataccattagggcaaccttgaacctttggcaactttagttttatatgtagtttgtacttttatttttatatgttgttgttttccactttatgttttatttatgatttaagtctttatcttttattctgtttcctttcttatgtagtttctttggtgagtacattggtttgttttctatttggcttttggactaaattgcatagaaatggaattaagatacaagataatgctatcatgtttaacgttatttcaacttttcaatcttttacgaaactattgtttgaaacaagaacgtcacgtcatttgtatccatttttcaataatttaatgtcacatcgatatttttatcttaaaaaaattaaatccaaatgaaaatcttgaaattcaagatgaatttactgttatgactttaaactattggaaagggataatatctttgtttcatacaatcatttctcttcatataagtactagtctctgacgaccatgttcaag

SEQ ID NO: 4342 - DNA, 660 bp, Gossypium hirsutum
aaagctgttggtaattcctgatttccttttagttatcttgtgaattgctggaactgaaagttcatctggatgattaatttgagtttgacaggagcaagcatccactcgactaacagaactaaaaggccttcatgaggaaagaatagaaatattacagcagttatcaaatttgcaggtatgcgttgctgattattttctcttcatttctgagcttgcacttccttttattcagtcatataaaatcaaataagtattttcggttgacagaacacattgaagagtataaagcgcatttcttcttcccaagtatatcttctggtgagagatcaactagaaaggtcaaaatcagaagtttcgcggtatcaggatttatatgagaaactacaggttgttactggtcggtagtttcatttatgccttttgtctgtcatttttgttgaggatgtccaattcccatgctgactataacttcccttctaaaacttttaggttgagaaagataatctggcttggaaagagaaggagttgagtataaaaaatgatatagctgatgtatttcagagatcattggcaatttctgattctagagcttctcatatgggggcagaaatacagcgacaaattgatgaaagaaagagagttgaagctaagctgggaaga

SEQ ID NO: 4343 - DNA, 831 bp, Gossypium hirsutum
  misc_feature (780)..(788): n is a, c, g, or t
  misc_feature (798)..(807): n is a, c, g, or t
ttcacaaaaatttaaattaaaaaaatcaagtaattaaactgacatgaacaaattacttggacctgtagttctgtctagagaagttaaagtgtatgaattttgaaagtagaagcatagcctccatcagctaatgaaaaaggtacttattctaacttaaataaattatcctgtactccagcacttcaactagtattaaaggcctttgaaggtggagcatcgtagaaaagaagaaaataagaaatatgcaataagatcattagatggaaaagaaaaaaaaaggatttgaccaacacaaatagaacactcatatatacaagtacaaatgatacaagatttccttgaccttggtttccccagctttacctttctttccccaacaatcaagtcaacagggtccctgtccttcaggacctcctgctcattctcacctctatacctaataaaagattttcttttaacacagttggcattacttccttcacttatcatttcatatccatgatgctctaacattgaatcatcattaaacacctcatcctggtgtgacccatgcgtagcatgaattgaatcatgcttagaagttttttcacaagaaaaagacaccccttgagcaaacaatctatcatttacaagtaatttatcctctctccagtgtagtactctagatcgcttactacgacctcttccctgtgactgaacttcattatccttttgcaaattattgtcatcagtataattgtaggaactaaaccaagtactgtctcggtcttcctcattacnnnnnnnnncatgaattgnnnnnnnnnnaaaatttttttcacaaaaaaaaaa

SEQ ID NO: 4344 - DNA, 625 bp, Gossypium hirsutum
atgcacccatggttcagtttatcatctttactagctcttccttatcaaagttctaaaacagtttgccttgattttgattaatgaagaaacaatattttcatatttaccgcgaaaacctcgaatgacttaaaactcgttgaatatagttaataggaaatggtctagaatgttaaaaggaaaaaaagtatcatgcaccaggataagatttacagcttttagaaatgtacaaattgacattctcaaaattaaagttaggaaagtaatattatattacacgtatactggatcatagatcaattggaccttaaagaagttgctaacacaccgtgattatcagttagatgacatgtcagaatatgcgagttaaataatttttattatttttaaagttaattcggatttactttttttttctctatattgtaggtttcggatgaagaatagaatgcttgaagtataaagtaaaaagtagtgaaaaaaaatcttttgctccgctagatttcaatgaggtggagtacaatatttgttctaaaatttcaaacaataagcagtccgcttcactgcaattttgtgtccagtgaaatagaacggttaaaatcataaaaataagagcgcgatttaaggg

SEQ ID NO: 4345 - DNA, 615 bp, Gossypium hirsutum
ataatctctaagtaagggataagtgagataatgatatgatatccttcaattatcccagatatagtctttacttaaccttcaatctatttcaatatgcttatcatgatgcataagaggaggctttacccacaaagcacatcttcaaccaagaatacaaattgaaatattcacttcaaacttcttagggtaattttgttttaccaagaataacttataagataaatgtttttctgaaaaagaattttaattttatataaaaattaacttcaatgaagccttatactgttatagtattaataaatttttaataaatatatccatttaattatttataataaattattaatgtattaatataatttattattttaataataaattttaacaacaataattttaaattttaaatgaatttctaaatatgttattaaaaatttatactaatattttaataataaatatatatttcagtttataaacatttaataataaatattctatagtatataatatgaatattttaattattttgtttaaatcatgcttagtttcatttatcccttctaactttaagtgtcactattcactcttaaaagtgtctatgggttggatcga

SEQ ID NO: 4346 - DNA, 554 bp, Gossypium hirsutum
ttctgcccaggagacctgtaaacagtaaagcaattaagttatgaagtaacaagtgttaattgctaaatgtgagaacaaatcatcctcaaacaaaatgcaattaacgtagacaagaaattctctccatatataagtagcctatcttttttccttctttctttcttccttcctttcttcttcttcttcttgttatttatttatattttttaatcaagtggaaatgaaacacacacacctacacaccaagggaattatctaatactgcattagttgctagaacatacctttccttcaaagggcccttgctgccttttggtgactttgccttctataaaaaagtgcaagtggaagagagttacgctcaaatgaaaagtaactgattttagcttgagagaaaatgaaaaacgttaagtcttaacctttacagacttgcagcctgcattaacaagctcccagcgctctctttccaaacggagtacttccacatctccatcatcgtataatacctaaaaagaacacatatattcagatatatgattaatatttggttccat

SEQ ID NO: 4347 - DNA, 620 bp, Gossypium hirsutum
aaaaggattcaagcgataaaagaagagggtttgcagttagaaaaggttgaatttttctacaattgatattgtattgtacccgatacttatttctctagtcataaatcaaattacttgtcaacaagttaaatcgaagtatcacctttgagaatggtgaaaccccaacgtagcatcaagagttgtctgctttaagccactagagcctctgcctcttgcctctgcctctacctctaccccttcctctagtagaatttttacctttaacaagttctgaagcatccccagatgatcgagaagctgttagtggccctttccggcctctattggcagagcttagtatctgtgctgtatcttcatcatcactaaaggaggctgcacttcctattcctttatcgtttttactccagacattctataatattgaagaaccaatagtttagatgcaaagaatgttatataagaaaacataacatttaaacaaatagaaagtggaacatatggaatattcgtaagattacctcaaaggattgcacgctggaggtgaattgaagggtatccttagagtgtgaggacctttccttaacacgttcctgcaaaattaatatatgaattgaaggtat

SEQ ID NO: 4348 - DNA, 571 bp, Gossypium hirsutum
ggtttttatgataataataataccggttaaatctttcatatgtttaactgaagtctttctcctttttatgtttttagtgtagaatcttttaactttggattcttgtgattgatgcctatatcatgcttgcaattccacttacataatattatatgatacttcgaaattttattttccttgtcttgttgtttgtatagtgtttcttttattcatcactctatttttttttaaaactttctgatgatttcaggttttatctgtgcaattggatgactggtctgatgaaaacattgatgccatgattgaagttggaggaaattcctctgctaatgcaatctatgaggcctatatacctgaaggttattcaaagcctggcccagatagtactcatggtgagcggaacaaatttatcaggttagagttcaaaccaatacagaatctctcaacttgagcatttctttgtcatttctcttggatactatcgtgttctaaacctattttttctgttcatgttcttttttaactggatttaaatagaaactcatcgcttatacttctatgatcaaccaaa

SEQ ID NO: 4349 - DNA, 610 bp, Gossypium hirsutum
  misc_feature (28)..(30): n is a, c, g, or t
  misc_feature (594)..(597): n is a, c, g, or t
acaacccaaataaaagacccagaaaccnnncggaattaaaactcaatgcagtgctaatgatgttggtaaatcaacataccatgaatgacctagttatttatcttacatctcttctaaatcacacaagaacatatatatttgctttttctcgagaaaattacacgtttactgtgaccttttgtgccccgcggcacagggatccccagcgcaaagaggtgaggtgaagagagagcaaaaactcggagatcctcctacaactgggatattttccccatcccccacttctttttgcgttttccccccatactctttatattttatatagtgtcccccataacaccaatcacctcccttgtcatcagtgagtaataactcaagttctgctctacttgcttcagcttccttctccgcatcttcatgtttcttcctttctttcttactcttttttagagaaggctcttcaacgaaaaagtcatcagcttcttctgtagcttcttctatatcagtatcgtcagtctcatcctctgatgaatatttagatttatttttcttggccttctttttctcccgtcttttccggagataggcctcccnnnnctgtttctgctgc

SEQ ID NO: 4350 - DNA, 623 bp, Gossypium hirsutum
ggcatccagttcttcacaacaacaaggttttgatttggttgctggggttttccctacaataaaggctatccaggctgccataactttaggcactggttgttctttgggtcctgaaggccctagtgtagacattggaaaatcatgtgccaatggattctcattaacgatggaaaacaacagagaaaggaggattgcacttgtggcagctggagcagcatctgggatttcttcaggtacaccgcttgtgttataacaaagtttacaagtttgcaacttctagataagctttatgttgatcaaagttcccctagatgagaatgccttataatagtggcccttcacaatattacacgggctaatgtgaatagtctttaagtatctttgtttccccttatattgttatggaataatgcaatttcaaatttatttaagcagccattttcatatttttatttataagctgaaaagagcaggcaagaaatctctgcagaaacaagaaactgtacgtatcatgtggattttgatattagcgcaggtactacatattgcaattccaaggtcatataagctgtcatttttatattttatttagaagctgaatggaaataggcagaatctctgca

SEQ ID NO: 4351 - DNA, 622 bp, Gossypium hirsutum
ctccttctctgtcactctctgatagcggaaatgagttcttccggtgcaaattttcctgaatggactcattaattatcacattgtctttgacattttgctctgaagcggaactggtttttgttcttcttccctgagaacaaacttctgcctgcatgtcggaaattgtttctgggtttgaattgttcacattacgggaatccatgggtgaactttgtaaggactgctgatcatagagttctgatgaaacctccctctctggcgagggacttgatttatatgtttcttcggcattggtatccagtgatgtctctggagaaattcttgatccctgtgctgtaaccattttttcaggtgcaggcccccgtgcaggaacagcttttgagggacaagggttatctgtggatttgcaagcctctacccgacccttggatgtctcagccttcgaattggctgcatcccttgattctggaagtctttcagttatgagatcatcctcaagtgcttggtcaattttagaaacttcagtactctcagaagcagcggctttaccttcctggtttttcttactagtcttctctccaatatttagggtcgaatcaaaatcaaaatcatccaacctgca

SEQ ID NO: 4352 - DNA, 568 bp, Gossypium hirsutum
aaggtcaatattttcctaaaacattgttagaaatgaagttgttgaaaatggagcagtttaacatcagcacttcaacaacaacaactccaatccactacctaaaatggcagaatcaaatatatatacatacacagatacatatatctaatccatttaccatccatttcattttcatcccctatataaaccaacattccactaaccatttttctcatcaaaatcttaaattcccatttctcttttcaacaaacaaacacacatatattctctctctctaatggcgacagctgagaaaagcggtgaaatagcaatcaacatgtcggagacaaaagccagtactaaaggaaaagctccattgttaaactcttccaaagctttcgccgtcgtcgaaccaccgaaccgaggagccaaaagaggtatcgccagtggtgatttctttttgagactatgtgcccttggagccgccctcggtgccgctatatcaatggggaccgccgatcaacttctcccttttacaactcagttcctccaattcgaagctcaatacgatgattttgatgctttccgg

SEQ ID NO: 4353 - DNA, 622 bp, Gossypium hirsutum
  misc_feature (582)..(583): n is a, c, g, or t
  misc_feature (587)..(599): n is a, c, g, or t
  misc_feature (604)..(606): n is a, c, g, or t
  misc_feature (609)..(610): n is a, c, g, or t
  misc_feature (613)..(617): n is a, c, g, or t
ccccccccctatgttaataattttgtttaattgtatcattatatttttcaatggaattatatttgaattttgttttatatcttccttacactttaagatttcagcttttagttataatagttgctccattatatccattttgaagtttgacttatttcacaacaattgctcaataattgtttctctccattatttattgatagggtcctgttaacatatttctacaaacgttgattattaggagaaattaacacaaattatttaacataaacgttgttgaaaaaaacatttcaaagtaataatatcatttcactaattttattttattttattttattttattgtctatttgcctcctgatgcgccaccaaacttcttttttagaggatgaaaagctcaactatacaagtactatgatccaatcaaattaaacaaaatccaaaacaacagataaaagggatattacatcgagaatatttaaggtatagttagggtaagttttatgtaccattaataaataataatatgatacatcattattaaaaattggataatataaattggggttcttgaatttggganngaannnnnnnnnnnnnttgannnggnnaannnnngaaaa

SEQ ID NO: 4354 - DNA, 635 bp, Gossypium hirsutum
ggagcaggtttgtccacaacctgataaattcattaccagtcaaccaattaataccattatattttatttcacacaaaaatcaatgccaatagtaattactagcatgaagacagaaaaaatcagagaaacatctaaaagtaaaaaaacagcagactcaaacttgaagcctcgataactaaagcaaagtcaagttacaggcatgctagaaattccatattgaacagatggggcagccccagtccgaccaattgagatttgtggcatagcagggagtgttccataggggtttgcaatagtcgagggttgtgctacagctgcactctgtgtagaagacctgtcaaacagaagagcacgcaggataagctccaaaatgtaatcattcaattatttggttaaccaaggacaacgtattctggcatacttttgcatttacgagtacaaaggtacaagaaaaattatataccagtaacgaatatgcatatgtttgtaggcatatataaggatatgtataagagcaactgaaagtagaaagaaaaacccaaaggaaattacacatacgacaagccaatgttactctgaccaaaaatgcttgaaccaccacctataaagccggcaacatcattaaagtcagcact

SEQ ID NO: 4355 - DNA, 628 bp, Gossypium hirsutum
agtgactaaactttgattaaattgttgggactttcgaactccttaatgttccgtgcactagtgcagttaatagacgtgattaaatggtttcttaagttttgttttctctataggttaaaaatcatccagtgaaagctcaaccggctgatcagcctggaagtgtgatacttgccaaagaaccagttcttcaagtatgtttttgatgccactttctttagttgcatgcttctttccctatgtatccgcagtccttgtttcatgttcctgcatgtgaacacacgcattccctatcttaaacatctacaacttgagattgaaggtgggaaatgttgtttttaacacctctcaacttctctttggcaggcaaattttgctcgagctgttgcatcccttagcaaggcacaagctaagaaggttgctcgcttcctcccgaatcctgaaaggcactgggggccaaagcttagggcaggtcgccaaatcaccagcaagcacatatctcttttgggtgaagaggcagtaaatggatgtctcaacgatctagatagtgagcgcgatgccaagcgtcaaaagattgaaaagtccaatgatgcgattgcagaatcatagattaggagggtagtcaagccag

SEQ ID NO: 4356 - DNA, 580 bp, Gossypium hirsutum
  misc_feature (314)..(314): n is a, c, g, or t
  misc_feature (573)..(575): n is a, c, g, or t
cttctcattccccgtgatgcaaacatccattgcttcgggaaccctacttaggtggacgaaaggcttctccatagatgaaacagtcagtgataatggctcaccctttgttttcatgcttattatgaattccgtagacttgttcataggtcgggttatccgctcaagcctaaaggcttggccgaaatttgaagggttttgacaaaaatattaggcccgaaaaacgagcttaggcaaaaaaaattaggtcccgtttaaaatatggatcaggctcgagctcgaacactcaaggcccaagtctagcccggccggttttntatgtttataatatattttgttatgttatttttatatatatgggataatttataacacataaaaactaaatctctagtaatatatattattatagtgtaaacattaaataaatgttaaaatgcctatatatataaatttaataaataaaaaaacaaaatattaaattaaaaataatataaatattttttaaaaaattaaaaaaaaatatggatgggcttaaattgggcttgggttagttatttacaaataaaggtgggnnngagca

SEQ ID NO: 4357 - DNA, 610 bp, Gossypium hirsutum
gtgattgatgtctaaagattcgagaatgatgtcgacgcgcattgaccgtgctccgtataatcttactgccgagaagacgagttcgttggcaaatcaaccttgtgagttcacctgtggcagaatccaaggtttccatggtgctggtttgtcaaatcatcaaggaggtgaggacgatgtgcccgtatcttttggtgtggatcatgaaaattcatgtcctcaatctatagctcatagatctaatccaaaatcatcagaatcgtttcttgaggtatcagctactctgttagggaaaaggaatataagtgatgttcaagatgtcaagagggtttccatggatcttgcaggggacgaaatcaatcggctcaatgagtataatccaagatcacctgagtcatttcttgaggtggggcaacgaaaaaagatgagaaaaaccgaaagccattgtctgtttgaatcaaataacatacctctttggggatttacatccatttgcggtaggagaatacagatggaagatgctgttgtggctatacctcgattcttgcaagttcctcctagaatactgaatgccgagagcatatcgaatcaaacgagcaatataagcaactta

SEQ ID NO: 4358 - DNA, 563 bp, Gossypium hirsutum
gtgcaaacaaagatagcgatgcaaatggtcccaatggagcctattaagatcggtttctgtagcctcgtccaaattttgtcttcctcccgtagactctcgtactcgtgcttcggcataaaagcttggcgtagcgcgttgcctataatcgccatggaatattttctttgaaaaccctacctcagtaggaattcaaatttacggttagttgatctagggttttatcaatctctaggtatttcctcaaaatgtgagaaatgtaaaaggtaaggggttcaaacttcaaaccctaattgtgtaatttgaaataaaggaatagagctaactttccaaggtatgggaacagcttaattgcaataatcactgatctagggttttaaatttgggttcttcaataggagctcaggaggggctgtggcggtgctacgttgccttcagctgtcagttatgagcagttatgagcagcaattttacgccatttctggaattcggcgcagcgggtggaaatattttatttgtgtttttttttcatgaaataatttatattcgtgtttgttattcattcc

SEQ ID NO: 4359 - DNA, 608 bp, Gossypium hirsutum
cgagggttcaatagggaggagtggctcacgtagggcccctgctctgaccattaagagccttatttacattcctcctagagaaaagatatttcctcaaagagatgtagcttcggatggtagtgaagaggaaggatcaggacatgctaataaacctgagaataatgttcagcgtatgagtgttcaagatgcaatcaatctttttgagagaaaacaaagggaccagattactgatgttcctaaaaggaactcattagcaaacatctctcttggtgcaagtaagtctgtattgagaagatggagtgcaggtatgaatgaatcctcctcccaatgcctatcacagaatgcttctgaagatcctgttctggagcctcctgataatgatatcatgaggtcagaagttaatttggaacctgatactagaaccgatgcacacaatgtcgatgagactgttgataagaatttagaaaggctggaagagagcttggctagtccaatagatgttcatgaggtcgcagatataatccaagaagaggaagctaatgaaaggtcaaaaagatcagctgaatggaatcggaaaaaggaagtggagtgaatcaaagtcaaaagaa

SEQ ID NO: 4360 - DNA, 641 bp, Gossypium hirsutum
acttagccaatgcattcatatttctcaaatctgtagttaatgggtccatcagtcgactgcaaaagtacaaaagcaatcagaatgctcagacaccagccacaactcaagaaatagaaagaaatacatgaatgtgctaaaatgaaaatttccaagattgtattcacattttttttttggaccaactgagcaagaaaggaaatggcaaatgttcttttgcttggagtatttgacggagtaaggaaataagttaaaactaggtggataagaaatcatacttctaccaaaacaaccaaagaaatgataatagcaactaacagttgagaaactcacacaactatcaacctttaacatagacaaaaccctaaaaaccagcatgctccctattagaagcaaaataatagaagctctctagcaaatatgtaaattaacatcttgtaagatccaaacttaacaccctaaagggaatgatccttttgtctccaaaattaacccaactaaagaaatctagcttaagagggaagccacacaataactgaacaagaaaaaaatgtagctccataaattagataagggtgcaataaattaaaatgagctgatctttaaacacttagtcaaagggctacattaaagcacctatcatc

SEQ ID NO: 4361 - DNA, 580 bp, Gossypium hirsutum
  misc_feature (302)..(302): n is a, c, g, or t
  misc_feature (310)..(310): n is a, c, g, or t
  misc_feature (312)..(313): n is a, c, g, or t
  misc_feature (315)..(315): n is a, c, g, or t
  misc_feature (328)..(328): n is a, c, g, or t
  misc_feature (331)..(332): n is a, c, g, or t
  misc_feature (334)..(334): n is a, c, g, or t
  misc_feature (338)..(338): n is a, c, g, or t
  misc_feature (349)..(349): n is a, c, g, or t
  misc_feature (366)..(366): n is a, c, g, or t
aacctagcagattaaaacctaagcattctggaaactgtatcttcaattcaaataaaaaatttaagaaccagagccatagttctgggatgtttccaaaacattaaaggcagcagtccactgtccaaatataagatcatgaggtgtatgcttcgaatctatataatactgaaacaacatatcttaccatttgactattagaactaattaagtttaatgagagcgtttgtatgtttataaaactgcttttgtgtagatatggtccagatttgagtgcaatttttcattgtgtattgtcaaatacnaatattcntnntncagaaaaagaaanatnntnatantggaaatatcnggcctaaaatgaaatgnaaagagacaggtgatttttactcatgaaatactattccaataatagcatttaccttttcagttaaatccagtgcaccactaatgatggttgtctcatcatgtgttagttcaccacctttgccagcctattaaggacagaaaagacaagccgccaaatacttaacttggttaagcaatattatctagtctggtttaagcagttacctcttggctg

SEQ ID NO: 4362 - DNA, 660 bp, Gossypium hirsutum
  misc_feature (652)..(652): n is a, c, g, or t
ttgggtcctgattggatcaaaccgagtcagatccctaaacagggagtaaaactctactagatttattttctttatccacaacgcttgaaccccaaaccttatgttagaggaaaaaacatttattttctttattcacagcacttgaaccccacaccttacgtaaggataccactcgatccaactagcattggtaagtctagatcatatcaagttaagcaatatacaaaaagaggaaaaaaacatatgttcaataacattatcaatgtttaatctgctattgctttcaaaaatacattgccggatccctataattaagagagtttttcacatagctgacattggaacttcatagtatccattgaagcttgcctcttgaaataaatcattataaaggacattcttttatcccattagagaagcaaattaattttcagcagatagtttcaaatgcaatgcagaaaagggattagaaaaagtaaaagtaatctaataaagccatcctctcatttaggaacgtgtaccttctttatcagttgaacatcataagacctgccatatttgttcctaataagagttgcaaggtctaagccactaaaggtggaatcatctgtgccaactattcgttcaaggttttcccgaagtatatcgctgntttgtctg

SEQ ID NO: 4363 - DNA, 609 bp, Gossypium hirsutum
ttgatcattgcttacactgaatagctcctaacacccccaagcctctgcccaaagaaaaaaagaacaaaattttgaatcaacccctaaaagaagagtaaatttctcaaatatcaacaagaaatgaagctttaataagtgaaaccagcgaagcacaagagcctttaacttgcagcaaagggtcgccagaagcctttcattaggaagtaagtaacagttaacgagtctcagaaacacacaacagcaaaagatcgcatctttcttcacttagagatacttggtgtattgattttggttgtttgcccatcaacaagcatgaggcgagggctatgaagaacctacgaaaggaaggtgaagcccacttacctggaagggtagtaggggccatcaagaagcccatcgactagattggtgaggtgggtgccccgcttaacactaaggccctatgggtgcgtgttagaatgggtggaccctgccagcatgaaaacgctgcccttttaaactcggaacatttcgctgttaaaatagcgcaatgctaatttagggtttaccatttttcatttcaatcttagaagttttctgaaaagaaaacatattctagtagcgggcatc

SEQ ID NO: 4364 - DNA, 636 bp, Gossypium hirsutum
  misc_feature (114)..(114): n is a, c, g, or t
  misc_feature (379)..(379): n is a, c, g, or t
gagatctcacatcagacccccagctagcgtttgaatagccttcaagaagaaaccgcgaggctcgagtaaactttaagccatagttcatcgtcccttgtagataccgcaatattnttttgactgctttaaaatgcacatctaacggcttatgcatgaactggcacaccttatttacggagtagacaatgtcgggcctggttatcaccacatactgcaaagcgccaacaatacttctgtactgatgttcatcattgactggatttccacctatggctgaaaggtgacagtttgttaccatcggagtaggaagagaattagaccgatccatggacgctttacaaagtaggtcctgaatgtacttcgtttgcgacagatatantccttctgctgtgtattgaacctctatgcctaggaaatagttaagttttcctaggtcctttaaagagaatcgagcatttagttgactgacaaactgatctacagcctgagaatcattgccagtgacaatgatgtcatcaacataaactagcacatacatcaaccgttctcctgatcgaaggatgaagagagagccatcagctttggatacttcaaagttcatggaaactaaaaattcccttagcttctgaaaccaag

SEQ ID NO: 4365 - DNA, 616 bp, Gossypium hirsutum
gatgatcactggaaaccatcttacgatggttttccggtaggttctggttctctacaatcaaacgtagttgagaggaaaagatttactcaggagatggatcagccatctttgaaagagtggaaatgggaggggacaatagccaagggtggaacacccgtttgtcgtgctcgctgctttcctgttggaaaagtcctcgacatgatgctgtaagtagtacaaaatcctttctcatagttaacatttgttcttattaattcctccattagctttaaagtaggtcctgtgaaatagagttgttctgtgttatttccgttattcaattcattgtttcaagccacaaattgacagataatgtcattttgtagtcgatggattaaaggtttaattatttattgtccaatttgatacaacatggaggaggatttctgcaactatttatgcacatatttattgtttaatattttttagatttcttccaaaaatcaagttgaatttttttttctaatgaaaaataatgaatctttccgacttcatggggcatcacatggtatttctgatagcgtccatttccgtttcctgccagtcctttggacttcctcgaatgtctgattaccct

SEQ ID NO: 4366 - DNA, 634 bp, Gossypium hirsutum
atgagttgctggctgtacttaagggaaaaggtaccaagatggataagctgcgttttgctataagtatattatctcttctgaaaccattaatccagcagaagcagaagcagtggaagcagcaatagtagaatctgaggttaatacaagtgcatttcggtatgtaaagaagatcaagtcattgaatgtttcattggcgtctgcaaattctgctagtagaaataacattgttgattgggctgagaagctctatggccagtcaattagtgcggtcacggcaggtgtgaagaacctattatctagtgatagacagttggctttgaccaggactgtggaagcattgatggaggggaaaccaaaccctgaaattgattcttaccttgtatttgatcctcgtgcccctaaatcgagctctggaactagtagtagccatctgaaaggaccctttaaagaagctattgtgttcatgattggtggtggaaatttaggggagtatggcagcttgtaagaccttgtccagcatcagcaacctgtcaagcatattatatatggaacaatagaaattttaaccggaatggagtttgttgagcaactctcactgttggggcagaagatgggattgggcaattctgttgct

SEQ ID NO: 4367 - DNA, 640 bp, Gossypium hirsutum
tggtgagacacttactaggctccttaaccactcttcatggagagttgagaactctgatctctgttcacttgacttaaaactttccccaacacttattttcattacttgtccagcctttgaggcagcttcaactaccttttctgggatcccagccatgattgcaacttgcaaaccataactctccgggcatgctccattagtaagccgatataggaaacttggctcttgctcacctttagaacaaccttcagacttcaccttaaaagagcaagccatgtgttgcagtataacatgtggatgagatgcaaattcctttgtgagtggatggtaatgtgttgcaaataacagccgacaatgaaccttttcaacaagatggcggaacacctacacaaacatcaaagtaggttgtttgaaaggggcatgagtattcaaattctagaatacgtaataattaagaagtgcagaacagaacagagaaatccagatcattctcagttagatttggctaagatgtttctctgaagctatcaagtaatattcctctatactatgagcataagcaaacttcatttctcaaagatttgcaacatcataaatacaatggtgaaaccatttgtgcctgcctttcacaaacatgatt

SEQ ID NO: 4368 - DNA, 654 bp, Gossypium hirsutum
tcatgttctgcacatgtcatctccaccattcggcatccttctcttgcaaaaatatcaaggaaactattacatcgagctacccgtctttcatcatttccaaccctcaccttatcaaaaacaaaaggaagctcgttccatccatttttaccactttcaggtccaaacatgggatgtgtgcatagaatatcaaactctggcggtaaatgttgaagaaacaaattccttggaaactccttcactgatagtacatcaacaaacagagtacttctcttcaatctctgaaaaggcaatgacttgagaactttttcagtcgaaagaatcgaggtgcacaagagaataacttcaggatgctcttcacagaggtcattagcatcagagaagaaagaaacccccaatttctgagctgcatctcgataatcagttcgagaataggctaaaacagagtggccctgacgagccagagtctttgcaaggaactggccaaagtttccaaatccaacaatcgcaaccttgagctttgaactgtcatcaacactttccaatatctttcctttgaattcataaggtatagtaacatcttgagatctgaaagttccagtaaaagacagtaaatatattatacaatttgcatcacaataatcccaacttactctc

SEQ ID NO: 4369 - DNA, 627 bp, Gossypium hirsutum
tctttctgaaaggttagccttgacaagtgaaatggtaaggcaggatagatcccttgttcctttccgaaaggttagcattgacaaatgaaatggtaaggcagaaattgttttatatacgctatggaagctccattttgtttgaatggataccaagtggattcagcagtccaaccaagctattcgaagttcggtgttagtatcggagatggggatatatcttacacgggtatggttagattttttataagtaattgtatttgaaagattcttggaggtcatatcccatacgtttgcaaacacatgatcatctctcactctattcaagtacttttcagctccactaaacgcaaggtttccctcaaggctaccaaggcctaaacaaacattaaaaagatttgaaatccccgaacttggtttctaacctaaatatacaatggtgagagatttagtagattcatttgacccttttctttttacctcttccaacaaccatattcggaaatctctttttacttgcattcttgttcctttgcgtatttagttaaattaagtccacacaatatttacagcagaatgacccaagtctcagctagtcaactccataacatccaacatttcctgtgacag

SEQ ID NO: 4370 - DNA, 641 bp, Gossypium hirsutum
taaaaacaggttaaacacatcagcagaaaacttcatggaagagtaatacaccacccataatcaaatactgaacagaagtagcatagttagttcaaattttgcttaagatgccagaattaataatgcaaaaggaattacctgaataagaacttgggaattcaaagaggtacatttgtcacactctttggagtcatcctgagaaaatactctattcaagctcatgacactagttggtgtattatcatcgccgtaagtttcttcacatgaaacaattccattcttcattttctcaaaaaattctttggaacaagtttcttctgccacattatctgcactttcttgtggattcctggagcttttgttcttcagctgttgccttagtagaagaatagtttcttgcatctcagaattttctgcaatctactaggagaatcaaatactatcattaacaatatgaactcggaaataataaagcatggggaaggcaaagcggacttagaaattctaccttcacttgaagttgctcttgaagtaccctattgtctgctgatttaatcttaaatacaattccatcacaatgcactcaaattagtaaagtatatttgacatttaaataccattcgcacaaccaagtaatagga

SEQ ID NO: 4371 - DNA, 619 bp, Gossypium hirsutum
ccatatccatttcgatttcttcaaaataaagtacacatcacacttgataaaatttcagttccacttaactagtactgttccataaaaaacacaaaattagaaactaccccaaaacagagaaaaaaacatagaagcttaaaaaaaacccatgaaatccatgaagacccaccactcaaaacctcctcccgggtccaccaccgcgaccgaacccaacttgaggaaccgaaacagcaaccggatcaaccttaacaaggccgggaatatcacccattccaagaaccgaaagcatatcaagtgtttccttatcaacttcgatttggtcgaccttgatggccgattcatcggggacaaaatccatgcgacgctcgcgctcttcttcttgaagcttaagagaaatcccgcgaactggtcctttctggatacgtttcataagatgggtcgagaaaccggcaatcttgttacggagcctcttggatgggattatagctacttcttcgataatctttttgttggtgtgaaaatcgagggtcattcgagaatagtaccgctcgattacctgacgggacgatttcttcaccgtctttgtgcgaacgcggcccatggtttaagatcggctgag

SEQ ID NO: 4372 - DNA, 620 bp, Gossypium hirsutum
tttatgacttagtataacatggaccaaaaagtgcactcaatctctttcagtaagttttatctctctcaaagatagaatttcagcacaaaacaattatgaaaatcatcaaaagtttgataaatgctaagaagaatgagcaaccttgtatttcgtaggtataaaccggtattgctgatttattgtgtcaacagtagaatattttgaggcagcttcaatctataaaaaggaaaaagaacccaaagcctttaggacattaaaattagagagggagattgcagaaaagttttgcttaaatagcatcatcaactttcacaggatttctcagacatgcccttcgccgcttctataacgtaaacatcagatcaaattgtgaaaatactgttccccgatggcagactaaataaggcaacatgactgtatgcatgagttaaagccaagtagttcggcaacctgcaaagaagttcattacacgcgtaagggaagttttgtaaaaggacaaattttaatatgcactatctggtttcacaaaaagagacatttaacaatacattctacatgtattgaagtttatgactaaacaaattgttggatgtcaattaacgtcacggtgaactatcaaa

SEQ ID NO: 4373 - DNA, 608 bp, Gossypium hirsutum
aagtgctaaatcaacagtcatacaaatgaatcaaggtaaaagtaccatgaagtcctctgtattaggggtcagattgtattttacctcctctactcaagaaatgagcaaattagtcactctacattagatcaaagagcaaactggtccttttatagaaaatttcatccatttttgctgttaaaagttggtctctgtacgttagcatgaggtacacatggcatgtcacatgtcactgtctagttatttcatcaatcatgccagtttttaatagtacaaaagaatgaaatttttaatagaaaggaccaatttgctctttaatctaatgtatagggactggtttgcctatttttttagtagaggaggcgaaatgcaatccaactcttagtacaagagcctccatggtacttttacaatgaattaacaatattagttggagtagattttgataacatttctttcagttcctgtttggagcaaaagcgcatgaagttgttgcattgcgcaagaaaggacccactcttaaagttcctcttcagttttcgcgtgttgtaaggtattataccccttcattctacgtaatgtatagctttatcagtacgttgcatcta

SEQ ID NO: 4374 - DNA, 576 bp, Gossypium hirsutum
  misc_feature (337)..(337): n is a, c, g, or t
  misc_feature (397)..(397): n is a, c, g, or t
  misc_feature (567)..(567): n is a, c, g, or t
gtacaagcagcttcataaccgatagcacaacgtgggaagcatgaagctggattagttccttctaacattggcaatcccaccattacctacaaaggccaaaagacggaggggaaaaacagaatgatgtaattgctctcctcctaaaagcacaaagtacgaagcaagaacgggaaattttacttacctttggatgaagatgtttgaataactcaaaaatgtcaacattttcagcagaatgtataatttgatcaaaaagacctggcagccaaaaatatctttagagcttatctgaagagagaggcatagaattttgaattacagcagaaaacactccatntatgttgaggtgctaaattaagaaagtgccttttttttgtaaactaaattcctcgatctngactccatataaagacagcttcactcaagatatttaaccgatcaatataaagcaccaaaatacacattcctaactcaaaatggaagcaaacttgtttatgttgcaataaaaggcacgaagcatttataatcatgccgaagtaagcagtgtgggcaagaaccaaaaaccangaagaacaa

SEQ ID NO: 4375 - DNA, 1175 bp, Gossypium hirsutum
  misc_feature (630)..(630): n is a, c, g, or t
  misc_feature (641)..(655): n is a, c, g, or t
  misc_feature (657)..(658): n is a, c, g, or t
  misc_feature (660)..(662): n is a, c, g, or t
  misc_feature (664)..(680): n is a, c, g, or t
  misc_feature (684)..(692): n is a, c, g, or t
  misc_feature (698)..(701): n is a, c, g, or t
  misc_feature (704)..(710): n is a, c, g, or t
  misc_feature (712)..(720): n is a, c, g, or t
  misc_feature (726)..(730): n is a, c, g, or t
  misc_feature (735)..(737): n is a, c, g, or t
  misc_feature (742)..(755): n is a, c, g, or t
  misc_feature (757)..(757): n is a, c, g, or t
  misc_feature (760)..(762): n is a, c, g, or t
  misc_feature (764)..(768): n is a, c, g, or t
  misc_feature (773)..(773): n is a, c, g, or t
  misc_feature (775)..(787): n is a, c, g, or t
  misc_feature (790)..(801): n is a, c, g, or t
  misc_feature (803)..(806): n is a, c, g, or t
  misc_feature (811)..(811): n is a, c, g, or t
  misc_feature (813)..(819): n is a, c, g, or t
  misc_feature (821)..(830): n is a, c, g, or t
  misc_feature (840)..(847): n is a, c, g, or t
  misc_feature (857)..(858): n is a, c, g, or t
  misc_feature (862)..(871): n is a, c, g, or t
  misc_feature (874)..(875): n is a, c, g, or t
  misc_feature (880)..(880): n is a, c, g, or t
  misc_feature (882)..(893): n is a, c, g, or t
  misc_feature (895)..(904): n is a, c, g, or t
  misc_feature (906)..(911): n is a, c, g, or t
  misc_feature (913)..(918): n is a, c, g, or t
  misc_feature (920)..(926): n is a, c, g, or t
  misc_feature (934)..(936): n is a, c, g, or t
  misc_feature (941)..(961): n is a, c, g, or t
  misc_feature (966)..(973): n is a, c, g, or t
  misc_feature (976)..(982): n is a, c, g, or t
  misc_feature (987)..(987): n is a, c, g, or t
  misc_feature (994)..(997): n is a, c, g, or t
  misc_feature (999)..(1006): n is a, c, g, or t
  misc_feature (1008)..(1028): n is a, c, g, or t
  misc_feature (1032)..(1034): n is a, c, g, or t
  misc_feature (1036)..(1041): n is a, c, g, or t
  misc_feature (1049)..(1056): n is a, c, g, or t
  misc_feature (1058)..(1059): n is a, c, g, or t
  misc_feature (1061)..(1076): n is a, c, g, or t
  misc_feature (1081)..(1081): n is a, c, g, or t
  misc_feature (1084)..(1085): n is a, c, g, or t
  misc_feature (1087)..(1092): n is a, c, g, or t
  misc_feature (1101)..(1116): n is a, c, g, or t
  misc_feature (1119)..(1138): n is a, c, g, or t
  misc_feature (1141)..(1148): n is a, c, g, or t
  misc_feature (1150)..(1154): n is a, c, g, or t
  misc_feature (1156)..(1161): n is a, c, g, or t
  misc_feature (1168)..(1168): n is a, c, g, or t
  misc_feature (1170)..(1172): n is a, c, g, or t
cttttgcagggggtgaaagtgatatacagaacaaaagaattagaggaacaacaagctataaggttggtacatgattggttggattaggataacaaaaagcacttattttctattggtcctgttcgcgaaggcactttttgcactttctttctaaacgaaatagtaatgattcttggaaaagtcaatgttagagagtaaagaagagacctacttttagtcttggaattgtagcgttttcgcagcaatggaacttccatttatggaccaaaatactattctgataagcccacaaaatcagaataaattacacatgttgggagacatgagctctgaattaaatagtgctatgtcccttggtctaaaactggagatgacctgtaacagttcaaaaattactgttagattgtaagccatcttccattttttttgtgtatgtatgttaatgtggttttgtgttattttattttttaagggataatcagtttgcttccatatgatggtgccttgagatgtcctttcttacgttttttacttttctgttttatgtcctttgaatctgacttgatgtttcttctatttctttctccaatttcattttggtgcctgtagtcggatttggaatgaaacctnaaaaaaaaaannnnnnnnnnnnnnncnncnnnannnnnnnnnnnnnnnnnaacnnnnnnnnnactaannnnacnnnnnnnannnnnnnnnataatnnnnnaaaannnctacnnnnnnnnnnnnnnanccnnnannnnnaaaancnnnnnnnnnnnnncannnnnnnnnnnnannnnaaacntnnnnnnncnnnnnnnnnntatacttttnnnnnnnnaccctaactnnatcnnnnnnnnnnatnncttantnnnnnnnnnnnnannnnnnnnnnannnnnncnnnnnntnnnnnnntcttactnnncctannnnnnnnnnnnnnnnnnnnntatannnnnnnntannnnnnntttanatgtatnnnntnnnnnnnntnnnnnnnnnnnnnnnnnnnnnatannntnnnnnnaaacaccnnnnnnnncnnannnnnnnnnnnnnnnnacacnggnncnnnnnncctacccannnnnnnnnnnnnnnnaannnnnnnnnnnnnnnnnnnntannnnnnnnannnnntnnnnnnaccatcntnnnact

SEQ ID NO: 4376 - DNA, 634 bp, Gossypium hirsutum
tgcttcattcgaggacgagtccatggagagcttggagaagcaagaagttgcttttaaattgattgctcatactttggaaaaggtgagcattgatcaaaagcatttggagcaagtgagattaattgcaaagaagcagcttcaatctatgtctgcattcctaaaggtaaatgccaacggaagccttgtgctgttctatttatttccgttaaattaaggcacctaagtaatgcattttattggtaaagtatgaagaaatgggtaacttgtactcgttttgtagaataagttagcatttgaaccttgtagaagcaatgtatattgaaaaacgagatggtcacaactttgacttggtatgcagattaggaagtgtgactggaatgaaaaaggacaacctttaaaagccagaattaatgcaaaactatcagcttttcaagctgctgctaggatgcaaattaaaagtcttgtctgtcttgatgtggacgcaaagacctctaagaaattggtgcttgagactcttgcattgttgatagatgctgctgaagcttgtctgctctctgtatggagaaagttgagagcttgcgaggagctattcatttccttgctttctggaattgcacaagttgctggtctctag

SEQ ID NO: 4377 - DNA, 582 bp, Gossypium hirsutum
  misc_feature (553)..(558): n is a, c, g, or t
  misc_feature (566)..(570): n is a, c, g, or t
gtgtgtgtatattaaataaaagcttatgttcttatctttaaactttagtgctgtatattctccattgctgaataaggggaagaaactactttcccttattttccttactctcctattgctcttccattttcattttttctcttctttcctttaaaacacattcaaagatcaaaagcactgatctattacctttccttcttatgaacatatcttcactgaggaataatgttaagggtggctttagcctttaagatgaaaatttatatgttaactttggtccacaaatgccctttattcaacatttctttagtaattcaagataaagtctaaatatcttcccaatttaaagaactttgaagcaacatgtttaatacatttgaaaagttaaatgcttaatcgttgttcaactccataaatttaattaacctcagtcaaatcttcaacaatatcattttttatttgactggattttgttagtgtttgggatgtagataatagtaatgcatagtattctacattttattatcattgccatcagtgcccaccccattcnnnnnnccttcgannnnnttcgaaaatggc

SEQ ID NO: 4378 - DNA, 535 bp, Gossypium hirsutum
cgagaacttctagaatttatattgacattcaatgccaacagtggcgcttcttcatatgatggagggaatggtccagaggacccgttttgttgaatgttgatatgccgtggcaactatgtttagagattgtacataacatagggctttaagtgagtgttgtgttacaagttttaatgttcactgcttcttttattatatatagaacttatttatttatgtggccttttttattctgtttatttcatttctttgagggaggagaacagtagaacatgatcttcactagtctgctttatttaacagtctgattgtcccaactgcacataagcgttgctttgcaactcttttggcttgttattattaaactctaaatatgaatgaaaatgaatttgattgctaagttatgaaagttgataggttggttctataatttgttagaatttggtttttgtactgttgttaatccaaatccaattggataatagttttaaatgttgtcgttaaattagtaaaagttggtggtttaagttcccat

SEQ ID NO: 4379 - DNA, 631 bp, Gossypium hirsutum
gcacttccccttctcttaaccgccctttgaaaacttgaccaggtctaccatctctgtgccttcaaataccccgttcccaacctcaccatttcatcaaaattcattcattctttttacactttcttttacatatttgtaaatcaaaatagttttagttttttggtcttactcttacataatggagacatcatcactaaactcaaactataccctttttccattgattgatatcagtatgatcttgttgtttcttagcttgacatgtcatgacaggtttaggagtttcatctccagatattattggtctttcccacaatccaaacatggcagctcaaagacatcatcctcaagtcgggagaaaacccagaattatgagtgtccaagcaaagaggcttcatttaataataataaggaaggttgtgcgatagtttgcagaaaagatgtggagaagtttatgggaaatctgggaattttttgcagcctagaaagtgaggagctacaggaatcctatggttctgatgagctttccaggctgtttgaggaagaagagccaagcttgaaagagttgaaggaggcttttgatgtctttgatgtgaacagagatgggtttattgatgcacaagagttgcaa

SEQ ID NO: 4380 - DNA, 614 bp, Gossypium hirsutum
tgtcaattaggttttgacaaacaatttttttaatgagttatagttcttattatgagaatctctggaagaatggcactagggactttcaagtcattggtgacagcaatttgtactacctccttcaagattattcagtcacaaatgatttctagaataaatttagcaggggaaaacataatcatctaagtaaattattggtagatagttttttttaaaaatttaaaaataggtgaagaatcctactttgtttgctgctcttataatcttgtctgtagggccatctgcactagtatcacaaaagcattgcttcatggatgcttgcttcttttggtaatcttatcgttcagtataatacaccattttggtgctctcggatacatgttgctatttgaaataatcaaaaatatctgttgtggaatttttattcattttttgcttccctacgcggattttgatgtaggaagcatatgctccttttgtttctttctaatatattcatactgttttataaacgccaacttgaccatggttatttgcccattgtactgcattttaagaaactacatggattttgatgtattcttttgctttctttctggcaagttcatactgtt

SEQ ID NO: 4381 - DNA, 170 bp, Gossypium hirsutum
ttagacattggcgatctgcttcatttcttgcttcgtcgctttggttatcagatgcgagtttcatctctctcagtctctcttagtgtctttctttttgtcttcatcttttctttggaaaaaagttgcgtaattttgttgtgaatgttcaattgttgtttcgcttttttttt

SEQ ID NO: 4382 - DNA, 648 bp, Gossypium hirsutum
  misc_feature (27)..(30): n is a, c, g, or t
tccctcccatgactgtgtcagcaacannnnaggtcctttctgaaacactcaaaagtaatcatctcaaatccccaaaatacaacaaaatttactctactgtttggagtaaataagaaatcttgctaaattgttaaatggtccaaccttctccaaagatgtgcaaggcccaattaccccttgaattttgatgtcctttgaacagttaatctcaagcatgccactaaaaaggggaaaaaaggaagcttataatgagtaagattaatactgtaactgatactgatagtggatatttctgagggctcaaaaccatgccatagccaatcatatgcacagacaatgcatgtgtatcaaaagagagagaagctaaagctagaccagataaattaacttcattaaactttgaaggagagatttcatttctggtaataaaaattaaatctgaaatcaagaatttcgaggttggcatataaactcaaacaaacatagacagtaacaactggtgtataaatgtaaattgaccaataaagaatgctagtgcatatttatttatcaacgccatagataagagaataaaacaaagtatatcaacaatgagaagattggtcaggtaataaaactaacttaaagcataaggcaagaaaatgttca

SEQ ID NO: 4383 - DNA, 614 bp, Gossypium hirsutum
aggttggaaacattgattgggataaacatgggcaggtatgtgctttcgagcttttaatagttgcacatgctacttctagttttgaatgtatagaggtttccactttcttttgtttctactgatcgatggtttaatgacatggggtttgtaggttttccgtgcaggaatacagcaagttccgtgttatgccaatgaatgaagcagccattgcacttgctgaaacggggaaaattggggctttaaacctcctgttcaagcgtcatccttattcacttgttcatttcatgttagatattttggccgctattcctgaaacaattcctgtgcaaacatatgcgcagctgcttcctggaaagtctcctcctgcaagtactgctatgagggaagaagattgggttgaatgtgacaaaatggtaagttttattaataaattacccgagaaccatgacattgggagtcaaattagaactgaacctgttgtcaagagattgctaggatttttttggccttcaacagatgaccttgcagtttggtataagaatagagctagagatattgattcctacagtgggttgctggacaactgcctctgcttgattgactttgcttgccag

SEQ ID NO: 4384 - DNA, 1002 bp, Gossypium hirsutum
  misc_feature (654)..(661): n is a, c, g, or t
  misc_feature (674)..(681): n is a, c, g, or t
  misc_feature (683)..(687): n is a, c, g, or t
  misc_feature (690)..(690): n is a, c, g, or t
  misc_feature (697)..(698): n is a, c, g, or t
  misc_feature (719)..(734): n is a, c, g, or t
  misc_feature (752)..(753): n is a, c, g, or t
  misc_feature (756)..(765): n is a, c, g, or t
  misc_feature (768)..(774): n is a, c, g, or t
  misc_feature (778)..(780): n is a, c, g, or t
  misc_feature (789)..(795): n is a, c, g, or t
  misc_feature (797)..(800): n is a, c, g, or t
  misc_feature (803)..(803): n is a, c, g, or t
  misc_feature (811)..(817): n is a, c, g, or t
  misc_feature (826)..(826): n is a, c, g, or t
  misc_feature (828)..(828): n is a, c, g, or t
  misc_feature (830)..(830): n is a, c, g, or t
  misc_feature (832)..(833): n is a, c, g, or t
  misc_feature (840)..(842): n is a, c, g, or t
  misc_feature (849)..(849): n is a, c, g, or t
  misc_feature (851)..(853): n is a, c, g, or t
  misc_feature (858)..(866): n is a, c, g, or t
  misc_feature (874)..(888): n is a, c, g, or t
  misc_feature (893)..(895): n is a, c, g, or t
  misc_feature (897)..(902): n is a, c, g, or t
  misc_feature (907)..(925): n is a, c, g, or t
  misc_feature (932)..(935): n is a, c, g, or t
  misc_feature (937)..(940): n is a, c, g, or t
  misc_feature (942)..(942): n is a, c, g, or t
  misc_feature (944)..(949): n is a, c, g, or t
  misc_feature (953)..(953): n is a, c, g, or t
  misc_feature (955)..(956): n is a, c, g, or t
  misc_feature (959)..(960): n is a, c, g, or t
  misc_feature (965)..(965): n is a, c, g, or t
  misc_feature (969)..(970): n is a, c, g, or t
  misc_feature (986)..(999): n is a, c, g, or t
tcactgtgcagaaaaagtcgcaatttttatccacataaaagcatcaaaattcaagcaagtagataagatccaaaacatttttttaacagaccaagatcaagaattttgcatcttttctctttgagaagttagattatgactggaggatttattcattttatgctttcctgtgatagttcataaatcatcattacagctttgataaacctttgcaagtttaaattttcaataaattttttcattgcgctttataactcattttagatatgatttaatgaaagatttaagatcagaaactgtagaaaaacttacagcagctagaaactacttaatgcattaagttacttttattcaaggaaaattctgttattcaattacattaatcttatatgttcctactaaccacacttattttccctttttgacttctgatcaaatgaaaagatacctctaaaattatctctcttacgaaaggtcaaatacagaatctacttaaaattaaattttcagtagcttacaaaaagaattaccatatcatacatttagcgcttctaattttcaaatcaatgcttaatttatttcaatttaacaagcagcacccataacagttttggcagaaaaagaaaaaccatatcgctcacttagtaatgccannnnnnnnctctccctccttnnnnnnnncnnnnnctncttcccnncccccccctcctctctttctnnnnnnnnnnnnnnnntccccctctctctccccnntcnnnnnnnnnntcnnnnnnncccnnntcctccccnnnnnnncnnnnccncttttttnnnnnnnaacctatcncngncnnctcttcnnntctcccncnnnccccnnnnnnnnnccaccctnnnnnnnnnnnnnnnccttnnntnnnnnntctcnnnnnnnnnnnnnnnnnnncctcccnnnncnnnncntnnnnnncccncnnccnncctcnactnntttcccccttcccccnnnnnnnnnnnnnnctt

SEQ ID NO: 4385 - DNA, 646 bp, Gossypium hirsutum
tattttatggtaacaatgttttcttgttgttctggcactatcatcaattgtaacaaaatttccttcctgttgtaaaatctggcataaaggcttcaagttcttagtggatgatacatacgtgcatgaatgaatttcatggtgtgttccaagttactagagttcagtgtaatgatattctgtaaaccacccaaacctctggcataggagagtgttgatggagggggtagggcatgggtggggtgtattagattgtgagaagtaaaatgaaatttacttgacttctcattctttaatgcaagaaattacatgaatgtttctagacttctagcattcctatctttcatgtacttgagatccaaaataatgaagttccaagcttgacttaaaacaacacttacattataaaaaatagatcaaagtaaaataactcaagacttaaatctgctggaaacctggaaactatcgttagattgagcaaactgatgaaaagaaagtaaagccaacaatcttttatactttagaaacataaacatgacttaatggaatcatttcagcttaaattggttctaaaattaccaaaagttagaccgtgatcttaaattatcttggcagttaacctagcccgctttcatctgattgtcatcca

SEQ ID NO: 4386 - DNA, 576 bp, Gossypium hirsutum
tccttcaactgttctgccctttctctcttttgcataggttaaatgcctccttgcatatgattcactagaaatttgaaggtccacgataaagctgtttgatccttcaaattgatcggccattaattatagattccagtaaaccatcaatgccagcaaaaatgggaaatggaaaatcataatttatgccagttttgatatggttgctttcccaaccgcttcaaaacatacatgcaaccagctgccgcgaacaatccaaccgcagcaaacgctatcacttctgaattctcaacagtcctataatagcctctctgcaacattacgaagctagacagttagttcattaggaaaaacagaaaatttgcattattaccatattccatattctcccacaagattcagtgagtgctcatgtccaattttcctatcctcaagagctcaggtctagggataaacattggtcagccctaattcacaattcttaaccaaattattacaacagcagataaaaaggggcagaagaggtgtatcaggtttcatactgccatttcccctctttccagtaaaacgaatcatcca

SEQ ID NO: 4387 - DNA, 646 bp, Gossypium hirsutum
aaagactgcaaagagttatccaagtcaggaatctcatctctcatgttcacaggacggtgtgcaggaaatgtgcatagtggacctgtaacactagcattaacgtctttgtctttatatctactggcctttggtgcagtcttggtcacttgcacttctacaaagttacatgatggacattagaaactttaacatcaatagtgaagtcgtacacctgatgccaaataccttcaacatcaacatcaatcggaccatcaatctttcccctttcccaagtcttgtgactttgcaaaactataaataccatgaaagaaacatagttacataaatattattgcacaaggaattcaataataactaaaaactctgttcttttctcatgcacacttttttctaattatttcatacatgtgtgttactcaaatattagaaccaagattccaaaaacaaaatatatattagaacctagcttttttatttatacctcacctattccttaacagcaccaatatgagctggaagtattaaagctatcaagaaaagaactaactaaaagctaaattaattatactaaatgtcactgtaacacacatgcacattcccatgtcagccgtcacgaaacagccatggaataacagcgtcaagccta

SEQ ID NO: 4388 - DNA, 656 bp, Gossypium hirsutum
tgtattatacttttttcttaaatcattcaaattaatgtattaaatgcaaaaaactttattaatatattggtcaaccaaccggtccattttgcaaagtctgcatcacatccagaacctaaaatttccagtagcatgacaggaggcttactgggaacagaaaggccaaccatctgcatctactgatgtcttaaatagcggccaacaaggaggatccttcttttttaataagagaaaagaataatttcttaatgtaagttgaatatcaacagtgagcgggatcctgtctgccagactgccacaactaatttgataaaagttgacgttttccttccatggattttagcaaaaaatatatattgggactatgaaacccagccacaaaaacacccaaacctggctttggctgataaatgaacactcaatatatgaatcacagtaccatcatctgggttacataatcccggctaaccctggaatatcactccaaattgttaaaaacagctcgtacccagcgcctggagattaatataaccattagaattgaagaaaatgaaaggaaagcaaaaagaacagcagagaaaaagaaatagaactggttttcctcctttagtgtatagcaactagcaagttccaacagatctcgcgatgagaaattt

SEQ ID NO: 4389 - DNA, 589 bp, Gossypium hirsutum
  misc_feature (511)..(511): n is a, c, g, or t
cattaatctatagcagtttcttgttctttctagtgatgaatcaatttataagaacttaacaacctgaccgacacttggagcttcggaccacttcttcaagatctccaaatcactttggctgaaaatcgccatatttccagccagaatgcttagtgaagggaaccatttctgggacatccaccagtagaacaaccaaggggtgtaatgcgcaactcggaatgaccattggtcttgtgcaagcaacctactgaatgcatcattcgataaatttgcaggaagacaaggccaccagtagttaacaaagggaactacaagagaagctcctgccaatctgtaaaaatgagaaaatccattgccaaagtaacttctttcgtttagtagaattagaaagcaagaattctgcaaagtcaaaaggaagaaaaaaataagaagcttataatctgtaaacaaatctagcaacatgcctatgaggtatgtattttaagcaactgtaaacagggtatgctccccnttgagatcccaatcacataaaacttagaaccaatctgcaacttgtcagctagttcttgaacatcatatgctcactctc

SEQ ID NO: 4390 - DNA, 635 bp, Gossypium hirsutum
tcttggagatgttgctgaggagaaagaggtggacaagattgcttctaaaatgaaagaaacgagaaagtgcaagtcgtttgaaaccttgaaactgattgcccaaagcataactttcaaaatccatgcattcaagcttctttctcccgttacaagtcacttgcaaaagcatctgactccaaaagtgaaatcaaaattggagaatatgttaaagcacattgcggatggaattgagtgtaatcaatcagtaaatcagactgatctcttcgtttttgtatatggcctcataacagatgcaactaatgacgaatatgggtccggtgtgagttcaattggcacagaagcaaataaacatggaaatgttgtcagtgagaaaattgtttctccagaccatgcttttaaaactaaatctgcatgttctcaccttattaccacgtttgcactaggggttttacaaaatagaataaaaagcatgaaattggacagaaatgatgagcaactattatcaatgttggatccatttgtccaattgcttggcaactgcttgagttccaaatatgaagatattttatctgcatgccttagatgtcttactccattggtgaggctgcctcttccatcccttgaatcccaggctg

SEQ ID NO: 4391 - DNA, 642 bp, Gossypium hirsutum
atacatacaacagtgtcaagatagtgtaagtaggattagatctttctagatcacaaggaagctccccttgcaagatgctatctaatagtgacattctatgagtttgggaatcagagttggaactgggagaacacgatttagtggatttagatgctggggcagaacctgaaccccctactgatgttcggtcagcttgggtgtctgccctctgataagttattgtgtagataccactccacattcctcttccgtcagtagatgtgaaatcactaccaccatatctctcatcatcgtcctcatccaacacaagctgtctttgaatggcctgatagatggtcaactgccggttgagctgcttactaccaacagtaaaaatcaattttggaggctcattagaattgccaaactgaggacgtccttgccgatctctacctcctctaatacctctaccattggcagatccaaacccagccatggcagcagcagcaaacgacattgcaccccttgagccataactactcctaaaatcagcagagtctgaaccactaacagcagcagctctgctgcttgatccagaagcagcattaatttggttatcacttgctgctggatcaagcagcagagctgctgctgttagtggtt

SEQ ID NO: 4392 - DNA, 628 bp, Gossypium hirsutum
atgttgagcttctgctgttgatgattaccaatgattgtgacgtccccctcattctcttttgcagcaaacgcgaagcaaacttgagacatatcgtcattgcctttccaggtaactgctgtttggtccaaatttacatccaagttttcaaaatgtagaaccatctcgggtattgccagattgtcctgatccaccaggttgtagcacgctttcagtactccatcatcagaaggattagcaggagggaactccgacatcaatctatcgaattcctggctcagctccaaatagactgaggaaggaagatgagtaatgacagttcctgaatctataatggttcctggggatgataatatacccgaaggcacttccacttttttctggcctagtgttatggcaataagatttacgaaataatagttggcaccagaagccgggtttcttagaagccgtgtgtaagtaccagaaaacggacattgttcacgagctttctcaccaaaataaacatatcctgagttacttgacgagggaagacaatgacaaaatactcttccaaacaaatttgcagtttgggttgcaagggaataggtagcaaattcatcgcgagagctggccagacctaggcctagta

SEQ ID NO: 4393 - DNA, 629 bp, Gossypium hirsutum
ctagtcttacaaacatagtattactcctttgtgtgctattaataacattttgatggagttccttataaatcgcttagttgcctaatgatttcagggtacagggagaaagtttttgccatcattggtgttaaggtttatgcagcgggactatatgtcaatccatccatcttaagtaaattggatgcctggaagggacggtcggctgctcagattcaagatgacatgcccttgtttaagtccttttttgagggtaataatgatatgttatttgagtctctaatatttagtctatgttacttgaacagaggtgaattgccagttgacattctttttaagtgcagatcctatggagaaatcgttgcagattgtcctggtgagagatgttgatggtaaaacattctgggatgctttggatgaagccatctcccctagaatcaaggcaccaactccggttgatgaatctgccctttccacatttcgtggtattttccaaggacgaccacttaataaaggaacttccatctttttgacttggccccatccttccaaaatgcttgtgagtgttgacttaaatagacattgaacattcattcttcacatggttttaatccatttatcgttgtctttgg

SEQ ID NO: 4394 - DNA, 540 bp, Gossypium hirsutum
  misc_feature (501)..(507): n is a, c, g, or t
ctctactgatttagaattagtaatcaaattaaaattttaaatctcttttgatttggaagaaatttattgtgtatgtacgataaggttggtcaccatcgctaatgcacctatttcaagagattcaatgaaatgatctcctgaaactaataagttctagtttccagccatccatggcatatttgtctttaacatctacatggtagaggagaactttaatgatgctacaactctagatctgcttagcatgcatgtatagcctgacattttctgtattaattgcctttattggcctgtttaggtatggttgacactttggttgccaaaactcgagcttgggaggaagatcgtggcatatcatttaagtacgatggcattccgctccttgccatgctagatgaatatgctatgctcaggcaagaaagggaagaagagaaaaggaggcttagggtaaattttctagtcaatatcagttccaactatttttaaacttcaagcatgacnnnnnnnttagacatgaagaaggtgaacttaaatggtctc

SEQ ID NO: 4395 - DNA, 567 bp, Gossypium hirsutum
  misc_feature (555)..(556): n is a, c, g, or t
ctatctccagaggtaaggttgtctcaatatggcactatgtgttctttaggcttttgggttttatttcaaactttgctatcatgccttgtagaattggtcagaaatgggaatgcaataatgaaaatctcaagtgaggttaagagaggataactttgagcagtcttctacctaagaaaatcaaatatggactctattaaaaattttaatacgcgtatggttgaattgtaaaatgcttatgattctttgtttcttgatctttttcatccatttctggtctgttctttttctttcctttcatttgtcctgcatattggctacaggtattgctgaattagttcatatgtctaacctttttctagttgtcattattcacgattttcatgtcaatgatcttagctagtcttaaattttatcgagaatagaagaacttcatgtctccaatgtgtgcttcatgcgaagcaatgttgcttgtaatcttcatttttctcaaggtacccatgttcaacattgtgtctgttgcatggatatgaggatatgacgtctaaggattctccnnaatatataaaa

SEQ ID NO: 4396 - DNA, 616 bp, Gossypium hirsutum
gtttatcatctatgcaaggatggcgtgctactatggaagatgctgtgagtgacaaattaaacctttagacccaataagaacaaaaaaaaactctagctttcaaatgttttgataatttggatccttgttgctacattctattacctggttgaaaatttttctttttgggaggaaaaattttggtaaatatgtttagtctgttataaaaggtcttccaaaacattgaattgaagttctttgtcatttactatttgtaatgtgggtcaatttgtcatctgtattccatatgttatatatattggaccttacattttatatatttctttcaaattaccaaattctgtttatatggatatgttagttaccttttattatttgttttcatagcatgctgcatatcctgatcttgatgcttctacttcgttctttggtgtttatgatggtcatggaggtaagacttggatggttcaggtacttatgattgttttcagttacatatacaggttatgaaggagcttgaacctattctcttttcaaatgaactttgattcttagctacttttcaactttttgtctacaaagggtcctcatcagggttgaacctatgaaacctggg

SEQ ID NO: 4397 - DNA, 594 bp, Gossypium hirsutum
  misc_feature (581)..(582): n is a, c, g, or t
aagccaagaattaggatgtgtacagcaggtatgcctctctccctctcattgatatgcaaagatgctttgttgaatgaagaagtggaaggacggaaagataagagtggaaatgcggaaagaaaatagcatttagcgtggttagtaggatagaaaagtgagggaacaaaaataggaaaaatgttccgtatttcatagtaatgcataaaaaaaaattaaactttctaaattgggatgataagagaaaataaactgagaaaattttaagtgtgtttatctctaattaatcaacggaaagaaaattactttttttttcttttcatatttttatctttttaattttttccaattttttgtcgagtgtagtaaggaaagtttaagggtttgtttggtagaataaaaaaattgaagggtggaaagaagagtgtaaaagtggaaaaaaaatcatttttgattgtggttagtgaaaaagaaaaatgagggtaaagaaaataagaaatataatcattttttattttcgtgaataaagaataagccatttcaatttgaaatgataggaggatcaacctattagttcaacctannaccgactggttg

SEQ ID NO: 4398 - DNA, 630 bp, Gossypium hirsutum
gctctgttttggttgtcttctgagttttggtaagtaacttacgactcccagtgtccgaaacagaccttgaatttgaactggtcttattcaaaagcctattcctgtttgcagcattattctttggagtagcctcttttgctgatttggtcactgatgatacctgagcagcatcagtattcaaggacttgggtttcaatctccgagctgctgctgctacaggagaaaccctgtgaacctcatcatccgatgaccgagttccctcatcaggcacctgagaacaggtttcagacacctgtggttgctcgggattgtctggaacattgtagctttcgagtagctcatttatagcttccccattttcaccaagattatggcgacgtatataggatttaagttcatcactcattttctgaaggggctggatttagtgttaaaatgagattagaccaaaaacaaagataagtaaataccaaatccagtatactaaattgcgtaaaccactttgatcatatgtgtgcgcgtgtcacaaaagaaatataaaacgatgccggctgaaaatattataaatagcaaatgcaaatgccaaaaaaaaaggaaacttgaatacaaaagcaaatgaaagggcgtaaa

SEQ ID NO: 4399 - DNA, 623 bp, Gossypium hirsutum
tttattctatcattgtttctagcgcaatcaagcaattacaagaaactctgcaaaacttcaaccctcgaagttttaaacagaatcgagaaactatttgctcaaactttgtttgcaagtcaaatatttagcttcatcaaatcctatgaccatatacatgttaggatttccacacagtataaactgaacaacaattattataatactacagacatactgggatataaaacaccttataaatcaagtcatatatcggcaactaaaatgaattctaatgtaagccattgtcaagtgaattcacttcaaaaaagtaaatgaataaaacctgatagctagctctccttgctgagaaaccagagtagctagctggttgaagatggtgccaagctcgtgaatagtggattctacattctgaagagcttcagctctgctctgcatgtaactgtcttgcaatggaaccatttgctgctgctgctgctgctgctgctgttgatgctggagcaatggctgactttccccatccgtctgctttctgtataattaagaaccaggaatgacttcatcaaaaataacaaggaggaagaagaagatagaaaagaggcaaatacacatagcaatgaagttcc

SEQ ID NO: 4400 - DNA, 619 bp, Gossypium hirsutum
agtaaccaggaaaggggatagcatgcacacttgctacaaaagttaattatctgtatcttaaatcagccaaataggggtttccatcgcttaccatctttattgcttccataaacgtaatactgaattcttttagaatattagcatggctgtttaatcgccttctccaagcatgttttggtggaccagcactatcaaaatcaaactatataggagtataaaaccagcagaattagtatagcagaatgctagaagttcatctcgaactaaacctaaaactatcatgtcaaaaaatagttttagatagaatcgatgtgccattttaataagaaaatctaatcaaacaaagatgtcatcctttatcctcctactcagcaataaacactcactccatatggcataattactgaatttaagatcgtcaaatatgaaaaaatatcaggaagaacaaactcctattaattcgagatgttaccggacatgatcagtctcttccctacatttgagacttaaaactttatcatgtgacataaccatcaagttcaaaacttctttttcaactgttttttcaaaatttataggatttgatcagacactagctgtaaaaatcaaccattcatat

SEQ ID NO: 4401 - DNA, 643 bp, Gossypium hirsutum
aagttggagctgaaaacaatacaattgtttcggtcaatgatacagactgctcctcccatactacgctacgtattaaggaactgtatggttaaacatatacctgtttcactaatgatacattctgctcttcacaaattcattttcattaaaaaaaatgtttatttgacatgttcaaattcaaaattttggaatttaatccttatatttttatttttaggaatttagtcccattactttttatatttcaggtttcaaaatttaggggcaactattaacggtgttaaaatcatttttttagctacatgactattaagtaagtatatttttttattttaaaatgtcacactaacaaatttaaccaaaaaaattaacaggattaaatctctgaaaacaaaagtataagaactaaattctaaatttgtgaaacatattttaacaaaaaaaaataataattagtttaaattcaatacaattttgtccaatttaaatttagcaagattaggtattataatatgtgtgcatttcgttttctttttattcgacacaatgcatttgcatggtgttatttgagtaaaaaagaagaatttttaaaaatatttatcggataaaaataattgatggaagtactattatagcctttgtc

SEQ ID NO: 4402 - DNA, 661 bp, Gossypium hirsutum
cttcgtcataatgagcagcaaatggctggagctaatttgtgtaatggtcctacagtgaaaattggagtaggaaagtattgtcttacctttgacagtgcttctagttccaaaaattccatcgagttcacaattatagctgatgagaacttaatcgcatttgtgaatgcagctctcacctccatcatcgcttgagtcggattctgtactattaatgctcgtaagcgttgaagctgcagagcttgaagctctggtgattcagttccagacattaattctgcaacacaaatttaacccacgtatgatcatcatctatacaacttagaggtgatcatgggccgggccgagtcaggtttaggctggctcgaacaaaattttaggtttgttttctaagcctgtgcccggcccgacccagaatataggcctaaattttttttcaagttcggcccgaaaaaaaattgttaagttcgagctcagtctggcctgaaccatattaaattttataaaaaaaatatttaaaaaatatatttgattaaaaaatatatttgattaaaaataaaatatatatatttaatatatacttcgggctgggttgggcccggactaaaaaattcttacccaaaacacgggcctcttttttcactcaaactcatatttcgagcca

SEQ ID NO: 4403 - DNA, 618 bp, Gossypium hirsutum
ttataatgagtttgtatctttgcatcttttaggagaaaatttggtcctcgcagctatatttgggtgatacaaacattcctgattggttttagcctttcaggtgttggttacctcctacttgatggccattttgtgtgtataaactattaatactttaaataagtactaagattattcttttctcatgtaaatcaatatctgaaatgtctctactgtacctatgactatattgtttacaatcaatgtgtcatattatttccttgtaccaataatagtctgctacgaactcggtaagcttcgtctctagcatatagacttaaagaggtatcaatgttcccccattttcttgtcttcagagacatttgaggtagatatcagtaacacaaagaagcttcttgaaggagagcgtggccaactgatctgtcagaaagatataattgtaagtgacccttcaccgtatatatattctgataaattagaaaacccgcgcccttcaccgtatccgtttctatgcatttaaagataaaaaggttattgcttgttcatgcaactcatctcatatatgttgtttaaataatttattgtttactttaccacatcaggtagttggagaatctg

SEQ ID NO: 4404 - DNA, 602 bp, Gossypium hirsutum
aggcgctaacgtgatagatggaatgaaaataggggaaaagtgaccctcaaaatagtaaaaaggactaaagtgaaattttgaccatagtatagagaccaaagtagatattaaactaaatattttctatgaagttcatcaacatgtacaacttaattgagtggatactgttggttaattaatgctttcttttgtgtgcttagttttagttgaattccatggcatccactttgagtgaactctcacttttaaagtaccctcaaatttcaaacactaattattaaaacaatttcatcaatcaaaccagccaacttatacaattagaaaagtggtaaactatatatatacttatctcatatagtggtaaactatatatatatacttatatcatgtagttttagtatattgactgcctatcttgtagcagtaaaagtaccatgaagattcttgtactagaagtcaaattacattttgcccttctactaaaaacacttaacaaattgaaccctgcacattagatcaaagagtaaattgatccttctgttaaaaatttcgtctatttttagtgttaaaaaccggtccctttacgtcaacatgagatacac

SEQ ID NO: 4405 - DNA, 632 bp, Gossypium hirsutum
aatggatgatatataagttcctttgcacgccatcaaaagaagctaaacatatgtcacaatagcagccagtagaaaataacaaatcgacgagacaaatgcttagaaatacaatgtaacagtcgtaaacagaaaaatggaagtgagaaagaactagtgcatctgcatgtatgttgcagtagtaggagaatgcaccatgcatcataatatgtaaaagctccaatacaacaatacgaagggctatgtaatgttagatggtaacaccaaaaagaagaccagatcattgggagaaagaaaagatgagcaagatatgtagatgttccaatgtcgcaacaaaattgaaaaggagacctaatttttatcgcacttgacagcaagttgcaagaagtatggcatgtttaggtcacccaaccatgatgcatgagcacgggaagaactgacacaatcatttcaaattaaaggtcattactcaaacagagtaacagatgacacacttcagcatattgtattttgacaccagtaaatgtgatcaacgcaaagaaatgccaacagctaatgcctcatattaagagattgtagatccacctaaagtagtagaatttataggaaagcaatagggaattggaggcatcttg

SEQ ID NO: 4406 - DNA, 630 bp, Gossypium hirsutum
ttcagcattaacataatagggggaaagtttttatgcccatcagctgtccttgctcttaaggattcttcagcatgcttctgtgatgatatatggtgggtttaattggcaaatttaataaatggcagtttattatgggaagttggccagcatgttgaccttgaaagaagatcctggagaagacaagattgcttctaagattattacggttatttacgattgttttaattagaagcaatacatgtcaagtgagctggtttgcaatttgcatgctaggcataaaaacattttctgaaatttttttattgctggatcctgacagtactaagtgtcgccaacattatcttgttgttgaagattgtgaaaagctgtggcttctcttgaattgcttctgttttatggagcaaaactgattttatcttttccagttattattatggttgtagcattttgaaagagtaaagtatttttgttagacttaaattgttataagatttggtcaaaaaggcttttcttttcgtttttgatttttaaaagatttgaactgtaacttaatttttccttgcatgatgtaatacctatgttttctccagatatttttctgcaacttacagactgctgaaggttggattc

SEQ ID NO: 4407 - DNA, 644 bp, Gossypium hirsutum
tgcgcggcaattctcctttctgaaaaggaatttaaatcacgtgttagaagtgttagctaccaaattcaaattgataaaaaaagatggtttttggtattatagttctatatccactaatataagcatgtcatataactgcacagcacaactcctatggattcttatgaccacaaccaatcatttatgcaggaagtccggcagagtcgaaagaacttaaaaggaaacttcagccaaagagatccaaaacatgcggtagcaaacagagattaaaaacactcatttacacagtacaagaacagacaagtaaatttaaaataataaattgataaagactaggaagagttagtacccccagcagcaacaagtttctctacacgcgcaacaatatgctttccgtaagtgtacttcttcaatgcatttaaatggaccttaattcgagaaaggatcagctcacgttgctggtcatcacaagtctcgagtactttctgtaccacatagtttgcaaactgatctttcatcattgcctgggatggactaacaactgtcagtaaacagactctgaatgacatgaaatttatagaaactctttttagagaaaattaaccaaaaagctggatcctgagcacatgcaacacatttaagag

SEQ ID NO: 4408 - DNA, 615 bp, Gossypium hirsutum
  misc_feature (61)..(62): n is a, c, g, or t
cactgatgttgccatgctgttcttgatggtatattactgtgcttgttgtggacatttactnnttagaatttctttttgtttatgtctttcaaattatttataattgcatattatacgtgatgatattttatgtatgaatgttctcattttgtttgttccatttgggactgaaactgtttctatcgaagacttaagtctgttcctattatttaatgtttacacccagcaacatacaagacttgcaacctcagttttttaagtgccccattttctttgctgcaggaagtgatgctattcttcttggtgcggagaccctgcgtggattgtaccctgttgaaaccatttctactgttggcaaaatttgtgcagaggtaaattctgtctcataaatgtgcatagttgaatcttttgacatatgcagctccaaattggatacctatggccttgatgccctttgagtgactatgtatagtcctaaaatattccagacatagtatgttttagacacttgttgcgagttgctatgagattctgttttttaacttactgttaccatgttggggcttggtaaccatctatctgtggtaacacacactgcctttgtggtaaaacacg

SEQ ID NO: 4409 - DNA, 628 bp, Gossypium hirsutum
tgttgtctactatatttatctcttggtaaaatggtgactatgatgccccgacattttttaaaataatgtttctattttcagtcacttgttgagttttttggtactctttcacgagaatgggctttggagtgcatgaaagatcttttgctggttaatctaaggggcaacctccaaataattgttcaggtaaagtatgtataatggtatgctaataatgtttagttaatcacccaaggctaagttttgtgtctgtgcaggttgccaaggagtattgtgagcagctgggtgttgatgcttgcataaagctttttgagcagtttaaatcttatgaaggattgtacttctttctgggctcttatttgagctcaaggtaaactatatagcaaacaagaaatttcctttgtttgctcatagcagagctattcctaatacagtacttactatgatgtttccttccaattattggacagtgaggaccctgatatacactttaagtacatcgaggcagctgctaaaactggacaaataaaggaggttgagcgtgtgaccagggaatccaacttttacgatgctgagaagacaaagaacttcctgatgtaagccaagcttcctgatgagcttcctgagg

SEQ ID NO: 4410 - DNA, 619 bp, Gossypium hirsutum
  misc_feature (545)..(545): n is a, c, g, or t
  misc_feature (547)..(547): n is a, c, g, or t
  misc_feature (551)..(552): n is a, c, g, or t
  misc_feature (554)..(554): n is a, c, g, or t
  misc_feature (556)..(556): n is a, c, g, or t
  misc_feature (558)..(558): n is a, c, g, or t
  misc_feature (564)..(564): n is a, c, g, or t
  misc_feature (568)..(568): n is a, c, g, or t
  misc_feature (570)..(571): n is a, c, g, or t
  misc_feature (575)..(575): n is a, c, g, or t
  misc_feature (577)..(577): n is a, c, g, or t
  misc_feature (580)..(580): n is a, c, g, or t
  misc_feature (588)..(588): n is a, c, g, or t
  misc_feature (590)..(590): n is a, c, g, or t
tgttgagtaatgatgcccagtttttgcccaaaaaatgatgatcaactttgatttgctaaatttcacccacagacaaaacactaggagaaagggacccagatcttgaaatgccatatggcggagggggtctctctcatcattttctatcaaagtctcaaactgtaatacttaaaccgcccatctttctttccgcctctactgtgtgtaaattcgtcccctatttgttccaccttcatgtctcaaagcggtcaaattctagtgtaggagatgaaattgaagtcacactatatgatttatatcgctatagctataaaatggaatgaaaaataataattaagtaacattttgtatacttgcttacaagtaaaactatgtagtccgatattgagacatactacaactcaaaaaaatttgaagcccattgggtccgatgcattcgacttggtgaatgatagagttttaaggttcagaccctaaaccaacagggaacactagaattaggaaaagaaaaaatgtttagtcaatgaatataaaaaaaaaaaaananggtnngngnanaccccnttantnnaacntnttnaaaggggntnggaatggccaacttgggggaacccaaggg

SEQ ID NO: 4411 - DNA, 625 bp, Gossypium hirsutum
tttacaaagcaaaacatttcaagaacaaattctggacaacccaaatgaccattatatgaattcttcttttctgcaagaaatacacgtaaagaaacaaggaaacagccatgttgcaataatggttaacctgttcaaaatttttcttccgaccaaggtcataacgccattttggagtggttttcttctcataggcctgctcaaaagacaagcacagattttgtcagtaaatttgagtccatttatactgcgccctggggaatataacacataacctggccaaaaaatggccctaaactctcataaggatattaaatattaatctgttgggtattatggtgttggaggttgttggaaaattaattatttcttttccttcctcctcagggcaggggaggggctaagaggttcgcacacatgaaattgagcatagcttgatataatgacatggtattaaaaaaacaataaagattaatgtttggaaacaccaatcattatgaaatggtactaatacttgagatgaagccaaatacctcaatagtagtcgtattagcggccaccaaagatatgtgcatgatcaaaaagcccaagacactcaatgcaaatgccagattcaaaactgccacag

SEQ ID NO: 4412 - DNA, 640 bp, Gossypium hirsutum
cgaattggcaaaggagttgaacattggtcctgagttttctttcgaaaccgctaaaatgtctaaccaacggacttttttggtatgtcatctttagttctcgtgccaatatttctctaaacttctcattaccataatattttgtcaattaggaagagaagaaatagcatcccttttgatactttgatccatatgcatgcaatggttagttccttacgtgcatcttcattacataactgccttttgccgctagctttcagggctagtttggtgtcatatcattttcttttaacttccagaaagggaagttccctgtatatctgttaattttcgaccctaaaccaaatgacttctacacattctttaataatatatagaaaggcttttcagggcttccctgaaggtctgtccatagtaatgtttactttcatttcatggctgtctttatttgattttcagttcgaggttttacgtgtccttcatattagtttcacttgtgctttcatatgtttcactcattaaagtttattacatacaatagtgcactctgaatcttcatttctcttgaagtattcatacctgacacatttgcaaaggtggatatggggatatgatcttctaagttccctcaaatgcatggaag

SEQ ID NO: 4413 - DNA, 545 bp, Gossypium hirsutum
  misc_feature (398)..(399): n is a, c, g, or t
  misc_feature (409)..(412): n is a, c, g, or t
  misc_feature (425)..(427): n is a, c, g, or t
  misc_feature (442)..(444): n is a, c, g, or t
  misc_feature (446)..(447): n is a, c, g, or t
  misc_feature (467)..(469): n is a, c, g, or t
  misc_feature (477)..(479): n is a, c, g, or t
  misc_feature (508)..(509): n is a, c, g, or t
  misc_feature (514)..(516): n is a, c, g, or t
  misc_feature (518)..(518): n is a, c, g, or t
ctctcactctaacttggctagttcatagtcttgctttgcctgattctcttcagtttgtgctctctccaagtgcagcttgagcttttctgtttgtctctttgtgctgtccagctcctttaatacattcattttttcctcttcagcatcctctggtcgtttcttatattcaggcttctctttctgcactctcacaaacatttgttccacaagcttgcttctctataacacaaaaataaattttaagtttcagtggaaatgaacaaagtaggcagagagaaaacaagaatttatgatgatcaaataaaattgataaaaagcttaacaaaattaaagataaaacgacattcattagacataacaaaaatatattgcagcattgcaaattatattaacatatnnaatatactcnnnnagttcatatttcnnngatctttccaatcannnannctctccaaattggaaaacannntctttaannnattcaaaaggggtaaaaaatctcttttannatcannngntttttccgggaaagggttaaaaaatta

SEQ ID NO: 4414 - DNA, 638 bp, Gossypium hirsutum
ctccttttttttgcctactgtttttataatttttaaatttgaataaatgaaattattgtacttattatttgaaatatagggtaaataactgaaggtaattggaaatgattgtttgcaatttttttaaggtacaattataatttgtaagtataattaatacattcgtataaacagaatttcaatttcaatcgacatgtattagaatcaaactatattcatttgatgaaaattacagtgaaaatgcaatgaaacttctaaatggaacataactactttaaaggaggggaaaaatataaatcaaaatgaaaattccattttgtattatttactaatatagataacgtcagaaatcgcggcatgaggtgaatatcaactactaaatttttttatttagtattagataagatattttatttatttttaaattctttaaatatctttattcatccccaataaaaagcttaaatatatcttcaaggagaaccggaacgctattgctttggctacattaggaagcaatttgaggccccagcttcctcggatagtactagttttaatacttttatcatgtttgtaatgagccaccttaggctattgtttccatactttaatatatcatgttcctctgcctaaccaaa

SEQ ID NO: 4415 - DNA, 658 bp, Gossypium hirsutum
cttactttctttttatgatgtgcctctaaaatgatctatatggttgaatatcaacaccaactagttcgaaaatatttgtttttagtatttattattgtacaaaatttagcttttgtctttagtttgtaggtactaaatttagttgaagtattttgttaataatttcacatcacttaagtggggattatgaatttttatagatgtttaaagaaataagggtaatgggaccatgaatttatataagaacttatgttataagtattattaacactaaaccaaagactaaattgtctgtttgtttttttctaaattaatgatagttttgaatattctacaaatatctcgacaatttttatattaacccattgaaatttattttaattttttatttatgtgaatttgattaccctagatggtaatattctaaaatttctagaaaaaaatagatgtgaggagaaatgggaatagcctgaattgggactgtacttcgatttcatttcagtcattttccatctccattttccatctccattaaaggcaggaggataggttctctatatttggtgattcatttacataaagtgaaatggcgcatctttgtgcttgcaagattttatcaggtatagcctatatatgctgtgcagagttagacttgttc

SEQ ID NO: 4416 - DNA, 700 bp, Gossypium hirsutum
  misc_feature (612)..(612): n is a, c, g, or t
  misc_feature (640)..(644): n is a, c, g, or t
  misc_feature (647)..(651): n is a, c, g, or t
  misc_feature (682)..(682): n is a, c, g, or t
agggttaattaattattatcgatgcataggatgtataatacattacataatcagctatcttattggctacataactaatgcagaaggttttttagttatcactaacatagaacatttcccacattacataataactaccttattttctaacataaccgattccctgctatttgattttcacatggaggttggaatatatgatgtttgaacatatctcaattatctaatgacagatcagatatcctgttttgctgacacctaatgagaagcaaatggctagggaagtttgcattgcatttaggcaagcggtatgtctattccatcttatttgtgaaatttgccttggtttttgatccatatcttttttatggcagtgttttttctgcgatatgatatctaccggaaattacttatatttgttttgcttttcttgcaactttagctttttgtcttctgatttctgatggtttgaaacgatgagttttgttgagatattattggcactcatttctttgttatatattttaccatcatattttagtttttccttttccaactaagttttaagtaatggggttaaaagatttgttcgcatgttaaagttactatcanttggatttatgaagaatgctttcatgcnnnnntannnnntttgttcccatgttaaagttactatcagttnaatttttgaaaaatgctt

SEQ ID NO: 4417 - DNA, 636 bp, Gossypium hirsutum
tgaatcacttatagttgtccatacattttggtgttacagccactgtctgcttttccacagtcatcaaggtcgataaacccatttgatctcggtggtgaagcacctcgggctcaaacgcaaacagtacgttattcacttcttttcgaactattttactgcttgtgcagactgatttgatcctgcttgggtttaaggactgttgtatggcagtttataatgctgccatgcttgttttgtgtgtttgactctgtagatcatagtttactaaactggattttctggttgattatttgggatatatgcgatcaacttatcaaataactacacttccaaacctactctcccttgttgaaatcccaataattttccctcgaacttattccttgtggtgcagcccctttccatggcttccttacaaggtgccctaccaaatttgccacctgcttctggcctattacgcacttcaagcctcggtacaccatcattagcatggatgccacctcaatctttaccttacgcgtcgggaatgccatcgcagtcactgccctatgcttcagcattgccacaaagtaaaccattttcattcctccttttggtaaaagtaccatggaagcccctgtatttggagtcgagtta

SEQ ID NO: 4418 - DNA, 526 bp, Gossypium hirsutum
tatctagaggtaagttaaagtaagaagtcatcccagccagaactctagcagtctgcaacacatccaaaggagggctctcctttaggcttgataaattcaagccaagaggaatgttttggatgctgatcaaagttacacaccagctcatctctcaccagccttccacattcctcttggcttgaatttatcaagcctaaaggagagccctcctttggatgtgttgcagactgctagagttctggctcgggatgacgtcttacattacaacttacctctagatacattcggggactactatattgtcctctattttgcagacattcttccagtttccgcttctttcgatatattaatcaatggggtcgttcagcaatccaatttcactataacaacctcagaaaccagcactctatatttcacacaaaagggaatcacaagtctggatattgcatttaggagaatcagattctaccctcaaatcagtgcatttgaggtccatgaaattgttgatattccaccacaggct

SEQ ID NO: 4419 - DNA, 606 bp, Gossypium hirsutum
tcttgtttctttgtttgcctgttggaggagcccaccacgttctctttcaagcctttgttgcttggacggttgaattccgattttgtcccactattacaataaatttgagatttaatttgatttttttaaaaatttatttttataatgttattagttggtcgaaattaataataccaaattaccaataattattatcattaaagtgaagaggtaaaattttcgtttattgtaatttgatcatacaattagtagtatgtaaaaatctaatcaattatatttaatcaataataaatttacatgtcaaatgaatgattaaaagccttttttataataaaaaaaatcaaacatcattattttaaaatttttaataagccctaataatattaaaaggtacaaatatcaagtatatgaacaaaatccgaatgaaaggtgggaaggaacatgagccaaacaaggttgacattgcagagcatggtggttgattctgtttttttgctttatgtgtccaaggatcatgtttaatgaatgggaatgatgtagttgaaagccagtcccagatggcagactatgcaagattatcaatgtgagtactgaaaggacctatta

SEQ ID NO: 4420 - DNA, 751 bp, Gossypium hirsutum
  misc_feature (600)..(610): n is a, c, g, or t
  misc_feature (612)..(622): n is a, c, g, or t
  misc_feature (628)..(631): n is a, c, g, or t
  misc_feature (634)..(639): n is a, c, g, or t
  misc_feature (642)..(642): n is a, c, g, or t
  misc_feature (653)..(655): n is a, c, g, or t
  misc_feature (659)..(673): n is a, c, g, or t
  misc_feature (683)..(683): n is a, c, g, or t
  misc_feature (689)..(691): n is a, c, g, or t
  misc_feature (694)..(707): n is a, c, g, or t
  misc_feature (709)..(720): n is a, c, g, or t
  misc_feature (723)..(724): n is a, c, g, or t
  misc_feature (737)..(737): n is a, c, g, or t
  misc_feature (739)..(741): n is a, c, g, or t
ttactcacctgccgaaatatttgaagaacatctgaggtagaaaagaattcctttttagctttcatagcattggaattgtccagtaatgttccatccaaatgaacaggaaataacaaatatgcttcatgattccatgatccttcttgtgtaggctagccaatgaaatgaaattgttttagacaaacacaattttgcattaaaagtccttcaaaagaagaagaaatgagccatcaaacgaaacacaagagcatctcgaaaattgttcccattttaagttttacaccaaccttaaaggtaaatgagctgataaattcaaaaacgtttaggacataagagaataaggtatctgaataattaccttaatggcaataatagcatgatcaagaagtgaaagcagattagggtgactaaacaaggatgaaacacggatctcctcacgaaccaattccaactgctcattattctgaacgagaacttttttcattgcataagttccatcatctacaaatgcaacccaaatttaagatgtaaatccagattaaagatgcataaatcagaacccgttaggcaagcagtcaaactgtcatagaccaaagacannnnnnnnnnntnnnnnnnnnnnaagggnnnntgnnnnnnaanagggtttccgnnntaannnnnnnnnnnnnnnaatttccttntaaaannnggnnnnnnnnnnnnnnannnnnnnnnnnnatnncatggaaaaagtntnnncttcaaaaaa

SEQ ID NO: 4421 - DNA, 608 bp, Gossypium hirsutum
aatccatggaagcctcaaaacagtatgaaaggaaaaaaaaacttactatcagcaatgctagttagttgagatctgtcctggaaaactggtggaagcttatcgatccctagagatgcagcaagcaacctgtgcacaatcacatctgcaaggaaggttccatacttgatcaatagtatcatcaagtatacatcagcaagaaaaggtaaagtaacaaacaaatttttgttcacaaacctgcatatctcctaataggagaagtgaaatgagtatataggggcgcagcaaggccataatgatgatattctgaagggctgagatccccactacagaaataaacagcctaatttgaaaccaaggcaaattagtaccaagttaaaaagtgcgtaggtcaaaatcatctggagattgaaaaaatttcctagctaactttacctgagtcatacacctagttgccagtatccgaatcaacttattaaagtaaggatcatcacgctgcaaggcaatttttctcagatgtaagaatcaactatgaaagagagaggccaaacaaatacatgaacatgtcccaagtagcaaaaatggaaaaaaaagaaaagaagccagacaag

SEQ ID NO: 4422 - DNA, 622 bp, Gossypium hirsutum
gactctcgaattgcatgccgtatgtaactttgcttcttatcctcactccactgagcattcagaccatgcagcttacatgcaacatatctatgctctaccaagtcataagcctgccggaaatttcttacttcaaatcactgcaaaatgatatattttcacaattgccaactctggcaaaggaattctagacttttgacatagcaaataggccttggccaaacatgcttagaaaaacatttgaatcccaaaagataaaagcttgctaaagttctgaccttataaacctcactgaatcctcctttgccaagaaggtttaaaagggcatatcgattatttagtatttgaaaattgttaaaacgggaaccatcctcatctctaatgcgcttcatttcacgtataagccttcccttatctagttcatagcgatctctttcacggagaataatttcctcctcctatataacattcgtaactcaataataaatgtgcaagggaaaaaatcaacaaaaccgctgtgccctttaataatatcaaatagaataagaaacaattatgtgcgaagctaaacttacacgtttaatacttgctagccgtgatttgtgtatctcatcctggaagagga

SEQ ID NO: 4423 - DNA, 619 bp, Gossypium hirsutum
attagaatttcaaatatcaaattaaaatgtttcagtttttcaaattttataatgataaaataatttaataaatggcttgagttgaataaatttcaagtaattaattataactcaaattacatgatcaagtaatagtcggaaaatcaattatgatttaatcaacaaaatcacccaaactaattggcccaatacagaagttcagcttcaatatttttagtgttctataaaaattctaattttattatgcttaaataaaattataaatgtaataaatttatttaattcgattttataaaattttgaattagttcaatcaacaaaataaaattaattaattctactaactctgttatttctttaatatttatttcaagattcatatttaaataaatcaattagtcaccttcaaattcaaatgtaataattttttaaataacttgtaaatatacgtgacggattctgatacaccaagtaaaaaaaaaatcttaaccctgcaaccaaattaaaatactcaaaaattcccaactattaagaaaacaataaaagaataaatgatggtcaaatacaaaagagaaagcaacccaacagttttaatatccttgaccgagacgttaacatt

SEQ ID NO: 4424 - DNA, 388 bp, Gossypium hirsutum
  misc_feature (209)..(209): n is a, c, g, or t
  misc_feature (212)..(214): n is a, c, g, or t
  misc_feature (258)..(258): n is a, c, g, or t
  misc_feature (260)..(260): n is a, c, g, or t
  misc_feature (262)..(262): n is a, c, g, or t
  misc_feature (264)..(264): n is a, c, g, or t
  misc_feature (268)..(268): n is a, c, g, or t
  misc_feature (271)..(271): n is a, c, g, or t
  misc_feature (378)..(379): n is a, c, g, or t
aggtgggtaagcaccagatttaggaagggcatcagccttagcagcaggggtctcgagtatagttggcacaaaggccaatgaatcctacagagcgccaagacagtctagttcagaaacggtcgaagcagtaggaactaggatctagggccagcgttaggtggggcaggggaggtgtggcaactggatcggatgagttgaaaattatgatnaannnattgttataggtttcagggtaataggatcaatgtgattccattntnantncttnaanttcctcagattttgctcattttgttccttgaatctcctgatactccttttatttcttttgtttcaaatgaattcagattttttaacatttgacccttgaagccatcnnagcaatcag

SEQ ID NO: 4425 - DNA, 661 bp, Gossypium hirsutum
taaaaacaaatacaaatattaagaaaaaaacttttaatgataacagaggtggaaaacggatgccatagagaaatgtgatgtgatggtatataccaagatcttcctcaagttcccgtacaagttttggccttgtgggacagacaaagagttcttcatctatgctcacgagcggagaggctattacacgttttggcaggtttaatcgtgactccctttattatttgttgccatctacttgatctttgatataaaccaatcctcttattactgctgccgtataacgaaattgctgttctgtcacataaatgattatgcacagtcactaattaaatacagaatacaataaggcaatctatgaagaggttggtggggttgacttcgttggtttcttatctgttagggactgtaatttacatttaacaacctagctgcccacatgatatgttgactagtaacctggaattttgataacatgacaatactactttgtattaccaagatccgaaatcaagttctgggggcagcttcttcagctaaaggacaacaattaaaatattaacagttatttttccgtgtagatattaccaactaccaccacataatggttttctcctttatgctgtatataaaattattttgtcattgtcatggagctctgaac

SEQ ID NO: 4426 - DNA, 640 bp, Gossypium hirsutum
tagccatttgagcatcccttcttaggcaggcagacgcagcaaccaatgcataggatcggagggacacccatgcataatcaagctcccagtagttatgtggaagatttggaatcagccaatgggaatggtggaaggaaggttcttacattgtttcctactggggatgattgattcaaaactttggtaatcattgacaccccattttcatcattcaacatttctgctctatttttatttacccctttccttcagtttcctcctggaaaagcctgggtaagaattaatttccctttcgggtttttttttaagagcccgagagggggcgggggaattggaaaagaaaatttatttttgagatttatctttagattttgtggggattacatttactgtgtttttttctacactctgtgtagtgactgtgttgcagtgacttcttttttaaatttgacatttgcgcacatttcaggtgtgatttaattttcccagggattttgtgtgccctcacaccttttggggagagatatttaactcgagatgtttctcaaagagaaaatatgtttttagttttcttgttttgaatttccttcagggggtgggatccaattaaattgggttttttttggggaatgggttacgg

SEQ ID NO: 4427 - DNA, 1361 bp, Gossypium hirsutum
  misc_feature (607)..(610): n is a, c, g, or t
  misc_feature (616)..(621): n is a, c, g, or t
  misc_feature (627)..(629): n is a, c, g, or t
  misc_feature (633)..(637): n is a, c, g, or t
  misc_feature (639)..(642): n is a, c, g, or t
  misc_feature (644)..(647): n is a, c, g, or t
  misc_feature (649)..(653): n is a, c, g, or t
  misc_feature (656)..(657): n is a, c, g, or t
  misc_feature (661)..(672): n is a, c, g, or t
  misc_feature (677)..(677): n is a, c, g, or t
  misc_feature (680)..(681): n is a, c, g, or t
  misc_feature (683)..(683): n is a, c, g, or t
  misc_feature (685)..(690): n is a, c, g, or t
  misc_feature (695)..(700): n is a, c, g, or t
  misc_feature (705)..(720): n is a, c, g, or t
  misc_feature (722)..(728): n is a, c, g, or t
  misc_feature (736)..(738): n is a, c, g, or t
  misc_feature (740)..(743): n is a, c, g, or t
  misc_feature (745)..(754): n is a, c, g, or t
  misc_feature (757)..(762): n is a, c, g, or t
  misc_feature (766)..(771): n is a, c, g, or t
  misc_feature (774)..(774): n is a, c, g, or t
  misc_feature (779)..(784): n is a, c, g, or t
  misc_feature (792)..(799): n is a, c, g, or t
  misc_feature (801)..(804): n is a, c, g, or t
  misc_feature (806)..(806): n is a, c, g, or t
  misc_feature (808)..(815): n is a, c, g, or t
  misc_feature (817)..(824): n is a, c, g, or t
  misc_feature (833)..(835): n is a, c, g, or t
  misc_feature (837)..(838): n is a, c, g, or t
  misc_feature (842)..(847): n is a, c, g, or t
  misc_feature (854)..(856): n is a, c, g, or t
  misc_feature (858)..(861): n is a, c, g, or t
  misc_feature (866)..(875): n is a, c, g, or t
  misc_feature (878)..(878): n is a, c, g, or t
  misc_feature (880)..(880): n is a, c, g, or t
  misc_feature (883)..(885): n is a, c, g, or t
  misc_feature (887)..(887): n is a, c, g, or t
  misc_feature (889)..(889): n is a, c, g, or t
  misc_feature (894)..(896): n is a, c, g, or t
  misc_feature (900)..(909): n is a, c, g, or t
  misc_feature (912)..(914): n is a, c, g, or t
  misc_feature (918)..(918): n is a, c, g, or t
  misc_feature (920)..(921): n is a, c, g, or t
  misc_feature (924)..(928): n is a, c, g, or t
  misc_feature (930)..(935): n is a, c, g, or t
  misc_feature (940)..(951): n is a, c, g, or t
  misc_feature (958)..(959): n is a, c, g, or t
  misc_feature (966)..(966): n is a, c, g, or t
  misc_feature (968)..(971): n is a, c, g, or t
  misc_feature (977)..(981): n is a, c, g, or t
  misc_feature (985)..(986): n is a, c, g, or t
  misc_feature (990)..(1000): n is a, c, g, or t
  misc_feature (1010)..(1011): n is a, c, g, or t
  misc_feature (1013)..(1018): n is a, c, g, or t
  misc_feature (1021)..(1031): n is a, c, g, or t
  misc_feature (1035)..(1050): n is a, c, g, or t
  misc_feature (1054)..(1061): n is a, c, g, or t
  misc_feature (1065)..(1072): n is a, c, g, or t
  misc_feature (1076)..(1082): n is a, c, g, or t
  misc_feature (1084)..(1085): n is a, c, g, or t
  misc_feature (1094)..(1097): n is a, c, g, or t
  misc_feature (1099)..(1099): n is a, c, g, or t
  misc_feature (1104)..(1105): n is a, c, g, or t
  misc_feature (1109)..(1111): n is a, c, g, or t
  misc_feature (1113)..(1116): n is a, c, g, or t
  misc_feature (1118)..(1139): n is a, c, g, or t
  misc_feature (1144)..(1146): n is a, c, g, or t
  misc_feature (1154)..(1169): n is a, c, g, or t
  misc_feature (1175)..(1189): n is a, c, g, or t
  misc_feature (1194)..(1200): n is a, c, g, or t
  misc_feature (1202)..(1204): n is a, c, g, or t
  misc_feature (1207)..(1208): n is a, c, g, or t
  misc_feature (1210)..(1218): n is a, c, g, or t
  misc_feature (1221)..(1223): n is a, c, g, or t
  misc_feature (1227)..(1229): n is a, c, g, or t
  misc_feature (1234)..(1239): n is a, c, g, or t
  misc_feature (1245)..(1246): n is a, c, g, or t
  misc_feature (1257)..(1259): n is a, c, g, or t
  misc_feature (1264)..(1272): n is a, c, g, or t
  misc_feature (1274)..(1285): n is a, c, g, or t
  misc_feature (1291)..(1313): n is a, c, g, or t
  misc_feature (1317)..(1328): n is a, c, g, or t
  misc_feature (1343)..(1343): n is a, c, g, or t
  misc_feature (1345)..(1356): n is a, c, g, or t
  misc_feature (1358)..(1358): n is a, c, g, or t
atcgacctctggcagattggtccacttatgtacttcatggtttattacatcctcaagctcagacaacagcttacgtttgagtggctcatgtccgaaatgacggagaatggagcgccgtagatacctctggaagtagccacctagattactcaagttatcgttgtgtaccgtctgtgaaaaggaatccatgtaatagagttcgatgagtttcccctcttgttgcaacacgaagtagttgaattcgggatctgatgacaccgccaccggtcgacccgctatgtttgtcttgaacaacggaccgtatctaaaaccatatttgaaaaaatgagatacttactgcactgaccgggaataattgtagggttattttattaccttttcaatctttcattaacgaaaggatgcatgtcaatggagttggaagtgacaaagaagctaagggtctctcctataagagggaatcccatggaaccaggagggagtttgcccttgcatttagggttcctccacctataaatccagttgcctacacttacactcaaaaaagatattatgaaaacccaaacataccatatttccattatcattgcaccaccatgaaatggannnnggagtnnnnnnagttannnaatnnnnncnnnntnnnncnnnnncanncctnnnnnnnnnnnnaaaancanntncnnnnnngaaannnnnnccccnnnnnnnnnnnnnnnntnnnnnnntatttttnnntnnnnannnnnnnnnnttnnnnnntttnnnnnnttnttttnnnnnnttaccttnnnnnnnnannnnantnnnnnnnntnnnnnnnnacctctctnnntnncccnnnnnntattttnnntnnnncaccnnnnnnnnnntantntgnnncncnctttnnntttnnnnnnnnnncannnattncnnaannnnntnnnnnntcttnnnnnnnnnnnntatctcnnctttacntnnnnttttannnnntatnnttcnnnnnnnnnnncaacttcttnntnnnnnnatnnnnnnnnnnnattnnnnnnnnnnnnnnnncatnnnnnnnnctcnnnnnnnncctnnnnnnntnnttttttaannnntnttaanntaannntnnnntnnnnnnnnnnnnnnnnnnnnnnaccannnaatatttnnnnnnnnnnnnnnnntttttnnnnnnnnnnnnnnntactnnnnnnntnnntanncnnnnnnnnnctnnntccnnntgtannnnnnctctcnnttttatataannntcttnnnnnnnnnannnnnnnnnnnnaatttnnnnnnnnnnnnnnnnnnnnnnntttnnnnnnnnnnnntattttgttatttgncnnnnnnnnnnnntnatc

SEQ ID NO: 4428 - DNA, 611 bp, Gossypium hirsutum
atactgcatatttttatctttgtcctggccattgttcatgtaacattctgtgttctcacagtttcttttggagggctaaaggtaagctgtctaatatggtcatttgcttcttcttcaactttattctggttgtggtatagttatttgtttattctcagcttcacctaaaaagattttttttcttttccttttaagtagatacgtgaatggaagaggtgggaagattcaattgcaaagcagaattatgattcagagcaaggtaaggactaaggactatgcagtatgtctttgctgcaataaggtttttttgtaaaaaattggcttactaggaactgatatggctgattgacccatccccttccctactccagtgcactctccttgggccaaaatagggcttcccacaaggagtatgcttttctttaccttttcttggtgcttctaacttgtgtactgtgttagtgcagtgctgaagaaaaaagtcactcatgtgcagcagcatgcttttatccaagagcattttcagggtcttggtaaaaattcaattctgctaggatgggtggtaagcgtctatttcatttaagatactatcttttttccattcacgtcct

SEQ ID NO: 4429 - DNA, 621 bp, Gossypium hirsutum
tcattaaagccataactttcaatcaaattctttttatataggattttagtttttcgttttttttcctgtgatcaaggttatataaatttcgtagattaatttgctctttagcatcttctcaatatacatttcagccaaatgagtcaaatgaagtaatctcacgtttcacctataatcttacattctcataattttattaagaaacctaatttaatattcgacaaaccaaccaccctcgtagagaaatatatatatatattttatgaagccatacaagaatgtttgacatcataattatattacaaactgtcaactaaatatatataggattaatttataacttataattagaaattgcatagaaaaaccatatagttgcctatcgctatagcatcactccaacattttatatttatatataccttactaaaatatgtttattgtaaaaattatttatatatgatactcaagccaaatacatatggtagatacattacatagcacgaccatgaccctaaatataatagtatgggcaatatttcagaattcagagctttgtactaggccatttctgaactcaaatgaaattgagttctgcaagatttctaaagagtcaaaggg

SEQ ID NO: 4430 - DNA, 594 bp, Gossypium hirsutum
aaaattttttctgcttttaaagccacagttttgcatttgtagtgatgtgaaatgctctaattgtcatcaaattgctgctaatagtgctttggttgtctgttgtggctgcatctgaaaaaagcatgtggagattcccagacctccttctaatgttacatcacctaatagccatggtacttcggagattgaacaaacaggctatagagcagagcccatctcttcagtcctcagaaaaattcctggaaatgatgtttgtgcagagtgcagtgctgctgaacctgattgggcatctcttaatcttggcatactgttatgcattgaatgctcaggtgttcaccgtaaccttggtgtacacatctcaaaggtgcaatttattcttcaaagaaaagaaagaacacctcatggtcttcttggttattagtttgtagttcttaatctttatttggttttcaacatgttagaagaactgttaatgggaaggaggatggtagaagtaaattgatatcatgatattaagttcattttaagagtcttaaataaaagattactctttttgtttgtgcaggtgagatctttgacattagatgtcaaagt

SEQ ID NO: 4431 - DNA, 575 bp, Gossypium hirsutum
tactctgacttgattccttcttggaagtccttcaaacacgcatcgatccttgcatccaacggagagaactccacttgcatgtgagaaagctcaccttgtatcaaaccaaactccttttgcattctggtggttactacttcgccgatcatgaagatcggcagctctgataccttgttgtgtcttagatcagaaagaaagagagaaacaaaaaatagagaagagaatgagagaattgagagaggaaggatactgagaaaacaatttccaatttcataacctttattaggaatggttacaggtatatattggaaatcccataacaggaacccaataattaatgggtcaaaacacatcttttaactaattgaaacataccgtatagttaactaaacaagtgtaaaacgcaacgtttaaaactgaagcattaacaaccacaactaaaatataaaagaaaaatgatcgttaactatgccatgacacactgtgaccttaaaatcgagatatacaaatttttatagtatttccttttttttttttggggccccaatcccacaaaaaaaaaaaaaaaaaaaggg

SEQ ID NO: 4432 - DNA, 655 bp, Gossypium hirsutum
ttgcttatttttttctcaattgaccttgtttatgttgtggttttagtaagtaaaaactaaaatagattttccctttctaatttcttctttttctttccctataatgtggtaacttgtataccttgtaatgctgttttttagaaccgtggcatacacaaaccacactgtcctacctgaggctttggagaaatggagtttagaacttatgcagaaactgttgcctcgacacatggagattatagaaatgattgatgaggaggtcagatggaacacatacatcaaacaaaaccttccaattttttggatttcctattctaactcaattttcatccctctttatactgttttcagctaattcgtaccatagtttcagaacatggtaatgcagattctaacttactggagaaaaaactgaagcagatgagaattttagaaaatgttgagctgccggctgcattttctgatttactagttaaacccaagaaaagtcttgttgctgttcccagtgatgaacttggagaatccgaagaggaagaggaagaggaagaggaagaggaagaagaagaagcagaagcagaagcagaagaagaagaggaagaagaaaaacttaagcctgctggtggaaaaattaaatctataaaggaaggcactcagg

SEQ ID NO: 4433 - DNA, 607 bp, Gossypium hirsutum
tactgatgtttatgataagaagcttatgatcctcaaatgaaatttcctgttagagaagaaactgctgtttgtttcatgttacattaaatattggtcatcttcttacctcaatgcattgcaataccttttataggagctgtcatcggattcttcgcaacatgtccgctccgctttagcttcagttattatgggaatggctcctgtccttggaaaggtaagaaaatagagtaattccttgattgggaagtaccctaggaaattccagggtctgtttagtgctggtaatgcaggacaaatgcgtacaagctagaggtaccaatataaattatctcctatgggattggattgatagaaggtcttttcattcagttgtggttgttataacagttgtctcaatgttcatgctggatgtatcagaaactggtttgaattgggattattgaatttcatttgttggtccttgcaggatgcaactatcgagcagcttcttccaatatatctctctcttttgaaggatgaattccctgatgtgcgtcttaacataatcagcaagcttgatcaagtgaatcaggttaggtataagttggagcttccctctgtttctatg

SEQ ID NO: 4434 - DNA, 378 bp, Gossypium hirsutum
tttggggaaatgctctacggcgactgctgagttatggcgtttgctggatggattgctcatcgttcagaaacaaggttataatgaggtcataattcaatcggataatctagaaaacgttatcttgatctgtgagagcaaggctggaggttcaaagaatgcactcattaagaggatacagcaaattctggcctcggaaagaaattggttcttgaattttgttcccagagaaaccaattgggtcgctgacgctttggctaaaatggccttgtcaagtggtaactccttgcgtattttcgagtctcctcctattaggattaaagatattttgcaggaagataaatttgttgataattccctcatgaatcgtcctttgtaata

SEQ ID NO: 4435 - DNA, 409 bp, Gossypium hirsutum
tggagcttctgctcaggacattgaggtatactcatttgttgtttcaattcacagctcccttctttcgttcgaccatctctgggagaggcaaaatgatcattttaagagttcttttctatttttggaaaaaaaaatagttactacctaccattgttggctggtctatttggcaaattgtagatgcacacttccaaatacgttggcagtgggatgtttttcgtatttgtatttgttgttttgtttaaaatatttttaatttgttttttcttttaggaagctaaaaaggggatggcaacagctggaaaagttaatatgactccagtggaagagaaggttccagatgacgagcctttagtatatgcaaataagctggtaacattccaaagacatgtcacttgttttttttttt

SEQ ID NO: 4436 - DNA, 657 bp, Gossypium hirsutum
atattgcttctctatatcaatgtctctttatgattagtttcattgtactctcttaagcaatgatgtatgtagttaattatatgatttgatgatgagtcaaattgaaccatggaacttgaagtaacatatgaagttgttatgtacattcatctggttatatgatctaatgaggattaactggaacggtggaacttgaagtacctttgaagttactatttacattcatatggttatatgatttgcttttacattcatatatggaaccatggaatttgaagtacatatggagttgctatgcgcccatcatggttatgggagaacttttcactccatgcttcctatgacttgcatgtacattcatatatatatgatttattgatgatcaaatggaaccatggaacttgaagtacatttgaagttactatatacattcatatatggaaccatggaatttgaagtacatatgaagttactatgtgaccatcatggttatgtgagaacttttcactccatgcttcctatgacttgcatgtacattcatatggttatatatgatttaatgatgatcaaatggaaacatggaatttgatgtacatatgaagttgctatgtgatcatcatggctatatgagaaccctttagttcaagcttcctttga

SEQ ID NO: 4437 - DNA, 663 bp, Gossypium hirsutum
cttttttcatgtgatttactggaaaaaaaatgaacataaatagactcttttagaataatcagaacaaaatcagttaattgtatttgtagaattgcttaattcattcaccgtagttgaaaagatttggtatgcaatataaatgcgctgctagttttctaaaagattattttttgttaagtttttaatagttacatttaattcatctttatatctattttatgtcttattttttttccttctaaaatggatttttgagttttttacatagttgtcttgggaaaagttaagcgaatttgttatgaaagttcggtaaaattggcatgcggatttgtatttgaaaaggatttagttagaaagtgtgattcatgcgctgaaatacttcgatattcagagatcggtagacaaaggaaaaattaagttgctttaatctttttggcattttttcctgcatgctttcagcatacgtacaagcaagccttgcagtattataagattattcccaagcaaaattctacatcttctagaagtgcattgtctgcctcaaacaggtcctcttctccaaattcttttaacatttgtgctataaatgaaaacgaggtattttctattttgaattaactttgagatcttcactttttcttgcaagctgaaatgctttattgc

SEQ ID NO: 4438 - DNA, 585 bp, Gossypium hirsutum
tttccttttacgatatatttcttctttttattcccttgaatgtaccctatattctactcaaaactcaataaattgtgattgtttagtcttcatgtaactcaagaaaaaaaattttagaaaaaaagcaagtatgaagtgagacactatgtttactcggactcgggtatgaatgggtatgtgtccaagatagattggtcagattttttgagtttttccatgtatttggaagattattggaggtcatatgcctataaccatatctcaaacactagtgtttcaagaaaaatgaagagtcagaataccatagttacaatcaatgctatattcatggtattttgatttgactagctcatatgtcagattgccttcatatatccactttttccatgcagttcgtttcaatggagagaaagcttctcaagtggaaaacaccagggaagagattcgagaaactcaccggcatccaccctgcagatagaaatatcttatttcgtggcatttggttacggatggctcgtagtggaattgcatcatttgcaattgtgggaagttattacttcttcattactcatcttgtttccagta

SEQ ID NO: 4439 - DNA, 608 bp, Gossypium hirsutum
caacgccgaatctagtctttggaaacacaagaaacaagccactgcaaataatccccaccataagcggaaaaccctccataacttggtccatttccttctcatgtcctgggaaaacacagttggtaactctatgatccgagaaagcaatggccacaaacaccaacaccgacatcacggcatgaacgaaatcagtaagtccaaccttgtacttgtcatctttcggggattcaacttcaagaccaggtttgaaaagagcaagtccgttgggggtgacgaaaccgtagtaaacagtcccatcggggcctcggaaactatcggtgaaatggaagaagaagcaagagagtgcgcaaaggcataagagggagtatatcatgatggtggtaacatgggaacagtcaccatggcgataaacagaaggaagaaccatttcgaaagttaaaagggtgcctgttggtaggaagttaacaagcatggaagttttggaaatggttttttgaactcctttggctaccactttccgtttgcggccggcttctggtggcagtcgagggagggaagagagtggtgtagggtcctcctctgggggtgggtgtgcagtagtgtaaact

SEQ ID NO: 4440 - DNA, 607 bp, Gossypium hirsutum
gaatgttgcttatgacgctgaggatctcatcgacacgttcctcctcagaatggagtccctcaagaaaaaccacttcttcaaaaggtctgcttccgttttcaaagaatggaaacatcgctccaacatcgctaatgagcttcttcatatccaaggaagaatcgttaatatatctgctagccgtgaaacctacggcatcagaaacattggggaagggatcagtactgcaagggagaggcttcggaaactgagaagatcatctcctcgccgtgaagagaaggatattgttggcctggacgaagacatagataagcttgtgaaacaacttgtcaagaccgatgaccaatggcatgcgatttcaatagtcggaatggggggcatcggaaagacaactctggcaaaaaaggtttacaatcatggtgatatcgaggctcgttttccttctcgagcatgggtttatgtttcccaggaattcagtagtaaagaccttcttgaggcaattataaagcaagtgggatcaccaagaaggaaattggaaagtttgggagaagaagaactcgaaggtattctctttgaacacctaagaaggaagcggtatttggtagtcttg

SEQ ID NO: 4441 - DNA, 485 bp, Gossypium hirsutum
ttggtttatgcatgaactgacttagatgttgaaccgcaaacataatgtctggtcttgtatttgtcagatatagtaaccttcccaacaacctttgatacatcgaaacatctgcaattaaaccatcttcttcaatttttgtttgtacagactcatcatattcaactgaagtgagtttctgattctgctcaagtggtgtacatactgactttgcttcccctaattccagatcagctatcaactctaaagcatacttcctttgattcaatataatccccttgtttgatctcatcacttctattccaagaaaaaacttcaacacacctaaatctttcatcttaaaattttgatgtagaatttgtttcaattcatttatcatatcaacactactgcctgtaattaacagatcatctacatagatgagtaagatgacgatgttacctctactccttcttgtgaacaaggaataatcatatttactttgctca

SEQ ID NO: 4442 - DNA, 618 bp, Gossypium hirsutum
gaaaaactttgtgggctgatggcattcattggtcacttgaatctacaattctcacgcttcttagtgttcacttgtatttagctacagatacttgataacaacaacaagaatattaatgaaacattaaaacgaaggtaggattagagccatgcacttggcaggaatcatgtcacgaattccttctggaaagaactctatttaacagaacagatacaaggaaaaagtaaaaaaggaactgtgtagaaagtcttacaatggaatattactcttattctttgtgaagctacatactcagtcaaatgcacttgtttaatctctaaagatacaagaacaagtttcgactaatctgagtaggaaatttacttcatggtagttgataagatgcctaatcctataacctcaaggcatctgttttccctactgcaacatctgtacatgcttatattataatcatgtcggtttgcttttttatatcaaaatctcagatgaatatgatttgatgagattaaagttcttctgggcctggctccgaaatctagatgttatccatttacattagctttaactgtttcaagcaatcaaccttttgtccgaagaatctttgctattgtccgacca

SEQ ID NO: 4443 - DNA, 562 bp, Gossypium hirsutum
caccatcttacggttcacagtcttcttgggttgggagcaccttacagcatgttgctatggctgatattgtaaaaatgggtagaccaaagagcaaaggctcacaaatgccatgtgagacctctttttcccctcaagatgctgttccgccaaactcaaccatcaaccaaatcaaaccatcccctgctacttcacattcaaatttgggaacaggccaagatttgcattctgatttgaacacgatttctgaatctggaatgaaatctagtcagcatggttttgacaatgaatgggctgtcaatgagccaatgacagcttctagtgatattgggggtacaaggtattcaaatcaaccttgctttcatggcaacagagctaacttgtcaaataactgctggtcagacactattgtagtatcagagagcaatgttgccaggaagaatcttagtcctaatcacgtcagttctgttcaagcatcaaataaacaaatgtttatgagtgattctggaggaatgtctgaatatgatgatgacctccgtaagcatacaagttcacctgattctta

SEQ ID NO: 4444 - DNA, 626 bp, Gossypium hirsutum
caggtattcaagaggaaccgaccttacctgggatcgcaaatcccaagtttgtctatgaagagcagatctaattgtattagtgtctatagttgatttcttctgtgtaatactaatcgatagggcctcattggtaagtgctacaagatctcgtgcattggaacccacggttatggacctgaatccattagtatggaacattttcttttccaagtgaaatcccctagtatatgaaagagtgaaaaagtgctttcgttgttgtggaataagaagccttcgtatcttaatacatgtatttaatttactcagggctactagagtgggatccactttttgggctcctaggataggtgaactaattaacttgaaatttgtttgaaggagaaagatgaagggataataaaaataatttaatcaaaaaataattaaataatattttaacaatatatatttttctttttaacaaaaaattattttaataaaattattttatgaaaataaaaatcaagacacatggcatgatttaattggctagagatcttttttaacaactgtgaagttttggactaacaattataaccaagaaatactttaggtatcaaaatggcccaaataggattaggtaccaa

SEQ ID NO: 4445 - DNA, 645 bp, Gossypium hirsutum
  misc_feature (76)..(77): n is a, c, g, or t
  misc_feature (517)..(519): n is a, c, g, or t
  misc_feature (545)..(545): n is a, c, g, or t
ggaattggaccgatataataacatatttattgttattactattttaaatttatttatatttttaaataattttcanntccatttataacatattcctaagtgtataaatatgaatattgcagatatacatgtaaaattataaatatttaatagctaaagtcttttagacattaataaatagtataaattattaattaagttaaaacaacttatcatatttttaaatataattatgaaaactaaaaataatcaagaaaaaaataacaattgattttaaaaaaattaaaatatagtatcaactggtacaattagaaattttatgaaacaaaaatagtaataaaagatgaataatgatattaaaaacaaaaatatgtatttaagtatatatatatggaaggagaaaaaaattgttgatattggcaaagaatacagtcctatacttcattggtcagctgagccaaaaaaaaaaaaaaaaattttccccaaattaaaaacctttttttcccaagcccccggnnnaaaaaaatccattaaaaattaaaaanttccttttgtttttaaattccaggatttaggttgggaaaaaagggcaggggatttttccaaaaaccgggaaaaaaaacccaaagggggaaacctaccaaa

SEQ ID NO: 4446 - DNA, 662 bp, Gossypium hirsutum
tatttcacccttttcttattcctatgaacgatacatgtattatctcaccatcaaataaaattacagctcacaaaaattcaaaaagagaaggcagaatttctaagcaatgccttttgcctttcaagatctccatctaggcataaaaatggaagtatacatttcaaataaaacaaatttattttggcttgttttattaatctttcttgatttgcttcactattgtaaatgagtttctcaataacttttcttgcagatgatatatacaaataggcctgcatatctttccaatgaaaaaatttataacaaaatgaattgatcatatatttcttgaatttaatatttcatatttttatgattacagctttctatcctgatgccttatcttgttaaaactaatatttcttcatttcttatgtaaagacaccgcacatggaggaggtgcaatgagctgtttatttactctagattacatttgggagggcgagagtttgctctgtgcctttgtgcctaagcacatggcttgaataatcctgattactgttagttcagggcaacaaatgtatttgggaatatggcctccaccaagagataaaagcagatatcaattaatacttcactagcatatcaaatcttcaggaactcaccatgtcatttatctctgc

SEQ ID NO: 4447 - DNA, 629 bp, Gossypium hirsutum
aatgaccaaaacctacaaagccacccaaacccgaaatgactcaaaatcaaaatgaacaaaactcgacatggtccaaacccataatgactgacccgaaaaaccatagcctcaagccgaaaacaaccccgaactggaataaccgaaaatgaccctaaatgaccaaaaaattttaaaacttgaattgaatccaaattgagccgattaaaaaccaaactgattcacccaatttactgatttaattttccgggatcataccaaaaagaaaaaaaaacaccatgtacctgcaatagttctaacagacgccatatcaaaaagtcgattatcataaccaagcaaaacagcttgcctgcccaagctccacatgaaagatacctaacaaaacatgacctcattagcatccttggtaataactcaaaaataatctactgattttaccaaatatttgaaagttacaagctaccactttgtatattacttggattctccattgtccctgaagtacccatgtccgacacaacataaacaagagggtatcaactttaaaatataaagaaaagctttaaaagattggtatacccataaacaaacacataattatgttcaatactcatctccaagtcctgttcaca

SEQ ID NO: 4448 - DNA, 568 bp, Gossypium hirsutum
ggcatgttcaatttttctaagtttttccatctattgggaaggtccttggagggtactcatactcatgttcaaatatgtatcagacacagcatcaagcaaaatgaaatttgaaataacataggtattagtcattaacagatacatgatacaagtaaccaaggaaaaactttgggaacaagacttagtaatttcagtatacagtgacatgggggagcttttagattcataaatttggtggggaaaaaaacctaggtgatgcaacagttgtaggtcttacttgcaaaatcagtggtcataaaaattgcaattattctcaagcaacttaccccaaaattaacaggcatgtgcatatgtggtacaggagacactggtgtttgatagtagaatgagccatcggagacgggggatgggggcctaacagacgtttgagatggtgtgaaactctttgcattagggttgagtttgaactcctgagcattaagcatgttaaatttgtgagaagaaaaaccaaaggcaagcacagatcatgttaaagggtaaacaaaataactgctaagatcgtcatagt

SEQ ID NO: 4449 - DNA, 656 bp, Gossypium hirsutum
tcccttttaagagttcattgttgacaagcgtgacaacacttgttttcccaactcctggcattccataaactccaatcttttgaacctcgtcattcctcaagtgttgcataatctcattctttttacattttattgtttcaacgactaagctcggtgttggcaacacctgaccaatccacgaaagatcgttgacaaccaaatcatcagaaaatctacccttttcaagcaattcttcaacttcttcttccttcttacgaacattcttaacaagaaatccacgagggaaaaagctgctacctctaactttggattcgagattaggaatttccccatttatcctttttacattttcaatccacagatcaacttctttcttgaccttctttctcggacgcagctctgattttattcttgattcaacgtcttctttctgaccatttagttcatctctttttctcttcagattatttacattctgatcaatgcctttagggaattcccaatggttttcaactaaaccccgtatagtgtttgcaacttcaaaaacagttcctgcttgttcaactaactccctgcacaacaccaataccatacaagcataagaattgacatctaagcatacattttaattttggtaaaagaactggtcattgcta

SEQ ID NO: 4450 - DNA, 586 bp, Gossypium hirsutum
  misc_feature (578)..(579): n is a, c, g, or t
taggaaattatgaaatatttctgcatcagaatagacacgttgcatttccatttcgtagaaatatttgtgcaaatgattccagctacaacaagttcggggctaatgacgccaaaacctttggttaataatgggatggttaagagggtaatatcatagcaaagagcttagagcccagttcaactatgctactttaaacatgcagcgaacaagaaacaacagtcaggaattgccaaatggattaaattaaatacaagaagaaaaaaactatcacggacttttcttcacagttactcaactacacaagttcttgactgttagaacagcatgaaataatcaaaagacaaaagaaggaaagtgaattaactcatgtttgatcagcaacagataaaacgattcatcttgtaaagtagttcagtgcctcaggtaaagaaaaaacataccaacaaatgagtacgaagaaataaatggttgcacaattaatgataaacaagacaagtttatggcagatatttccagcattaaagacaaaaggttgaatggagtggtgatctaaatcacaaaacaaaagaagtaccatnnccagagt

SEQ ID NO: 4451 - DNA, 567 bp, Gossypium hirsutum
ggatccataatagagcaacgtggccatgttgaaaagagtacagattccaacatggagccattgctctggaacattcccggtttagtaattgacaaattgtggggagatcatgtgggtctgaatggaatgcacaaagacgttttaatgtaataatataagtacttgaacgaactggtcaataataggaagctgagagcttagagaagatgctgcaaaattccatcattgctgcatgtttgacctctgccccccccctccccccacaaccgggtggccatgcttatgccgccacctatcggacagactcccttgatttttatgattttgttatccttttctccttgttggatgagtgtgaccagggcctgcttaaactgaaacggggactgttgtattttatgtggtcatctcatttcttgggtccatttcttgattataggcttccatgttaactcagcagatagcaacatatacttgtaatcggatatcgaatccttttttttttccccgttcaatttttattgggacaagcccccaaaaatggccctggcaaaaacctttgtttaa

SEQ ID NO: 4452 - DNA, 616 bp, Gossypium hirsutum
tagcaattggccattcaatttgtcaacagcttggaacactcctcctccatcacttctctgcaacaataatcccaagatgaagcagggctataaaactgcttagcgaagagcaccggtgaaatatttaccttataatagtcaacagcgacaaagttagcccaacggttgcctgatcttccatagcatgtatcaagcatactaataagacttgctgaattgtcttcacaagccattactttgaatgcaatggaatggaaatggtttatcaaaaccagagatttagttttatcattgagtggcgccgactctccgcggttgctacattctcctggatgctccccaacatccccatctgaaattttaggacaaaacgtttctcaatgctatcaaatgttggcaagttcatttttagacagattttctcttttaagtgagaaagttgtagtacagtgattttcaaccacgtagttccattgatatgctattccttcactttcttgctttgacttggctgaagtgaagacaacaaatctttggttactggcaaccatatcctttactaatggccaatcttgaccattttgtggcatacttgagactgggaaccaatacttca

SEQ ID NO: 4453 - DNA, 640 bp, Gossypium hirsutum
ctatcttgcctcaaattctcaaagtcctttttagccagctcttgcattgatcgtgcctaaccatccaatccagacgtttaaaataacagagaccacagaatcatgacaaaggagttaatacagttgagacctagacaaacctgtcgaaagtaaattgtatctggtgcattatactgcattgcattcgagcatattaggaaaacatcaatctgcatgaatcaaactcacaaattttcagttatacatcaagtatcattccagaaaaactatatcccctaaatctaagttctgattactacatgtttgtagaatctaaagactatctccactggtccagagcatttatactgacatgaaaatcatttcattaggattttcatcttctcaattaaccacaaaaagcaactcacagcaaatatagttatctgctaggaaagagtaacactgtaagatcccatgctaaacaaaacaagttttgcaatcaaattccataaaccataggcaaaccattggctgtaccaaataaattatatataatatgaacggtaaaaaacaaaggcaagtaattatcttctcaaaccaaattaaagaatcttctaggcataagaggccaaaatgctatcccaaacaagtgggactt

SEQ ID NO: 4454 - DNA, 613 bp, Gossypium hirsutum
ttctgattcatgttcagctccctttggtcaaatagaggatcaagggaaatcaccaatgtttggacggctactcaaaaccatcaggtcagagttctgatggcatatactacgcataaaaatagacaatgtcccagtgtttaagaacacagataaggttaactgatcggtgagtggtgctgtctccacagaattaaccggtttacaatgtgaacaaatacatgagcatcagcatatatgaagagtgataactgaaaactatttgaaggatgaaattcatattcacactaactaagttcaagttaaacaaaacattagcattgcatcttatgtttctgaaacagattaaccaacatcacaagttatcaattcatacttcaatcgtactttccattttcatattcagaagttggtgaagcagaaatgagcatcaatattcatcattacatatgatattaccaagacaaaagtatgagagataccgtacctcttcacatccagattccatcatcattctaatggatctggtgacgagctcagtggctgcaacatgagaaaaagcaacgaaattcagcatctacattttacatgaattttgtgactacatatccattga

SEQ ID NO: 4455 - DNA, 627 bp, Gossypium hirsutum
aaaacgaaaaaaggaataaaagggaaaagaattgaaacaaactattcacaaattgagtccctatactctttgcacattctaaattgactcttactattttcaatttcagtaatttagtttcttactctttatttaataattgaagtataatattcctcagtttccttgatctcaaagtttgaaatgtgaagcaatctacctaattggcctatatccaatagttgatagttcagttaggattgacaagagttttgcagctactataggttgcacgagagatcacatgggagagtgaattataaggcttgcgagatatttgggtaattgttcaattttgcaggtagagttccgggggattttggatgggctcaatcttatggtagataggtgtttccaaaatgtctttatttaaactgatagtattgaagctataaaagttatcatggaagatgatacgggaatctctaattttactattattagaaaaattcatcagatgcttaaaaagatagagcaattgaaaattcaacatgttcctaagggaagtaatctaattgccgatagcttagcccagattattcgtattagaagtctaggcttaatactgtttgaggactcccttgagat

SEQ ID NO: 4456 - DNA, 574 bp, Gossypium hirsutum
tgttcaacaggctaacctatgattttgacaattacacaattcattaaaaatttctcttcaagcaaattacaaagaagtattcatattaaagatcaagggtgggtcaaaacattgaaatagacaagtcgttaaacctaagcatatagtcatcttgcaggttattgaaatttctagtagaaatgtgtagatatttttcggttcccaagttttcaaaattaccaacaaatgtcttctttgttaacatagcaaggtcagccaagtggtttaggtcctttctttttcactgatgtaagcaagtggtctatgtactattataaaaaaataaaataagctcaaattgtatcaaaattaacatttgttgttaaaaaattatatgaattttttttcatttatagtttaaatttaaacaaaaaattttatttgcaaaattataaaaaaatctttaaaataataactttttaaaacaataaatattaattctattgatatttgatcttttgtttaattttttttataatataataattaaattgatatagttaatagtaacgagactaatttaatcctaccctca

SEQ ID NO: 4457 - DNA, 810 bp, Gossypium hirsutum
  misc_feature (640)..(653): n is a, c, g, or t
  misc_feature (655)..(659): n is a, c, g, or t
  misc_feature (665)..(667): n is a, c, g, or t
  misc_feature (679)..(683): n is a, c, g, or t
  misc_feature (686)..(689): n is a, c, g, or t
  misc_feature (697)..(700): n is a, c, g, or t
  misc_feature (702)..(708): n is a, c, g, or t
  misc_feature (723)..(723): n is a, c, g, or t
  misc_feature (725)..(737): n is a, c, g, or t
  misc_feature (739)..(739): n is a, c, g, or t
  misc_feature (741)..(750): n is a, c, g, or t
  misc_feature (752)..(752): n is a, c, g, or t
  misc_feature (754)..(760): n is a, c, g, or t
  misc_feature (762)..(763): n is a, c, g, or t
  misc_feature (766)..(771): n is a, c, g, or t
  misc_feature (777)..(795): n is a, c, g, or t
  misc_feature (797)..(807): n is a, c, g, or t
attccattcattgtatagatcatcatcaaggaaagaacacaataaaaaaaattagagaagctaacagatttcttctactgagaaccatgcaagtattagatgtctgtatgtaccagcattggtcaaaggcaaaatgaagaagaaattgagagaaagaccgatgagttcgtttattgtgttggaactgatggcccatacagggtctccctggttaactcaaaaaaagaaaaaaaaagctttcatctgtgaataaaatgaagagaaagtgggaaaagaaataaaagaggaagcttacaggagcatagggaagcaaaaagagccacaagatataaacagcctcagcggcccacagactcaggtgaaggactcgccgaagaggaccatcctgatcgctttcttccgagctggagctcaaggcggtggacttgcggcgggacgcgcggcaaacaatgggcgtggaatggaggatagaaaaggaggttgtgggccatgtttcgccgtgatgtttgcaggggtagcggctgggctgtggaggagggttggaactgaagggtgttggtcttggaagagcccggcaatgggtttggcagagcaaagcttgagtagctagtacagccacggccatgcccttcacttactnnnnnnnnnnnnnnannnnngagctnnntcccccttgggnnnnnatnnnnggggaacnnnngnnnnnnnccccccttttttttncnnnnnnnnnnnnncnannnnnnnnnngngnnnnnnngnnccnnnnnncccccnnnnnnnnnnnnnnnnnnnannnnnnnnnnnaaa

SEQ ID NO: 4458 - DNA, 617 bp, Gossypium hirsutum
taatttaaaaggctaataaccactttggtccctgaaatataaataaaatattattttgataatttcaaatactttcttaataattattctatacttttttaaaaaattaaaattataaaatgtattataaaaatgatattaaataaaataatataaaataaaataaaataaaaaatcctccctactcttttctcccctccgtgcgaggcagggaggagggacgtgggggagaggagtgggaagggttaggttagagaggggaggggagggttttttattttatttaatattaattaattttttataataattttttataatttttataatacatttttatatttttattaattttaatttatttttaagatttttaaaaacctttttagaataattattaagaaaatatttaaaatatcaaaataatatatttttttatattttagagatcaaattagttattaaccctttaaattaatgtctcatgtcattattatcgttttaacagagataatggatgagtggcaaaaatgtagcaattcaataacattaataactattatgtaagttttaaaagttaggtgaccaaaacataattttgactaaagttcagggac

SEQ ID NO: 4459 - DNA, 634 bp, Gossypium hirsutum
aagtattccaaaaatacaaagctttcaccatttcaaagacttctttttgccatttttttctaacgtaaagaggcaaaagatgactccagtataccaaacaaacagtttgggccactggatgtctaaaagagaaggaaagaaagaagttatatttgaatttcccagcatgatcatgtgtataagaggtcatatgttaagcaaacttcatgaagttttcatgtaagaattgataagagatcagtctcagagacctggctgtaaattcagccttatgaacattgaaggacctagtgaagacaaacagttattttccaacaggaacaactgagtagacaggtatgaggatattcagcatgtttcatgccagaattgaatacataacacataacaagccattaatttacttcatgcaattgtcaccacattctagtatcactagtatcacataaggactaaacaccgagggtctaataccatccccatatgccaagaagattttctgcttcccatgccttctgtatttccagtcgaccaagaagttaggctattcagcaaattcgaaattcttataattacatacacttctatatatcaagttatgtacttcgagattttctttttcttttttctagaa

SEQ ID NO: 4460 - DNA, 609 bp, Gossypium hirsutum
  misc_feature (563)..(563): n is a, c, g, or t
  misc_feature (574)..(574): n is a, c, g, or t
  misc_feature (577)..(577): n is a, c, g, or t
aagtagttatgcccattctttcagcatatttttcataatgttctttatcttctaaaagctctgtggtccctccatctctggctcaagtagctgatgttttttggagttacaggaccatcaatttccccctgctttagaccaacaccagataactgctcctccagattaatagtgggtgcagttacctgttggcactggaaaccttcactcggttccataattttactgaatgaacaagctgaagctctagaagaaagggaatctgataatctaatttttgacttcaaaattccatcattgaaagcagaaccaaggggagtacactccagattttttaatttgatgttacttttcaggacagaaggcaaactcccaccctgttttatgcttccctgactcaaaaaagaaccagattgttttggggacggagtaacaaacagtgcatgtcttggtgaatttgtagtatccagaagtaattgttgtcttttagcagataatgagtgtatggaacctgctaatggagacctatgcatttcttcctgaaaaaaaaaaaaaaaaaaaangggaaaaaggnaanaacctttaatttttctttcaagccgggcacaa

SEQ ID NO: 4461 - DNA, 660 bp, Gossypium hirsutum
aaatattcttagttttagttttacaacagtgtgtaaatgaatgaataattatttgggaccattccttggcataactagctgtttaacttaggttgtgtagttaaaatcaattgatgaatgtattatttgggtttgaggacaattaacatttatcacacaaactaccccttttggaagtttcttgtattggaatagtggcaaatagatcccaatgaatgaatgatggtatctttccttatatgaggatcaaagaaattcaaattttaaatgtagccatcgtggttatcccttttaattcaaatttaatcatcacgagtgacaataatatatagatggtccaacaataatgaaataaacaatcaaaaattcattatattaataaaaaaaatttaaaaattattaaaaacatcaatggttagttttcttgttctcgattttaataacatttcaattctaacaacattgactttacccgatgcccattccttgtaaggcaatgaaaactaaatcaaattttattaagtttttattcggcttcaatttgattttcgagtcacaaagataaaacaccattataattgtttttatttattataaataaataggtgaaaataactttgaaaaatacataaggatagtttaaaaaaaaaaaaccaaccc

SEQ ID NO: 4462 - DNA, 610 bp, Gossypium hirsutum
tgctttgattttattgttgttatgatagcttgggcaaattttgttcttgtaggtgtacatttcggatttgacggaactttttacttggacatgtgaaagatgtaatggtctgaccaaggtacttgattttcaatgtttaagtaggtttctagttgaatgtattgtactaatgcttctttatattgaaacagggatttgaagttattgagcttgttgttgatattgagaactgtttacaggtgcatctctttgtgtgctttgatatttattgaaatcacaacccatgtaggtgttaaaattaatggttataattgacacgaaattgactataaattgataggcatttgtcggagtggcgaaggatcttaatgccgttgttattgcctttagaggaacgcaggaacacaggttctaacatcatttgcttctctagtttctgttcaattaatgttttcaaaagaatatgttattcatggcatcgaaacataaatgataaacaagatttgaagtatggagaaactgatagtctttgttctttctaaaaatgaatatattttactgttttctatttgattgatttgtctgtctgtttgcagcatacagaattggg

SEQ ID NO: 4463 - DNA, 608 bp, Gossypium hirsutum
taatgtggaggaagccaaatttcaaatgggataactcgattaagctggaaaagatatttctacaagtttctgtattcattatcagagtgcgtgactttgtctgaatagattctatgaatccaaacggttggaaaggaacctagctgtatagctcgtccacattgcacaaaatattgtggtttatagaaaatgattacagctttatgtccaggagttctcatttgttcatttgtaatcatgttcaaccattggtcaagaggatggaatcagcttaagaacatgaaaaagatttgatattcaggctggacattttcatgaaccgcattacgcaggaaggatttgaagtctgaaacagagaaccgaatggctacatggtaacaatgagtaaaataccataaaaacaatttcaattcttcttaaacttcagtgaaataagtccattggataagatgaataaaaggataatcagggtgaacaccaaagggtttgaggacgagacctccaaagtttttgaaaacttggagttgatattcaaacatcatgtctcaggttttttggagaaaggttttttcttcaacaagcctcataacttctagaagaaatactgg

SEQ ID NO: 4464 - DNA, 613 bp, Gossypium hirsutum
gacttttgctggttaatctaaggggcaacctccaaataattgttcaggtaaagtatgtacaatggtatgctaataatgtttagttaatcacccaaggctaagttttgtgtctgtgcaggttgccaaggagtattgtgagcagctgggtgttgatgcttgcataaagctttttgagcagtttaagtcttatgaaggattgtacttctttctgggctcttatttgagctcaaggtaaactacatagcaaacaagaaatttcctttgtttgctcatggcagagctattcctaatacagtacttactatgatgtttccttccaattattggacagtgaggaccctgatatacactttaagtacatcgaggcagctgctaaaactggacaaataaaggaggttgagcgtgtgaccagggaatccaacttttacgatgctgagaagacaaagaacttcctgatggaggccaagcttcctgatgccaggcccttgattaatgtttgtgatcggtttgggtttgttcctgatctcactcactatctctacacaaataacatgttacgttacattgaaggttacgttcagaaggtatgtagtattgcctgccagatatgttc

SEQ ID NO: 4465 - DNA, 379 bp, Gossypium hirsutum
attgcctttttctacatcatcaatatcctgtacttgaagacgctattgtggtaataattacttcaaatccaactggatatgaatagttatccctaaagaatatagtaaatagttattcacatattagtgtcattgagaaaaattcaacactgaatctaattaagcaaactgtcataaaactatgccccatactctttgcttcaatttaaaattgaaaagtgacaaccataaattgaacgaataggagctcaatcaacctcacagtaatgaaatataactccttaaacaatcaagacaactatgcttaaagaaattagacattaaataatctcttgctggtgattgaaatgaaaaaaaagaacactttagatatatgata

SEQ ID NO: 4466 - DNA, 624 bp, Gossypium hirsutum
tacttacgtgctgattatgagatttaaataaacagacaaatagatgaatgaatgaagctggtgatttgtaagtaaggccaatatcaagtgatgaagcttaaggagatgtgtccctctccctctttccctctctgaactatgaagggtacttatatttgtacgtatctgcctgccctccctagttgcttttagtttcccatgcaagtatatattatatgtttcttcttgtcttgatagcagaaggcagtggatatatatatatgcccataaatgagtgtgattgggactgtatctgggaatgagaccgaccgacttctgaaggagaccggaatgagatgctaaaagtatctgggaagtccttgtgttattgggactgtatcaaattagtccttcaaataaggtcaaattggaatgaaatcaccatttactagataaaagaatatcatttaatatatttgaagtatttatggttttgtaaatgaaatcttttgtttggagttggaaaaattaataatcgagatattttttatacaccaaatgttaatatagacttatttgattcagtccgtataatacaaggacttccaaggcattttaacctaaaagtggcagaatggagattgg

SEQ ID NO: 4467 - DNA, 522 bp, Gossypium hirsutum
atttctcaacttttacaccctattatgtttctctttctccatgcgtgcagaaagcttttttgtttgcagtgagggactcgttaataaatgttggccctttgaaggacttctcatatggcctgaggattaatgctgatgcaaatgcaatgggaatagccaaacaaagtaactatgaactggttagttttagcgagttagacgcttattatctactcagctttgactaatgcatacggatgtgggtttgggtttggggttctgatttgaatttggcaccacttttatgaaggtgtggctacctaaaattttcctatttatgtattggctattttagcagttatttcattttcttatccactgtttgcattttttcctctaaatgatttgcagttatgttgtgcctgaagtctgttcttggctaatctttcaggtgtgctgttctggccatggaaagaatggtgccctctgtgttcttcggcagtcgattcgtcctgaaatgattactgaggttcattcatactc

SEQ ID NO: 4468 - DNA, 568 bp, Gossypium hirsutum
cgtaggagagaaactataccgatacctcattttttcagagtctagttgccaacccttgaaatgtaagagaatacgaataaacaatcgaaatgaagaaccgggcagaaaggcaacctcagactgatcacttgaaaaattaagaacccttgatattgcagaaaatagagatgcaactgagatacagatgcaccacatattaatcaagtaaggttgattttccagatcaatttgttttgccattgtcattaagttggttttgatcatgattttccaaagcataaatataaaactacgtaccaatgtatatcatacccctcttcttaagggctctaagaaagactcgaggcattgatgccggatatatacagcaaaaaaacagaggtcaagacatgcattttcaagtttgtagcttcaaacgtataaacatgcaaaagcgtatatgtatatagtgcttagaaagattctaacaatatatacagttttcaatgcaaaagtccatgcagaattggggaagcagggagagtcctaaacattaggttatctggtctgataataagggctagtttag

SEQ ID NO: 4469 - DNA, 615 bp, Gossypium hirsutum
aaagggcctgaaaatcacccatagccatgacataacaaataaaatgacgagttcatcctagacaactaaagttctaaaaggacagcaaatatgacccaccaaattactagtattccatatgctacacatattttttaacacatttatccagattgatcattatagaattagaaaagtacaacagcaatgtaactcaagtggacacaaagtcctacacatatgtaataaatagctacactatcagccttaagttaacactaggatacaaattggtatactgggagtatatggtataacaactcaccaaagagaactgcggcgatcttgagctgtctttcaggatacttgtgaaaaaatcggtattcttcaaacaaattcgcaatcatgcactcaaatatcgattgctccctgccagaattaaatagcccatcaaactgtcatgtctcaaacatgaaatttccagtaaaattcaagtttaaaatgatgaaatatctaatagaagatatataatgtgaagaaaaaagatcaagctcctcctatgaaatatttaaaaaatcaaccagatacatggaaattcaaacagttacaaaaccaattaagaatatccacatcgag

SEQ ID NO: 4470 - DNA, 629 bp, Gossypium hirsutum
gtattttagttaatgtgaaacgcgttattcttatgaattttgattgattggtctgttagatttatcagaagggaaatttagagtcgaagaaaacgcccaataatgagacagcgtgaaatgcaattcaaaattaatcattgggtcggttaggttttcgattcattaacttttatttcacttcgctaacgtgtgaatatattcttaaactagattttggtgcatctgcgagactggctcactgtgtggtctgtaaatttgcatcatataaccctccctttcagcgtgcctcttaaaaatcaaatggcttacgtgcaggtcttttatggatttggaacccattagccttttctcatcttgcttagtttcttctagtttgccctaacaagagttgcacaatgatgaggaaatggtactgttttattagctggctatgaccaaatgttacttgccactggaacctgtttaatccctgattaaacacaatcgatttttgatttctcaaagtgggttttcccaagaaaacaagcatatcagtaaatcactgccattccatctaatgatgcttcaatttgaaagcaagttcaatctccatataagtgtttcaaacttcaagcacaacaatcccacta

SEQ ID NO: 4471 - DNA, 607 bp, Gossypium hirsutum
tgtccttgcttgcttttgtaactctgtgaaaagacttcttttgagcttgaacttggccccaagggaacttgcaaagactctggattctggcctgtgattagtaaggtaaaacttaatacacataattattgaaagataaaagagtggacccctttttctggtgatgattggcaaacctggttgattagctccaaagccatagtttggtgttaaatgcctgctttttgcacaactccaggttactactatttgaagagccaacagaaaccaaaacaagcttgcttccatttcttcaaaacctcaaaaatgatggatgttgactgagagtaaccatgatggtcaatattggagagatgaagggaggtagaggccatgcacgactgttggaacatataaagtggtgctaaaaagcctggcaaacaaaaaatctcatttcccaaagtaaaagaagccaaaggtaaaaaatctctggtatttttcttggtcattggcaatggaggttttgcttcgcttttactgtgtcatacatgatgggtttaaaacttggccgcaattccactacactgtcctttctgattgactgtttcaatcccctttgacctttcta

SEQ ID NO: 4472 - DNA, 553 bp, Gossypium hirsutum
gatagaaatagtttcaacctttatgcatgcacctccgtataagtgctgcgtacaagttccggtcaggataattgggaaagatcaaaccaatttgaaccgctcacatcacaatagtaatagcgtaaaggccgtaagtcgggggacggccataacataaggctattactttcacatctctctctatctatagatagagagagagatccgctgcgtgagcaacccgactgtgcgttacaggtgctctacaggccgcactccatctttcttcccaacgagcccatttatcttttgacttggaagacgggcgttgcgttcggttcgaaaggcatggttttcagtatgtctccagatagggcccccactagtccggctagctagtgagcggttctttcgggcgagaagcaggccgggccctacgggcgggcatctcccgcaacgcaagctgcattgttcgccaccacccgaaaagcaaaagattcgagagtccaggctgaaaatacatgcatagatagtggtctaatgacaagggccgacgacgaaagctcgtgacaga

SEQ ID NO: 4473 - DNA, 577 bp, Gossypium hirsutum
acaacatatgaaggagaattcaactctgaagagttctcaaatttttgcaaggtacaaggtatcaaaaggcaactcacaacagcttatacgcctcagcaaaatagagttgctgagcgtaaaaatcgtaccattctcaacatggtgagatgcgtacttgaagaaaaaaatatgcccaaaatgttctggtcagatgttgtaaaatggatgtgccacgtgttaaacagaagtcctactgcctgcttgaagaataaaacccctaaagaatactggagtaacctcaaacccaatgttgaatactttcgggtgtttggatgtattggaaatgttcaagtacctgaggcaaaaagacaaaagctagatgcaagaagccaaaagcaagttctgatcagttacaatgaagaatcaaaaggttgcaaaatgattaatccacatacaaagaaaatcatcatcagcagagacgtggtttttgaataaaatgaaggttgagattgaagcagtacaaaagaagaaaccataaatgatatattagattgaggagaagcctatgaataagcatacaatcaaaatgataaagaga

SEQ ID NO: 4474 - DNA, 564 bp, Gossypium hirsutum
gaagtattgatatcagtatatacgagctgctagatttttgtttatgaaataaatggtgaaaaagttgtgtttaatttgattttattcctcaattatatttaacaatttcataatatcattgttttatgttttattatatttattattttaaataatacacattgcctcaacaaaaaccctaattttttttccttttcacatcaagtggtgcctttactttcatctccttccctcacagattccccaaaccatttttgcctaaacataggtgataggagcatttttgctaattacgtaaatttattaatataatgtaaagtctttcactgaccatgtttgcactaatttgattaaaaactgcaattggggttattagatgacttaaaccacattaatgcatgcctaactttgtactccagtttgaactaccttttcctccctaaagatgtccgaattttgagtacagtttgactagtaatttttcaattaattagaaagaaattagtatcaaataaaaagaaaaattttcaaaaaaccaaatattacaagaaaatatttacatga

SEQ ID NO: 4475 - DNA, 610 bp, Gossypium hirsutum
tgaggtattcccatacttgcatggacttagtatgtacctatggctatggatggttttaagcaagttggattttcgattcacaggaaattcagagccgatattcccagctgtgtaaccaaagccgcacccgatttctgcactgtctatacaatatccaaagggaaggtctcatcattacgaaacgcctctcgatcagctccattttcttctccacttattgatcaaatcaggaaactaaataataatttttctgatcctaacctaattaatgctgctgtaaaggcaggttggtttctctccaaaactacttttaaatcattggggagtcactaaatattagaatctttgaatatgcagctgctgataataaggctatgctcaagcctcgttcctcatttgaaagcggttccaggtaataagccttgggcattcattatgataaatatgggttcatcaagtaaccatgattcacaaatgcaggtcaccaccgttgccaagtacaacaaggccgagcttgttgaaagcctttgctgattatccggaatcggataccgatatctccttcgttagctccgatagacccagcaccgatcggaactcttccttgatg

SEQ ID NO: 4476 - DNA, 625 bp, Gossypium hirsutum
  misc_feature (12)..(13): n is a, c, g, or t
  misc_feature (334)..(335): n is a, c, g, or t
  misc_feature (443)..(443): n is a, c, g, or t
  misc_feature (447)..(447): n is a, c, g, or t
  misc_feature (468)..(470): n is a, c, g, or t
  misc_feature (600)..(602): n is a, c, g, or t
ggactagacccnngcaaagtacaagaaccattcccactgacaaactcaatactagggttggatgtctggcaacccatagtccatatttcctgaacataagtatgtaagaacaaaatcacagacctgaccgttgctcaagtgatgtaagcttatatgcatatagaaagttaacctgtaaaaatctgacatgtatccttgcacaacagaaagttgaaccccagtgctactttgattagcatcctctagcctctgaacaaagaaaatcacgtgagatttaataggaaaagcatataactaaactaataaaaagaagaaataaaaaaactgagaaatnnaaagattgttaaataaaaattacaattttgtaaagttctatgccaaaaatgaatgctataacctaaaaaggaatatcgactgagaaatagaatgagatccaaggtcancacnaagtaaaaaaaaaacacctgnnngggaaaattgacaactttttgcctactaggagaaagagattgaccaccctcaactgcatctgtaaaaggtttcattctaaactaccgctttctttttcttgtctggtgaaaaacaccccatcttactagnnnagaaacaaacaccccatccgaag

SEQ ID NO: 4477 - DNA, 637 bp, Gossypium hirsutum
atctccttctataatgtaaaattttcggataacctgtgagtatcttattctgcctattgcagcagtctctttgtttattatcgtttttcatattaactttttgtaattgaaaatttagaagtacggaacgatttattaatttgacgttatctttaaaaaaaaagagagatgataattcaacagagcataccttgacttgaacctattcgtaatttcattttgctaaaataaggatttgaaaattggtttggtagcagctagaagtttgcaaataaaccttaaaggtatgcatgaatgaaagcctgtactacttcactttatacttgagtaaataagaataaattaactaataaggacatgacaaattaatagagaaaatcacttgcattgatcaaagatgttttacgccaaacaaacatgaaaaaaaataaaggtttttttaactatttctacttgagcaaacaaagctctaaggaatgtttggttcaatgtaatgtatagttattacaagtttattttgtaggcccacacaaatagctgtttggttcaatagaatacttattagggatgtattccattttgggcttatgttagaaaatttattgatttttattttttccctttttccctgattact

SEQ ID NO: 4478 - DNA, 627 bp, Gossypium hirsutum
tgctgtctgatttggcagttcatatatcatctggcattcttacgaccattgatatcaaatacactgaatataccaactcagtcccctcaggctcaactcctttgcagcatccgattgataataatagaagctctgctaatgccacatcaaagaaggtatttttactggatctggagatacaggttcattgaaccaaatctcttaatgtttaacgttagtaaataaaatttgtggaataaggttctggatagtttttcacagcagttttcaggtatcttcgggagattatcgtcctgtaaagtttcaatacctgactggtcttttctggtattacctgtttaccaaagttttggtatttgaggggacagtagaattcattggatagtttttttcatgacattttgtattctttgaagttttaaagagagagtgggagtttttcctcggggaaacaaggatagtgtggttcacatgccattcaagctcctgaatgtaggagcattttctgttccatttcttgcaaaattaaacctgatagttctcttggtattacttatttgccttggtttacctctaaaatacttcctttcaaaaactgattgacccttattttgaaaaaaaaattgc

SEQ ID NO: 4479 - DNA, 650 bp, Gossypium hirsutum
gtctgctcttgtaggtcagtatcatttgtatgatcatcattagtaaagatgaagccatcatgtgcattcattgtaaattcttgctcttgagttccaaaaggttgacaatttaattgactctgctcttggccatgcataagtgtaccatcctcaactgaaagaaaagaaggagatgcgaaagattgacagcatgaggtcggtaatacctcagaccttgaaggaagactagattgtgaagctggagtttttctagtttcagacggttggatgtctgaaggctgacaaagagatctgtttgtgcagccacccaattcaacaatattagatccctgtgtaaagttttcagaggcaaagcacccatcattcactgcttccgagaataggaccctacaacattcatcatcggttatcaacatatgctcaccgaactggtaatccccactggaagagtaccctacttcacaaggtatttctggaatggagaagttaacatcttcaaaagatgggtaatattcttctgaacaaggtgctgaactggaattcctctcttttgacacaccaggcatttcagccaagtggaattgctctcttgtatgtacagcagcagtagctaaatcacttgctgatcgagaacagccaatcatatttga

SEQ ID NO: 4480 - DNA, 514 bp, Gossypium hirsutum
aagagaatctcatcgacacttcatgtaacattaatggttaacataatctacgggggatctaaccttttcaataagatccaggacatcttgattatcaacaaattctatgtagctccagttgatcttctcttttgtgtactcttcttgctccatcttgaagacatgctgaaaagcataccggaaacacataaatatgtagtttcgggtcaaattgatatagctgaaatgatcaaagcatgagattcgagattttatgagagtgatgtggtggtgcctcttcacttttgaaaagaaaatacaaaagtgctcagatgtgtatagagagagatactatatatatctcacacgtgtatttaagtgatagagacagatgtgtacatatatttaaaatttttttctggtttggaagaaccctgggacccgaaaaaccctaaattaaccctacaagctgggagcataccttttacccttaaagttttcaaaaccgaaaaggtcagggaccccaattataaaa

SEQ ID NO: 4481 - DNA, 613 bp, Gossypium hirsutum
gaactgctgtcacctccgtgaagagaatgttgcaaaatggaagaaaggcgaacttgcttaactttaccaaatacagtgtggtttaggccaaggtttttcgaatgagaacccgtgatggtttgagctagttgctttaatcttggcgttgatggagaattccctacagcaagcagaacttttgactgaacgataatggggggagcagcagtggagcctttagaattcgataagatgatatacaagttctgaaactcgccaagtaaatcgcatcagattcagcataagagacgctaaagccaataaactctcttacaaatggtacatacaaaaacgaaaaaacaaaaaataacaaagcataatcaataaaaaaagacagattgcctaacctcgtttggggctaaatgcaatccagacttgagctggctccttaattcatcaaaatataattgtatttgataaatagagaagttcaaggtaaagttgaaatggatttgcactttctgcagaagaaaagcgctttgcgggggaatcacagtaatccctcccgggaattttaacacctcgaagaagtatgaatccccgaacaaggatttagtcaagctcgaagatgctt

SEQ ID NO: 4482 - DNA, 606 bp, Gossypium hirsutum
gtgcagctgatatgatattaatcttgagaggaacttagtggggtgatgctaactgagggcatctgttcaaactgacagaatttggtttttcagcaactctatttttttcttaaagccgtgacaggctgacagccaaataaattgatatcatgagagattatctgtcctcttttattgcaaagctctaagagatcaccattttctaccttctaaacttatttgataaatgaggcaatcatatgaaaagaaacataatctgtatttgtaggccagcatctataatcattgcctcaggactgctggatatgtagtgtcctccatcagtcatcctgtgttccttgggaattaaaagcatgatgtgtctcatgcttattatgattatccaagttagaacctaaagccactgagtacttcaacggtttccttttgcttcttccatttctgaaatttgttatgattctctttgtctatggtaactgctctatttattgttaacaaaggttgacatcgctttcctatgccattcagaggcaactgcacctttatcctgggcgaaaagaatgatgattgctctaggagctgctaaagggcttgctttcctacaca

SEQ ID NO: 4483 - DNA, 634 bp, Gossypium hirsutum
aacctggtgcagaatatatagactattcttatgtaactttcacttatcatgcattacctccaggagggctgcactagcagaagagttagctgtcctgaagcaagtagatgagtttgcttcaaaggggctgagccctccaagaggaaagaatggatttgccaggtattagttgtccaaaagcactgtacttcattactagcaatttactccttttcttacccttccataatatggttctacggcctggtattagtaaagaagcttgcataaagcatgcttggcatataaccaacatttgtactcaacatgcttttcctttcccacactaataggtcatccgtggttggaagtttgaggagactagttaaatacttaaatgcggttgtagatatgatattttctccattgtataaagtgctccaacctctcctaacattccttgtatacgtttttctgcttcacagggcatcctccatgtcaccaaatgcaagagtggccagaatatcttcacttgagaatatgctcagcatatcctctaattcacttgtagcaatggcttcgcaactttcagaagcagaagaacgggagcgcgccttcactaatcgcggacgttggaatcagttgcgctccatgg

SEQ ID NO: 4484 - DNA, 595 bp, Gossypium hirsutum
acatattttgctagaccctttatcgtgagaagaaattgttagatttagaaatgaggggtgggaagcaagcataaaagaattcaataattcagaatatgtaaacaaaaattaaagataaaaaggatgcacatagtgttttatacaatttctggtatgaaagaaatctgctaaccaaagaaacagtttaattgatagtatgcctaaggcatcacataaagtagtatcataactacactaagatataagtacaggtagcttctaactttaaatttgcgtagtggataggaaaaacaaagtaagctagagatttaaaacagctcattggagaaaacaactaaagaaatatttaaaagaggattaaagatatagaaaaaaccaatctcagtaaagatctgaaaacaagaaaatatttttttactaataaatcatgaccaacaaaatgagatagaagagaaaaaaaatcaagttccttacacataaacacttaagacacagcctcaataacaatctcaaacataaaaaatcttttctttaacaaataaaggtgatcttttaaagatagttcaagtgtacaaacttctcctcgaatagagaa

SEQ ID NO: 4485 - DNA, 643 bp, Gossypium hirsutum
ccttgcttacgactctccgcatgtcaccatatgaatcacaacctctacttccctccttttcccctcaacatatagaaaaaaatattttttgtacttcaaaaatggaaaaaaattattttgtttttccctcagctgaattgcataaaagtaaataagaaaccatttaaaaaaacaaacaaaaaagcagagggaagagtagtgattacagtcaatacaagtttaatcaagacatttttgctcaaaattatttctatttgattcgtaaaaactccaattcaatcattaataaattaaggccgcacagcttaacctatcatgcaaaccaaaatttagtattctaatgtttgaatagctctgagcttaatcaaaatttttaattaatattggtaaatatcaaacacaaataattaaacttaaaagtcaaacatgaaaatcaagcattacgatcctaaatataggatatgagatatttacaagaatttttgaataaaaatatgataatctagaacccaattatttattatatgtttactatttcaatattattatctaaatccacgtctaatttaaatagcaaaatcctcgaaaccatcacgtaaataaattctcaacaattcagcagcctgtgtcatcgataaatcat

SEQ ID NO: 4486 - DNA, 653 bp, Gossypium hirsutum
aatttggtccacgatttccttttgcttaatcccgacagcaatggctaacaagtttgaagatgtctcaggattgacctgaaatttcagtgtatagcacaaaagacaattgaataagatcaaatcgtagcacaatgtcttattccagaaattatttttatgcatacgtttttcacactgtcgctccataatggttgcatttgcaagttcgatgttttgaccacgattccttgaggtaatgcttcactcccaggtggcctgcattgattctgtaagggaaaagaaacatattttcaagagattacgaatcggaaaaacatttcaaaagacttgatcaactattctaaagacaactgaccttgcacgtaacagattttgaattccgaagcatattaatcacttcccatctcgataatctctgtatacaagcatattaatcacacccatgacaaaaaaatacaaaaattgaacttcaaacgaaacgattacaaaaaggagaaacacatacatctttgtattcgttagtgataaatgcattactaatgaaataagcaccgcagaccaaagctgctacgataaagagactgcggaaacatgccctattcttcggatccgaaactacataagcctacaaggtaatgaaacaacagtcaagc

SEQ ID NO: 4487 - DNA, 515 bp, Gossypium hirsutum
ttttttacaaggccacacattagaagggtaagcataaaattcttcggagcctttctacagctaggacaaatgggcgatgaatttaatcttctgttgtagagattagttgcagtaggaatgtactcatgtgtaaatcaccaaatggcgattccaatttttggagggagatttagctctcaaatctactgtaaaatcttttatgattggtacttatagtgtcgttgatgttcgattcgacaagacagcagtaaccactgcataccgtatacatactagagttatctgtacagcacaccattttatcttcaattgtgtaaattgaaagaggaatacaactgattgcatgagcttccatccaggtaagaagactcttaaaaagttccactgtccaagtctttgctgattgatcaataaggtctgatattttttcaataccattttttgcggtagtagcttaaattccccctcccccctatttcacgtgaaaggttcaaggtctggagacagcctatggc

SEQ ID NO: 4488 - DNA, 582 bp, Gossypium hirsutum
  misc_feature (347)..(347): n is a, c, g, or t
  misc_feature (470)..(471): n is a, c, g, or t
  misc_feature (473)..(473): n is a, c, g, or t
  misc_feature (543)..(543): n is a, c, g, or t
tttttattttcttttcagtgtttggtagataagaaaatgctggaaaaaggaaggaaatttggatgagtgtggatttttttggtggttttttggggggtttgagcttaccaagaagtaaggaaatttgggtgatttttcttttttggagttgttttgagctaactcttcattgtttggtaagagaagagtgaagtagaagtttgagctcagattttttttctcttttttttggtttcctttttttagacgcttaatctggtgaccttggtttgcttcggttatatttttttttttttgatatactgtaatttcgtcttcggacggatggaaagatttgaaaaaatttnatggtttgattcttgatttagtttgttttcaggttttttttttttttttttttaaaatggtggggaaaatggggttgatttttgggtttagtttttaaaatttggttaaccctttggtttccnncncaaaaaaatatttgggggaaaaaggaaaaggggaattccccccccccccccccccccttcgggtcccttnaaaaaatccttttaaaaaagggaaaaaaaaaaaaaattt

SEQ ID NO: 4489 - DNA, 616 bp, Gossypium hirsutum
atttcaagagttgaccagacctaagtaaacatcttggattctagaaacttgcctccaaaatataaaaatgaagtaaccatttcccagctgcataaaccctaattagcgactatcaattctagaacattttatactgctccaaaataagaattcccactctcacctcaatcattataaatatacatacaaaactccaaaaatgataatgaaatacatagaaatgaatgaccatatcacttgataatttcaattgttttgcctttcaattttgatttcaagttcaactgttacaaagattcctcgatatcaatatgttatagcaggctcacaggaaacttaaatttctctaacaaaaagaaatcataatgcattggaaagctctttctccaaacaaatttcagtgcatattgaggagaacaaaagattaaaactacttatcaaaataagtacaagagggaaaggcataagagaacttaccactggagttacgttgctaaatgttggtaatccatgcataagatggctccatattagttgccaaccacaatcaaactgcagtttttgtcaaataccaagtcaaaacagctaaaagagagaactcgtccaaagcaaagat

SEQ ID NO: 4490 - DNA, 286 bp, Gossypium hirsutum
  misc_feature (257)..(257): n is a, c, g, or t
  misc_feature (259)..(265): n is a, c, g, or t
  misc_feature (267)..(269): n is a, c, g, or t
  misc_feature (271)..(271): n is a, c, g, or t
  misc_feature (274)..(274): n is a, c, g, or t
  misc_feature (276)..(278): n is a, c, g, or t
  misc_feature (280)..(280): n is a, c, g, or t
atgtacttcgacttcccgccggcattttaacggtggagggggtggcggcggagggattgtattgaacggcgattcgttaccactttcgacgttctcttcgacattgttgacgtttcttatcttgactggcaaaggaggtttctggatcgtcgttacaggtggtttattgggttctcttttcgatgcacgcgcttccattgacggtggcagcgttggaggtggagaggttgaatgatgctttctggctttgttttttntnnnnnnnannntnttntnnnangacggt

SEQ ID NO: 4491 - DNA, 521 bp, Gossypium hirsutum
cattgtcatccttagctgaataccttccacttttgattttctggaggtaccatcttcagctccagtgattaagttgagcaccttttcttttggccctatgtgcttagtttcatctcgacgatgacttgtagaagcagcttcagatgcacttggcttctcatctgtttcacgtgcaattctatcctctttgaatttggcagatacttctaggtaaacacagaaacaacaacgaaaggaatgagaaaaatgtacgcttccagcatgcatgaagaaaatggactggaagaaacatatactgcataagtataggaagataagtgacaagaaacccaataccgtatactacatttaatcagtaaaaactgaagtagaagcaattgacacctaccagattctataattgatgctggagatatagatgtagacaaattagctaatgccagtagggcatctagggaagcgctctcatctacatataaaaaggaaaaatttgaagctgagcatgtatgtcagagaaaaac

SEQ ID NO: 4492 - DNA, 759 bp, Gossypium hirsutum
  misc_feature (625)..(629): n is a, c, g, or t
  misc_feature (728)..(731): n is a, c, g, or t
  misc_feature (733)..(737): n is a, c, g, or t
  misc_feature (744)..(749): n is a, c, g, or t
gcatgcgtccaaatttaatgacggagaagagatacctccgttagtggtatggatataattgttgtgtgtgttggtgttctcattctttgtgcacatttcagtagtgttttctattgggttttgctaccctaagggcactctttaagattatatatatagtaatatcttcacccaatgcattgaaaatgtagatgaaattgtcaaccactgcatcaatacaatgttagtactacatataactagtacattaatgaaccttaaaacagtgctggggcagtgttagcaaaaaagccctgttacatttcattccattaggatagtgaaagagcagtgcaggtggcatacttgaccggttcttttaatcttgtggaaatggcagattggtttcagtgcaccacagggttgtgggaagaccacacttgtatttgctcttgattatcttttcaggatcactggcaggtagcttgaagggcattggaatttattaagtagaagtaattcgtatctggtttagtaacgtaaatcgagcaagtggaaacaaatgaaattactaacatccaccataatctcaggaactctgcaacattatctatagatgattctattgacagcaggaggtcaatannnnnagagtcatctatagataatgttgcagagttcctgagattatggtggatgttagtaatttcatttgtttccacttgctcgatttacgttactaaaccaannnnannnnnattctannnnnnaaattccatg

SEQ ID NO: 4493 - DNA, 633 bp, Gossypium hirsutum
acaaaacttactggatagcagcgcatcatatatagcaggggatttgaagacaggtctagcccatcaacatggtgttgactgaacacagcaatgcgaacctgtttgatataataatgtcagtttccttgagcataacatgtcaagaccaatattagctttcactaatgcgacagttgatgtagtaatgtcagtctccttcaaccaaacatgtatacaaccactagtggtttttgttcagctgaccagttttgttatcaatcatgtcacacaatgtcagccccatttaaaatgcaaaaatatatcactttccttgagcataacatgtcaagaccaatattagctttcaccaatgctacaattgatgtagtaatgtcagtctccttcaaccaaacatgtatacaaccactagtggtttttgttaagctgaccagtttgttatcaatcgtatgtcacataatgtcagccccatttaaaatgcaaaaatatatcactgtactttgtgtataactggtacttaatccaattttgaatatccaaatccccttataattaatgtcatttttcaccaacgcaagggagcaatgattaagccccttgtttggcaccccaatgaccaacgttcaaaccctgctg

SEQ ID NO: 4494 - DNA, 636 bp, Gossypium hirsutum
gtaaatttgtatatgatcagatgtcacacaccttaacgtcattcagatatacaaacttccatccacaaaggtgtgctcgaacagcgatatccatgtcctcaacagttgttcgttccaaccatccaccacagtcctcgagggccttaattctccacacaccagcagttccattgaaaccaaagaagttaataaacacaccattgacctgctgttcaacctcaaaatgaaacgataaatttatgttctgcaatcttgtaagcaagttctcatccttatttacaaatgcccaccttgcttggactaatgctaagtcatcatttccctagaaataaagacaaacaaatgcagatcagaagaaatgataggtaaattaacaaatcaaaagtgaaaaatagaaggaaatataagtcttttacagagaaaccaaccagcacctatgcatattagaaatgcctaaaacactgaagttacatcatccaattagcttattttgggggcaagcagtcaacttccttgtgtcggaaaagaaggtttagttcttgctcaaccgattaagtgataacagatttactactattactattaccattaccaattaccatgataagtagaatagcagctgaggaatgattagca

SEQ ID NO: 4495 - DNA, 598 bp, Gossypium hirsutum
cagtttctgctataagtaaccatcaaagtgatgctatggatattgaaggtgatgacagggggaaagtgcttgttgatacttcagaagagcgaaatatcatttctagtgaagtaactcaatgcagaattattccagaacatgtgtctttcggcttggataaaaggttaaatggaatagatgcagatgatgacaatcatcttcctctgaaggatgatttaccttccacctcaaactctttgatttctgttgttgatgctaatgaagtgtctgcaaccaactccaatgatgaagctatgcctgcacctgatatactttgtgatgtcggttctctcagtaacctagttttaagcacatcaacttgcaaaggacatctttttaattcagaagagaagacttatgacaatgaaacactttcatatgatgagcctgtaattgaaggttcttgcaactcatctgcccatgtgtcagatccacagcatagcaaaactattttgaagtcaaatgatgtaattcaaaccaatcaatcaagtgctgggaaggcaggtttgttgccatcgtatgattctgaaagtaccatttccctcaatttccttagtgg

SEQ ID NO: 4496 - DNA, 643 bp, Gossypium hirsutum
ggcaatcatgcaaaccttaccaatttagcttttgttgatgccaattacgtggcaacttcttggggatttatattcatgtaataattcattctatatattgacgtcaagtcacaagtgttactgttttcacatcagatttcatactgattttgattactttgtttcatatggtatctaaagttatgatgttgagaaagaatccgaggcaccacatggcggcaccctggtgcaatcgtggagtcacaaaagttttgctatgctactttcattttcctcaacagtccgtcaaactgaatatgatcaaattcactttcgcaaggatttgggtggaacattttaaaaataaaataaaatcattattataaatattgacatatcttccttaatcaactaattaatcaatgatttttcacttaacaaatattggtacaagttggaaattcaagaaaaaattataaaaagagaccaaaacaaaacacaaagccgccttcctcatttgcatgtttgatggcaggttgtcacccacaaccttttttcttgaaagcaaaaactcccactgcgaatttcaatggggctttgtttttcttcaaacagttgtacgtttcatagtctttacagctgagactgagaagctataggtcaa

SEQ ID NO: 4497 - DNA, 614 bp, Gossypium hirsutum
  misc_feature (6)..(6): n is a, c, g, or t
  misc_feature (606)..(610): n is a, c, g, or t
tttgtnattctgttgtcattaacaattatatttatccctcaggttttcctcagagaagatttggtacattgatcaaatgctcaaggttctttctgaggtatgtgttgtctttcatagaatcaccatatgattgggataaagatgtttcatttgtcatattccacttaattcattgatgtccaagtttctcttttgctactatattgtttattctttgagtctcatccatctcagtctttgctcctagtaggtgttgctgaacattacgttttctaaaaacttctttatcactttacccatgtcatttcaatctttgattaatgatcatgcaatgttttgtgtgtgaatacacgacataatgttgtaagacttcaagccaccacagccagtaacttgttaaggactactgttggatccagaaaagtggtcaatggtttttagacctgaagcataatagaaaagctaacactttcctgagacaaattggtatttagtcactgtttactgcatgtagaaaccatatgaaggcaacaatttaccaaaaagtgtggaattgaggtgtttagtcagtaatggttcatcttactgtgcacaatacttgcattnnnnntatg

SEQ ID NO: 4498 - DNA, 634 bp, Gossypium hirsutum
ctctctatttcctcttcttttctcctttgatgaggccattacaccatcttcaacctcatctgaagcatcctcttcattcacaaaactccatccaggtaagttttcctgcttctctgatcaaacagccattgtcatataaactttgagagatcgtattatatatgtttctccgaggctcttcagttacaaaacttgcaggccaagcaagggcttcactgtttgtccctcccatgtgcgtatctgaaatccccttgtcgttttttttaggttgctgagctaaagaggaattggtctcgattccgcaaatttggatgccaggaccttccgggtgagcttggttgtggaatgcaggcataggcaaattgcgtccattaacactattatttgttatggtcttctcattatctttcttggtactcgaaatagagtgagctgttttttccaccttgtttagaacaactttctcaaaaaaaagaactctagactcaggttgaactttacttgctgcaggcttttgacctcttgcttgaggatgagactcatcaggagaagcagacacatcaactgaagcaactgccctcttaggtctgcccctctttgatgctgctccggataagccagtctgaacagcttg

SEQ ID NO: 4499 - DNA, 638 bp, Gossypium hirsutum
gtaaagcagacgtgtaggcggatcgactcatcaagttcccattgaaataggatccacacaaggaaaagcacttgccattcgttggttattaggggcatcccgaaaacgtccgggtcgaaatatggctttcaaattaagttccgaattagtggatgctgccaaagggagtggcgatgccatacgcaaaaaggaagagactcatagaatggcagaggcaaatagagcttttgcacattttcgttaatccatgaacaggatcgatatagacacatagattcatggatccatacatctcgatcggaaaagaatcaatagaaaaagaaagaatcggaattgatcgatatatttctcgaaacaaacgaaaaggaaacgaaagctgaaacataaatcatggatcaactaagccctctcggggacttgcttaagaataagaaagaggaatctcatgtaaataccatggaataaggtttgatcctattcatggggattccgtaaatattcccattccaaaactagaaagttcgaaacaattgggattttttttggagattggatgcagttactaattcatgatctggcatgtacagaatgaaaacttcattctcgattctacgagaatttttatgagagcctttcat

SEQ ID NO: 4500 - DNA, 620 bp, Gossypium hirsutum
attattaacaattcctcacaaaaaaattgctcaataaataatagtaataatatactgttaattttgatgtttattttttgtatgttgattagggtaattttgctagcataaccaagtccaaaatcttgacatcaagactgtcatctatccttacaatgccatccgtgccatccacaccaattaacttgccagtaaccccacgaagtgagccacccatgattttgatcttatctgatttccttgggggtactatctccatctcactcggcatcacaattatggtatcgccactgccatttgatcccagccccaccttacacggtccatcctgtatttatggaccatcaattatttttcaaacattcccattacagtcaataacagtactagagtatatgccctgactatgtttcagaaaattaagagttaaaacatcataaatacccgacacatgaaaattttaaaatctatataaaatgaatacaaaagttgaacttcacataaattgtcatactttggaaacaaaaataacatatacacgataaaaacacaaatttctctaaattgaaccattatgacaaattacgaacacttatttgccctctaaattgaaccactac

SEQ ID NO: 4501 - DNA, 644 bp, Gossypium hirsutum
  misc_feature (625)..(625): n is a, c, g, or t
gcacatagcacaaaatatgttctctaggaaccttaatcaaccacaaatcaactaatgcaaccacaacaaaaataaatagaaacaccgatatttttacgtggaaaacccctctaaatcaagggtaaaaaccacgggactttagagtccgataaagagctccactatcatcaaatgttcgactacaagatcacaatatcaagcctacaacaagcattcaactccgacaaggctaacaatatgtaatttttagcaaaagagagaaatttgagagaacatcaccaaaaacgtagctgctgaaaaatgggtatttccgacgctacaagactcggatgaaaaatctgaccgtacaaagtcaaaaacaccttatcgcctagctgctgtccaaaaatcagctcaatcgaaccacggatggacatttaattgaagagttgatcactactgcaccaagcttaaaaaactgatttttctattctctctttttctccaacgagcttcaatctcactctctataataataatagaaagtctctcacactttctacccacaccacccataaaagccaaaatgactggctctcttttttttttggccaaacccaaaaaaaaaaaaacccaaaattggggncaaaaaattgggattcccc

SEQ ID NO: 4502 - DNA, 835 bp, Gossypium hirsutum
  misc_feature (654)..(663): n is a, c, g, or t
  misc_feature (668)..(676): n is a, c, g, or t
  misc_feature (684)..(698): n is a, c, g, or t
  misc_feature (700)..(701): n is a, c, g, or t
  misc_feature (706)..(710): n is a, c, g, or t
  misc_feature (728)..(729): n is a, c, g, or t
  misc_feature (738)..(738): n is a, c, g, or t
  misc_feature (740)..(740): n is a, c, g, or t
  misc_feature (742)..(742): n is a, c, g, or t
  misc_feature (748)..(753): n is a, c, g, or t
  misc_feature (761)..(761): n is a, c, g, or t
  misc_feature (763)..(766): n is a, c, g, or t
  misc_feature (779)..(781): n is a, c, g, or t
  misc_feature (789)..(790): n is a, c, g, or t
  misc_feature (799)..(802): n is a, c, g, or t
  misc_feature (813)..(813): n is a, c, g, or t
  misc_feature (816)..(817): n is a, c, g, or t
  misc_feature (821)..(830): n is a, c, g, or t
gctctagacattgtataaaaaagagcaaatataataaaaacatataatgagattgatggtccaaaaaaaatcattgatctagtgtcactaattaaataatattagctaatattaattcaattaagtaacattaaccaaaggagttgttgtcattatatctaatatttaaaataataactttaataactagtttataaactaattatttttttataattatatattaatttaataaaccatttacaatttttatcaaagattaaagtctttattaaaaaaagtttttcccaattgatgattactttattttacaaattaaatattaagtaattgttgtgtttatatatgggtttatgcattccatttttttatatatctcacatcttacctttttaatcatgtttgtgaacatattttttaaaataaaaattccaaattgattataagtagaaaaataatattttttaatgaatataagtgaaacacgcacaaaagcaaaatactatatttacagctttgacaataatcgaaatatgaagatataagtaaagataagaaataaaatctgagaaggaaaaaagtgctgaaatgattttatatagatgtgatgaattacgataatcattaatgtggcagtgatgaaatatttgggtnnnnnnnnnnccccnnnnnnnnncccccccnnnnnnnnnnnnnnncnnccctnnnnntccctttttctttttccnncttcccttncntncccctnnnnnntttttttncnnnntttttttttctcnnncccccccnnttccccctnnnnctttttttccnccnnttcnnnnnnnnnnttttc

SEQ ID NO: 4503 - DNA, 609 bp, Gossypium hirsutum
cgagatctatcggagttgtcgaaaataatggagacagttgccttagtaattccagcttggccttgcttgtaaacgagctcttgaagattggcagctcgaacttgctgcaaattggtgatacctaggacaaagcaaatcgagtccaaaatgttggatttccccgacccgtttaaacccgtaatggcattgaagaagggatcgaaaccagggacgacggtcctcgtggcgtaggatttgaacccttccaaacatatttccttgatgtacattgcgcctcaattgcgggactcggagaaggaaaatcctataatttgaaaggacaagagaaatggagagaaatcgcatgggattgtgaagaaaataagtagagatattgcaattagctttacctgggttgccctttggaggtcttcagatgaaaaaagcgagtgagttacaaatgaaggtttagcagaaaagtaagaaatgggaaggctttgaggtcattttaaattctgaaattttgagaaactgaagaaagagcgggaaatacagatgtcagaattgttttaaaaatataaatatatcgcggaggaggatgccctgggccctcttatcacttctttcacg

SEQ ID NO: 4504 - DNA, 607 bp, Gossypium hirsutum
attccttttttggtgtttcctgtttcacacatttgcatattgtgtagtttgcttattctgtctgggcacttttatcgccttatgtttggtgtccttatttgtaactttagattatgattttatcttagtaacaaaactatacctttaatgaaaaaaaatttcctgttattttctatattttatgctgcaaacattttatcatgtgtaatatttatctgcttgttatttttatatactatatatcaaaaaaattgttaatgaatttaatgattgtcatttggatcaagattaaaacttcaaaatttgaaaagtataaaaaaatataaaaaatcatattgaataatatagactaaatctaaaagatcacacgcataaaaaaaactaataacataatttaattaaataaatatatttaattgctattgttaaattaaattaaaattttaccattaaaaaaaactaaaggtaaccaaattaaaattgaggcactacatgcacagtaaaatctcacctaaaaaaaatcttttcaaaatcaaccatcttaattccattagtcatgttgaccttaattataataaaaccttactgtgctataccgaactcaaaa

SEQ ID NO: 4505 - DNA, 823 bp, Gossypium hirsutum
  misc_feature (645)..(663): n is a, c, g, or t
  misc_feature (665)..(665): n is a, c, g, or t
  misc_feature (667)..(670): n is a, c, g, or t
  misc_feature (672)..(682): n is a, c, g, or t
  misc_feature (684)..(686): n is a, c, g, or t
  misc_feature (690)..(692): n is a, c, g, or t
  misc_feature (698)..(699): n is a, c, g, or t
  misc_feature (702)..(705): n is a, c, g, or t
  misc_feature (709)..(709): n is a, c, g, or t
  misc_feature (713)..(713): n is a, c, g, or t
  misc_feature (715)..(720): n is a, c, g, or t
  misc_feature (728)..(744): n is a, c, g, or t
  misc_feature (749)..(753): n is a, c, g, or t
  misc_feature (755)..(761): n is a, c, g, or t
  misc_feature (763)..(765): n is a, c, g, or t
  misc_feature (767)..(768): n is a, c, g, or t
  misc_feature (775)..(776): n is a, c, g, or t
  misc_feature (778)..(781): n is a, c, g, or t
  misc_feature (786)..(790): n is a, c, g, or t
  misc_feature (795)..(803): n is a, c, g, or t
  misc_feature (807)..(814): n is a, c, g, or t
  misc_feature (816)..(816): n is a, c, g, or t
catgcctcctaaggtctggtcatacaactccggtggttgccgttttcatgtctctaaaggatttcctaaaaccatctatgccaggatccgaaacctttgcatgagaaggtattacattggaattcaagttcgacataaaatgatgagactgagctttcactctctgtggtataggcttcctcctatcataagtgtttgcagaactactatgagtttctgatgaatccacaaattccgcatttgaaactcgcttgtaacctctaacaaaattggatttattattacctctatcttttgtaccattgtagctaactgttgacttatccccagctgctatttcagatgatggttttggattgactttggcaatgttctctcgtttgacagacctgaaagctggggattttatatttggaaatgaccttgttgattcgaccacacaacgcccatttgagcctaatatcgtacccccatcagacaaaggaagcttataattcatcaggtcagacaagaacgatacagcttcaatgccaactttaacaaattggtcagaaatagtagctgatgcatgttcatcatgttgaatagcattagcgctgctggcagaatttacaatgttagatctacgcaacggaataggattgnnnnnnnnnnnnnnnnnnnanannnntnnnnnnnnnnnannntggnnnaatttnnaannnntccnttgnannnnnngggggtannnnnnnnnnnnnnnnnatggnnnnntnnnnnnncnnnannaaaaaanncnnnntcaannnnnaaaannnnnnnnntcannnnnnnnanaaaaaaa

SEQ ID NO: 4506 - DNA, 664 bp, Gossypium hirsutum
gtttggtttatatgtaatgaaatgttagatctctattatcttgtttccaaattggaaatttggtatctttttccttccccttattttgttattactttggttatgtgctctgaccatgtttattaccatactagatcttgatatggaaaagcttaagataagtgtttttagcattgatcttagctaagatattagctctgcagagttttgaatgatctaaattctcctttgaaatctcagatgatgatttgccttttttagtttatggagtatagttgaaccaaaccctttgtttaggccatgataagtttgatgatctgcttttacttttcattgatttcttttctttatatggtattctaatggatgttttatgtttttccaggtcttacacattatatgatcatttgttctgctaaaacttagattcatatacaagaaatgggtctctcaagtctgccatctccgtcagaaggaatgctttgtatactgttggtaaacacagctttatccatatctgtaattaaaggcatacttcgatccatccttcacgttgtcggtatccatctctcgtcgctatcaccatccccagattccatcgaaaatgaatcatttgatttccagttcagtacatctgaattttacattgaggagttccggagta

SEQ ID NO: 4507 - DNA, 628 bp, Gossypium hirsutum
aacataattttgacctatgtttctattattatctaatgtgcttaatctatgttctgtcaatccagaaagatgcgatggaagattctattgaaattgtaattgaaaagttacttcatattgctaaggatgcagtttccaaggtgccattgttttcatcaattgtttaatacaggctacatgacctaatgctacctcttctcgtgaacctaatacattcggattatgtttcaggtttcaattgaagcagagaaatgcttatcaatgattttatcagaatatgaccctttcaaatgtctaagtgtatgattacacgactttcatgaaattttgctctaattgtgaatttttatcctacttttgtctcattttcggagttgcaggttattgtagcccttttaatccatgaagatgagaaaactcttattttttgcatcaagacattaacaaaggtattgcatatctgattattatccttatgatgtcctgacatgatgaaattaatgacaaaaaaatgatttattgaaactaaagatttaaaaaaacattggagcttgttcgtttggggaagaatatgatctggttcgctttgttttaagaaaaaaattgcagctaatgtgcagtggtatgg

SEQ ID NO: 4508 - DNA, 609 bp, Gossypium hirsutum
tctacattcaacaagtttagtcagttaagtatctagcatttcaatatgattcaacaagcatacaattcaatgttataagaggtaaaagcataacatttgccactctaagtcatgtcaattgccggaaggtaaatgagcagaactgctaaaagctggtgacctttaaagccattatcaagcccaaaagaacagcaaaataaaataattcgttgtacatatcagatatagattttaaacatccgaccccagcctctctcaaaaccttccctcttctatctcgatgaggaaattacacaaaaaagggaatggaaaaaagaaacaacgtaaaatcctaacagctataattccttaaaagttacaccaaggagtataactgcaccgcatcacatgatcaaccagcaccgtttctattgaagttaatatattgaaaacggaaatataactacactgcaccacacgatcacccagcatcatttctcttgaagttaatacaatactgttttcaacaaagttataagctagttaggggtcaccacttctaaacgcataatagtagcataggagatacatgtttatgtttgacccgttctaagccaacacccttgactt

SEQ ID NO: 4509 - DNA, 617 bp, Gossypium hirsutum
atttttaacagaaagattattttactctttaatttaacgtataaatactaatttgctcttagtacaaaagtctccatggtacttttaccaaacttaaagcatttctttcaaattttggactaaaagatttaattatgtttcttcagtgttgaatcataagttacatatcatgtgttaaacacaggtaacaggtgatccagggaagatggttgctgtgcaaagaaatttaagcaagtttgggatcaaagaaattgctagaacaggaaaggtaaatgagcttgatgaaaatttctagttggttctttattagttcaaggctagtaatgcatatgtttatcctcaaatctcctattagattgctcttagaagagaaaaaatgggtgcatctgctccattctggcgattttcagcagcttcatatcctgatcttgaagaaacagtacctgataacgcttttgcaggggctagaaagcaatcagtatttagtgaggtcgatgtttctggaggggtaagcctttctgtgctcctatattctgtcattgcataattgatataccttctgctccaaaatctatagttttatgtgtttttgtctgctcatgcaaggagaacgtcta

SEQ ID NO: 4510 - DNA, 529 bp, Gossypium hirsutum
gtggaagacccattcacacacaatcaaaagtcatcataatgttggaggacttcccaaagacatgaagttaaagctcattgagccacttaaacttctcttcaaggacgaggttttgatttggtccccaagaactttacctccaaaaaaaggttttccatcctttcatttacttttcccccctttcctttggccaatttttgaaggttcggcaactcgggaggatattgaaggttcctgagccatttttgaagcgtcatccatttcctgggcctggccttgcagttcgagtcttgggtgatgtaactgaaggcaatgccttggacattgtgcgccaggtatgaagttcttacataaggaagtgcaaccatgttaccttttagcttgtgttcttttgctcatgaactttgtttttgcccaggttgatgaaattttcattcagtccatcaaagatgctggtatttatgattcaatttggcaagcttttgctgtatttttgccagtaaaatctgttggagttcagaggtgatca

SEQ ID NO: 4511 - DNA, 629 bp, Gossypium hirsutum
ggatgacttgctggtcatgaacttgctaaatttgtttggattgaggaattcacgccttacatccatcaagctatatcatttctcgatgtttctcttctcaaattcatctcagatgttattacgttataaaatccaaaaagtttgggcatgccaccctccaattttccaatgacttctaattttaaggtgaaagaaaatcgaaaattttactaccaaaaagagcccctaaatatttatatttgtctaacaagtcaaaaatcagaaattattgccacaagtccacagcccggagccataaattaaagagcagcctctgtaattttccgaagataaaaaatgaaaactagggtagtttccaattttgatcttcatttaacactgaccgctagggtgttttcatagccaccaagattagtacctaaggctcgatgtatcatcaatcacatatgtaagctaccagcaaataagggtaaaacaacttaattaagatttttttttagcacagtatagccctatagtttcacaggaatacctactattatgtgaatccagacatcagtctggaaaatacatgaaacgacatcactcatgtccactcagtatagcacctactctttacacggcaactg

SEQ ID NO: 4512 - DNA, 635 bp, Gossypium hirsutum
ttgcctccaaaacctaccaagcatagttgagccaagtcaaacacaagtatataaaatgcaacacttaacagtacatatcacaaggatgtaatacatactgtttgttttctcaataatacttcagcagataattttaagatgtaatacatgtttctgtaaagcataggtggctctaaaaagtggtattcaaaagtatgctagctcaccttcatggttggaatcgcaacattttgcacgcaatgattcaaatgcatctttttcaagctggtagcaaggagcaaagactcgagtcgatgcatgattgacggaagaaatgtgaaagaataaaatgtgctgatcgatatgggagacattactacacaacaaagctcaggaggcaattctacgaatgcgttacttgattctgcaacataaataaaaaaatttaatattaaaataaactgaaccggtatgaaaacttggacaaaacctattttgtaccagatattacgaaaatcttagtttctctacaaaaatcttccaatatgaaaatttgttcttaacagttgaattcaattgcaaagatcatccaaagctatccttactaatctcaaaaaggcaagatgataagagaccacatgcctttctctttcagt

SEQ ID NO: 4513 - DNA, 675 bp, Gossypium hirsutum
ctcggtaaatatgatgatccagggtaactctgattgatttgcacatcccctgaagcttagtagccagctcattatattttctcagacaatcaccattgtaggcaccagaaagttcagtgccagtatcagttggtatatgacctacggtaaaactttcatgaaggtgtgagagttcagaaagaacactgttaatgtcttcaaacaatttttcctcctgcttatgatctagtgtatatgagtgactgacattatgaagtgtctctttagactccaatgctgggaaaacaatatcatcctcggcattactatgagctctgtataaaccccataatagatgaaatcttccaataaactgcctaaggaatgtctcatcacaattgccaagctttccagattcaacatccagatattccaagtctttgctgatggctttatgaaatttgaaaattgtatcaattggtcgatctgctgagccaatgtcagacaagttattatctgtttcccagacaaaaagactggaatttagagatggagcggaggagctaaaagacaaagatctcagagacttggctgttaaaagagaaccaaaccccagattattagtatttactcctaaaccaggaacacagcaagacctttcattacaaggttgctcatgggcatcgacactaactg

SEQ ID NO: 4514 - DNA, 653 bp, Gossypium hirsutum
ctttgccctgaatgaggtattaaaactttaaaagtataaaatgttaccaaagtgtaaaattggatttttaaaatgctaattgtataaaaaaattattatgaaggtgaaaagtttagttctacaacctttgtaatttgatataaaattgtttgatttaattattcatatgaaactaaaaaaagaaagatgatgaaatattttaattgaattttattaagaactagcataaaaactccactaaatagaatacagaataatcaatccatgaataaacagaagcatcaaaggtaaaatgtcttgaagtccgtcctttcacctcttcaaattaaaaatttgagggtagatattctactaattaatgaacttggtccagttagattagtccaacctgtctgagtaaggacaacaaattttgtattatttaattttttttatcaattttaattataaaatatattagatttctcaaataattttttttttgtctatttatgagttatctaattaatgggtttatttatgagttaggaagctacgttttgtccattgacaatactctccaccagttcatatacatactacctaacaatgttaaaaaggtttttttttcgctagagaataatacaggggtaggtttaaaaaaaatgcaaatg

SEQ ID NO: 4515 - DNA, 581 bp, Gossypium hirsutum
  misc_feature (550)..(552): n is a, c, g, or t
cttaggtgataaatacatacatgcatggcatttttttctttttttttgtttggggggggggacatgtcattcagagggtgctaaaaggaaaaaacaatttcctctgatcacttacatcagaatccaagtgatgtgagtacgagttctctcccttcatgctacttccaatagccaaaacgccaggggactgaaactgcaaaaatagagaaaaaagatcatcaatttagcatcagatcagttatcagataaagtgcattttattgcctacaaacatagaagtttcagaatgtcgcatctataagcaatcaaaaacagtcctgaattgcaaatgtatatgacaacatacttatcaggaggtgggctaaaatgtgatttcatgcagcaatggatctatttgaagttcgaacaaaattgaatcttttgacaaataaacacattttccacataaataaatggtcaaagagcaatattcctatcagaaatgcataattttatgggaaaattttgaataatgttagatttgaggaagtaaagctctatttaaagcaannnaaaacctgattaaaaacaggggctgcttg

SEQ ID NO: 4516 - DNA, 636 bp, Gossypium hirsutum
gttgagccaccatccgtgtcatctatcatcagtgctaaaccagtgtcttatcagttacccttagaaaccgaaggggatgccataaagtctattgtgaaatgtgcaaaccatgtaaatcaaattgaagctgatagctttggagaagcctctattactccagcaattcctattgttggtctcaaaaaaggaattcttaaaagaaatcctcctggttgtagaggtatttgtacttgtctgaactgctcttcttttcggcttcacgcagagagatcatttgaattctcgagaaatcagatgctagatgctgaagaagtggccttagatttgattaaagagttgtcattcctacggaatattttggaaaaatctgcttttggtgctgctaaagatcagtctaccatgttaatcaatgtggtgaatatgaaaagaactcttgtccatatacttggtttagactagacataattatataaatttgtgctaaatttccaacatgctcaattcaggttaaagaagcttgtaaaaaggcctccaaagctgaagaagttgcgaaatcccgtctcggcgaaatgaactatgatctaaacatccattgcagaatgccagtaagtatagtttgcactttgctgtccataa

SEQ ID NO: 4517 - DNA, 650 bp, Gossypium hirsutum
agtcaatgggagctaggatcggatatatgaaacaggtgtattgggttgaaggttaatccggttccttggttttacctttgatgcaattgtttaaaaagtaaataattttttatatataattataatgtaatttttgttttacgtaacttgactttcctatttctattgatgaaacctaaaacagtaaaatttaaatattttgaaattttcaatccatatcacaaatttattgactcacaagttaaatctcaacaaaattttccttctcttctttttaaaatgttgttgatgttaacaggtggagtgacattcagtcgcagctgttgaccctaaaaaggagacattatatagcagccttataaaggttaaagtctaccataggagctatgaaataaaatttttagagaataatacgtgaaaataataaatttatgtaatattatacatataataatatattagtttcatcaatttttggaaataaaaaaaatttaactgaatgaatttaccaattatcaggattgaaaattttaaacttaaaaagtatagggactgaaaatgatcaaattaaagtaaagagattaaattcataacttttgtaaagtaaagggactaatggaagaattttaaccttgtagatagcagccaaa

SEQ ID NO: 4518 - DNA, 562 bp, Gossypium hirsutum
  misc_feature (53)..(54): n is a, c, g, or t
gacagtagctttactctctggtttaaatccttgcccattgagtctagttcttnntttttttgctgtggcaatttatggaattggtctcctactcttaccatttccttcacttggatgcatgctaattggagctaggttaatttcggtatgtattattccattctttatacagttgatgcctctcttttcacctttgctccttccttttgttttccttgggaccgcactctacttgtatgaaatagatattctaactgtacaatttatttgacattccacacaaattttcaatagataccatggtacaaaggtttccattaatatgtgttagctcaagttaaaatcaaagctaaaagtataaaatctgtgtatgttgaactggatttcgccaccttgcgatgatatttttttcctctcattcatgcagagtgcatcaggtattattttccccataatcaaagcagagggagtgagacaaatgttctttcctgccactgttccagcagtatatcgagctccgcccgttgattgatctaccccatcatggtagcgtcatctttta

SEQ ID NO: 4519 - DNA, 677 bp, Gossypium hirsutum
agcctaatgaatcgcacttatctccaggggcgaagctagaatgattttttagaggcagatgaaattttaattttttataatctatattttataatttgtaaaggattaaattaaattttaagaggccaaagtgtaattttatcttcactaatttaaaatttttaaaaaaattttaatgacataaatagtaattttacattttaggggaagccggggccctgccagcctcccttaactttgcccctgcttatgtcctttgccatcgccgtcacctttagtcactaccatgtttgctgccgttgaattctcattagaaaatcttatattagcaaccgaaatataactttaaaaaaaaaatcgaaccctcaatttttatgttcgcattgcattctaaacaaattataaatttattattatataatagattttaaatactttctgaatttttatatatttaattattttatatatattttttagattatttatatattttataatttctttctatttctataattttataattcatatgtattttttcgatttttatatattatgaattttttatatattatttctatttttaatgattattaatggttttatatgcttttgtaaaagaaaaatggtatattttgtatagaaataacaagtaaggctgttacattggccac

SEQ ID NO: 4520 - DNA, 662 bp, Gossypium hirsutum
aatctcaacggtgggtccccagtttccggatcgatttccggaggagaagacgacgacgacgacgaccgcctacagaagaagcataaaccattgcttggcttcaattcttctcgtactgatcagcattatccgattccttcggcgctcaattcggcctcctatgggtccgattcgaatgcggatggtgacaatcccgacgcgtcactcaagcgtcgcaagtttaccgccgccaagcctggatctgatcaaatggtgataaatcatacattaatatatagatttcgcgggttttttaaagtcctggttttgaaacagaatcaaaaaattgattttcctactttatttggatattttattttagggtttatattttgggaatcgaaaatagcttctcgtgcgccgaaattttatgattgcaacagagatgaacgaatgagtttgactaagtcgtgtacctttttttattggatattttttaaactttttgattttcggcaaaacttcaagttgttttgaacatagtttgtcttccttttctttcccgatttacgaattttccattattattttattatttcttgtcttggatttaatccttactttatttttgtgcaaaataatagatgcacagaccatcatgcctgtaaagcttcagtttgtct

SEQ ID NO: 4521 - DNA, 639 bp, Gossypium hirsutum
ttctttttatttcctaagaagattcacgaccttgaccgtcagattatcagtcatgaattttttttgagcggtcttccataaccagcatctgcatcctcggtgttatggtgtccttatgttatcatatctgaccgcatggctgatatagtagtttcatgcaatgcattacctcaaatattcttccattttctgcatgttgggcgggggactgaggtttgcagctagcatttttgtcaatcaattataaaacttgaaggacagtcgaaactctttgtgggaataattttcttttgaatacatgttgttaacaatatggatcctacacttcctctttgacaggtccaatcctccttgaggactatcatctggtggaaaagcttgccaactttgacagagagaggattccagaacgtgttgtccatgctaggggagccagtgcaaagggtttctttgaggtcacccatgacattactcagcttacatgtgcagattttctgcgagcccctggcgtttagacccctgttattgtacgtttctcaactgttatccatgagcgtggaagcccggaaaccctgagagatccttgtggttttgcagtgaagttttacacccgagaggtaagagttcacctgccatctc

SEQ ID NO: 4522 - DNA, 658 bp, Gossypium hirsutum
acccttgatgtcattttctgaacgtttcggagcctctcgtttgaggtatgggagcttttcaaccagggcacttagtcgtattcaaagcatatatatattatgcatgatcacatactcgaacatgattgaatactttttcagaggtcaaaattactcatggaagaataattgacaaactggtgaatgatttctccatcacttcattttttttcgttgcagggatgcttgtgtagagtttactgaattatggaaaagaaagcatgaaaccggtcagtggcttgaaattgaagcaatgtctagtcgagctgatttctccgctatgaaagagctcaagcaagcatggcccgtgatttcagaaaacaacggaaaagccggtattgagtcaagtacaagtatgtttttttagaattttcttctagataaaatgttagttcaccttttctattacatgacacgagttctgctattctctgagtaacgggaaggttactttagtattattgctcttttcatataatttgaaaagaaagatttctccgtacaatgatttgtggatacatgtatcaacatgttctgtgcatgtgtgattatgtgcattaatctttcgtctatctggccttgcttctggtgcgtgcgatagtcctaattttcaatgttg

SEQ ID NO: 4523 - DNA, 609 bp, Gossypium hirsutum
agacagaaactaaagaagatgaagaaactgagtatgaattagacaagaaatttggacgccctcatccgtttattgatccaaaagtaaagaaaccactagaggaaccacttactagtgaagaactatggtggaattggagaaagccagaaaaagaacaatggtctagatggcaaaggagacgacctgatgttgaaacagttagtgcaaaaatttcttttatctttgatagaaattgcgttcatctctaaccaagcagcccaaaagttttttttttaaattattattttaaccttttttatgtgcttgtgtgatgtggagggtatatgtgcatgggcatgtgtgtgtatgtaaatagagagaaacggttagtttccatgtgttttcatgcaatgaaacatgtgctttcaaaggtttgaatttggatcagttggtcccccctcaatgatatctaaggcaatgatcatactcccggatgattttcatttatgcaattcaccactgttctccatatgaatgtcctcaaaatgttgtcaaaagagatggattgactttcaaatcctgatatgttcttatttgagtccattcaccagcagctctgtatctattgca

SEQ ID NO: 4524 - DNA, 605 bp, Gossypium hirsutum
tgagaagcattgggcagcaacttggaagtaaaaatgcccttaacaatgccagagctacggttgttgctgtgcagaaaatgaagcagttccgagaagttgctcaagaacgaggaattcccatggaagagctatggaagtgatggttgtggaaataacttcaccgttaccctcaattctcctctgcaatgtagatacagtacatgaggctttggtaatgtaagtcaaccaacaagatttgagcatctctttaactgtcaattataaaagttatgttactctgagcttctattagaaattttccattttcttttcatttcttgtctctgatgtttctaaaaactgagtttcttgagaacttgccattgattacttaaaaatcaagtcccttttgtaggcaatagactctttagttgttgactgttacgtttaaggaaatatagaacttgacattataatgacacacaagcataaacactgcatgaaccagcccaaccataaatagagcagccatggtcattccccctaaaagcttcattattgtcaaaagaaatcagcaatgatctatcatttctcatgtaaaagaaaaaggatccaagaccaaagac

SEQ ID NO: 4525 - DNA, 622 bp, Gossypium hirsutum
cgataatataaaaataagggcaatgaaatggagatgtaaatacaatacaaaaaaggtaaaagaagctaaacctttcatctgcttcattttctactttctcatctggctcaggctcctagcagccaatccatagaagaaagtcaattttcaagataccaaaggtgtgaagttctcttagcactaagaaagatatcctacaacggaagagtaattatagaaaatgaattaaatcaagtgtagagaagagagcaatacaaacatcttcatcgaagtcactatcaaacacatcagcaacctctggctcttcttcgtaattgacatcattctcctcctaaggagagaaccacaaacagaaaaaagggttaatgcctgtgaatcctttaatcaaaacctaaaactaataaactaagtagtgatcataatttctagctactcccaatattgtcgctctaaataaacactttcagagtttgtacgaatttaaggtaacatcaaatcacccgtattccaatacatcaacatcaattctataatctaagaatatggtgagagtattttcacttagaataagtgtgtgcttgaacctcattaaaagcttcttgattccaaaacactcgtcctc

SEQ ID NO: 4526 - DNA, 633 bp, Gossypium hirsutum
ttaaatatgaatttggtaactgcaaacaagatgtttaactacattaaaacctagagcaaaagtttttcacatatccaggccaaccttatgcattccctactacactggacggctacattgttagaccgatggagcaccattggcaaaaagtaaactatatgatagattcaactttctcattccgtatcaagcaaatttgcacagcatggggaagaaagatatttcagtttctgaatggtctaactttatccttccttaacacacaggctaattcattgtataaagcaaaaacaagaaattatttgatcatcattaacgaataataattcattaaatgacaccataagaagcaaccctggtacaagaggttttaacctagttccttaggttagaagtggggcaaatggttacagatcatgttataaaagaaacagatcatttcaggggacccagtggaaacacaaaaatgacacactgtaagagtatcagttattgtactacctcagtggttgagagaacatcctgctccactgaacgtgttgaggtcaccaccaacttgtcctgccaattgctggctcgactttgaatcctgaattgccattctgatccaaccaaagctaagtccagcattgg

SEQ ID NO: 4527 - DNA, 590 bp, Gossypium hirsutum
taggtcataaaacaacatgctcattgctcttagagtatggatgtcacacatgcctggcaataaggtctgttgcagctgacggagaaacaccttctcctatcccgacctaaatttacaaaaaaggcgattcttttcagagttgaggcatactaattagcatttaacaaaagaagctccagcataattgcaaaaacaatcataaacatatcaatgagcaatacattaaacatctgaacagcttgagtgacactttataatcaatgatataataatataatccaaggttcagtataatcagaacacttctagttaaaaaatcaagggatttaaataaatgaaatagtaatccaagcaataaatagataatgaaaattgaagaaaaatacaaggaaaaaaaaaaacccaacttcccaaaccccaaaaaaaaagaatcccgggctggatcccacttaaaacgggaaaaggggtggaacccagggcccaacccggaaccccaatctaaaaaatttttcggcttaaaaaaaaactgggagggaaaaaaaaagaatattgggaatggtatcaaaacttaaatttcccggccctccaaa

SEQ ID NO: 4528 - DNA, 640 bp, Gossypium hirsutum
  misc_feature (632)..(634): n is a, c, g, or t
cttggggaggaaagtgttgctcggaagcgtgtgaaagagtaaaattattgtactaaaaaatcacactaagttcaattcccaggaaagagaggtgaatcacgaggatcacttaagtaccaagtctttcctagccagaatatccctctatcgtaatttaatagcacaataaatcactacaatcacattcacaaaatatgaaaaataaatagtaaagaacaccagaatttaacgaggttcggcaaatcttgcctacgtcctcgagcactaccaaatatatttcactccaaaatacaagtgaaactttacaaatagggagagagaacaatgccttaagtagagaatggcaaatgcgggatgattagaatgagcaaaggttaggcctatttatagttgaggttcaagggccacctagcaaagtccctatacaatttgggaccaaaaattgctattatcccatgcccaatactaaataaatatttggtgcccataactttgacctttccaaggtatgggcaaggaatggagtatattctaataatctccaccttgaagatttgattaagatgatcttatcttcacacaattctttctgtctttgacaacaatacttgatagtgccttcttcaactgtnnnactttg

SEQ ID NO: 4529 - DNA, 609 bp, Gossypium hirsutum
ttcgcactattctttctctttcggtcatgaaaggttggccgttaagacaagttgatgtaaacaatgcctttctcaatggtgagttgactgaggaaatctacatggagcagcctccggggtttgaagaagttggtcctaatggccagcagcttgtgtgtcggttaaacaaagctctatacggattgcgccaagcacctcgtgcatggtttcaaactcttcgacagtatctagttggtcagcttggtttccatgcatccaaagctgatccttcattgttcattcgtgctacatctggaaatattcttctattcatggcttatgttgacgatatagttatcaccgagagttccaatcaagagattgatgaggttgtgtacctgctcaatataaagtttgctcttaaagatatggggccactcagttttttcttagagattgctgtccagcatacatctcaagggttatttctcagtcaacaaaagtacattggagagattttgtccaaaaccgagatgtcaaccgcagcacctacaccgacacccatggtgagttttccaaagttggtggcagaagatggtagctcaccactggctgatgatcatttgtatc

SEQ ID NO: 4530 - DNA, 612 bp, Gossypium hirsutum
aaactgcatttcaattttcattaatttctaatacaaagttataatgaaaaaatgatgtaaaattcacaaaccatatgtaaatgacctaaccataaggatagaccataactatgtaaaaaattcaagtcctgaaaagggtacacgagtggagtttcaaggtgatatgataaggaggaaaaggagggcaaaacagtcctcacatcaagagcaagttacattcacatgtccatcaatcccaagaattcttaaaatccataaatagtcaattttactttgcaatatcattaaccaaataggtacttcagcaattggagcatctcaccaaaacgtaattttgcctccaatagggccattcagttaagaaaagaattatgtccaaccatgagccaaagtcaaagttcacaacttggaagcaaaagattataagataatagttataatttgacacaaaaaagacaacaaagagtaggatgtaaacacaagaaaacaacagtaggcagtgagatattatataattcacaaagtttggaagttcaaaaggttagtagtcagataagctcagaatttagaatatggcttgacattcccataaaatcagagatatcaagtttg

SEQ ID NO: 4531 - DNA, 576 bp, Gossypium hirsutum
  misc_feature (295)..(297): n is a, c, g, or t
  misc_feature (557)..(559): n is a, c, g, or t
gatattgaccagcaaaagacagagtcgcttacttcagcagaggaggggtcgtacagggcaggggattacatcacaagagcaacctttcccttctgttaatagttttgaagctggtgatgctgtgaggcagatgaatgctggttaccagaaatctaccatagaccctaatgccggtcaagtttcaaaccaatcttctgctgcttactctgtggaaagtttgacaactgatgcttactgcacaggaatttctcaaaatggccatttggttatggcagcttccactgatgtcccatcnnnaaatgtgcatggagcatcagaaataaatgcttcaaatgcagttgattctgacagcaatgtagttgggtcacataacactggtcttccaacacctgctcaggttgttgtggagaacacacctgttggttctggtcgcctactttgtaattggcctgaattctggcgggcttttaaccttgatcataaccgtgcagatttgatctggaatgagcgtactaggcaagagctgagggaggctttgcaagctgaggctcacaagnnnggatgtgagaaggggcg

SEQ ID NO: 4532 - DNA, 639 bp, Gossypium hirsutum
cagaaaggaatcagtgcaaagtccacgtttatcaggtggggctttgcctcaatctccattatcagcaaaatctggggaatttttaggtggtcctgtaggacctcactttggagctgttgcggcaaccacttcccttggagcgactgtaaaggagaagggagctgttaactcagtacctgctgttggaggtaccccatctttgacttcaagtgcaaatgactctatgcaatggcaacaccaggctcaagctgttgctaagcgaagatctaattccctccctaagacccctgcaatcaatacggttggttctcctgcaagtgttagcaatattagtgttccattaaacgcaagcagtccttctgttggaaccccaccttcggttgatcaatcagtgctcgaaaggttctcaaagattgaaattgtaactatgaggtatgatgccaatgaattatttatccattggagttttttgattgatttctagccatggaaaaagtaagtttgtgtttccatgctgtatatagtgttagcatcatcctttcaaactttacagcaggctagtgctacctcttctttatatgaaacttgctctacttgcttttttaatttgtcctgttggacagtgaacaccataacatg

SEQ ID NO: 4533 - DNA, 574 bp, Gossypium hirsutum
  misc_feature (160)..(160): n is a, c, g, or t
  misc_feature (163)..(164): n is a, c, g, or t
attaaatcacaaacaagtgtgtcctagaaacagggataggctagcaaatctgaattgattccaattcaaaaggaacccaaaaaattttgaaaacggggctgggattaagtggaatatttggcaaccatccttggctttaggttggaactataatactatnccnnttctcaaaaccccaggtcaatagccaagcaaaccgaaatacccaaaatcgtttttttcaagatattgactctgattataatctccaaagacgctatatatatataatcatcccatcaatcaagaaatgaagaatacaattattttgtatcgaaaaatagctgacccccaaagttaatatttaaacttgatagctcgctccaaccagtatcgaacaggcaaaaaggaagctaaacaaaagatacccatcaaccggtttaccatcaaaacaacaaaaaaactcttctcttttccaaaaaagggaaaaatgtacagaaagagctgaaattgtaaaaagaaaataaaagtatccattggcgacagagaaaatagcattaaaatcagaggtttccacattaaaacatcgtgccac

SEQ ID NO: 4534 - DNA, 632 bp, Gossypium hirsutum
gctcctctcttaaaatacaaaattttctatttaagttgttttataatttataaaattttaaattagtaatggtaaaatttagttttagccccccaaaaatgataaaaatttaatttaatcatttaaaattataaagatataggctattaaaataataaaattatatttttactattgtaaaaatatacgatttaattccgctcttcaaaaaaaatttctaatttcacctctaacttgaatatggattttggaaggtttaaccacctgataaggcactagtgttacctcgaaaatactgagaatagtaccagggtggaggaaattggtaatattgaggataagttgcataacaagggtattgagaatcatgaggctgctagggttcttgaggataccttgatgggattggttgacgttgtctactgctaatttgaggttggttttagatagtatgtggttggttccatgttgggtgttgtttgtcttgatttctttcttcaatgttttcgaggtggttagtggttgattaagctatgatcacatattcagtatacattcactataccaattgttgatattaaagattaataaggcaagaaatgaggatgagagatgaaattagttcacttgtg

SEQ ID NO: 4535 - DNA, 631 bp, Gossypium hirsutum
  misc_feature (622)..(624): n is a, c, g, or t
  misc_feature (626)..(626): n is a, c, g, or t
cgtttcatccaatctgtatttgcgtcagtcaaatactgcatcaagcctatattctcataagagaattttatcaatgtttatcaactagcaacagttaatatgagcagtggattcagcacttcttaataatctttcgtgcaagcaccttgtttgcatgttaccacaacaatttcaactatcactgatcggttctgcatcctagctccattctcattgtcatccacgggtctattctaaaactataatttctttagacagattcaaaatgggatagcaacttgactacctaaaattataagcataccaatcctcccacaggaaaaagctaaagctgcaaagaaatcaaggctcattatgccattctatatgtctgctgctacagtgcttccatatgagatgaataagaatatgaataagaatttcaagcttataatcaacattgataagaataagcaaattgaattcaacacccttagcttttctgaccaaaacccaaactttatttgtttctgcccaaaatgcaagtgcattcccccccccccccaaaaaaaaaaaaaaaggggaaaagggtgaaattttgaaaaattttgaaaattttttaccaaaaaaatgggggaaaccnnntnaaaaa

SEQ ID NO: 4536 - DNA, 597 bp, Gossypium hirsutum
  misc_feature (18)..(18): n is a, c, g, or t
  misc_feature (508)..(510): n is a, c, g, or t
  misc_feature (538)..(540): n is a, c, g, or t
  misc_feature (553)..(554): n is a, c, g, or t
  misc_feature (558)..(560): n is a, c, g, or t
  misc_feature (590)..(590): n is a, c, g, or t
ttcttctagttgcccagnattcttcggctttgtgtcaagtacatgaataactgttcaaaatgaatcaatatatattattacaacgagcaaccaacacagggtgcatttcagggattatttcaagtgacttgaaaatgaactagccttcaaattttgatttccgatattccaaataattgagaaacaactattgatctaaaatccaaagttaaggagcaggaagaaaaggatggtttaaatattttagcaataactgtatgatgacggaaaggcattgtttgactcaaacttactaaataaatgaatgaatatgaatgaatggacaactttatagtgactaaacttagatggtaatacctgtagatgtgttcaatgccatgaaactaatagctccagtcactccatttttttcccgggaattcctgcaattttacggtctcaaaattagcaccaatcattatattacctacaaagtctaaaagtgcattaaatagtgtctcaactcgtnnnggaaaataaagaaggaccaaaaatcccnnnctcccctactttnntacnnnacctagaaccacttgaacaatggaacaaanacttcct

SEQ ID NO: 4537 - DNA, 455 bp, Gossypium hirsutum
atagtggagatctatgttttctccatttcttctctgtctctatcaatggatagatgaaattagagaatctcacattttcggatttagaatttgtgtttgttagagtataatattgttttttataactttgaagatttaatatattttcaaaattgtctttcgactttaaagagagtctagaatatctcttaaatcacttaataatgaatacatgcgtattaacagcaatgctcatatagaacaaaaatcctgtagggtgtgttgattctttagtggcacccaaaaacagggacgacaccaaaggcaggagcttaagctatgaaatatcagtttagtccctcctacatgttttccattttagtattaaattttttgtcccttggaatctaagccattactccattatagatttgagtcgaaaaagtaaaaagagctagaaggattaattggcaaac

SEQ ID NO: 4538 - DNA, 628 bp, Gossypium hirsutum
atcagcacttaatgacccgaaatcgctccttgataacgagactctgaaacctcatagcgtgtcaggtgatagctttggagggcaatcaggtaaaagtcctgttggtggtggtggtggtggtgaggttgagaaagaaagattggaaaaaaggaaagatgtgaaggagataaaagtgcgggaagatcgagataaggcagtggaatggacaaaggatgatgagaagcatctaatggatctcgggttaaccgaggcggaaagaaacaaaaggctggaaagtttgattgcaaaacgtagagcaagaaagatgttcaaaatggcaattgagaaaagcctgatggacaagggtattgttccccataatcatattgctcccattctaatagttaaaaacaacattcttggttgttcaaatcatgctaatgaagaagtgttacaaatgcctggttctgctccttccatcttgttgcctacacagaatccatttgacttaccttatgatccatttgaagaaaaaccaaatcttacgggtgatagtttccaacaagagttcatggctgtcaaccaaagggatatgcttttctgcaggcacgagagtttccaccatggacctttgtttacattcgaaacc

SEQ ID NO: 4539 - DNA, 612 bp, Gossypium hirsutum
ctcttaattgatagaagaatagaattctacacatttcatttctcatttcaatgatatacatacacttatgaagcccgaaactaactcctatacatcaagagtacaacaaaacagaaaacaagaacaaagaaatttgaaatctcctatatatcaggagtacatcaaaacaaaaaacaaaattaaaaaaaaaaattgaaatagaagcagatttgatgggatcccataggaaccggtcttgtggtggaaatcttctgttaggcctcttcaagatggatctcaacaatagagtccaatcttgtcctaaagaaagagaaagcaagtccaagggagtggttttgttaaaatattagcgagttgatcaacgaaggatacatgtgcaacccgcagattaccattttgcatttgatcacgaatgaaatgaaagtcgagagccacatgtttcattcgtgaatgaaaaactggattatagcacaattggtttgccccaatattgtcaccatatatcaccgagcatgtagaaggttgaagaccaagatcatttaacagagagcaaacccaattcatttcaacaatagtattagtaacggatcaatattcgacctcagtggaaaa

SEQ ID NO: 4540 - DNA, 659 bp, Gossypium hirsutum
cacataaacaatcgttgaaaagtgttcaatttagtcctcaaagtatgacttgtatttcaaattcatctccaaagtttaaattgtattaattaagtcacaaaaatatcaatatcatatctattaaattattccattaagtcagtcattaacctaaacattaaaggtagctcaaatctagcagtagtatattaaaaccccataggtcaaattataaaaccttgaatctatatatttataaaaaggaattctcttaaattttattgatgtttttttaaaaaaaaatattagatgtaagctattcatgctaaaattatatatatgcatttaaaattttataaaaatatttaaaatacatttcatgttatatctgaatcaatatttattatttaaagtgatggctacacccgcaaatgaatcttaatgacataatactaataatttgagaatacaataattatttgaaatatagggatgaatttaaaatttgatcaataaattaggaatattagttgaaacttgaaattaagtccttcgtccctcgttcctgctaatttagtattttgttagttctggaaaactgacactaaagtaaaaaaagactttgataattaatcctatattttatgttttcagagtaaaaaatcacgtcagtgcgtttc

SEQ ID NO: 4541 - DNA, 597 bp, Gossypium hirsutum
  misc_feature (539)..(541): n is a, c, g, or t
  misc_feature (566)..(567): n is a, c, g, or t
  misc_feature (583)..(587): n is a, c, g, or t
aggtgtaacaactttcttcagaaaagcttcctcctctcctccataggctggctggatattctctctagtcagtggactgacatttcccgccagcataccataaagttcaaatgccatctacagtaaacaaaggatagaagcatttaatatctacaaaattaaaatagatctgggaaagcatctatcagaaaaaattattgccagaaacacaaaccaggtaacatacacattacataaattcagtccaagacaagtagaagaaacaacattgaaaacgtcactatgtacggaaacaaattacaaggctagtcttcttttattaacattgacaagccacatgttgaggtgtccatggatcaggctaggtcacatatgctaaacctttcattttaaaagtcaagactgagacaggcttatcaatttacataccggttatgttaaaccaataaaatattgtattattaacatttcaaaagaagctttctaattaaaattaaataaacatgtttttacttataataaaaaaaattcaggatggnnnaagcctaaaaacctatgtccaagcnnaaaagcataaatcagnnnnnggctagcgcc

SEQ ID NO: 4542 - DNA, 366 bp, Gossypium hirsutum
catatgatatgttctcctcttaggctcgatacgtacctttggacgtgtctctttgatagaacttgcacctaagtatcgtcatagggagcgagtagtgcccgcatgttctttgcgctccacctcatgaggtcgccatgtcggtggggtgtgagagacaatgaggtgatccatctcacgactcacacatctctcttgtgctccacctagccaggtcatcatgttgatgggatgtgagacgcgatgaggcagtccatctcgcggctcacgcatctcccttatgctccacctcgcgaggtggcaagaagcgatgggaagatccacctcgagaggagggtcggatttcgggttgtgaagtatcctataaga

SEQ ID NO: 4543 - DNA, 908 bp, Gossypium hirsutum
  misc_feature (190)..(190): n is a, c, g, or t
  misc_feature (336)..(336): n is a, c, g, or t
  misc_feature (503)..(503): n is a, c, g, or t
  misc_feature (829)..(829): n is a, c, g, or t
  misc_feature (872)..(872): n is a, c, g, or t
  misc_feature (883)..(883): n is a, c, g, or t
  misc_feature (891)..(891): n is a, c, g, or t
  misc_feature (904)..(904): n is a, c, g, or t
attaacaaaaataatagacaaaaaaaaatatcattgaagacaatgtgacattgattgagtatagttgaagttattttcgtcttttctccctttttggagtaattttttcgtatttataaggtacgattctttgatgtgatgtgttaaaagataataaagtgccatgcatatgatatgttctcctcttagnctcgatacatacctttggacgtgtctctttgatagaacttgcacctaagtatcgtcatagggagcgagtagtgcccgcatgttctttgcgctccacctcatgaggtcgccatgtcggtggggtgtgagagacaatgaggtgatccntctcacgactcacacatctctcttgtgctccacctagccaggtcatcatgttgatgggatgtgagacgcgatgaggcagtccatctcgcggctcacgcatctcccttatgctccacctcgcgaggtggcaagaagcgatgggaagatccacctcgagaggagggtcngatttcgggttgtgaagtatcctataagaaatatgcaataatttttgaaataaaataaaaattcacgtgatgcatttctaagatactgaaaatcttttgaaaatcttaaaacaaaaataatcaaatttaaataataaatatttgatactactaaaaaaatgagtattaactaatatagctaatacaggtcgtttttattaatgttgatatgtactgatatcaatttattttagtatatagtttcaaatttatcgttattttaaaaaaaattgatatatgtataaaatatttacaaatatcatataacgagactaaataaatctcanatataaaattctcataaaaataaagttttgggtgaagtatctnaataaatttanattatggntatatgggttaantctc

SEQ ID NO: 4544 - DNA, 610 bp, Gossypium hirsutum
atatacatatatttagctcgttccattcatgtacatatatacatacataaatacatatatgtatactcctagtaacactgatctttcctaaaactaatactggtgcagtcgtttcggtaaatttgttgagattcagtttgataagcatggaagaatatcaggagcagccatccggacttaccttttagagagatctcgtgtttgccaagtttccgacccggaacgcaactatcactgtttttatcttctttgtgctgcgccagcggaggtatttttgttggtttcttatgagatcatctgactaatggtgaatattagccatattattttttcagtgaggtttaagttaccattgttaacaggaagttgaaaagtacaaattgggaaaaccccaaagttatcactatcttaaccagtcgcattgctatgaactagtaggcgtaagtgatgcccatgactatcttgctacaaggagagctatggatattgtaggaattagtgagaaagagcaggtatatatatgtatataactcttatacctgcaagaattaaggtggttacttatgatacaaaaacaggactgatcatcctcgtatcccactttcaggag

SEQ ID NO: 4545 - DNA, 616 bp, Gossypium hirsutum
  misc_feature (544)..(545): n is a, c, g, or t
  misc_feature (547)..(547): n is a, c, g, or t
gaagggttagaaacactctctggtgtaatgctgcacattgtggaagccaataaaagaataagcttcggatctgtagttaaagaacaaaaacacaagcgaatcaatagcaaagcaagaaccacccatttcttagaacaagtcgattaatgaaaaaaaaacactaaagaagaagaaaaagaaccttggataagttatcggcgccgagatcagcatcttccaacgccttcttgcctgcaacaatgcagtacctcaagcaatcgtcaagcctcctatcgttctttccatcaatgtaactttcagaagtgaacccccggatctgaccggcgaaccgagtaggaaacttggaagcatcgaagcggtcgatgattccgatcccgctctctccagccagcagcttttcatagtaagcatccacatcgttcccaaaaacggaaaccaaccccattcccgtaataacgacccgtttcttggggtccttctcgcgcttgggagctgaaacagtgggggatgaagcggtaatggaagagaatttcttggcaggccnngnagggagtgttgatacattgggaaaatggggattgggtttggggtttttaaaaggttttaaagaggaagg

SEQ ID NO: 4546 - DNA, 561 bp, Gossypium hirsutum
ttgatgaaaaaataccaagatatcaagctttccgaattgtgttttgacgaaatccaccaaagaagcaacactagcagggtctgcaacatcaagctgatgaaaaactacattatcagacaggccaagatctttcagcttatccacagcttcaagacccctcttctcatctctagctgttaaaacaaccatggttccttttgaagccatctgcttacatatttccaatccaattcccttgtttgcaccactaaccactgcatatctgagaagaaagttgaagaaaattggttcagagagttgaaaacttaacatatatagctggtgtgtgaagacagacaaaaaatgcagtacctctttgttacttctgccattgatattgtggagaaagtagagaaaaactctctttgctgcatatagatcttcctaaagcatttttcgtttctatttgtcagggctgccatacacaaaagtgataaagatagagtattgttaagagttgccgaatactttgaccaaaataaatttgggatggttatgaaccacctcaaaccaaacagatct

SEQ ID NO: 4547 - DNA, 624 bp, Gossypium hirsutum
  misc_feature (209)..(209): n is a, c, g, or t
tatatatgataattgtttaatgtatgaaatttggtggtttcgtttttgttgttaattatttgtttttgtcttctgagttgttttttatgaagatttcttgtactatttttctaccatataataatttaaacgtataaaccaaaaatattgcagagtaattttctgctttctttttttctaggtggtcctttgttgggtttttttttccnaaagttttgtttttgattatttgttaatgcttgggcatactaccctccaccatcccatttctttctcccacattttgcagcagttgcagtcttccttcattaactaaaaatttctaaagggtagcagctccaggtaattcaatctcaaaagcattttcaagtacctaatttgatcatattgtatggatgcctttgaaaatcaagtgttttgtctctatggtaatagcataggtgcaatgagggttaaaaatgcatgtatcgcattttgaagtttcaacgacgctaaaaacctcgaagggtgagtcttgctttacctgtatgcaatgcctttttatgcacctagttgcttgatgatgaatggaacaggtgtttgagatgtttgcaacagctctctcatgaatactccctactgaaa

SEQ ID NO: 4548 - DNA, 609 bp, Gossypium hirsutum
actcagatggcctggctcaatgtgtttctacatgtgttcgtgggcctttacctatgagttttctaatctataggcctaaaggatcctataattgatgtaatccataatgccctgaatgttttaagttgcgagttgtgcaactcaatctcagtcatactgggattgggagttgggactgtaaggagaagaaggtggtatttttgggtttaggaagatggtagtagatcatgaaaccccaaggttggaaaatgggcaaactgacaaagaagtagaagagaatgcaaatgttttacaatttatggactccatggacgcttatttgacccttattcattctttatcttcgacacttcgccgggtaagaaacatcttttcttttctttttttccccctttctccgatatatttgattcgattgataaatgatgaaatttcaactttgattagatataattagttcttcagttatcagaaacgctttagacaatgaacatgtaactcagggttaaattcattaccaagtgaaataagaagatgcattgatccaggcatcaccctttgaatcctgattgttttatctacttgtagttccctgtttatgtcacccag

SEQ ID NO: 4549 - DNA, 597 bp, Gossypium hirsutum
tgaaaagatggcaatggaagctgttgtcggtatatttttgttttccccttttaggttttgctgttttaatgatctgcattttaaatttcctccttctctactttatttagctccttcttaaccaacaaattatatgaaaggcatggaaaaggtaaaaccgaaaccagttattctaaagcaagaacgggatgaacctttgcaaaaaaaagttgcttgcaaaaaaaggctaaatcatcttgacacggccctgaagcaatgcatgcagcacctacagtttgttcggaaaaagcacaagcaaagaattcatgatgccgtaatgaaggcttcaaaaaagttcaaaaaattgaaaacaattttaaaggcccagttggcggagtctagcaaaagggttaccaagttaggagttgagaatacaaatctaagtagggctctcttggcaaaggaaaaagtgattgatgatttacacaagcaaagggctcaaatggagactgattttattgcactaatggcaaaagtagagtccacagagaaagaaaatgcttctctgaaatatgaggttcgagtgcttgaaaaggaacttgacatcaggaatgaaaa

SEQ ID NO: 4550 - DNA, 650 bp, Gossypium hirsutum
caaaagcacatgataaaagtgagaaccaaataaagcctaaacaattgaacgttatgattaaattacatcaatatagcttgcaattggagcacccatgtcctgtgcaacttcagcaagacaagcaaccaccatagttcgatcttgtggaggacgtgaagctttctgcacttgccaacaaacaaatataaaatgctaattatagaaatcataacttcatacttgacaattatacccaccgcaaatttcatcaaaggttcaaatagttttgcaaatataggagcaaagtgataacccattgacttagcaaatgcaggtaaaaggtccgaaactgcatccataagaatttcatcatgttcagtatcatcctcatcatcaatatcactcccattctctaattgctgacaagctgattcctctcgaagcaaagtcaaagttgcatccacaagccgagacatatctgaaacacaaaaaaaggagagagaaactcactatatatatccacatctgaaagatttttgcactgaagattcccaacaggaagcagtgaactacttacaaggttctaatgccatataaccataatccttgataatatcagctatgctcatacaagcattggcaacaacttccctgtcatcgtcttcagtcat

SEQ ID NO: 4551 - DNA, 290 bp, Gossypium hirsutum
ttctgcttttaagtctaagaattttgaatccttatacttttctcttttaaaatttaaagtttaattaattacactggtcagactttaatttttaaatcaaacctttgaatatgaaaatatactatattcaaatttaatgaaactatattaataatattataaagtaactaaattatcccgaagtaaaaacaaaaagattgaatttcaaatgcttgaaaagcacagggattaaatgaagaattaaacctttatctgtttgtttatttggttatggtcttagatcaccattc

SEQ ID NO: 4552 - DNA, 865 bp, Gossypium hirsutum
  misc_feature (215)..(215): n is a, c, g, or t
  misc_feature (235)..(236): n is a, c, g, or t
  misc_feature (263)..(263): n is a, c, g, or t
  misc_feature (266)..(266): n is a, c, g, or t
  misc_feature (275)..(275): n is a, c, g, or t
tccctatctactctcccataaataccatcaaagcttgtcactaagcttttccatctcttaaaagctcgattatgttaggatttttgattcactagtaagattgtatcattgattgtgagatgatattactaagttatttattacgatctaattatgcaccaatccctaatacccttagacttttaaactttagtccttctgcttttaagtctaanaattttgaatccttatactnntctcttttaaaatttaaagtttaattnatnacactggtnagactttaatttttaaatcaaacctttgaatatcaaaatatactatattcaaatttaatgaaactatattaataatattataaagtaactaaattatcccgaagtaaaaacaaaaagattgaatttcaaatgcttgaaaagcacagggattaaatgaagaattaaacctttatctgtttgtttatttggttatggtcttagatcaccattcttccaaaaaattgaagaagatgctcaaaaccatgccaagacgatattggaattaaaagcagccatcaattcttttcaaacaaaggacatgactgaactcattaagttccaacaacatatggaagccattcttgaagttctaaccgatgaaaatcaggtcagtatatatatatatatataaacatacatgtatgtgtgtgtatatatatatatatcaaaattttaacaaataattcattattcattccatatatgcatggatcattttgatgttataatgaatatcctctatagctgaacttgtttaatcaatcatgattcttaatgcattaaggtgtaggtgcttgcaaagtttgaagatttccctatcaagaaatgga

SEQ ID NO: 4553 - DNA, 614 bp, Gossypium hirsutum
gggctgtcaaattgagagtaactggctggctggacgattttttaacaccaaagacatcgtcacatgacacgtcacttttccgtgacgtctgtaatggaaaacggtaaaaagaattattttgtgatttttcgaaagttgagtgactgaaatgaaacttaattgactgttttgtcagttacctcaaagttaagtgactattggtgtaatttaccttaattttaaatattgtatcataaaaataaatataattaaaatctataataaaattattaaaaataataataatacagttgatatttgctgttcataagagaacagaattttacagccaccctgtttagatttggttttactaaaggatttcgatagtgcaaaaagaagcatggcattcatagccatgaaccgtcattttgagacagtaatgtcatttttaccaataacaaactggcacattatttttattttatttttttactttttcaattaaagtcatagttataattcatattatatatgccaacccttttaaagggtacattgggcttgctttccgaaatacatttgtattgggctcatcttattatgtctatgtgggaaatccaagttctttctgt

SEQ ID NO: 4554 - DNA, 600 bp, Gossypium hirsutum
agtattatgttttctctaattacttcccttactattctcctctcatctaggttcactcttcaaaagctagaaccacttgttttctgcacgaggtaatgggcaatcaagcaaatggaggaagactaggttgccaaaacaatgatttttatcattagtgatagaagaaagggtttattaattaaacaaaaaagagggagaaatatgaccaaatcttgctagttttctgtatataaaactctgatcctgcgagcttgaggtgaatgtctcaagcaatagggttttgtttaacagtgatggaatcaatgtgtttgaattagctttatctagaattaaacagcaagttttcctcagtagctacggtcttcttatctgtaaattctcttaaaaatcgaaatagtttaatagcaaaaccgaaaaagtataactaagaaaagcttgaagttcgatcccaatagcagagctagttctgtgtttctaagtactaatacaagtatgaactccattaattcaagctttttcctttttctgtcaatttatgtttgcttctgattcttaaagtccttaacataggtgctatattcttctttgtacttggggtct

SEQ ID NO: 4555 - DNA, 622 bp, Gossypium hirsutum
aaaaattggaagaatatttactccaggtcaacactaaaataaaaactcaaatgtaatttgcatttcaaaagcagatgccaatgaaagctaaatccaaacctgtcgctgcgtcccctgctgtaactgcggcttctgcttctaccacggtaggggctaggtgagcgagagtaactgcgtggtctgcggctgcatcaaaagagttgtcttcaaagtaaataaatggaagatttgaatgtttaacagataaaaccgagcagaataagaaaaaccaatgggaaggatagggggatgaccttagtttctttggactgttttgacaatttctttctatatggcctcgttctccacagcggtaacacttattcttccaatccccggctttgcaatcacgagcccaatgaccatcaattccacagttgaagcagcgtcctgacccaggagtgggacctcttccagggtaatctcgagatccacctgaaccacggggcacctaaattgcaaatcaaatcagaaccaacattcaaacaatatcagctagtgagctcacagaagaatcctaggacaataatgataaaagagtcacagaaaacaagataaaatgatgcagaccagtttaaccttc

SEQ ID NO: 4556 - DNA, 609 bp, Gossypium hirsutum
aaataagaagaaaaacaatgagtatataacattacctgtggtaccacagcagagtctgcggtcatctatatgatcgacatccaacccgataaaccatgatcccagtgaaacgtcttcgttggcatacttatgcagcacatgcctgaaaaattattgtttcacaagaaacgaagcacataaaacacaaatgaatttcaaacacagataatatgatactattcttcggaggatgcaggaacttactggttaatggatatgtaagatgccaaatctttagagatggcatatagctgccccgtagcatgacggaaatacttgtttccctcctcaccgaatttccaatattcaggttcatggtatcttactcccctgttcacagatgaggaaaaagtgagaaaattttaaataaaaggtaataacttcgagcttttagttaaaaacataatattgaacatgtttggcttacttttgagcaagaaccggaccagatttcatgcaaccaatgtaaacccttggcttggaccgatgtctagccaaagttgctccaagtgtcgctgcaaaagcacatggataaatcaaatttaagaaaatgtaccaaggaaagcaaca

SEQ ID NO: 4557 - DNA, 892 bp, Gossypium hirsutum
  misc_feature (242)..(242): n is a, c, g, or t
  misc_feature (353)..(353): n is a, c, g, or t
  misc_feature (363)..(363): n is a, c, g, or t
  misc_feature (449)..(449): n is a, c, g, or t
gtccagtttctgctcacatataatcccagaactcaatggtacatcattccctgctctgctattgaatagcccaggtggtctcatatgaccagtaaaaccacttatttgataacaagttctttaattcgatggttcaagctatgcggctttacaaccagatggtcgtttcaagatgctaaactcgatcagatgtgatagtaagaaaataagaagaaaaacaatgagtatataacattacctgnggtaccacagcagagtctgcggtcatctatatgatcgacatccaacccgataaaccatgatcccagtgaaacgtcttcgttggcatacttatgcagcacatgcctgaaaanttattgtttnacaagaaacgaagcacataaaacacaaatgaatttcaaacacagataatatgatactattcttcggaggatgcaggaacttactgnttaatggatatgtaagatgccaaatctttagagatggcatatagctgccccgtagcatgacggaaatacttgtttccctcctcaccgaatttccaatattcaggttcatggtatcttactcccctgttcacagatgaggaaaaagtgagaaaattttaaataaaaggtaataacttcgagcttttagttaaaaacataatattgaacatgtttggcttacttttgagcaagaaccggaccagatttcatgcaaccaatgtaaacccttggcttggaccgatgtctagccaaagttgctccaagtgtcgctgcaaaagaacatggataaatcaaatttaagaaaatgtaccaaggaaagcaacaccaagaatcatttacatagtaatctataaatcccgaaagagtagaaaaactctcgatactaatttgaacttttcagcgca

SEQ ID NO: 4558 - DNA, 639 bp, Gossypium hirsutum
  misc_feature (582)..(583): n is a, c, g, or t
  misc_feature (620)..(625): n is a, c, g, or t
  misc_feature (628)..(632): n is a, c, g, or t
gcataaccaaggatgcatttccttacacttttgatggaagccgcactccggtatatattcttaagatgcttgtttctgtttcttctttttctgatggtttttattactctgattgtatatacatgatcttttatacatcctgaactgattgatttagaaaacacttggaacaacttctgctacttggttttaatttaaatatcatgaactttgatcatcttatcttgtggtgtctcaaatgtgtactgcgcaaacacaaacctactatattttttatacagggtgatatgcccctgaacatagtgttatctcgataagattttatactataaattttataagtgtgagaaagatatatacaaaattttcactcgtgtaaatatcaaaacttaaacactatatgtgtaatactgatatctagatgggtctcgtgtatatcactgtgttgaaaattatagtgatataagaacatagagtctcaaaaaatgtgtctatatataaaaatttttatgtgaattttctgcgtgtgttagatcctcccatgtgttataagatgcttcacaatattttttttcactcgannagtgcatagtgattttttttctcaattatcaagtatnnnnnnttnnnnnttatcac

SEQ ID NO: 4559 - DNA, 587 bp, Gossypium hirsutum
  misc_feature (547)..(547): n is a, c, g, or t
  misc_feature (563)..(565): n is a, c, g, or t
  misc_feature (573)..(574): n is a, c, g, or t
  misc_feature (576)..(578): n is a, c, g, or t
ttattcttctagccctagcccaagtcttatatatacgagtgtgtgtgtgtgaaacttattgaataatcctagattaggcactgacatatatgttttgttgcaatatatttcgagatatacaagttgtgactatatttaaagttgaaccggattagaccataaattgagaatagaactctctatgatgggttttcctactaaagtaagataaaaaggaaaaagaaaaacatgctgaggctcacaaaatttgtaagttgtattttagctcagcaactcacgatgggttttcgttatacttggaccaaaatgtgtaaagtttataataaaaacaaaacattgaaaaaaaatttaaggataacaacaaaacaaagggtgttggatttatctttcccctaatactatagccggttgatgcggcttttccctttataaatttttctttttgtttttgtcggaagcattaaaataatgggaagaaaaagaagaagagttcaaaacataatgcttggattgcttgttagattttaggcaaatttaaatttcaacngggtctgcatgtaaannnaagccaanncnnnatgtttatt

SEQ ID NO: 4560 - DNA, 658 bp, Gossypium hirsutum
tttcttccttgctaccttcttgccctatatatttagacattcttatgcacaagataaaaaggggaaatgcttctattacagtgagaaattagggaatagaggagtggcttctccctttgtatcatattcagtgttctaagttggcttggtaatttactattatgccagtgaatcttctatttctaaattcgaataagaaagagctgttttattttcagcaagaagacgtgcaaactggtcaacagtttgtatatttggcttctggagaaaccagttttccgcagttcactggaatcacgtctcaagcgtgtgaagttccatattcatcgagtggttttgtcatgggcagttcatggaatcctggaatttccttgagaggagggaacaaagttgacacatcgcatgaaacatcttgtacctctgatgatggcgatgatattgggattattgaaaataacccgattgaggatagtgtagttctgattgaaaaacgggatacagatcaggaacaatctgagtcagtagaaaatgttgagtgtctgaagaaaggtttcatgcccgcctccattgaggtgctggagacttctatcaccgatgtccctggagcttctgaggacactgacaagattcatgataaaactggagatgcagatcttcc

SEQ ID NO: 4561 - DNA, 600 bp, Gossypium hirsutum
gctctctatgacattagcgaaagttcttatataagtttcctttgcaaagaagggttcaatagcaccaccattgacctactcattcgaggcaagcaaaaatataactgctcaagctttaaacctgaattagggtttgacgggctcaattatccatccatgcacatccaactgaacagtaccgaatcgagaatttcagcagtgttttacaggattgtgacttatgttggattccggaataccaagttcacggcaaaagtgacatctcccaaggaactttccatcacagttatcccggaaacattgaaatttactaggaaacatcagaagaaatctttcagagtttcggtgaagggcagttcaatgaagaatgggacagatatcctatcagctacgcttgattggaggagtaacaaagggcacagtgttaaaagccctattgttatctttaaacaacagccatagttttgatgttggcattaaatagttcttagtcgattcccatttatccatttttgtatatcaaaaatcagttctttcataaatcggtcagcatagcaatatttcataaaaagcaacaaatcaaaatatggcattcattga

SEQ ID NO: 4562 - DNA, 610 bp, Gossypium hirsutum
aagtagtatcagtacagacattatattcaggttttatgaaacaaagtatctttgatatagcaaaggatatgtagaacaatagtaaaatgagcagtatgaggagctaccatagatggattaataatatcaattgcataaaaaatttacggtaagataacgaagacggtttcaagtttaaacttatcataattgatactttctttcttttacagacgagaagtaattgtaacttcatcagtcttgacatgtgaggtagccaaggtaatttgacaaatatcgttttccctttttcttctggttctttttgcatataaaagcttgaatttataagatcattgcttttggaatatgtttactaggttgtatgtgcccttattctcatggcaaaagatggtagcttaaagaaactggcaaaggaatggactttggtgggttcacttactgcatcaggtcttcctgcagcaatttatgcacttcaaaacagcttgttgcagatatcttacaggaatctagattcacttactttctcaatgctgaaccagacaaaaataattttcactgccatatttacatatatcatactgaggtatctttctcaacatgtcctttg

SEQ ID NO: 4563 - DNA, 639 bp, Gossypium hirsutum
aataaaatcaattagctcagaaaattttaaattttgaaagcattcttcaccaatcaagaatgtctcttcgagtgtcaaaaagctgccttttcagcatttaaaaaaaatccggcattctctatctcttgttgccttatggctcaatttaacatacacatttatatgtagcacttcatcaactaagcatggacaacataagacaattaaatttcacaataaagtagataagaacccaaaaaatcccctaaactaaaggtttcctgccatagccaaatatcatctagagtgagaagatattcatctgcagtcgctggaataagttaaccaaataccataagaataaaaaagatgatacaaatgcatgaaaactcaaggtagaatatagctgttgagcccaacaaaattccttgttacaacaagcaagctaggatcctgagcgcatgtatacaagaaaatcacaagcgctaaatgatgagacttctgagacagaccaagtcatagtcatataaatggcatttcaagcataacctgccagttttctactaagcccaaaaggtgatgcaacagattcgaatacaaccatgttatagactacatataaaatataaaatatatattatatatatgacctgaagagca

SEQ ID NO: 4564 - DNA, 630 bp, Gossypium hirsutum
agggggaataacatcaacgcaaaattcttccaggtgtccaaacatttcccccctgaatctaacagctattttcccctcctatatcaatttttgcagcaacccaatgctttaactaaaaaggaagttatcatatatacgtgggcccaatctggggctagcttctttttttattaccataaaattctcagcatcaagaaaaggaaaagtcaggttgggttaaccttccaaacctaagcccactaatcacaatgtctccccaaaatcattccttccctaattgttactcatctaaacctctttcatggttttaggaatggtctaattatgaatttttaaaatttagtctttttccaagcaactaatttctttcagaatcttttttctaccaatccattacaaaattgtgaaaggctcagaagtgaaatccagccgtgtatatcaaaatctctaaatgaaaaacttataagagatttcaaggaagatgaggtaatggaagctttaaaaggcatggcaactctcaaagcatctagaatagacagatacccagcatttttctaccaaaaattatggcatataataggaaaagacgttactcattattgccttcaagttctaaataatgggatggat

SEQ ID NO: 4565 - DNA, 531 bp, Gossypium hirsutum
  misc_feature (463)..(463): n is a, c, g, or t
  misc_feature (478)..(478): n is a, c, g, or t
  misc_feature (485)..(485): n is a, c, g, or t
tggttataaaattacagtgaccaaaagtctagacgatcaacatcagctcaggatgcttcaaggtcggaatcttcttcaaggctgcatgcttcaaggcctgatgcaacaccaatggactttgttgtgcgcccccagtctaagattgatccagatgaaattagggcccgtgcgaaacaagttattcaagatcagcgccgtttaaaggtttggttttatctccctggaattaaatgtgttggtttcaaatatttggaaacggttttttgggtttttttggttaatgaaacaaaaggggatgtatctataatgttcatacaactgtctgatccccaaacattgcactactctgaatgcctccttaaatttacgtctaggttatacataattatttggaaacaagcattccgattgttctatattcagtttatttttccctgaaaccaatcgtcttgacctttccttncaaaataataaaaanttgccgncgtttaaaacacccaaaaagaagaatttgcaagcgaataaacttaa

SEQ ID NO: 4566 - DNA, 589 bp, Gossypium hirsutum
  misc_feature (41)..(43): n is a, c, g, or t
  misc_feature (574)..(574): n is a, c, g, or t
gtatatgctaaaatcttgacatcctatgtagcataccatcnnntgagacactcaaatactattattgtttctgtttctactatttgttataggagaaaaagaagattcgtctaaagccaggattacaaactttttctaaaacaacgtattgtgaaataatttaaatttaaattatcaagttaaaccttgattaaatatagagtgataaaaaacttaataacttataacatgatttaatattagtattttttttccaaacccaatcccaaaaaaaaaaccctaactaaaaaaatcccaattcaaaaattaataatcccaagataaattaaaactttcctccccctaaaattaactaagttaaccccttcctggttgtgaacccaaattcggatctggtgaaaatgaatcctccagggattaaaaacctggattaagaactttaacttcccggggaatggtacttcctccctggttaaaaagccccctaatggtctggctccggtccctgaaataaatgaaagggtggttaaatctaacaacttccccaaagataatcttggaatgattaatttgnttggttaaacggcct

SEQ ID NO: 4567 - DNA, 621 bp, Gossypium hirsutum
gggtatttcaaatcatggacatttatataagactgcttctgtacctacagtaagtgtcatatggaaatttttgttaccttcaaaaagattgagaacagcagaagtaatgaaaatgcttaacagtcttcttaagaaaccttcatcaaaaacagtataaacagatccagaacgcctccatgcaactattaccatagcctgaaatataaaataaatatataagaaaaggaaagaaatatacagatgcaatcaactgattgtgtaaaagagtaagaaaaattcaagacagaaggttaaaaaagactacctggaaagccactacgaagaatatccacattcggtgaaaacttctatataagtgcagaaacgtgcggccttcaacaaagttggttttatgcttcctcttctcaataatgcatggattaacaatctgaaagggacatatgtaatttaaataaaatcttaataaaaagaataaattgaaagatactaatagagattaatttgacaacaaagagagcaagctcatatgtttagaagatgctgagcaatatatttcacagcttccaaatcaacatagttcaaaagactcaaaatcacaataaacttttagttcacagtgtg

SEQ ID NO: 4568 - DNA, 642 bp, Gossypium hirsutum
tgaccttgtttatgaatacccccacaaatattcctaacctctgcatttctcctcatagactgtgatatggaaactaatatcaacaacccagtttttgttttacttgtttcatccatttttcttctatgttctcttgttcggatttgtgatggggttgatataatcagacaaggccaaacggtaagggatggtgacacgttgatatctgaagctgagattttcgaactgggattcttcagtcctgaaaactccacacttagatttcttgggatatggtacaaggttgatgtgaaagcagttgtttgggttgcaaatcgaaacaatccaatatctggcaatgatggagctttgaggattggtgttgatggtaacttggttgtgttcgatggtaataacagtttagtttggtcatctaatgtttcaaggttttcatcgaacaacacggctgcaattctccagaattcagggaattttgtgttatcaagcaatgaaagcattggtgatacccatggagtccattggcaaagcttcagtcatccaactgatacatttctgcctggaatgagagtaccggtgaattcagcaataggtgagtaccgtgctttcacagcatggaaatcagctaatgatccatcaccaggg

SEQ ID NO: 4569 - DNA, 383 bp, Gossypium hirsutum
aggatggcgatcattggaagaacaatgatgttttagttttcaacacttggctatggtggtaccgcagaggattgaagcaacagtaatacaataagctctacattacattgattaatgagctaaacatatacataatggcatgtgttgttgttgaactgcagatgggattatgtgaatgatgaagggaggattacgaaagatattgatcgtatgactgcatttcggacagctttaacaacatgggccaaatgggttgattcagatgtggatactaacagaactaaagttatatttcaaggaatctctccatcacactacaagtgagaccagcttttgctttgaacactgtatcagctaaaccatgtaataatctgttcactgac

SEQ ID NO: 4570 - DNA, 537 bp, Gossypium hirsutum
  misc_feature (523)..(523): n is a, c, g, or t
agcttggtggcataccggtgacataaatggggttaccgtgttcgtcagtgagttgaaccgggttgccgtgttcgtcggtgagttgaatagggttgccgtgttcgtctctcaaatcagccatttttcgtatacgtaaaaaggggagatgtgttttactgtaaagcaaacaattattcatgaggtgtttactataaagggaacggtggagaagaaaggactggtgtttttttttttttttggtggaaaaaggggggtttaaatttttttcccggggaaaaagggaaatgggaaaattttcccccttaaaaaagggggggaaaacccgggttttttaatagggaagggaaaaaaggggggggaaaaatttaaaatttccccccttttttttttttttttttcccaaatggaaaaaaattaaaaaaaaaaatgcaaaaaaaaattaaggttttggaaatttccctttttttttagggaaggggggcaaaaattaaaaggaaaataggggggggaaaattaaaggggnaactcaccatattt

SEQ ID NO: 4571 - DNA, 455 bp, Gossypium hirsutum
actacattattttatttattgataattataatttcaaaatttatatttacaaataattatacatgctatataaaaaaataaaaaataaaagtgccaatgttacttggataataatttgttcatgctcccaaaaaaaaagattttaacatcctttaaaatgtaaagaacatgattaaaacttgcaaagaaaattaaaattacataaatttaatattcaaataacacgtgacatatagtcaacaatgccaataatggaaacctaatttttaaaattcaaggtcattgactttagagatcatgtactcaacagtcttggagaggccaaccaaatgaatgagggttgagggaaaaaaaaggcgagagcatatgtggtcagagaggaagaaaaaaaggagagagaatggagagtggtgcggagaggaggttaggtgagtgattggcggtgtttcggttga

SEQ ID NO: 4572 - DNA, 613 bp, Gossypium hirsutum
  misc_feature (598)..(598): n is a, c, g, or t
agtcctgggggtctttaattgagttctgtaaatcattaattgtattttattttgaatacagttaagatacatcttttattcaataataattgcccaaaggaattgtcattatctataaggtgtaattggtatcataaaacctgaaataggtagttgttctttttattacacgtttatactgtattattcaaatttgacaattgaatgatttactattcttttctgcattgttttcctctttcaaactcttgtattctttattttgcaggggcatctaaaaatatgttgatgcctgtaaacttttggactagatagtacagttaagggttgaataaatttatcatttttcttctccttttctcttctgtctacaaagagaaatgaagttattataaactaaatgtgttgaagtcttagatacaacgaacaactttcttgtggtgaaaaggattgagaaatttaatgtgttatcattttctttatttagaatttcaaaatatttttatacaactaggccatcttgtttacaaaggcgttatgtactcgggtatcagtgtgtttatttcctagttttggtgggttaaaatctaaaaaaaancaacccttttttttt

SEQ ID NO: 4573 - DNA, 633 bp, Gossypium hirsutum
ctcttaatatgcagaaaaagagtaagaaggttgagatagtgcatgatagtgaagaagcgaagagctcaaagaagcccaaaaaacttaagaagccttctgagctacatcctggtgaatgtgtggaggtaaaaccatgcgagagcctttctgttgagcttgagccgaaacctgctagtaggagcaaaacgggaggcaaattttccattacatccatgcccatgaaacgagtcttaatgataaaacctgagaaattaaagaagggcaatatctggtctaaggactgtgttccatcacctgattcttggttggcacaggaggatgctattttatgtgcagttgtgcatgaatatggcccaagttggagtttggttagtgacacactctacagcatggctgctggtggcttttacaggggtagataccgccatccagttcattgttgtgagaggttcagggaactaattcaaagacatgtttttgctgcaccggacagtttgggtaatgaaaagatcagctatgcaggctctgggaaggctcttcttaaagtaacagaggtatgtgtgtgtgtgtgtgtgtgtgtttggttggtgaagagagggcaaaagaaagaaataaggatacgttgggtgtgag

SEQ ID NO: 4574 - DNA, 642 bp, Gossypium hirsutum
aaaactgcatattcagatgctagtatgtcttttaatgttacacggacacctatttttagcaacgtgtcaataatatattgcttagctaatttgtggagttttacattctaaagaatgcctacccatgttctgggagctttcgccttatgactgtaaacaaggaatatccacaatttagatagatacggacccagtgaatgcaagtccatctttatatcttaattctcacccaagagaaaaactcaaaattctagcaataaaaaatgtccgttgataactgcaactttaactataaatcctatgttagaagtatgataatgactacaagacacaaaatggcaaaccacctaaaatcctagatactctgttgagaaagttacatatataaccttagtagtgcaaagtgtaaaacattggcttaaggaagatccaaaatagtacaacaccatctaagatgaggcaaatatagaatgcgatgtatagtcttgaaaagttttatgcatcaatgtcaaaggattttatcaatatcaggaaaacacagtgaaaaggatgatcaagtatggttctacttaatatacaaacaaatatttgccaacaataatgcaatcaaaccaaacaaaatagaaaactttaatgcagaag

SEQ ID NO: 4575 - DNA, 630 bp, Gossypium hirsutum
tgctagtataaaaataacattgtggtgagattatattttataacgagagttaaaaaaaattaaaacactattataaatgctcatttaaatttagggattttatttggggtttaggatttttttcacactaatttttgtttctaatttcatttatattacatgttatagagaaattatttaaagaatgatttgcgttgaataaaaaaaaaattctaactattgcccaaataaacatcacataatatttccaaactaaatttaattatacccaaataaacgtctgcatccttgcaaatgacaaacaattatcatctacaacttcaacatttaagttgtgattttattttattaaatattttcaattgtagaattagtcataactatggacttatatataatcattattatttcccaatatgtttgaaatttaaattttctttttgcaaatttattagaaatatcaattacaaacttaattttattttttaaaaaaatatacacaattttttaaaattaaattatacaataaacaaataaaaatgtatgataatgatagattttttgtaatttcaaaagtgaattaaggaaatcaaagtcaaatttgatggtaaatgtatcatgtaggtctcc

SEQ ID NO: 4576 - DNA, 618 bp, Gossypium hirsutum
  misc_feature (356)..(356): n is a, c, g, or t
  misc_feature (555)..(556): n is a, c, g, or t
  misc_feature (593)..(596): n is a, c, g, or t
  misc_feature (599)..(607): n is a, c, g, or t
  misc_feature (609)..(615): n is a, c, g, or t
tgtcatctgcttcttctgatcaagttgactcagccaaggggaaccaagcagagagcaatcctaagacaaaggattcttttaaagatatatctgtttctggaggtcagcatgcatatagagttcatatgcaatgccaaaatatgatgcactgcatttgaacttcttctaatattttttcttggatgtataatgtttcatatgatatcattgggaagttgggttaaattttcctagataatgtgattatgccactaaaaataaagttgttaggatccatgcaccgtgtttgacgcatattcagactgggttgtgggaatatgaccttccaaggaacctctaattcctggaaaaatttnaaaaaaattgaacatttcctgaccgaaacctaaccctgactcccataaataaagattacgatttcctttttctttggattttgtttcaagtttccggttccacttttaaacttaaacaataaatgttgatgctgctgcttcttagtttccgtgaccttccttttccttttgttcttgttcacgctaaacccaagttcannccgtgttggtttggtgttgatttaataatatttaacnnnnctnnnnnnnnnannnnnnnaaa

SEQ ID NO: 4577 - DNA, 638 bp, Gossypium hirsutum
cctttttttcttttcttagtgtagttgctagccttttgttttctatttgattccttacattttaacaaatgagaaacataggttattatagatggttggcattcaaaggcaaatgtttcaatttgcttttgcctcttgttttggtttgtgggcaaggaatgttctgatgatgtgttgggttgtttggggggtatggttaagtaatacaaccatagttagtataggatgattactgccccaaggttttagttccagtgattaatatgttgtccttttaggggagggctaactatggctgtcaatgtcatctcttctctcttttgctgttttcattatatattcgacaaaagcattaactgaccaaagcattaatatttctaaccggaaatgctgcgatctgtagtgagttggtcccaatatgagatcttctatcccatgattagaactaaaaatataactcaattcatgggtatttttattaattatatgcagattcaacaaattaattaaaattgctcgataacacaaattctaaggttttctttcacttgttaatttttttctataaatttcgtacaaagggtatctgataaacattcaatttaacaaattcaccctcaaaattacgagctacaaag

SEQ ID NO: 4578 - DNA, 612 bp, Gossypium hirsutum
  misc_feature (412)..(413): n is a, c, g, or t
  misc_feature (485)..(486): n is a, c, g, or t
  misc_feature (590)..(590): n is a, c, g, or t
ttgttgaagctcttgcctgtcaagtaagcttatctgcaagttttaattgaattatctgaacattaatgcagatacaaatctcaataacaactcaacagtgtaccttaaaacagaagtagtaagcattttctgcattaaacttcatctattctaaatcaaaccagacgataataaaatttttctttactatactatacgatatgatatcaaaaaacaactcggcgtggaatagcaaaacaataaaataagattcaaagacagaacataaaagaaaaaaacatttcatttagctaagcgctgcgataccttcacgtgttgaggacatgataatcaaatgtcatttttgatgagaagacaagaaccgatcctatgtcaagtgtaatgctctgcaccaaatctagagaagaatatnnaataacaaaactttagcgagaatagaataaaaaaatataatagggaagagcctaactccgcaccgcaggggnngggacgccccggccagtgaatgctagaagcaatatatccaaaggaatgaatccaggggtgggaccaaaaaaggcaaggctggcttgggttttctttcaaaggtncgacctggggaaggcaaaatga

SEQ ID NO: 4579 - DNA, 394 bp, Gossypium hirsutum
aacaccagaaaatattttcctataagtcattttacagaaaagtaaaacattttccagaaatcattttacggaaaatattttactgccaatcaaacagaccataaacttaaaaacatcaaaactcaccaacttcctaaaacaagcagagaaaaaaaggggcaaattcgatcgaatcacatattcaacatgagtaaaataaaaatgaactaaaataactttatcaaaagagaaaaaaaaatcattcatagatagacgagcagattcaatgatgaaaaagaacaatccgcaaagtgtgaagataataagtacacaaaaatacaaaagcggaaagggaaatttattacgcagcaaaacacattccgagagaaaggaaaggaaacgaaagggagaaggc

SEQ ID NO: 4580 - DNA, 644 bp, Gossypium hirsutum
tattcgacgatttaaacgaaaaagagacaaccgagaaagatggttgatggtgacaactaacccggttgtgtagccatagcccatatctcctgaacagaagtgatagggctctcttgttttatatattcttccaatttttttattgaagaagataacccactgttatatttcaactcatacttcatcagagttcaaaagatcacaccaattttatacagcttttcactaccactctcattcgattatacatatttgcaccaatataaacttataaaattaaattaaatagttgggaccctaacttccatgcaagaaaacattcataaaactaaagcatagattcctttgttacactaattacagagagaaaaagagagttagaaaagaaaagaaaagaaaaaagagagttgaagcgtattacagtgattccattcctttacctttcacagttgcagaaatctggagacccaccaactgagagcaatcggagtgacagagagaacaagaaaaaaaaagtcgactggttgagaagggaatcgaaagagtggcagagagaaaaagaaaaggagggagcaaattggcagaaaagaggcgtaatggagtgggagcagagaaacaaaggaaggaaatcggatgaaggaaca

SEQ ID NO: 4581 - DNA, 652 bp, Gossypium hirsutum
aggaagaaattccattaatctggctcaaatacaacacaggatttacttttaaggattctacgtctgagaatcagtcatgtttgaagctgcttcacctactacttttggcaacgaaatcacgtgaatatttcaagttttataaaaggaaagagatttgatgtttgtgattgagattgtatgaaaccggatggcaaaaggggaagatctagtgatgtactttggttattagtatcttctttttattatattttgcaactgatttaaatgataaattgttgtaaaatcttattctaggggctagccgtttgattgaacatttgcatgcaaaaggagtaccgatttgcttggcaacagggtaagcattgtcatttccggttcttattccctttagttgctttactcaaaactaaacacggtgtgcatacactagtgtgaatgagctttgggttccttaaccttaatggaattgtttaagctattgaagtgctatgcgagcatcattgacacgatatattttgcaggagccacaggcggcattttgagctaaaaacacaaagacatggtgagcttttcaaactcatgcaccatattgttcttggtgatgatccagaagttaaaaaagggaagccagcaccagatgtattcttggctg

SEQ ID NO: 4582 - DNA, 605 bp, Gossypium hirsutum
agcaactacaatagaaaagatggattccacttaatttgagatttgaccattaagtttcagactggggttttttaagtctgtctatcctccctgaactcttgagcttaatctgggttgcccttaggtaaccaaatgagccacaagatcttatacaagtgacaagagttgtttaaaggaggaggagaactgaatgttaatctgcatcttgtaaacatatgagctacttgcctgtgtctctttatgtaatatttatgcaatttaaactgttacttcatcattcaaagtcactaccttctgtatatataaaattccattctgatgaaaagataacatacgagatctacaatgagactagtatacgaagatagcagtatgaaagttctctattactctgaggttgcttgttttctttatttttggttttatgatttatttttattttcacatcagagtggggatattggcaccaagagggcaaaggttgatcaagaatcagaatgcaaggtaaatgaggcatcaaattttgttgagaggagtaccactgatagagagaaacatatggcttcttcatctctggaaactgtagcaagtacgtcctgtgtaac

SEQ ID NO: 4583 - DNA, 656 bp, Gossypium hirsutum
cattctatggtccaggtgaacaagtttaacttgttataacatatcttgtcctagtccttgtcctttcttttttacaaatacttgcatatgacccctttgggttttcttttaatttttctcaagttctttagttctgatcttgttatctacccttcaagtgttaattaagcatggatggatacaataacttttcttaatggtgattcttttacttgctaatgggaaatctaatgagtcttttgtactcttaaatgttttggcatttcttctaatgaaaagctctctcagcaaatacaccttctcaatggtttctggatccgtatctcactagtcttaacgggctttatgcaatggttatgcatagattacatattttgaatatcactggatttttacacataaaaattctagagttgcttgcctgtgatggaaaattaaagttggatggtatttgttcgctagattaatgttttgagattcaacagggtgacataagagattggataatagttttctttgggaatgatatgtatataataaagagaaatatgaccaacagtgatcgaatgtatatacgaagataacttctttttaaaaaccttcttactgaatttatagctctgaacaatctgattaagacaaattgcatcattgct

SEQ ID NO: 4584 - DNA, 673 bp, Gossypium hirsutum
tgtttttcgaagggtcgtggactttggacccttccatctgtttgcaagtgagcaagttcttgatttgatcccaagaagacgtggtgggttgcttttgctttttcacttgctttctccggcgcttcggctgttgtttcatgggctccgccgccgcctccggcaagaaagtcagcagagccataataaataataatacaagtgtagattcagctctttctcttttcttataacttttgtgggcaaatggggtgggatctgagagtggtaataaggaggaaaattgaggagggtgggagtggggtcgctgcatatttattgcattaatgttattattattattattattattattattattatataactctctcctttatctgtgtacaagtgcttaagttttggaccacttgatacaagtcacgacgtgacggtccatctaatgattttggactccatcaatggagaagtcatccgatcgaacggttctccactgttttagtgaatcgccggcactttatttatggttttcagacggctatgagggccttcgtctaatatttacgttgtaagtttttagaaaaattgaagttgaaaatataataaatttgattgaaacttagtcgatatttgttttgatgctaattttcttaaaagttctggcaagggttgaatt

SEQ ID NO: 4585 - DNA, 629 bp, Gossypium hirsutum
  misc_feature (610)..(610): n is a, c, g, or t
aaaagttgtgtggtgcaggctgcctgcatcccaataattttgttggtccaataatgctaataataacttctttcgcaggttggactctatacaatctactaaaaccaatagggtgatgttaataactgtcattccatgatacacaaagcaaaagctgtaaggcatgtgggagagagagatggcagagaaagcaaacaatgaattatgagtcagacagagagtggagtgtctgtgtgaatggaaaaacccaacagcacaaaacaaaacaaaacaaaacccaaccaaacctagcgtgcaagcaaggactgcgaatcattatattcctacattccttttgtctctacactttgtggaaaccgaatctctaaagtctaacaccaaacccatcaatcacatgttaactttatctagaatttcgtttatctccttccatttacattatctacattcagtctgagtgtcaaataaggatacttttagaaagaaatgaagagtcctagtagcctaggctcgaagttttcttaagggaccataaacatgaagatgaaaattagtgtcaattctatcatttttcttgcagcaaaaaaagtaagcattcctcaactctgantcatttccagtggcctaat

SEQ ID NO: 4586 - DNA, 574 bp, Gossypium hirsutum
  misc_feature (466)..(468): n is a, c, g, or t
  misc_feature (472)..(472): n is a, c, g, or t
  misc_feature (477)..(479): n is a, c, g, or t
  misc_feature (482)..(484): n is a, c, g, or t
  misc_feature (487)..(489): n is a, c, g, or t
  misc_feature (495)..(497): n is a, c, g, or t
  misc_feature (499)..(503): n is a, c, g, or t
  misc_feature (526)..(527): n is a, c, g, or t
  misc_feature (529)..(535): n is a, c, g, or t
  misc_feature (543)..(544): n is a, c, g, or t
  misc_feature (555)..(566): n is a, c, g, or t
tctttattttgcttatttgataattttatttctagactttggtttgcttatagagaacttctgaatgtttccagcattggacatcaatccttgaactactcaaacatttttgggcatcatatcctatcaccaccacttacctctatgcgaaggtaaatgctgcacttattgttataaaaaagcctggagctggctgactaccttattaattaaggttgattatgtttgctctcaatggatgaaaattcaagttttaaataaaatttcaactggttgtgttagtcctcaactctctccttctgtcctgcatataatgatagacacccacagaatcagaaaaaaagaaaaaaattgttacaaaagaaccatttcttccaacaagaagctaggctgtttttgaatatttacagggaaaatctgtctttttttttttctaaaactttttttgttttcaaaaatgctgggnnnttanctgtnnntannnggnnnctgaannntnnnnncaactgtaaatgaaaggattgcnntnnnnnnnttaacccnnaggggattgannnnnnnnnnnnaaattttt

SEQ ID NO: 4587 - DNA, 621 bp, Gossypium hirsutum
ctaccttgcaaattcggtcaacagaaacatcaaggcgaagcacaagcaaaagatgaataacattgttgccagtcactggtcatcacaagggccaatagaggtgaaagtgcaacatcagacttcaacgctacctctgtgccaacaccttataaaaacattgatatcaaagttggcaggaatcacaactgttgcagatgaactacaattacagttcataaattaaataggattagaattcaacatcaaccccagtcatgcaaggaaaaagggttcagtatcaaattttagtgatcactttaattgggaaacaaaataaaactgaaagaaaaaggcaagaaagatttgcactaaaaaccaatttgggcaccaatttctaatgcctacgcagcatagaatttaagtttccaacagttgtaatatctacaaaggggaaggtgatctgaatcaaaaactaattcaaggaacaatggcttgaaaacactgaacagttatttaggatacaattgatagagtaagatgtgggggtcagagactataaacatcaaatggctcacttaccacccatcctctaagaccacacagggtaaatgacctctgggggttagccaattcccatccttg

SEQ ID NO: 4588 - DNA, 653 bp, Gossypium hirsutum
agcttattccgtgaaatgaatcgagtgaacgagtcgaagatgaatcgacggttctcaacgaaaaaatcgagggaggcaccaattgatggaatcgatgggtgaacaaatacagggtaaaattttctgtggaattttttttgctattacctctgttgttgaataggctattcttagccccgttcactaaatgatattctgtaaattagacgaatataaaaggaatagctattcgccgaatgaagaaaatgataaaccaagctatagcttcactgctcatcaagaataaggagggattgactattccattcccccaaccaaacatattgacgtattgtaggatccatgaatatatagaattggataaaattcttgtaggtgagagatgtgaacctagttacattttttactacaatttttaacctaaagaagtatatatacgtgcatcattgttacttactatctatatatctacataaattttcaataaattcagggtttgtaaagaaaacaatctttaaaataaaatcaaagaagaaaaatatgtaagaccttgtttcatacattaaattatgaaatttatacaaatgtatatttagttgtatgaattataaactggttaattcatacaacaggatacacataaaacaaaagcg

SEQ ID NO: 4589 - DNA, 626 bp, Gossypium hirsutum
agaacttaagcactaaaggtatctttagctttctccttttaatgagcaaaaatgatatagagcttgatggttgaatacattggtgtccaggaggactatattgtgttgtatattttatatatttttatgcaatgtgatttttacttttaaaaaacaattctttgaaatttatcatgaactgatgccaactgacagtggactatcataataattgaagctggtcttgaaaacttcatttatcagtgacttgatgtttcccctttttcatgctccaggaaataacttgcatagttgattgattttatacagcgtctctttctgaatcccccctgcccgatttattttggacaatattagtaattttaaaatattataatggaaatttactaattgaaaattgctttaaatattttactcttgattattctataatttgttctattaactgaaataattgtatcacatttatcttgaactgttttcattgtccctttttcatatttggtacagctctgttggctgagattaaagaaatcagcgagaagaagcgcaaagaagatgatgtgcttcttgctattgctgctggaaacagacggccgattattcccaatttgaagtttgagtac

SEQ ID NO: 4590 - DNA, 620 bp, Gossypium hirsutum
ccccccaccgccgcttctaccaaaaaggtgtctcctttcattcaaatgcttcatttgttttttttggcaatttatttgtatctcaaaataggtaaaacccttttcactatagattcaaagagtgcgaagggcttggtttgcttgcgtttttaccacttagcttaaatggggtttaattaatttgtctagttggatgatatggcaaggagggaatggatgctgttatattttggcaattttatttgtatctcaaaatatgtaaaaccctttttcactacattttcttagagtggaaaagggcttagtttacttgcgttgttaagcatttagcttgaatggggtttgattttttttctagttttgctgtgtgaaatttaaagttttgatccttattatttatgtggatggaaaggttttggttccaattggatttggtactgaggaaatggaagctgttatactggttgatgttctacgccgtgctggggcagaggtgacggtggcctcggtggaaccgcagctcgaggttcaagcatcgggaggcaccaagttggttgctgataccagaatctccacttgttctgaccgtgttttcgatctcgtggcattgccagttagtt

SEQ ID NO: 4591 - DNA, 657 bp, Gossypium hirsutum
gagtccaagaaaaaagatgaaaaatttgatattcctttttgcagaaagctcaaaccattaatgagatgatctctagcttctaatttgggaattttctaaaaagaaattacttgactatcataaatttgctttggaaacagatctcctccatgcttttactttccttccaagggatctcaacttcattgattatactagcaatccgggttggaaacagtaagcacatgccactattccatttttgattacatatatttgaaggttgatttatttttcgataaaatttaattataaaaataatattttttatccgaaaattttctcgataataatgctaaattaaaccttattttcgaggtaaaaaatattggatgtgtgcaggaggggagagataaaccgaattgttgtagaccccaacttatattataagagcaataccccaattaactatgatgttgaaactcgaaaaccagacgctttcgagatttttggaggtcagttttataacttttaccttgctatatatctatgcatgagaatcatattttataacttcttattcatgtaacactaacagttggatgctttaacaaaatgtattctcactttggtagctaaacttctaccaataagaacgtgacatgtggcatattctat

SEQ ID NO: 4592 - DNA, 1072 bp, Gossypium hirsutum
  misc_feature (626)..(650): n is a, c, g, or t
  misc_feature (655)..(656): n is a, c, g, or t
  misc_feature (659)..(660): n is a, c, g, or t
  misc_feature (663)..(666): n is a, c, g, or t
  misc_feature (671)..(671): n is a, c, g, or t
  misc_feature (673)..(676): n is a, c, g, or t
  misc_feature (682)..(694): n is a, c, g, or t
  misc_feature (696)..(698): n is a, c, g, or t
  misc_feature (701)..(712): n is a, c, g, or t
  misc_feature (714)..(724): n is a, c, g, or t
  misc_feature (730)..(739): n is a, c, g, or t
  misc_feature (743)..(758): n is a, c, g, or t
  misc_feature (761)..(763): n is a, c, g, or t
  misc_feature (773)..(792): n is a, c, g, or t
  misc_feature (794)..(796): n is a, c, g, or t
  misc_feature (799)..(811): n is a, c, g, or t
  misc_feature (817)..(821): n is a, c, g, or t
  misc_feature (824)..(827): n is a, c, g, or t
  misc_feature (832)..(843): n is a, c, g, or t
  misc_feature (847)..(850): n is a, c, g, or t
  misc_feature (852)..(852): n is a, c, g, or t
  misc_feature (858)..(860): n is a, c, g, or t
  misc_feature (872)..(873): n is a, c, g, or t
  misc_feature (892)..(894): n is a, c, g, or t
  misc_feature (896)..(901): n is a, c, g, or t
  misc_feature (910)..(910): n is a, c, g, or t
  misc_feature (912)..(921): n is a, c, g, or t
  misc_feature (923)..(936): n is a, c, g, or t
  misc_feature (942)..(942): n is a, c, g, or t
  misc_feature (944)..(947): n is a, c, g, or t
  misc_feature (956)..(960): n is a, c, g, or t
  misc_feature (964)..(975): n is a, c, g, or t
  misc_feature (983)..(1000): n is a, c, g, or t
  misc_feature (1004)..(1004): n is a, c, g, or t
  misc_feature (1006)..(1006): n is a, c, g, or t
  misc_feature (1008)..(1009): n is a, c, g, or t
  misc_feature (1011)..(1012): n is a, c, g, or t
  misc_feature (1018)..(1019): n is a, c, g, or t
  misc_feature (1021)..(1021): n is a, c, g, or t
  misc_feature (1031)..(1043): n is a, c, g, or t
  misc_feature (1046)..(1046): n is a, c, g, or t
  misc_feature (1048)..(1055): n is a, c, g, or t
  misc_feature (1064)..(1069): n is a, c, g, or t
atcagaaaataggccactaaagtaaatcaagatacaaaagccagcatgttttcaatctcagcatatcagtgagattgaagaaaccccacatccatgaaggaagttaccacaaaagtatcccccccacaagttaaaaaaatattattcccttggatattattatctagcaactaaaaattgataatgcaaacattcacaaacaacagaccagaaaatatacaaaacaattcacttaccaagttctctgcaccagggaggtttcctcttttagcaagattgacagcaagctccaagttgttcaactgaaacagcaaacaacccaaaagaatcatcaagctagtatgtctagtttaccagaaaacagaaaagaaaaggtacaaaaacatacttgaccactaacaaatggcactattgttgcttcatttacagtagccagcaacacctgacctcgcctgttgatggcataaaaccctccaactgctgaagcttcggaggttaaaaatattggatctggactgattctatttctgtaaacagcagtcgctgtctccagatcataaacaaacagcagcccaagtttggtgataacataaatcaaagcatatttgtgggatatctgccagccnnnnnnnnnnnnnnnnnnnnnnnnntctcnnccnnggnnnncggtncnnnnttaatnnnnnnnnnnnnncnnnttnnnnnnnnnnnnannnnnnnnnnnatctgnnnnnnnnnntttnnnnnnnnnnnnnnnnttnnnatttttttcnnnnnnnnnnnnnnnnnnnntnnntgnnnnnnnnnnnnnataaannnnnttnnnntttcnnnnnnnnnnnngaannnntncctctnnntttttttttttnngtgaaaaaaaaaaaacacnnnannnnnntttttttgntnnnnnnnnnntnnnnnnnnnnnnnnggattntnnnnttttccctnnnnnaaannnnnnnnnnnnctgaaaannnnnnnnnnnnnnnnnngtgnantnntnntttttnntnggtgtttttnnnnnnnnnnnnnttncnnnnnnnnttctttttnnnnnnaaa

SEQ ID NO: 4593 - DNA, 567 bp, Gossypium hirsutum
atggaccgtaaaaggacatttgggttttatgtttattatttttggtttgttttttgttttttatatgggtcgggcaaatttggcccactacatatattttgttggtttttaaataataagattaaaatatccttaaataatataatttattttaaatacgaaaaaaatattttcataaattttttaattgagttaatatttaattaactcgtaaaattaactcagcaaaataagtttttagcgaagtttttttaggggtgccgctaaaaatattttcatgatttttttaattgagttagtatttaattaactcgtaaaaaataatttaattctttgttatttttatcaaaatctcttacccttaaaccctaattcgctaactcctaaaaccctatctataaaaacactaaaccctaaattataaaccttaaaccattaccttttaaacacaaccacaaacccaaaataataaacattaaaccataaaccataaaactctaaatcatagactttaaacattaaattctaaatcctaaactttaaaataaaatgatttttttgcggcat

SEQ ID NO: 4594 - DNA, 640 bp, Gossypium hirsutum
aaaaatagttttatcagaatgtttggagaatcaggccggtcaattgtggacgctgaaaacagatgataacacaattcgatccggtggaaaatgcctaaccacttacggatacagcctaaaggactatgtgatgatctatgattgtgactcagctgtccctgatgcaaccaaatgggaaatccggagagatggaaacataagaaatcccaaatcggggctagttttaacggcaagtagatatagctcaaccatgattaatctggttgtagatcgcaatatttatagttctacacaagcttggtttgtcagcaataacacgaaaccaacagtgaccaccattgttggttacaatggtttgtgcttgctggcaagtagaagtcgagtgtggttagagaagtgcgtgaaaaacgacgatgaacaactttgggctatatatccagaagggaccatcaggcctaaaaagaaccgaaacgggtgtctcaagtgtgcatatccaggagggtactcagtcatcgtaggaacttgcgaaggatgggtagaggaacgatggcaatttcaaagcgatggcacggttctgcatgtggtgaatgagcaggtgatggatgtgaaagatactagcgcctctcttcctgagattacg

SEQ ID NO: 4595 - DNA, 574 bp, Gossypium hirsutum
  misc_feature (481)..(482): n is a, c, g, or t
  misc_feature (518)..(520): n is a, c, g, or t
  misc_feature (525)..(526): n is a, c, g, or t
  misc_feature (528)..(529): n is a, c, g, or t
  misc_feature (542)..(545): n is a, c, g, or t
  misc_feature (547)..(549): n is a, c, g, or t
  misc_feature (554)..(555): n is a, c, g, or t
ttttagcctcaaactttagtccagatttgggctatgccttcatgttccaagatagattatgaaagaaatatcttatagtaagttatttgtgttaatctagaatgcaaagaaacacttctttaagtttgcgcttgttaactacttatttttagcagtaacaaactatggacttttaattcccctccacccaatctttatttttcttttgcagattcgtgattttaggacagactgggacctggaagtaaaccaaccagtcgctggaaattattacccagtatgttcttttcatcagtaactttgttccaaaagataagtttatacttttagagaattgcggttaatgagagactctattttgacatatagcatttttacccatgcagattaatttaggaatttacattcgtgatagtaagaaagaattctcggtcctggtagatcgatctctaggaggatctagcttactggatggaatggnnaagatgctttgtgtcaaaatagagtctctaaaaaannncaatnntnntatagtatgaacnnnngnnntggannatagttacagatgaagaga

SEQ ID NO: 4596 - DNA, 341 bp, Gossypium hirsutum
ttgaccaatcagccaaccctcaccctttatagataccatggattcagctaggataagggcctcaaatttttcagcaggtgctgcaataaaatatcaaaaacattatcaccagtaagtttcactaattaaaacttagttttgattggaaaggaagattgaacaaattcagttcaacatacctacacggttctgtaaaattgtcgcaacaccgtcacgcatatggtttgaccagttttcgttttgaataacacggagagcatcatgaaggagtgtctaaacgtatcaagtgaaaatattatcagtcaaatgtaagatgattcctaacaattggagatccaaag

SEQ ID NO: 4597 - DNA, 609 bp, Gossypium hirsutum
  misc_feature (540)..(540): n is a, c, g, or t
tgcccagagctttgaccatccgttggtataggatatcagcaatgattttgcacagttggaatcggaaggccttcgcttctttggaaactgcagctcgtactaatgaagctccatcctgcttatccaacatacaagtttaaaatacaaaatgaacaaaaaaatttccagcttccacgtcaaaattacctgggaagacaacatattaacaataataaagccccttggtattctgggttgccatcaaccatcctgtaagtcattatatgtcgtctaatatcacaccatttttatgttcaggaggaaagggggaaatagaaaaggaatcaagctgaacggcactcaccgcagtcattataagtcttcttagtaccacaccgtctttagatggtaaaagccttagcaacaaatatgcaacgtcaaacacaccatcagtcctactaggaaaattatccagggaagtttcaccacttgaagcttcccccaactgcaaactctttctgcaaaaaattttcatatttaaacccaaattttaaaacaaanaaaggctatccccccccccccccaaaaaaaaaaccattatagggcctgtcctgagagaacatgataaaa

SEQ ID NO: 4598 - DNA, 656 bp, Gossypium hirsutum
  misc_feature (650)..(652): n is a, c, g, or t
tacttctgctattagttcactgagtttcatctacaaatagtaaagaattgggagaagaaaaaaataaaacaaagacaaactttacccaatgtgaattttgtagcttttattgttaaaaacaccttcaatcaaaccaaaatagttgtgctaaatctataatagtatcaaatattgagaatcaatacagaaagcaaagattgttactttaaacgaagcaagtcttttaatccaacaagatgcagacaatttaatccgacattgaaggatggcatataattgaaaaccatgcagtattaatgtacaatatgcgagaatcagctagaaaatgaatataacccaataagatacaagatagttggtttccgaagtggaaggatgtccctgtgttgagatgcatacagtttttatctataataacatttcagcttaatttctctccatatgagaaggaactttaggaagccttcttctgcttgtaccttgaagcacatagggtatacaccaacatgttgaagaagctgagaccagccaagagccagaagaaatagtcgagatgaccctcgttaaggttgtccgatatccaaccaatctggccaccctttgttgtgaagtaagttacaagagttagaataaaagaactcaggtaattnnncaaa

SEQ ID NO: 4599 - DNA, 576 bp, Gossypium hirsutum
tgtaaatcttaaggtggcatgtctatttccacccaccaccgcttctgcttgtgttttctacataaaactataactacccttctctatacatagaaccatgtttaagctaaaataaagtcttttttgaaatgggtttgtaaagacttgggcattgcatttcttttttctccactacagtccctccaatttgctcatggttacacttttattaatttctttaagcattcgatattataaatagataataagtcaagagatttatcttttttttagagtcttctttgaaatggtgtagatctgaatacaaaggtgtgtcagctaaggacataatgcttaagtcagttcaatatgtatgattatgataagagttaagtatcttagcttagtgaagaagatgaagagagaaggatcacacctcatagtcctatgtttaatctccaagcttgcttcgttttgattgttggtattaggagtgatcccatactatatcaagtaaagttgatagtgttttgacaactaatatatttatatttatatttattcatattattatctaataaacttaaatataaaatg

SEQ ID NO: 4600 - DNA, 595 bp, Gossypium hirsutum
aaacactagtattggaaatgaaatgaagtatcttaatttttgagtgctggaaaccatataaatttgcgacaatcacacatctcttcatagcaacttctcaagcataccatgcatgattcgacaaactaattctctttacaataagtaaatgctaaaggaaatacaaacagaagtcctaaattattatgctatgagacttacccaatatgattaaaggtttaaaatttcaatgaataggaacccatattacacgatttattttgctgcgttacttcaacccacaagtttgcagccattgtcatttctttaggcaagctttacaagatattgcttcacataaatttgcaaacttagaaaaaccaccaactcattgtagtaacaaagtttgacaaaataggtatagctttatgttatacttcttttagaagataagcatgaataaagaacttaatggcgaagtttcaaaagaaaaaaaagtaataaaatcagtttcatatataacaggagttttaagccttatggtagtacaaatttatggtctacattcaaattctagcaactcaacagtcagctggaaaagaactatgctaactca

SEQ ID NO: 4601 - DNA, 910 bp, Gossypium hirsutum
  misc_feature (441)..(441): n is a, c, g, or t
  misc_feature (889)..(889): n is a, c, g, or t
acatttctcaagtggtccatgtcagaaaaagcgaaaacactagtattggaaatgaaatgaagtatcttaatttttgagtgctggaaaccatataaatttgcgacaatcacacatctcttcatagcaacttctcaagcataccatgcatgattcgacaaactaattctctttacaataagtaaatgctaaaggaaatacaaacagaagtcctaaattattatgctatgagacttacccaatatgattaaaggtttaaaatttcaatgaataggaacccatattacacgatttattttgctgcgttacttcaacccacaagtttgcagccattgtcatttctttaggcaagctttacaagatattgcttcacataaatttgcaaacttagaaaaaccaccaactcattgtagtaacaaagtttgacaaaataggtatagcttnatgttatacttcttttagaagataagcatgaataaagaacttaatggcgaagtttcaaaagaaaaaaaagtaataaaatcagtttcatatataacaggagttttaagccttatggtagtacaaatttatggtctacattcaaattctagcaactcaacagtcagctggaaaagaactatgctaactcatgttagaagtaaaaaggtttggtagttgaccatacccaatcagcagctgcttgcaatgtaagatgatccccccattcactggtcctgtatcatcaatgtaaataagtatattaaggatgaacgtgttcttagaaagtttttagtgataaaatagtaaagaaataaatattattacttgttcattttcttcaagtagtcaccataagccattggaacataaccctcatacatctccggatttgatttaagctaatgaaatncacacatcatcagaaaacaga

SEQ ID NO: 4602 - DNA, 641 bp, Gossypium hirsutum
taaatcaatggaatgttattctagagagtagagatatacctgaacgagagacgagagtacttccttgatagtttcttctttctcacacaactccgcaaaatcagtaaaagcaactccttgcttagaggcccaatcttccactgcatgctgggaagccacgacaagagccacacagtaactatggaacggatcagcatgcaacataatattgtcgacatagggactgatgctgagagcagcctcaacctgtagaagataaaattagctaccatggaacatccaaagaacatccttgtttgattagaaacattgattcatacctttcccaaagaaacatattccccatgttgaagcttgacaatgtcctttttacggtcaattatctcgaggcaaccatcagcgtgaaactgtcctacatcaccagtatagaaccacctcattcctctctcatcaaccttctccgcatcaaaaagatcaaaataatcagtttactaagagataatcttaagaacaaagagaaagaaaaggaatgcggattttgagagttctaatgccaaccttgtacacttcttttgttttctcttcatttttgaagtatccaagtgttacactgggaccaccgactactatttctccacgag

SEQ ID NO: 4603 - DNA, 569 bp, Gossypium hirsutum
gtctttgactagttcgcctagtcgtctattcttgcaaggaagtgggctttttcattgtttcgtttgaagtaaaggcttatttatgtaaaagatgcagctaagaattagtagttatgttaatcattcccacttgaaagtagtataataatctttgcttcctggctgattatgtcctgggcagttacttgcaatctgttgcatcacagagaggagcttcacttccaggtggtgcaacaattgcttgcactgatggcttcaagttgcttaatttagctaaatccaatcctaacgtagctcttcgaggccttgtgtgtaggcctttccttaatgaaacatacatgtaaatctttcacctaaaggtacaactgtacaagcaaccatagtgcatattgttggtttatttgaagctgtataaaaagtaaaaaccatgtttttcctgcaaattttagttttaagtagtttgttctacacaggtgaactccagtgcggctcacccgcaccgaggaagaagtaataaggctagaacttgagtactttgaagagtaaagttgttgagttcattaattcat

SEQ ID NO: 4604 - DNA, 643 bp, Gossypium hirsutum
gagaaaatggaaatcagaatacgctcaaaacttaaaaatgttttatacagagagttacataactcctcaatgtaagtacctcttggctcatcaggtgccaataaagaaatgcctgcgaacacagacaccattcctagtatgaacatagttgttctcagcgcatcaaacacctgtttcgttaaacaaaaaacaccgtttgagatcatctaattccattatccagaagggaggggctagagtagaattgaagaatactggcttgttcagactaactgcatgattaactttacagccttcctacatgacaaatggcaaaagccatcaattttcactttagtactttttaatgaatgataaccacttatttgaaagcaaagattacataaggctgttcggtaaataattgctgcaaaaagcaactacaataaaaaataaataattaagttcagccaaatgatgttgctacactggagatatattacagtgaaaattaaatcatgcaggcagggagtgaggtgatttgaactaagaatcttgacataatatgaaattaggggagagagggggggttaagtgcacccgcaagacagagagagagagagagagacagagagagagagagagagagagagagagagagaga

SEQ ID NO: 4605 - DNA, 645 bp, Gossypium hirsutum
tttatccaattcttttctaattaggttgacttttatttcattaattttaaagttttaacatgtccatttcaccttcaacatatttttcacttaataaaacttaaattaccatgtacctcacattttaagcttataacacctaatgaactcaacaatggcaagttaagtgaactcatttaatagaaaaatctgatgatgggttaagtaaatcaagtttcttgcattagaaatgcatgaaattattaaaagaaaagcttacttagcacctaaatttggtggccggccacgaaagctccaaagtgttttttttttcggctgggagaagaaaaaaatgaagaccaacttggttcttccccccacgcttatcaatatataagtttaattatctttaattaaaattaataaaataaaagttaatgatagtttactggagaaatgatggaatatatgatgcttatgcctatatatattaacaagggttttattaatcattaagtccttggtaaattttctcaataaacccactcattttctttaaaaaaattccacgtgtttagtagtctgtttaccatttccacaagtccttcaaataaatcattttataattctaactaggtttaataatcaattcaaaaatcgaattct

SEQ ID NO: 4606 - DNA, 575 bp, Gossypium hirsutum
  misc_feature (27)..(29): n is a, c, g, or t
taccgtcataatgatgcatgacttgannngcaccaacataccacctatacaccccttcagaggtggaagctgtcattactcgcctatgagaatgcgctgccatcataagatcttaccatgcaacaacctgctttaccgtcataatgatacatgacttgagggggagaagcttgtatttgtttcttgggattcaagctgtgaaacgttatttttggtgtggcactaaacttatctactctttcagttggataatttaattacaccagatcagaaaaaagaaccttttttaattggatattatgttctcaaattcttggactcggttacggttacccatattattgctttttaaagtcaaattggccttgcattgataagaaagataagcaaggactaaggtgggcaaacgtggttagcattgtcaagttgagtgaaaagacctcggtgaaagtgaaagtaaaaccattctcagaatggtccttgacaatgctcatttgttctgcttgccgtatatatatcatcccatctcaaaagagtacacatattgacgacatccaaaacatcaacctcgaaca

SEQ ID NO: 4607 - DNA, 625 bp, Gossypium hirsutum
tcgtgatagaatggagatgcagtgtggaaaacacctacacaaccttcaaccacaggatcaaaggaaccttgttccaataggtctgcttttaacaacatgagcctgctctcagcaccctcaagtccaagcaagtgttgtgtcttccttggatcatctaatgaaatatcacttgtaagtaagagcaacaatgagtaaagcaacgaaaaaaaaaagcatgaaaaaggagcagacttgggtcacgaacagaggctttgacagtgtaaccacgaagtagaagctgcttcacaagccatgacgcgatgtagccagaggctccggttacacacacggtttttcctgcaccgctgctcattttcctccctttactaatatttcttttttatttttggtgatttttgctctattctgtggctgtcaattgcatattcttatctttgtttccctctctttattttagtgtggagtttcttccatcaaccaaatgtagagatcacatttgcttggaatcttttgtcagattgggccgaatctagataatagaagtcatatatatttcaataaatgtcacattatttaatttagtatcaactttattatataaaaatgttcactgcctgcgctctaa

SEQ ID NO: 4608 - DNA, 615 bp, Gossypium hirsutum
ttgtgacaaggagatattgtatcttcatacatgttcatcttatgccacaatattgtgttgtccttgaagtattatatatattattgtatttaaaacaacaaaccccatgtttagtacaatcactaatattatttattattattcgacaataaatagcctaaatgaccatatacctaaagacatgatttcataaaaaaaataatatacgaaaaagcaccatctttttcagatgtataaacataataaaaataccaacgctaatcagtagtgatgttagaattgaacgtgggtgattataattgaatataaattaaataatcataaaatcgtgcaaaattggactttagaaaaaaaaattaacgattgaattatttaattataattatatttgttattagaataaaaaaatgtttttagaatttgatggattcaaaatgattaagatgcaatataattaacagatatgacaataacaatgatttattattattttgttaaactaaatgtttgtgttctgtgttgagaaaatggaaatgtggtccgatcccgacaacggttggtgggcaacaaataactctgtattgtattctttctttctatctcactcaccaaccg

SEQ ID NO: 4609 - DNA, 617 bp, Gossypium hirsutum
tcgcatttgataagcttatagtctttgtgagcttgcatctttaggtgagctcgcatggatgacctcttcccaacactccttcttagccttcgtgttgcaaatagtaattttatttattaacttttcaaatctcaacttattgagtggtttggtcaggatatctacaaattaatcttccgaactgcaatagactaaagtcactttctttacttctcttacaaagtagtatttgattttaaaatgttttatctttcaatgaaagactagattcttcgcatttgctatgattagttggttgtcacaaaaaaattgagttgtttcaacctgctcacgattcaaataaaataaaattcttctcaaccacatcgctaggttgactgttgttattacagctacatactcagcttcagctgtggattgagtaactgttgattgcttcttcaaatttcatgagaataccccagatccaagcgaacagaaatattcagagatacttcgcatgtcatccactgatcaagtccagtcactgtcagtgtacctaataagtttcaagaagttcaccattgcgaaccagacaccaaaagcagttgttcctttgatgtatctcagcacccatg

SEQ ID NO: 4610 - DNA, 392 bp, Gossypium hirsutum
  misc_feature (10)..(10): n is a, c, g, or t
aatgaacacnaatttatttcctacttaacaccattattcacttatcttacaacatagctatggcttctaagttccaactttttacagctagactagacatccctcggcggtgaaacccgatacgtccatccatacctcgtttatgcgcccagtgcgatgttttgaagcattgtactgtgcaatgctgtagttataatacaggttattttccactgcttgcattaacgctggcaaacgttttgtaaggcttgaaaccagagcatctttttctttctccacgttgtcgtcattagcatatcccggaaactttctcaccgcaatacactgactcttccatttgtccaactgcaaattcaattcagcggagggctgcggaggagacttgtatttat

SEQ ID NO: 4611 - DNA, 642 bp, Gossypium hirsutum
tctttgctggtgattctgttcttttcataaggtaagattcatatacatacacatatgtttgtttacatgtgtttgtctgcatgtatttgatagaatcaactagatgactgtcatttcgctgctcaactgaaactccttacttaaatgtagagatgcgaagtcacagcttctcttgggtctaaggcgcgctaatagacaacagccggctctctcgtcatcagtgatttctagtgatagcatgcatatagggatccttgctgctgcagcccatgctgctgcaaatttcagcccatttactatattctacaatccaaggtatagctataacatatttcgtttgctcttagattcatcattactctttaatcgccaattttcattttcaaaggaaaaaagatgttaatataaagtctcaaaagttttataattttgatagggcaagcccctctgagtttgtggtacctttagcgaaatattacaaagccatgtacacccaagtttctcttggcatgcggtttagaatgatgtttgagactgaggagtctggagtacgaagatacatgggtacagttactggtatcagcgacctggatcctgtgcgatggaaaaactcacaatggcgcaatcttcaggtattctttg

SEQ ID NO: 4612 - DNA, 617 bp, Gossypium hirsutum
gaagctctcttcatgtacctcttaagctcatagttgaccttttcttcttcccacataaatccttgaatgttctatgccaacatacacggtcatgttatcgtaaatgtggacactctaatgcataatgaacttatgttataaattagatatactccaacacaaaaaggatgttatcaatgcacaactaatcattatgctttaagagcagtgtgggaaagtgaatagttggtattacctgaacccattcaaagtaactgacagtcacaccaccagaatttgcatatatgtctgggagtataatcactcctttcctggataaaatctgcatgaaacagagatttcgttatgtaaccatgtttgaaacagaaaattacttgatgaaaaacttagttgaaggcacagttgccatattacttcatctgcttctggatcagtaggatgatttgcagcttctatgatgaactttgccttaacatcagcagcattttccctttgaaagaaaatgaaataaattcacttttgattcttgaaaggaaaaaggaaggaattgatgaacggtaagctttgtttgtaagaagtgcagagtatgtacttgttaagaactccacctaatgcac

SEQ ID NO: 4613 - DNA, 616 bp, Gossypium hirsutum
tagcacaaaacctctcatttgatctgattttgttagcaattttcagagcgatttccattggtattaaattgtttgcacctgcaaccaacagccaaaaggcatgcttaaaaccatatagttgaaagctaagtttcacatctcgtttatcttcattccactgttatttatcataaaggctaagtttcttgcctaaatctgtatgagaatcccaattatatgatgatccaagaaagtattgattctcgatgtagatgaagcgttgagcagcacggattgcattcacataggcagtgtgaatgctcatgtctataagaacattcttcccacacaccaagttctagacaaaacataaacatacaagtcggttaaactttgttattctttcgacaatgattgataagaacagctaaaatccataagcttctctcaccatttttatagcatctttcgggtcatccggaaaacctttcacagagttggaatcgattgaacggaaaaccttcatagtagggaaagcattaggaaacataacaaatagggaacgagaaattagttacaccaaaagctcactaacatgcaaaatacctgaacatgccaagtttctggatcatctttg

SEQ ID NO: 4614 - DNA, 732 bp, Gossypium hirsutum
  misc_feature (640)..(641): n is a, c, g, or t
  misc_feature (643)..(652): n is a, c, g, or t
  misc_feature (654)..(656): n is a, c, g, or t
  misc_feature (661)..(679): n is a, c, g, or t
  misc_feature (681)..(690): n is a, c, g, or t
  misc_feature (694)..(700): n is a, c, g, or t
  misc_feature (705)..(713): n is a, c, g, or t
  misc_feature (715)..(715): n is a, c, g, or t
  misc_feature (718)..(729): n is a, c, g, or t
tctaattttgttttgccatttgcttcagtttgacgacagagacagattcattagaggaattcattgaaagtcggttgaaactgagacatccagaattggtagaatggctcagagtggtggaacttccacggatggcagaatttttcaatccattgttaaagaaatggtctacggagtatgcaggaaggtttgctcaaaaaactcctttgctttcaactaaaagtttttatttccctctaggattattgacaccctccctacttaacaactctgtccctatggtaactatgaatgaggtttgtatgtttatttctgcaaacatgctaggaatttcacctttggagaaattcactgattattgtgtaacttatggtttaacctagctaaacacaagaatattcagtggcgttgcaggaattattgtggctataagctgctgtgctgctgtagagaaatggtgctctgaacatatctcttgtcccttgtctaaaatattagtaggcgatgctatagcggagcttatggatctttcacatggtattgtttcggtcgacaaattacataagttagctactgaggcaggatttgaaactcatttcctgtcacattttggagcaaaggtttctgtctggcaagaaanntnnnnnnnnnntnnntttcnnnnnnnnnnnnnnnnnnntnnnnnnnnnnttcnnnnnnnctttnnnnnnnnntntcnnnnnnnnnnnnttc

SEQ ID NO: 4615 - DNA, 646 bp, Gossypium hirsutum
ctatcaaagtacaaattctctatgggggcacttcttgattgttttggtgcttggtattcatcttaatattgatcatattctatataatgtccacactttctgcttctaagatcactagcatcaaaaggtatatacctttccctttattaatgaaattaacagatcatgttgtcaccgacctttgactttatatggatttttgtatcgcaataattgctttatatatctcagtctcatctaataacttttgtatatggtaggcatttaggacctgggctagtgttaatcaatataaattaaatttcggtgtggtcatgagcctttgttgttagctccttggaaggagtgaagtggggataattaagtttaaaagtataattatacctagcttcttctatttatattattaaccttgggcccaggatgaaatgatttaaacccacatctgttctaagtaaaggctttgaaattacatccaagatcatttctttcagtggaagatttttttattatttctttttaaaaagcaggaagggatcactttgtttactcagtctttttcatttttctaggaaaacaactatcattctccaagatattctaaaacttatatttcccagcaaaaaagaagtaaagctttggaaaa

SEQ ID NO: 4616 - DNA, 637 bp, Gossypium hirsutum
tacgaggcagcaggcccttggaaactcgaagatggactctggttagagttattgaaggaagatgaggcttcctgatgaagtgagttagggtttgaatttattgaattttgccgaacgagcaggttctggtagttagaaagtgccaaagctgcttgtgccgaaccacttaaagttcctcgaccagcagccatttgatggctgttgtttctcattggattattgtttatcccaggatgcaatgccatcagcttattgagggtattcctgtcagttggcagaccccgaacatttgttatctgctccatttcttgcattttttgcatttggagtttggtcgaaaagggatgtcgaggatagttcttcaagccctctgcaaatacggtgtttacaaaaaacagggaatgagaataaaagctatcctgtacgacttaccaatccagaggtcagaatggcaaattgtacgacttaccaatcgccccagacttgttttctcgacaaaaatctatcagatctttcatgctgttgacaacctcagcaatctaacaaataatgcaaaacaaactataaagaaactaaaaaaaatatttgtttaccggaatataaatgcactacgttaaaaccgtacctgcaaacacct

SEQ ID NO: 4617 - DNA, 623 bp, Gossypium hirsutum
tcttcgcaatgatctctaactactcactcagccgtggcagcccctgtagagctacatctcgccccatccctttccggtttctcccaatagatcaccttgtccagtcactgttttgcatcaccgacagtcgcttactactaaattttaaaattaatttttttacaaacatattaacttataattagttctcaacttatatgcttttagataaatcattagtaaaaaataattgataacatattaataattttaaagataaataattataaattagtagtatattgtgtttaacataattataaatgataacattttgtaatcaattaataataaagagataagcacataataataaatagtttataatacaagagtgaaacgtattatggacaaaattatagtacaaaatatagaatacgaagctaaataactaatactagaagacaataatatatttgaagtttgtgactgtacattcataatgaattttacaaatataattataaaaaattcaaagttaatatttaattgtaatacttcaaatttaattaataaaatattataatatttgaaactgatctattgattaggtgttcatctagtcatgaatagcgtgagtggaa

SEQ ID NO: 4618 - DNA, 636 bp, Gossypium hirsutum
ccactctcattcctccacctctttacggccactcccaagagctttctccaacgatcctgccgttaccgaaaagccttctatttgtacagccgacgagctccactatgtgcctctacctaattctgattggcgccttgccctctggcgttatcaccctcctcctcaggttttttttcttctctttcactttgcggattttgttattactagtatttttctttcttactttctttctttccatgatgctatgtttgagaatgcgagtgtgaagatctgaagtatgctatataaattatgagacaaataggtatagtttagttgagattgattgtaatgctatgtttgagaacatgaatgtgaagatttggaatatgttatctgaatatgatatagatacgcctacattatgtctaaattatatatttgaaaggtatatatgaatttgtgatatatcttgaatattatatttatatgtgcaatttatactaatttttgaaatccaaatttatgtttggctgcctaattgtttttatttatagatagagagaatgatttcttttttaacaggcgctacctagaaatcaccctctattattattatctggactggggactaatgccattgggtatgatatt

SEQ ID NO: 4619 - DNA, 661 bp, Gossypium hirsutum
tttgagttgccttatacttttcctgcttcttaccttgaccctcaaaactacacttcattacttccattatattccattccacctgaagtcatcccatatgaaactttcacgatccattggtgatataacaagaaccacctagccttaattgttagatgacaaccacctagcctttcacctcttcttaactactagtttattgcttttatggtcgttgtttgtgtaattgcttatatgtaatttccatattcttttgtgatttaaaattggatcctgttcaggctctttcgtaagttgctactagagaatttcatgcttgtttcttctattttggatgacatgtgttaccgggtagtcctcatgcatgaactgaactttggcttgtgctttctggtctctgaaactcaactgtgtatatatttttctcaatagtactgaattcttaagttactgtggggttttgccgttgctgctggtaagcaaagtaactattaattatccatagaactgaccataaatcttagttttagaagcaacaccgaagactattctggacctgatggatttagatggactcaatctttaccatgttaagagtcatttacaagtaagtgtttatatttaacttacgcgtttccattttagcccttaaaaccaacct

SEQ ID NO: 4620 - DNA, 554 bp, Gossypium hirsutum
  misc_feature (548)..(549): n is a, c, g, or t
taatttccctcctagagaaaaatgtattaaataatacaaaatttggagtcaatgatatcccagaatcaacaatggaaccagacaaggtgaatcaatattcttttcctgaatctgaaactcctgatccccttggctcaaagctacaaggacatttgtcattgatgcctcatgaaaggaatgatgatcaagctgatcagtctaaacgtttgaaggtggatttaaataaatattatgttctggagcccattgatttgttctgtggatatccatggaactctgcaccaatgcgcaactcattttcatttagtcgctgcaacaaggttatgcatgaaggtggacaggtggtcaatggtacctggcaagctcagttagtggaagtttcaagaactagaacaggatatatgcaagaactgtggaaagttaatatggaggcctgtgttgatgcctcaccacttgttgtgttcaatgattctgatatttatttatttgttggatcgcactcatacaagttcctctgcattaatgccaaaaggtatggatctcacctnnatcac

SEQ ID NO: 4621 - DNA, 665 bp, Gossypium hirsutum
taatcaccatgtgtggagagagagtattaattacgtgtaggcatgtagctgaaaatgaagatatggataccccagaattacaggattctgtcatattcaccctccaaactcctaagctcacccataacaggcacagcaccaaaaagttgtgattttttttcttggcaatttgagtataagagaatcccaactttatatttgtaaagttgtatgaattttgcccccagagtgataattttaacagatggtccctgatttgcttttggccatgagatgtggctcaatggtttagttagcccctccatttctcccatgagggagagaggagactgtggggttattgcaacacattcacctccatgcaattcttttttaacagtaaatgcaaagctccactgacagtgagacaaggaaagggtatggggtccagagttttcagccccaaagttgatcttgatataccaccaaaatggagatacaaatcaacattctatggggattgcaaacaggtaaaaatcagaataaaaacaggggggggggagtgaaatttttcacattgcataatgcgtacatgttcgccaaaaggaaaatgaaagcttctattttttatctctcttttgataagaataaaaatgaaagctttcagttgacattaactccctaaa

SEQ ID NO: 4622 - DNA, 630 bp, Gossypium hirsutum
gctcttttatttcaaatctagtatttactctttttactctagccttcatattttattaaacacccactaggatttagcttaagcacatgatttaagttttatcccctctgaattttactcttaccatgttttttttaacaatcttactataaattttgatcatatcggactctttttgatataatatctaaaactatttatagtcctttcccaactcataaataggaagataatgcgtttcaatgcattcaaactcacgtcatcttacattgacaacaatatccataccaatcgactaagactcaatcggctactcttaccatatattttaattatttgcttcattctatttatttatttgctatcatttaaaattttgattaaattgatataatgaattaaatagatatgaattcagttggaaaaataattaatatatcatttttgttaagcgattataattcttatttcgatagcacttttatcttttcatatctttatattaattttatataaaagaattaaaattaacatattcgaaaatcgaacacatgtttaatagatttataaagaagtaatttttttctcactcacataatgtataatgtcactagttgagctggtgtcata

SEQ ID NO: 4623 - DNA, 647 bp, Gossypium hirsutum
tttctaaggtaattattataactcttaactaggcctgtctagggcgagcaaagatttgttcgaaaagtgagaggatttggataaaaatatagctctgaaaaattagtttgaacaaaaaaaggcttgtttaaaaaatgggcctagcctcgagtaaggctttttgacccaaggtaagcttggctcggcccgaatttgtaaaaataaaaaatatatattttttcttgctatttttctactattttgttatcattttactattatgttgctattattttattgttattatttggatattgtataattcttattttattattaattttgttactattttagagtttaatatttttaatattttattattaaaataaattgtatataaaaactaatataaaaaatttaatatgagcgaatcaaatcgaacttaaataaaattttagactcaatttttgaatcgaaccaaaaccgagcctaagaatttaattgaacccgaccatgtacacctctgctcttaagtatatttgtaacataaaagagaagcttttaattcttccgaaatgtggcacgtgtagaaagtctaagagtaagcgagtgagtagaaaaccaaagatctaacacatctaaattggcaagtaagcattgaccaa

SEQ ID NO: 4624 - DNA, 633 bp, Gossypium hirsutum
  misc_feature (603)..(605): n is a, c, g, or t
attagaaaagcgccaaaagaaagagaagaatttacagtctttgcaattattcaccctgtctatttctcgagttttcaatttcaccgcactcgggatctcaactcttcttgcaagcaggccctctccttttgtacagggaggaaaaataaggggtgctgctttgcagatcggatccaaatttcatgcactgagagacctatttttctatatttaacgatatgggtatactgtttacaaaaatgttctctaatctgtttggaaacagggaggctcggatccttgttctcggccttgacaatgctggcaaaaccaccattctctgtattatatcgcttccttattatgttttaagtgacttttttattgggttttattaaatgggtattttccattttctttttttaataatttcatggttttggttgcagatcgactccagatgggtgaagttgtctcgacaattccaagttagtcttcctttttttcattttttttgcaatttttttttgttttaaagggaattatttagcatttcgatgtataagggagaagtaagttaatatttgcagttaagaagatcaatgggtttctctttatgtttannnattgttatttgatttactttgttcttga

SEQ ID NO: 4625 - DNA, 623 bp, Gossypium hirsutum
  misc_feature (39)..(40): n is a, c, g, or t
  misc_feature (585)..(585): n is a, c, g, or t
gatctgtgtatgtaactagaacaaaagatgaaagaaatnntgtggatgtaatcagatgcttaaacgatagtgctactttcgttgggaaatatttgaatctcatatattccattttaatgggtgaaacatattcccagtattaacaccccaacaagtgtcgatggcagaccattggtaggaggtggtcttagaaaattttgatgtctagctttaaatttattcggatgtgaattttatctaatttttttataagtcaataattatactctaattatatcttttagtattgttatagttggtaatttcattcttctctaatctaaaataataaaaaaatatttaaccaaacctatacgatatctcatctttgagctcaaaccttatgcgatatttgtcccttattgcaattgaacatcttatataattgtctttttaattagtaacttatctcactcttttttcttcttttttttttgaaaacttcaaaaaaaaataaaattttttttatggcttttaaaggtggcccttcttcttgcaggggaattaaatttccggttaaaagaaggttaatgggtttgcttcatnatacaggttcccggtgggggggcccaaatttctgcccg

SEQ ID NO: 4626 - DNA, 632 bp, Gossypium hirsutum
acggctatttgtttatagaaattactggattgttgatttttactaattccttacatataaattgttaaaccgataatttttaaattaacaatttaatggtaaagtttaacggtatcactcaattgaactatttttaaaattaaaatacgagaaattgaggtaagaattaaactttttcttaataattaagatgagtcaatttgtataaaacattaaggctgtagatttaagtcgtcaaattggatataatttttttaagaaacaactaaaaaacataattggacataattaccaaattgatgattaatttatatagaaaggtagaatttaagataattaggtggttaaggttgatggaagagtcatgtacatttttggctaagttgatagctgttaataaatccaaaaagggtgttgaaatttttgaaaacctttacatcaacatgattaatttatatcatatcaaatttattgatttgattaatatgatataaatctctacaacatcaattaccccatctcattcctagaagaagaaaaaaaaaccctaattttaaattgctgtaattattatattcattaacttaaattttgttatttatacgataaacatattatcacatttctaacga

SEQ ID NO: 4627 - DNA, 586 bp, Gossypium hirsutum
tgacataccgaaggtttttttttggtaaattatatgagtagtcacccaattatgaaaagttacaaattagtcacttaattatttaattttatttttttgtcacccaattatcttagattttaggtgttttcatttttacattagtcaactagtgacaaaaaaaacaaattgaataattgaatgaccaacttgtaacttttcacaattgaataatagttgagtgagtattaatgtttgttatgataggtataatgggccgccgagaatgcatgaaaatccatacgggaacggcccaagcccgcaacatccacaatatccacaaccgcgaccatccttatctccagttccgatttacgggagaaaacgagcacttctttgtggtgtgaattaccatggaaagagttataaactcaaaggaagtatcaatgatgtcaagagtatgaagtaccttcttgtggagacattaggatttcccaatgattccattttaatgctcacaggtaatctcgggtttttaaatgttgagatttaaatataattttaaatttttttgcttaacgagcggttgaatagagcatctgtttat

SEQ ID NO: 4628 - DNA, 606 bp, Gossypium hirsutum
ccaaattttaggaaattaaagcagatacataattttttataacgtcttgctgcctcttccaaagattcccgatttacttttcataatttactagcttagtgagagatagaaacattgtctcgttgtaataataagcgaatcaatgaatgaatatgtagtctaaaccagactaccctatacattttctaaattgctaaaaaggagagatacccatgccctttccgtcttctacattctctttctcatatgaagtaactcatacctacattacccggttgaactttgatatggacgcttttattgcaataggagttctttagttttgtttatttattatatcaggttctattaagagttttagtttttcttattttctctattatattaggtttttatttccttcataaactctaaattaggaattctattaggactctcttctttgttattaacaatctataaaaagctgccaatatgaaataaagagataagcaattattctatcaaaaagaaatgttattttgagaggggattcagtcaaggacgaatcagccttttgagtaatcataggtcgaagcaagaattctttctcgtctagacctgtga

SEQ ID NO: 4629 - DNA, 617 bp, Gossypium hirsutum
tctgaactcttttcaagggcaacattaaagtgtcttctaacaggacaatgaaacatcataaaaagaaaaactatttttttcataatggagggagcacaatgagaaagtgaaaaatgtaacaataaatttaagaagcatctttattgctgagaatgaataacaaacctatttaacatggaaaacatattaacaaacaaagatcataatgaataataacaatatccagccataatcatggataacatttaagtttaacaatgtcattactgacctaatattccttttatattataatgttatagacagtagcaccaaaatcatacttcaagccttgtcaaaatatttgattaaaaattacatgtattatgagttattggagcttacatgtcggagaggaagagatacaccagaaggcaaagaatctaactcttttaacccaaatttctccccaaccattgccaacaccgtgagctcctcattagaggaagatgatccagaggcaatgttgcagctaacaccagatgaaagcttatttcctatgattttagcatcacataataaactgtaaaaagatacaatcttacgagcccagctcaccacagaacttccatctttac

SEQ ID NO: 4630 - DNA, 641 bp, Gossypium hirsutum
ctaaatattaccatctagggtaatcaaattcacataaataaaaaattaatatgaattttaaagtgttaatataaaaattgttgagttgtgcttgtaatgagatagctgtagaatatttatacccatgacaatagaaatagaaaaaacaaatagaaaattcagtatttgatttaatattgataatacttataacataagttcttatataaatccatggtcttattatccttattttttaaaacaacgtgaggtatgagtttctataaaaactcataatctcttttcctcttgcacttaagtactgtgagattcatgcacttattaacaaaatacataaactaaacttagtacctagaaattaaagacaaaagctaaattttgtacagtgataaatactaaaaaagatattttcgaactagttggtgttgttgatattcaacaatatagatcattttagaggcacatcataaaaagaaagtaagactaattttgcgttgttgaaagttggtagttggtgttttttttttaaagaaaacaaaattgtacaaatgatggggattccaggaatagacaaatacttaactgcaaacacgagccaacaatccttacatcaacggaaaggaaaggaaagcgttgttaaa

SEQ ID NO: 4631 - DNA, 585 bp, Gossypium hirsutum
gagaatagatagggaaaagtgttcatcaaagaagaaaagaagtcattaccttctcattgtaactttgaaattgtagaacttctggcgccatatacaaaggagacccgcataccgtctgagcataattgcctggatctagacttctacctccaatataaaagtggggaagcaattaaagaggaaaacaaaagaaaaaaaaattccactaaaccttctgtaacaattttgttagggatcattcttctcagttttgcggcacaagtactagagccaaaataccatccaaacttaccccatcctgtaagccccctaaaatgatatttaccttgaaagaccaaaatccgctatcttcagcaccaaatcatccttggagcccgaaagtagaatgttctactccaacaaaagcaccatggttaactgaattaaaggaactattaatctgaaaactttactctgaaatcacatgtcatatggcaaacgtagatgcaaaccatgacttgcatttattgatgaattacaaaaagttaaaactgagttctaaacttctagtattctttggggttgtgaatacaccaacatatcaag

SEQ ID NO: 4632 - DNA, 639 bp, Gossypium hirsutum
  misc_feature (584)..(585): n is a, c, g, or t
actattaaaccaattgcaacagttaatactagaataataaattgaattgaaaaataaaaaggaataacagattcttctttaagcaaaaagagggtttactatatttttgtgcaactgatatatggtggcattgaggtcaccagcccaaaaccccttatagtcctcttctgatagcctcactccatgtaactgtggggtacttaagactccctgacaaaagatctttaatttgggacattgtctcacaataacttgttccaaagatgggaactgaaagctgtattcctctgaacagaagcttgaaaggtttggcaaataatgaagtactaagcatttcagcttgctgaaacttactaagtcttttgcatcatctttctcttttgcaactatttctctcaccataatgcagtctctaatcctcatttttatcagctgcaccagattccaagctactgaagatgtaattaaggcagttgctttgcactgccaaaggtccaaagttatgagattttgaaaggatgacaagtatgatcccaaactgatcgaaccatcacatctcctaacttcaagagtttcaagatttnngacaacatggggtagttgtgagttttgctcccctatgtagccagtgttcaaaag

SEQ ID NO: 4633 - DNA, 634 bp, Gossypium hirsutum
cagtaaatgtggtggtgaagttggtcagcagtaacagttcaatgatgcaattgtacttgacagatctcatcaaccctttgtcatcattattatgttccaacaacttagaagttgctacttcctgtgccactgctttgaacatggtcctctccaatctaagtgttaagagggagaaacaagtttgggagatagtcaaagaagcaaagactctcattcaaattattaggattattcgggaatttcctggtgtcacccagccaatcgagaattttcaagagatggtttcactattgtatacaatattgtggcagtggcctccatctcgttattttgtgtggaaggatactattttgatcaaagttttagaagattctcacattaaatctcatctatctacaaaagttgcggtgttgaaattatgttctgctttaggtaatgaaacatccattgacttgctagttttatcccttaatatctggattgaacaattttctcacctatttgttccagctttatgcaataaagtagccaaggagcttctgggaaatggagaaacaattctaacaatgatggtttcttgcatggatgtctcagagcctctggcagtcagaatagagggatttagacttgccca

SEQ ID NO: 4634 - DNA, 654 bp, Gossypium hirsutum
acttgtccactagataatactttaccaaaaacatctaaaactgcgatgactcctttcgacatattacatacatatattatgagaagtttcaaccaagaatgggaatgcaacaagatacaatgtggaagacagacatataataatgccagagtttttgcagtgcattaagtaaaagatttgcctgtctgtaaatctgaatatttccaatgaaagcaatcacataaatattttcccagtaatttatggtataggttctcagaaacgagaagctgatttatgatttttcaaacatcaatcagtctgacagacttaacaggattactaaatttgcattttcaaattgactcgttagctccaagatcatcatgaaattgtataatccagaaggcagcagcatgagtatgcaccatgtatgaaaaagcattctgattaccagcacaataacatggtcgacagttgaccagaaagttaaattatcaagagaaattgagtaggaactcctctgtttttatgaaaaattgcacctagaaaacaatagataaatataaaaggaacaggagttgatcatcgaatacagatcgaaaagttaataaaggttatttacctgtcgagtagttttgatttgaaacaagtgagaattgaatgccatggtag

SEQ ID NO: 4635 - DNA, 620 bp, Gossypium hirsutum
tatctgcaatgcatgttggcgaatactaatcacataacatatcaacaaaatattttcacatgaacaattcaacccattattgcaaaaagaaaaagaaatttacaaaaggaaatgaatttttcaaaagaagatgaacatagcaccaaagatgccaaaaagaaaactcagatagttattacataagataaactgtgggactctagaaattaaatcaatatacgaaatgaagattgcctgcttattgaaatgaaaacaaaaaatacattaaatagtttcaagaagatatggataatttagaaaaaagttcagttggtagaaccagattctatgaggttgataagaatctgccgtgctgcatcactgtttacgtcaacatgaactcctctatagatctcctcaagttcattttgcctcttcaataccaactctttcattttactagccttcagcacattcaaactttgaacttgaagctcaacctggacgtaacaatgaatgctcaacattaagaggaaagtacaataatcttggaacattgacaattctattttttttttttaaaaaaaggggggcaacctgctcaatgatttctaaaccaagggatccttgtctcaaaaccc

SEQ ID NO: 4636 - DNA, 565 bp, Gossypium hirsutum
  misc_feature (6)..(6): n is a, c, g, or t
tgtagnccagttatgagacttgccaatgtgctagcagaatggacataatgctgattgtttaacactcctgctgtaggtggttcatccaatcctcgatcagagtttctttcttgatacaagtcacaaaaggaggctgaaggaggagtatggtgagtgtactcggttttgttatctcttgttataattaaggacaaacttactgaaatccttttgaccttgtactgcttctagaaattgagccctggacatttgaacaacatgttggagaagctgtaataattccagctggctgtccataccagattagaaacgttaaggtaacacgtactaccgatatctttagtcttgaataactgttacagaacttactgaatgaagttatgtgcaaattttcatatgcttctccaattttgcaattttatgaattacaagttaattgttttgcttagaaattttaccaacttatatggctgtaagtattcttttctttcccctgacaacctgtagtcctgtgttaatgtggttttggactttgtttcaccggaaaatgtgaccgaggttccgg

SEQ ID NO: 4637 - DNA, 646 bp, Gossypium hirsutum
tctatatgtttaaggttaaaatatcagcaacaccagcaagtagactacttgattctaacttgaactcgaaaatccgacccgatcaatccaaacacaaatcaaaccaaccagatttgaccatataaagtcaacaatctgaaccaaactgaccagttccaaaacaaacttaaacttgaaatgactcgaacaaataactcttatgcaccgactccataatgttctggaccgaaaaatatgaatttactcgatccaaaactaatccgacaaaccaattgacagttctacctgtaagcttgagatccctatatggatgtagcctccctttaaccaaaaaacctcagcagtcatcatgtcaacaaattgtattgagtcacccaaagtcaaaacttaatttctaacctacatacgataattaaatgtaatagaaatgcaaaaagggggagagagagagagagatgcatggtatcccagcatttttcatgagattcagtgccttaaaagcaacatgacctaaattcatttttggtattgttatttacttggttgaaactaataagcaacactggcattttttttcattccccaaattctggaccactagttacaaaccttgccataaacaaattcaaaaaacaagcaaataccc

SEQ ID NO: 4638 - DNA, 472 bp, Gossypium hirsutum
tctttctacatcatctatctcttttgcatggacaatgcatgtctactttttagtatgttaaaatttaataaatttagtattatgaatctttatatgataaaaatattaaattaatttatatgcatgaaaataaaaatagattaatttataaaaatatttttatgataaaaatactagattaatttatatgcataaaaattgaattgattatcaaaaatagtagttgaattgaatgaaattggttaaaaatattttttatatgttttctaattatttttatagatatgtttttttttactaatttatatataaattgtttttatattataaaaattgtagaaaacaataaactaattataaattttggatgatgttggaatagatacaagtaataatcaaaccgaatctaaattgaatgctacagttcagtgttatggcaaatacaaattgactgctacaattcagtgctaac

SEQ ID NO: 4639 - DNA, 629 bp, Gossypium hirsutum
gaattctttgatgtttgtttgtggagagatgcccatgtgtaaaggtgccaggtaacttacttggtatagttctttggtggctatctcaaggacttgttattgcttctcaccttcactactaatgctgtttatatctgtgcatacttgggtgttgaagaggttattgtgagaaatagaaagggagggggattttcctgttctgtaaatccagctaatgcatattaaacactgcatttttgtaaagatatttaactttcttcttgttctttttctttccagatatactttcagtcaatggtgatggatggcatcaaaatggctgaagaaaatgcttctggtggggaaatagaaattgaaaacttctcagcccaaatgattgaagcacggtctaaaagcttggttccggtttttgactatgttcaaactcctaagttcccgcagacaaggtgtgctgaatgcaatttatgtctatgtactgattcccatgatgcttgtcaaatcttttgtttctgcactgctctcatgtccagatatttgagctttttggttcatagcatcattttcagataatgcatttatttaacttccacgtgaggaatatttaattaattccttaatgtgggatcatg

SEQ ID NO: 4640 - DNA, 627 bp, Gossypium hirsutum
  misc_feature (619)..(621): n is a, c, g, or t
  misc_feature (623)..(624): n is a, c, g, or t
ctagcttttgcaaagctgaaaaatgagatttcagaagcttgcatgataaaaactgaattcagtagcaaatgacccataacaggagcaatgatatctttgttctatagtagcttaaggttagtagtatattctcaaacatttgtttagcggttagatccattatcatcacaagcaagtccccaaaaccatgagcaaatcatgtgtcgtacaacatagcctctgaattatcacccattattaattactgtaaacggaagcaaaggaaatagtacctcaacaatttctctgatgcaattctagcagctctaatagcactttgacttggcacccacttcacagctcggtttggatccgaccgcataggagaatggattttgattagcttaaaaagatcagataaaagttcgtcaaagatattgatatctcaagactaattgtgaaaggattgtaggtacatcagaaaaaaagtaaacgagattttgcgtctcttcctactaatagtcatacaaaacagaacttctctgattattaactcaaaagaccaaatccacataaagatttcaatgtgagagagggagagagagcatacacccaaacactccatcatctggtaataagnnntnncac

SEQ ID NO: 4641 - DNA, 736 bp, Gossypium hirsutum
  misc_feature (644)..(647): n is a, c, g, or t
  misc_feature (704)..(710): n is a, c, g, or t
  misc_feature (728)..(729): n is a, c, g, or t
gctgcaaatgaattgaggttcgcatatagcacatctcacatcccatgtgaagccaatacaaataaaatctgacctatattaattttgtacataaccaaaattcttatgattattcgaagcctagatatgtaaaaaagaaacacaattcgattagctatgaacattgtatattatagggaaagatgtttacttacgtgtgtatatatatatatcatgcatatttttggacactctttccagatggattcatgatttcttttaatttggaaaaattcaacaaccaaattgaatttaatatacttaatctataagtaaagatttcaacttttttttttcccgtccaatacgtcataattaacaaaagtgagcacatatttcttttttctttttgaaagtcgatatgagcttgcacacatatatctatatatatattcttcgaaatatttcactatcaatgtattatggagattgaatggaaggcgatttaaatgtcccaaacccaaatgtatgtgattcacaccctaaatgccataaatttagtaactagttcagtaggccacccaggggttgggggggttcggtttttttagggggaaaagggggtaactagggtaaatttgggggtttggggggggaaaaaagannnntgatctctttttttagagattgtgtatattattttctttgggggtggagtttttccnnnnnnnaagagattttgtgtctcnntggggag

SEQ ID NO: 4642 - DNA, 685 bp, Gossypium hirsutum
  misc_feature (323)..(323): n is a, c, g, or t
  misc_feature (325)..(325): n is a, c, g, or t
  misc_feature (404)..(405): n is a, c, g, or t
  misc_feature (407)..(407): n is a, c, g, or t
  misc_feature (655)..(656): n is a, c, g, or t
  misc_feature (666)..(666): n is a, c, g, or t
atatcccttgtgacaggactatacccaagaaaaacacacggtcgagaccgaaattgaagcttatgagtgttaaagggccgtggatagggataacaccggcaaccaaaaactttcaaattctcataacctgactcagacttgtgtaacatctcataaggtgatctaccaccgagaactggcgttggaagtctattgactagatatgttgcactgatgaaagcatgagcccaaaaactcataggcatatgagcctgtgccagcaaagtcaaaccagtgtcaactaaatgcctgtgcttcctctccaccaggtcattttgctcacntntcgtggggacaagaaagctatgatgaacaccaacccgagagagaacctttggaaaaaatctaaactctccaccccagtnntntttggagagctttaattttagaaccaaactgaacttccaccagatttctgtagatggagaaatttatccaaagcttcagactttcgttggataagataaaaccaggtgtaccttgtgtaagcatcaacgaaggaaatatagtaaaagtatccttcagacgccaagggagcacgaacccataactcagtcacaataagttcaaacggagcagtgtacattattgaggaaggagaaaatggaatcttatnngacttgccangaagcttatgagacttgcc

SEQ ID NO: 4643 - DNA, 613 bp, Gossypium hirsutum
ttatagctgcaaatttgaagcctacatggtaattactgctcatttattcacttggtttctatatatacaatagcatgtactaatcaagttatgatgaaactttgagacaaaacattttcatcttactttggttgatatactatgataccagtttactttttccttggtcttgcagcttcaataatatgggttggggaggtatgtgtatgtgtatgttgttagacttatttaagttcatttatcttattgaataatgactattgctttcttttggtttatcaagggacatatcttacttctatagcacgcagtcatgctagagatgccaacttacatgaaggaactgtgatcagtcagttcaatggagaattttaggcaacgtttgctcttcaccaggtgactattgatctctgctgtgacaattagtcgttttctaatttttttattcagaataactatcttctttgaatatctttaacgggccatttcgaggttgtaaatattaatcttttaccccaattttgtttcttcttaaaatgcagtttgttggaaagtggagcgatatgtgttgcttctactgttaatgaaaaaacgtttttcctcttgtattcta

SEQ ID NO: 4644 - DNA, 716 bp, Gossypium hirsutum
  misc_feature (701)..(707): n is a, c, g, or t
ttttctcacccaagtcttcatctttttgtgtaatttatgcaaattatgggtcttgtctattatcataatagatgcaaacatgttaacttgcataatttagctaggcctatttagaggtatgcatttggttggtttggtttttatgtatcaataaccgaataaacagacaaatctattaaagctgaatcgacctatcctattgccacaaccaatataactgaaccgaacttcagttaggtgggttttttcagttttgatttctttttcttttgctttttaaagtgcatttctttatatacccttaaaagttccatccttgtttcaactttagattagcttctatctattgacagagacagatccgattaaaaaaaacatatttgaaccaataaaattaaatatatttgttaagagaaacatagcgtttgatttggtaaatataacgaaagagctgttatgacaaaagaaaaacatggaatttgtataactaaatttaacaaaagatctcaacttatagtaaatggggactggaaggaagaagaggcttagagcagatgtttgatttgttacgcctctgttttatgttctagtgttttactcatttaccgttggtagggttttttagattaattaatttaattgtaagttttgtattagggtaatttggttaagatttgggagttgttggatccccccttctnnnnnnnccccccccc

SEQ ID NO: 4645 - DNA, 621 bp, Gossypium hirsutum
  misc_feature (40)..(42): n is a, c, g, or t
  misc_feature (491)..(493): n is a, c, g, or t
gtgaattaaaaattcataccgtcaattgatgtaacgcagnnnggacaatcggaaaggtatttgatggcgagagtcattaaaacaggcactgaatcttcaccagggatcatcatatcaatcatgttatctgctattagatcgtcggttaatagttcactagcgtccttgagcaaaacatcaaccacatcttttggaaccattgaactcatgcttgaatcccttttagattggatgattttgtgtacaatcttaaccattctcttctttgcctgaaaattggataataaaaatattcgacacatgtcataagaaaaaaaagaaagggtctagcaaaattgtaattgaacatgaagcttgcctgcaatgatcgataaagttgagttccgggtagttttacaggtaaagacataaggcctgagataaattcttggaactgtttcttgaggatttccatttcttcacctgggttcaagctaatcaatgctttcacnnngcacttgaaaagcaatctggagacaaggaaagggtgttttccattttaacttttcaaaaggatcggctatatgtaaaaacacaatcattacaaaccaaatttaccagacaaaatgattcatcaaaata

SEQ ID NO: 4646 - DNA, 586 bp, Gossypium hirsutum
  misc_feature (197)..(197): n is a, c, g, or t
  misc_feature (202)..(203): n is a, c, g, or t
  misc_feature (206)..(206): n is a, c, g, or t
  misc_feature (518)..(518): n is a, c, g, or t
  misc_feature (524)..(525): n is a, c, g, or t
  misc_feature (564)..(566): n is a, c, g, or t
  misc_feature (576)..(576): n is a, c, g, or t
  misc_feature (578)..(578): n is a, c, g, or t
  misc_feature (582)..(583): n is a, c, g, or t
aatgtttaatcattggattttggttcttatgtggaaaatctacttattgattgcctcttcacctagcctttttcttttccatcaacggtagtccactctctttgtaacctcttgttaccctcctctttgatttcgtacttggatggatgttgtctcgcctgcattttgaaaatgttgggtcttattttctccttacntggtnnggnctttttgtttgtgtcatcatgttattctcataaagacagcgcagtttttcaggatagataatgagtgaaataaaggcattctaaaaaattgtttttctgtccaagactttctttgtatccatttcatatgttatattttccatattttcatacaaaactccacgtggtgcgtgataaaatggaaaatacatttaattattccttagtgaattagtaagaggtgaagaagcattgagtatatatgtttttgtgatatgtgaagtgcacatcatataattattgcattaagagcatgctttaatcacaaaagcngagatnngtgaataagttactttaaagctgaaatgtgaatccagtnnncaaatgtgtntngtgnntca

SEQ ID NO: 4647 - DNA, 633 bp, Gossypium hirsutum
atgagggcactgttatatgtggtcggctcggcttgcattgagttgttccgggaatcgatgtatgtttcattaaggaaaggcccacccacaaggcctccaacagccacattaggattcggttcagttgaatcaagccacttgaagccgtcggtgcaaccagtagtcgcatcagctggaattgaagctcctctatgatgcacatattgtgggtacttatccccataccccacaagaaagctcattttcaaagggtttttgcccaatacataatcagcctggaagcaaaaattattatagtatgattatttaagtgaaatatgaatcaatgcttttcgaggaaaatttcaaatcttcagctgcctcttttatgcaacacgtttatcctacaacataaatggcgtacctgtgatttggcaaactttctaagatccgacggtttgaatgaatggtcaccacaggttatttttgcagtctgtgatgtaagcatgtaatcactgtaaagagcagctaaaaatgcagaggcaacagggtgctgcagagcattccattcactgatccatacaagaccacctgcaccagaaagtctgaccggtgagcaaaaagtgatcccaaggttcgaaacgagttcagttc

SEQ ID NO: 4648 - DNA, 625 bp, Gossypium hirsutum
attatagaaagattgtactccatcaaaaataatatatactataaaaggattgtagttaaattcataaattaataaatcgaggccaaaaaataaaaacaataactagttcaagcaaacctaaccgcagccagaaagtagaaatcatgtctcgacattagctttgtttccggcaaggatgagagaaatctccagcccacggctaaaggcttggttaaagagaaggcgagactggaaggttgagatgaatgggaaccatgacaacactgctactggtgcaaatatgattgtacccattcctgcgtcataaaatcttgcaatttctcgcaccgaatcccataatcccaaacttcttacaaccctcttccatgtaacagccagctaaattatatcaacacaacacaaaacaaaaaaggatacgaaattgttagcaacaaaatgcaacaccatattgtagagtggtttgaacttgaaacaaaaatgaagaatcattctgcacagattcaaactcctaatcatgctaaactaggttcctgtatacagagaggtaccgctcaaaatgcaacagcccatggaatgttagactagtggaccaaggcaagcaatccaaataaaaaatattaatcag

SEQ ID NO: 4649 - DNA, 587 bp, Gossypium hirsutum
  misc_feature (270)..(270): n is a, c, g, or t
  misc_feature (272)..(272): n is a, c, g, or t
  misc_feature (277)..(277): n is a, c, g, or t
  misc_feature (280)..(281): n is a, c, g, or t
  misc_feature (297)..(297): n is a, c, g, or t
  misc_feature (570)..(570): n is a, c, g, or t
gtacatgaaagcccttgtactaggagtcggattgcatttttgcctaatctactcaaaaaatgagcaaattagtccctgtatgtagatcaaagagcaaactggttctcctgttaaaaattttatccatttctattgttaaaaacagtttgctctttaatagaaatggatgaaattgttaatagaaaataccattttgctttttaattcaatatatagggactaatttgctcaattttttgagtaaaaggggtaaaatgcaatctgactccnanttcanggnnctatggtacctttacnattgatccacttttttcattcttgagaaagcatgttgttttacattgaaattcggtctttgcatgtcctttagtttaatgtagcagtgtctgataagcacgggatattgtctaactggtaaatttcttttattttgagcttgaagtaggtagatcttaattggtcgcctgatgactcgatgttggccagtgggagtttggacaacactatccacgtatggaatatgagtaacggtatctgcacggctgtgcttaggggtcattctagtctggntaaaggagttgcctggg

SEQ ID NO: 4650 - DNA, 581 bp, Gossypium hirsutum
taacccaagctttcaacctcttgtcctccaaattttcagttttcagttcttgcaaaagtcatataagattcagatatatttaataaatccaaaagaacaagagtatgacaatatgcacatcatctcaactatgagtttctcgatgatgtcaactttgttcgactcttacatgtttctagaggctttggtatcacgtgcaaacatattgtatgataataattttccttctagatgccgtagtaattgattaacccggcatacactgaaacaggttggcttgtttggtgcttcaaactctttattattgccgataattaaattctcaacattttccgaactactgctttcaacacacttgttacttggctcattacagtttctagcaaaactaaaactctcaacttccttcacattctcacagcattgcttctcattttcttgatcattcaaaggaaatatatacaaatagcgcctccattttgcagaaaagttgggatggaatacacgcgaaacctacaataattcaacaatagttataagcatgtaggagtaattactacagataagctttgcagtggctg

SEQ ID NO: 4651 - DNA, 616 bp, Gossypium hirsutum
ctttctggtgcagagctttaagggcaagagatatgagcctctctgcaaagcccttggaggaggtttctcacaacggaagaattggtgaacttcaaggttaagaagggcaaaattttgtcaagcgaagcacacaagatgctcttaatcgtagccggttcggtggcagctaaaccaaaacaatagtactaggagtgtcatcagcaagatgcaccttgcaggttggtctattgcgggcacttctaatggagtttcattttctctctttgcgcttttcaacttggtaggtttcggaatctcactttatacgatcaaaatcctcgccagaaaattcccactgcatttcaagctcgaaatgttgtatatgttgtgctttatatgatgcattttgtaggtcggggtggggtgctaagtttaaaccccagctctcgtgcttcccaagtctttttgcaaaagttttctgtttccgtttgttctaggaaatattgttggtatgccttgatttccttgtaaaagagcctttttttcccccttctgttaaatgttttataaaaaaaaactataaataactaaattaagaggtggaccataagaatgatcaatgctcagctgagacggt

SEQ ID NO: 4652 - DNA, 948 bp, Gossypium hirsutum
  misc_feature (1)..(1): n is a, c, g, or t
  misc_feature (9)..(10): n is a, c, g, or t
  misc_feature (93)..(93): n is a, c, g, or t
  misc_feature (555)..(555): n is a, c, g, or t
natgatgannccagaagaaataatttgatagtaagtgtaagattgctcaaaagggtgagcatttgccctataagtgccagtctattccatgtntcatcttgcccccatgttatgtttgtatgtgaagaaaaaaagatgtaaccatcattgcaggttatagaattgttactcgaaaatagcagttcaggcttgatgggtgcaaacgctgtgaatgaaaccgatctctcagcccttaatatgctgttgatgttcccaagtgaaggtgaccatggagaaatcatggacattctttctggtgcagagctttaagggcaagagatatgagcctctctgcaaagcccttggaggaggtttctcacaacggaagaattggtgaacttcaaggttaagaagggcaaaattttgtcaagcgaagcacacaagatgctcttaatcgtagccgattcggtggcagctaaaccaaaacaatagtactaggagtgtcatcagcaagatgcaccttgcaggttggtctattgcgggcacttctaatggagtttcattttctctctttgngcttttcaacttggtaggtttcggaatctcactttatacgatcaaaatcctcgccagaaaattcccactgcatttcaagctcgaaatgttgtatatgttgtgctttatatgatgcattttgtaggtcggggtggggtgctaagtttaaaccccagctctcgtgcttcccaagtctttttgcaaaagttttctgtttccgtttgttctaggaaatattgttggtatgccttgatttccttgtaaaagagcctttttttcccccttctgttaaatgttttataaaaaaaaactataaataactaaattaagaggtggaccataagaatgatcaattgcttcaactacaagcatcaagaacctgtgcagtcattacatcatccaagataaaaacat

SEQ ID NO: 4653 - DNA, 630 bp, Gossypium hirsutum
  misc_feature (587)..(587): n is a, c, g, or t
  misc_feature (604)..(604): n is a, c, g, or t
atgaggtaggtgaatcttgtaatgttttatgtacttgtttaatgcatattaagagagcaagtaacttccatgttactttaattacatatattatcacctggttgatgctgttttgtcttgtaggaaatggctaaggaagagaagaaatatctcactaaaagtaaatgtgcttctcagcaaacatcattcaaaattccagaaggttctgtcactaataatgatccaaaaatggctggaattgattcagtggtgtcgacttcacaagttcctgcctcagatcctgttagcttaccaactaagcatcaaagtagacgtaaaatgaacctaaagagagctttactttcaacacataaaaactcttctgtttgcacactaaaaaatcaaccaaacaaccattctgttccaccgtacacaccgaaggtagaacctgatcttccaccattcatttccttcccgcaaaagaattttcaaaacttttaaaagaataatttatggatgttattggatttcaggaaatgctttcttcctgcctatcatccaatcttgcacgaagatggtgctgtttcaaagggttttacagggctatngataaccctgggttggntaaaaggaagttggggaagaacttaa

SEQ ID NO: 4654 - DNA, 598 bp, Gossypium hirsutum
aagaggaagagatcttctaaacgaggaaaatatagacatggaaaaaggagagatagacgccgtgagaaaaagagaaaaaggcgtgataagagatcaaagcgtaaatcaagaaggttatatgcttataatctatttatgcttcataacgttgtcttctcttgtggcaaattaccagttaatcaacttgagtcctgtgcatattttgtttagttttgtgcttgttcagctgtgtatgaggagtcaaatgttttctaaatgtaatcagtacgttttgatcctggcactgtttccttggcctccagtgtcatgcgttagaggatgtcctttcctcttttttctcccttagaaaaagaagtttttgatttctaatggttggtttttttgatacaaaaccttcagtcttggtgaattactaaagttgttcaggatttgtttgttcctaagtcataatatgagttgcatatgtaatctaattatgtccatgcatagcaactataaatattatggagaagttatttgcatatttccatactttgaaatttgtcacttgtgtctttggggaagtagatctttatgtgtttctctcacgtgcttggaa

SEQ ID NO: 4655 - DNA, 614 bp, Gossypium hirsutum
tagtcaactttgaaaatagacaagtaagacaataaaactgtgccggaagatataaccactgtttcagccaaaggagcaactatgaaaatcaccttgcctctaacaaatacttttatagattaaacaagcaggagcctccaatgaatgggattttgccattagtatcatttttgtgaaagatttagccattcatatttcatatacgtaagatcgatttatgaatggtgaacattattgttgttatgatgacgaaattttattaaataataaaataataaaaacaaatgtagggggagcatcggcccgattaatactaatcatttattatgagaggtttaaacctggtgtgtatgatctcatatatgtgatgtcatctggtagatcaccaccaattcccagtttttcaccttctataaaagccctacaacctctcaccatttcttcaaagtaacaaagattctcagctcctgtaatactaaatttacagctttagttcagggatgaagctcagactagcaatcacgtggtcgtttcgatggatggaacaaggtaaggtaggtaggtagctagagcttgtcatgttggtaagttttagagcaggaaggtgacagaag

SEQ ID NO: 4656 - DNA, 656 bp, Gossypium hirsutum
atatattaataaatttacttcataaaaaataacacaaaaaaaaacactaattgggaagaaaaggaaagaaataaagtggaagggttaaaatcacgatataataacatttctgtgacaatacttcaatgaaaaagggaccatctacaccaaataaatgcagtagaatcatagtacaagtgcaagaagttaatgtcattccaaaaagtcaaggaatttgagaaaaggaacatcactatcattgcaacttaaaatcaaacttcaccattcttaactttaaaatgtaagactggatgttcccatgaatattttaattcaatataaaatgaacaggctgtcatgatgcaagatatagatttggctagtattttaacttcctgaaggtaaccacaagttccctaattttacaattagccaataaactaatgttgtattctaaaagtaacaaatataaatatacatctgccatgaaatctagctgcaactctcataccaggtcattgaaatgagcttatgtatatccaataacaaattataaaagcaggaaactatctagtataactgaaaattaaaaatgtaatttcagaatgcaattggcatttaatacccaaatatctcatccatattagatatacaataaaaagtccatctacgtaccc

SEQ ID NO: 4657 - DNA, 637 bp, Gossypium hirsutum
tttgttaattatgagtgggtttagatgggtagtacttttatatgcggttagtgtaaaaatagtagtggcagtaaaattagatactataacgatactgtagcgtgagataaaaagtaaactaaacgtaccgcaccacacccaatcacccatttaaaccctccctatatgtttttaggttttagccgctttgttttctcaagtaaagtgagcttacaaagctttctttgacaaactcatcacatcagcatcagagatagtacattcctgttagcctcagtgatcacaataaatgaaaggtctgtcattaggtttccagttagtgaaaactgagaaaaaaaagtaaaaaggagcaaaataataatacaatattagggccattcttttatccaagcatatataatataattcacaagtcttttcacattttttgtgggtaaaagttaaggacattccttacatggaaatatacttgtgcttttaaccggtttaattgaggttttttgtttctgaatatgccaaattttgtttactatttgagaagttacttcattcactgatctgactcatcatcatcctctttgaagcaatcagaaactatcaaagaaaagctttgtttcctatttacaggctctcatta

SEQ ID NO: 4658 - DNA, 613 bp, Gossypium hirsutum
cttcacttgtcaccctttcgataagcatcaagaacaaactgaaaaggattacatatccaatgaattagcatttgctaagtacatggaaagagagaagatactacatcttacccccttccctgccccccccccaaaaaaaaataaaaaaaggtgaaaatatttaagggcatgcctgatcattcaggttgaagagaaatgaagaattttcacggtcatatatctttccacgtttatccgcttccctatgtgaaatcagttccccagtgtactcaccaaggtattcatgcttgccaacactattctgaagaatgcccaaaatttaaacagtgtgtaaaacagaaagaaaagacttaagaaaaatcaagttgacaaatcatgtattaccttcaagaaagctccccatccaaaaacatctgatcttccaagcaagacctgtgcatatatcgcaggcaagtcttgtcaacacatatatgtaacttttattgactcacatatttttctagtcagtgacaaacagaacagctctgctacacacggaataagcacaaaaaggacacttccattttatattttctagaaggtaataaaatggattttattatatgtttgtcca

SEQ ID NO: 4659 - DNA, 637 bp, Gossypium hirsutum
agttgccaagagagtaggattttgtaggcgattggcaagaacaaaagccaatgcttgttctaaacaatcatgtgctaagatacttgcatacaagaagctacttaaaataggttccttttctgcctgcaccaagtagcagcatatttatcaactaatctcacacgatcatcaagaataaaaggcaaattaagagctgccataggggacatcagttgatccttccatcagtactaataaacagccagtatttcaatttaacgtgcatatgataatagaaaaactgaagccaggttaagagacaagaccatgtaattagcaacaaactcccaacactccatgaaaatatcatcaaagatagtcaaataaccatgagatccatcaactatcaacttgtttctgattataaatcttcaataatcaaaatcccatcacaaacaaatcaacaaacaccttgcaagcaatatcccaagaaaaataaaattaaaaaaaaaagagaggagaaaataagtatgaaaattgggcacctccagcttggcctcctctcgtacagcttcccaaattgggtcacgacccgaattaaaaagggagtcagggtcaggcttaaaaaggctcattgcataaactggaaaccccttct

SEQ ID NO: 4660 - DNA, 1288 bp, Gossypium hirsutum
  misc_feature (602)..(602): n is a, c, g, or t
  misc_feature (604)..(613): n is a, c, g, or t
  misc_feature (615)..(619): n is a, c, g, or t
  misc_feature (624)..(624): n is a, c, g, or t
  misc_feature (627)..(645): n is a, c, g, or t
  misc_feature (647)..(652): n is a, c, g, or t
  misc_feature (659)..(660): n is a, c, g, or t
  misc_feature (664)..(668): n is a, c, g, or t
  misc_feature (674)..(680): n is a, c, g, or t
  misc_feature (682)..(697): n is a, c, g, or t
  misc_feature (702)..(704): n is a, c, g, or t
  misc_feature (706)..(721): n is a, c, g, or t
  misc_feature (724)..(734): n is a, c, g, or t
  misc_feature (736)..(745): n is a, c, g, or t
  misc_feature (748)..(763): n is a, c, g, or t
  misc_feature (769)..(769): n is a, c, g, or t
  misc_feature (772)..(774): n is a, c, g, or t
  misc_feature (776)..(786): n is a, c, g, or t
  misc_feature (789)..(798): n is a, c, g, or t
  misc_feature (800)..(808): n is a, c, g, or t
  misc_feature (813)..(832): n is a, c, g, or t
  misc_feature (834)..(835): n is a, c, g, or t
  misc_feature (839)..(841): n is a, c, g, or t
  misc_feature (845)..(846): n is a, c, g, or t
  misc_feature (850)..(850): n is a, c, g, or t
  misc_feature (852)..(857): n is a, c, g, or t
  misc_feature (859)..(861): n is a, c, g, or t
  misc_feature (863)..(868): n is a, c, g, or t
  misc_feature (871)..(875): n is a, c, g, or t
  misc_feature (877)..(900): n is a, c, g, or t
  misc_feature (906)..(923): n is a, c, g, or t
  misc_feature (928)..(928): n is a, c, g, or t
  misc_feature (931)..(948): n is a, c, g, or t
  misc_feature (952)..(953): n is a, c, g, or t
  misc_feature (955)..(964): n is a, c, g, or t
  misc_feature (966)..(981): n is a, c, g, or t
  misc_feature (983)..(1001): n is a, c, g, or t
  misc_feature (1003)..(1003): n is a, c, g, or t
  misc_feature (1007)..(1011): n is a, c, g, or t
  misc_feature (1015)..(1020): n is a, c, g, or t
  misc_feature (1022)..(1024): n is a, c, g, or t
  misc_feature (1030)..(1036): n is a, c, g, or t
  misc_feature (1038)..(1057): n is a, c, g, or t
  misc_feature (1059)..(1061): n is a, c, g, or t
  misc_feature (1066)..(1070): n is a, c, g, or t
  misc_feature (1072)..(1076): n is a, c, g, or t
  misc_feature (1078)..(1078): n is a, c, g, or t
  misc_feature (1084)..(1106): n is a, c, g, or t
  misc_feature (1108)..(1113): n is a, c, g, or t
  misc_feature (1121)..(1132): n is a, c, g, or t
  misc_feature (1137)..(1156): n is a, c, g, or t
  misc_feature (1158)..(1161): n is a, c, g, or t
  misc_feature (1164)..(1169): n is a, c, g, or t
  misc_feature (1172)..(1202): n is a, c, g, or t
  misc_feature (1208)..(1215): n is a, c, g, or t
  misc_feature (1220)..(1231): n is a, c, g, or t
  misc_feature (1234)..(1262): n is a, c, g, or t
  misc_feature (1266)..(1269): n is a, c, g, or t
  misc_feature (1272)..(1274): n is a, c, g, or t
  misc_feature (1276)..(1283): n is a, c, g, or t
  misc_feature (1285)..(1285): n is a, c, g, or t
ctgccagcttgagctatagctcaaccgaacatctatttttaagctcgttctcggctcgatatataatcgagctactgaagctcgattaagctcgtttaccaatttttgtactaaagctcgaatttgagctcgactcaataattaagcttagggtaaataacatatattaaggaaaataacgtaatttaagctcgatcaggctcgtgaaccattcgagtcaagtattactaaacttgaatttggctcgattgatagcttgagctcggctcaaaatttaccagatcaagatcgaatttatttttagttgaacttgagtaacttgtgagcacaaatgtctcatttacacccctaagcccaccagaagatacgacggaaaactattcttacaactcttttaaacagttaaagagcaaaacatcagggctccatatcaaccagagatgaaactaataccaccgacacctaaaaaactaattgctgagatgaatgaaacgtgtttgaacattggatgctttctagcagaaggaaaacattaatcaaacaaaatatagattcaaataagttcagaaactaatatccacaaacctagaagatggctcagntnnnnnnnnnntnnnnnatttnttnnnnnnnnnnnnnnnnnnnannnnnnaaaaaannaaannnnnaattannnnnnntnnnnnnnnnnnnnnnnaaatnnnannnnnnnnnnnnnnnnaannnnnnnnnnnannnnnnnnnnatnnnnnnnnnnnnnnnntttttnatnnntnnnnnnnnnnnaannnnnnnnnntnnnnnnnnnattannnnnnnnnnnnnnnnnnnntnntatnnntaannattntnnnnnntnnnannnnnnatnnnnnannnnnnnnnnnnnnnnnnnnnnnnaaaaannnnnnnnnnnnnnnnnnaaaanaannnnnnnnnnnnnnnnnntatnnannnnnnnnnnannnnnnnnnnnnnnnnannnnnnnnnnnnnnnnnnnanttannnnnatannnnnntnnnataatnnnnnnnannnnnnnnnnnnnnnnnnnntnnnaaatnnnnntnnnnnanttattnnnnnnnnnnnnnnnnnnnnnnnannnnnnaaaaaaannnnnnnnnnnnataannnnnnnnnnnnnnnnnnnnannnnaannnnnnatnnnnnnnnnnnnnnnnnnnnnnnnnnnnnnntttttnnnnnnnnaattnnnnnnnnnnnnaannnnnnnnnnnnnnnnnnnnnnnnnnnnnaatnnnntannntnnnnnnnntntta

SEQ ID NO: 4661 - DNA, 612 bp, Gossypium hirsutum
tattgagtctttactagatgtcaatctatttttcttgatgatcaagaaattacttgaaacgttagtaagaaaaagtaatatactttcttattaatatgtagagtctctactagtattgtcagatggtaagggggccatagggatatttatttcccctatgctacttaggacttggctgtgagtgttgtatttgtatgtgtctgacacatgtatgttcagcttttcaagtttttggaattaggccatattttgatatgggtcggacatggtgttagacatgggtacttcaagaaaaatgacaaaagaagtcagaacaacatggccttttcagcttggttaatgaaatgcgagggccaatgctggtttttgtttcatttttacgagttaaaaaattattttatatggtttgtgatgtaactatctttcttagtatgcaccatgatttacaattgtttgcattattctgatgtttacatgctattgcttccttcagctgtagtaacagctgtcactgaattgggcaatggaaagccaaagttctactccactcctgaagtgattgctttttgtcgtaaatggcgtctaccgactaatcatgtatggttgttctca

SEQ ID NO: 4662 - DNA, 628 bp, Gossypium hirsutum
  misc_feature (559)..(559): n is a, c, g, or t
ggccttcgtggtttccttcttaataatatactatctctttaggtaaatggcatatttagttcattaccgtcgattgtgaattctcatgctttgtgctttaacataggcgctgtcatctcttttgctttatctgcttgaaagatgtttatattaacaacgagttaaggtactaaagttgattgcatgattggtagaacctacttgtcagtagttggaaccttttcgtttttcaagtgatcaatggcattctttgaatgttgtaagatcttatcaactccaaaaaattattgccgcatccttttgcttaattgattatgaacacatatgtaccaaaacaagattcatcacttgtatacaaggggaagagcgtgttaatcgatagacttcattagggaaatgcttaaaaataaacaaaacatacaaggcatgacattattgagtattttcttgaatgaatctttgctgttactgatagtttccttgtatgcaggatgcttcgatatgtccgtggttgaagaaaccacaacattcttggaagtttggtccatatatgagaacngaatgtcagtcaaaggcaccaaaaaaatcccatttcttttcttgaaaatacggttgctcgccgtttgct

SEQ ID NO: 4663 - DNA, 614 bp, Gossypium hirsutum
ttgatgtaaacaatactttgaaaaccaatacaccaataaggcaaacaatgtaatcttgatagctttccacatgttgagagaggaacttcaatattatcaaatgaaattggaagacatatgatgaactaattaaagttacgcaatgactcccttcatttggctagtttgaaaaacaagaattataaagatctatcaacagcaatttcaagaaaaattggcatgggcaagtcaccatattcaacaagaacatgtagggttattcatggctaaactaggtgattccattaaattgaatgttcaaatgcacaaaccccctaacttaaccacaaatgggccccactagcctttgaatagaagcaagaaatgctacatgtaaaaaataatcagagaaacttggcaaggtacaaaaggcttatgttatggcgaggtacaaaggctattattgtaataatagctagagccattttcacctatattggcaggtacaacataatttgggcaatatgagcaaaatctacctatacacactagtactaccaatactgaccaaaatttataccaaaacagaacagtaaaatttgctgttccagtttactaccagaacaagggcattc

SEQ ID NO: 4664 - DNA, 619 bp, Gossypium hirsutum
atatggtggtttttattatcttaagtgtaagagcaaatgctacgactacatgttaataaaatctttgcttcatgcacttgcttactccatatttattgcttcatcaacaaataataattttcttctgtgcatcttttaatgttgcttaagggtcgctgtattcctggtaaaatattattgaccagaaggtcagatattcttgatgattcaggttcacaagaatgatctcctagttgtcaaagaaggttctcacagaacgatgctggtacaagtgatgacatggacacatccatggaggtcaggtttagagtgactgtagtatctttcatgtattctattacgacaatacgggaagatgatttagtcttgtactagtgtggctttagacttctttaaaggttcgtgattttagtaactgaaaagcattcctttcttttagggaggggtcagaaatacaaataattgtgatggtaatacaactgttaataagttaacatcttcatcctcgaagaatgaggatgctgcccatgaagtccagaactctgcaatgggcacaagaactacagattctgccagggttacgaagttcactaaagagctctcaggacaaatggtcata

SEQ ID NO: 4665 - DNA, 625 bp, Gossypium hirsutum
gatacaattctgagagttgcagatgaaattcaggatgaagaacctaacgtagctagaatttgtatgtttatttcttttcctttggtttgcaacatacttatgtatgaatattttgttattctatcaaccgatccatcatttctgctgatttttgttgcttatttatgttgctaattgtaaatcatgggtattggaagacatgtctaaattttcaaaattttttatgataagtagaaagttccaaagttatgtcttaagaatattgcatatttataaaatggttataggtcacttttattggtggtattattttcaatttgtatggctaatgaagtcatatctaatacacctagtatgagcttgtgtgatgagaagataagctcctcaattctagtgggagttttaagtacccttgcggatgttttattttttgttacttagtaaatttttggtgaatgaattatggccttagagggttttgagttatgtttggaagattaaggattggttaatgttaacacatttgacttgaacccttgcagaatgctatatatcttacagttagtagacaatgctttagtagttcaggttataggtgatatgcttgttgtttagcatgtagtct

SEQ ID NO: 4666 - DNA, 600 bp, Gossypium hirsutum
tggtacagctgttgcatcatttgttgttgtaaaacctggttaccctgaggcgactgcggatggttcttctgcattaagttaccactaagctgttgctgctgctgctgctgctgctgctgtggagttggtaacaggggactcgataagccactaacaggcagactctgcatggatcccggtaaaacggcagcaggcccttggaagtttgaagatggactctggttagaactattgaaggaagaggcttcctgatgaagtgagttagggtttgaattcatagagttctgcctactaagcagattctggtagttagtaagtgccaaagcagcttgtgctgaaccacttaaagttcctctaccgaccatgtgatggttgttgcctaacgggttgttcattcccggatgtaatgccactagcttattcagcgtattcctatcggttggcagaccctgaacgtttgctaactgctccatttcctgcattttttgtatttggagcttggctgcactggcatgtcgaagataatttttcaagccatctgcaaatatggtttttaagcaaacaaaattattatgtgccttaactgaataccacccaatc

SEQ ID NO: 4667 - DNA, 640 bp, Gossypium hirsutum
tctctaccctcttgccatctccttcaattgaaccaccctcgttactaccactagtagaaacctccaaattctgcctggaggaaactacctcatttatgccctcaacagctgcaatctttttgtgtgctgataatataggcttttgcttattaaaactaatttcctcatctaaaagttcgggtttttcaattcggtcgccaacgaaatcaattggtttctcattagcaaaactaacttctatttgagactcaaattctggactttcaggaacaaaatcaaaatggggttcattaaatttgcgtccatgagaccaaggagcagcaattacctgactcggcaaaggaatactcactgggtcactcacttccactcgtgggtcttcatcactttctgtctcagatgcggtcgcctcaaaagtctgctctttttcaacttcttcttgttcttcaagttcctctttttcttgccatggcaatttctctctagtggaaatgattggtttttgagaccatttatccttaatttggtccaaaaaacttggcttgggcttcctcttcttcttacttatatcaataccaacctttactgtttgatgagaaacacaataagatttgaatttgagtgctctgaaactgtattt

SEQ ID NO: 4668 - DNA, 645 bp, Gossypium hirsutum
  misc_feature (615)..(616): n is a, c, g, or t
  misc_feature (638)..(640): n is a, c, g, or t
gtgctcgatgggtcacattttatacgatgaaatcatgaggtataatcctaagaacccttattggttcaaccgtgatcgtttcgtcttgtctgctggtcatggttgtatgttgcaatatgctctgcttcaccttgctggttatgatagtgttcaggtaaagcttttaaactttttatccatgtccaatttggtgaaaaattggatttgggtttatttcttttcagtcctttttaatgttttgcatgaactgtggtgcaatgtgtaattagtacataaactttgatttggtgtacttgaacttgatttgaattgtggttcgtatatatacataaatacattcgtttattttcatatagtatcatattgatataattgtttgtgtgtataatatatcaacataaaatgttactaattcgataatgttgttagtgatttgagaaaataaaatcaaatcacaattttatgtataaaattccccatatcatagttcttctatgacattacacattatatttttgatatttatctctaaaagaaatgaaaaaaaagttgattattggattaaaaaactaaactttacagttattggattatgttacaggaagatgatttgannaattttcgtcaatggcaaagcnnnacacc

SEQ ID NO: 4669 - DNA, 623 bp, Gossypium hirsutum
ataatgtggctgaaattgttcccttagttacaagtttctatcaactactttttcattgatatgtgatagaattttagttagagatcagattgaagcaaattgaaataagtgcagtcgctgctagtacaaattcaaatcagcttgttttcaagataatgatcaagtatgaatctttctctgaattcctcccatatgagaaaagttttccttttgggcagaatctttcggtgcttggagctggatttctgaccttgtgattgaatctccaatggctgagatattggtaagtttagccgcttttttactttaatttctaagtttgatgcttggctggtcgtactgcaatttctgagattgataagcctatctaggtccagtgaataatatagttaataattgacataaatcctgtctgtatcatggtagcaactagcagttaaagaaactattaagtttggcagcttcttggtttagagataatggtggtggagccaatgcaataagaaatgcattctttaaaataagccattgattaataaaacagaaaactattggacactttaaaaaagaaaattagggtgaagctgaatctttattcttatgaggtaacaggaggatttctt

SEQ ID NO: 4670 - DNA, 358 bp, Gossypium hirsutum
aacatctctttttctatttatgcagggaggaattgttggctcaatgactggcagttgccgcttttacgatatgttaggtatgcttcctttgatagggattcatatttgttcatggattgacctatattcatcagttttatgaatcatatacatcaatctataggcatatgcatttttggtctgtttctcaaaatccttatgcttgggtttgttcgtttgtgcctacctggggttggatataaattgcttcagtttaagtgatctagaagtagtatctgaaagtttttctaggcataggctttagaaatatgtttctttcattaagcagcttttacggttggactgattcttaagaata

SEQ ID NO: 4671 - DNA, 610 bp, Gossypium hirsutum
taagtggaaaatttgcaaaaaaaaattggcagacaatgaatggtgatcatcaaagaaatttaaaaaggaactatggggaacaaacattgatggaatgacccttctattgcatcagctgtgtcatttcggaaaatcccattgtgtcccatgacaagtgcagcacttggggcttgtgcgagggcatgttctagagctgtcttccactcgtacaaatcttccgatgtctccgcctgaatttataaagcaacatggtgttagcttgtttaacatattcttcaggaaaatcatgtactacaagtagttcaaataattttcttcataaaaaaaaggaggaaaaaaaaaacaagtacataaaatattagctgaaacaatattcaattagagagaagccccttaagggtaaagggccgtcccttccccccattaggaaaaaatacagtcaacaacttttttttttttttaacaacaaccctggaaacaagaggaactataagcaaaaccgttgtgaccaactatcccaaaaaacacacaatgactatccataccttccaaaattattcaaatcaatgccccccaaagtcaaatttacttcaccacctcgttgtggtag

SEQ ID NO: 4672 - DNA, 629 bp, Gossypium hirsutum
tctaatctaccaattgataataaggtgacccgtttcttatttttgatgatttggttttttcatctgtcttattttgttatttattttttttcattatttttatgttcttttagataagctttttttttcattatttaattctttttgcatttgttgattatagtttcattgttataatcggtttttttcattttgttggatgcatatggcatttgaacaatttgttggataatttttattttttgcaattttctttggcttgttactgcaaatcaaatagattctttttataggcaggcagtggtagaaattcaagtgttgtgcattggtattaagtactatgtttggtgtttcaattttctatattttcggattggttgacaccaatcacttggatacatgcaggcttctttggcgtttacaagcctggtcattgcagctattcctacactatttgtaagtgttctgacatcatatttgtaacttttgttgtagtttttatatgctaattaacagtgatgagttagttgaaggttgttcatggggattttgtcgtatgcctactatatacttgatattttaaactaccccttatgcgataattaggaagtctatgtgagcctcaatca

SEQ ID NO: 4673 - DNA, 570 bp, Gossypium hirsutum
  misc_feature (17)..(18): n is a, c, g, or t
  misc_feature (559)..(561): n is a, c, g, or t
gccctttctctttggtnnccccttcttacctctccaccgccctctcctcctctctcgtctccctccacctcacccccgacggccaggccgatgcccttgtccctcacccttcgcagtcttccctctgtttcgtctcagcccatgtccaacccacccttttccctcaagcccttgacctcattcgcctaccccccaaccatttggtggcatatttacagcagcaaaacgactgcttcaggactgagtacagtgagctcgagtccgattgcgatgcccatattccatgggcttccgaagccttaggctgcctacctgaagccgtcaatctctggatcggaaatcatctctcccagacttctttccacaaagaccattacgagaatctctacgccgtcgtttccggcgagaagcattttttgcttctccccccaaccgacgttcaccgcatgtatattaaggagtacccagcagctcgatactcctattcccaggtttttacttgaagaaactgggtgcttgaaattactgtcagcatgtgcaaatcctgcttcatttcgannngtgtatgga

SEQ ID NO: 4674 - DNA, 606 bp, Gossypium hirsutum
tgcataacaccaatccaaaaatgaatttggtcttcaagtcgatacctatggtaaagtatcaaccaggaataaatgcataaacgaggaataacaatcatcaatatttaaagatcacatttaaatgctataagatgaacttctttcaggtggtaacagattttcctttcaaaataaaaacatgtaattcaagttaagttaggatcagaaaacctacttcttcatctgggttgacagaagcattattggatccatcagtgacatcttttaaaggattcccctgcacaatctatgtacatgttagaggaaagaaaacaaccaccttaaaaagctcgatcataaaggagaagaatatgtatgtacatgttcatcctggttaccagggaagttcccttccataattgaaggcttaacatcaatttttgtttcctgtataccatatatataattcattcaacaatttttaaccaaagtagcaagtgaaaataataaaataaataaatatttgcaaagtagagaacatccccgtgatacttacaggttcattttggtccatggaaatactccttcctcctttactaagatctctcagcgttccctgtacgttca

SEQ ID NO: 4675 - DNA, 604 bp, Gossypium hirsutum
  misc_feature (598)..(598): n is a, c, g, or t
cagcagagagagtttagagttttaatgaaaagatattgatcatcgtccctacccggttaaaggcagtttgttgataaccaagtttgatgagctgagccagatcctcccgcagctgtttcacaattgtaaaccttttgttctttagcagcttcagacggcactgaacacgcttgatcagcttcttactgcaaacaccacagtacataagtaaaaacagaaaccccatccaataagcttttctctcaggaaaaaaaagggtaccattttgaagcttttcgccagccgaaaaagatgtcaaacatggttcaaaactagaaaacgttctcctccttgtaggtttcagcagttagagagcagcaacctctgaaactaaaactaaagcttgagtgtgagattaatgatggaagttgaaaagggtaacatgtttggtggtgtagatgtgggaattgagcatgcatgggaattggttggtcagttagtgtaatataaattaggaggagtgggtttgaaaaatgaagaaagtgggagcagacagttccattcttttggaagaaaaaaaaaactgctcccaccactcccctaatcataacacttggcntgtctc

SEQ ID NO: 4676 - DNA, 607 bp, Gossypium hirsutum
  misc_feature (13)..(13): n is a, c, g, or t
tctggtttggtgnataatgaggtatttctgcttcatctggctttgcctgagggccgtcagccggtattccatcgaaaccatatttagatgaagcatcgctataatcgccagccgaagcaataactagcaatgaaagtagaagtaaggagaatggcaaggagagacgtgggagagccattgcgatgtagttactatatgaacaaagaaaggaagatggtggctgaagaaatcggctcacaacgttgcctatttatagggaaatttgttaccaatgattattgattatgattagtagttaggaaataaaataaacaatgtaggaacattacgttgggtgcacgatcccaacgtgatttgtagactggggtaccactacctaaataatctatatctaatgtacatggacaccttttcctgcaaccctaatgaagatcgtcaaatgctatgaaaatatatactaaaatcttgttaaaaattaaccgtaaaaaaattatatgcctgaagttacatatctattacaggcaaaaaagcgcatcaccaagaaggaaaaaaggaaatgtaataggcagcttgaaacctgccaggttaaggcaaggacacgtcatag

SEQ ID NO: 4677 - DNA, 385 bp, Gossypium hirsutum
  misc_feature (329)..(329): n is a, c, g, or t
atgtcataaataaattggacaacgtcaagacatgttggtcacacgattttttttcttggcatttttttctccaatacagaattaacaatgagcaaaagcctatatcctaaggaacttaaatgcttgaaatccataaaggaaaagaagatgtagagagaaattacaagaatggagagttaaatgcaggaaagagttatgcaaatgtgttatgaggactgagaatgaaagagagtagacaaagaggaaaacgatgagacaagtatggaggtttctcttgttgagtagtttagaatatgaggatttaaagcattctggttttggaatttgancttttgggaccgaaagttgattatagggtcatgcatgggtattataggttcatgca

SEQ ID NO: 4678 - DNA, 611 bp, Gossypium hirsutum
gtactctttggccatcaggatcaaaggcaattatctcatcacaagctgatatacaacaaagcaaatgtgaagaggaaaacattagaattgaaacattgcagcagaactgaaaactaatcttaacttctcttgcacataaaagttgaaagacaacacaagtaattgcaaggtgggattctaagaatgcattgcaatattcaattatttctatataagagaaaacaagaacgtcaatttgacaaaaaatatgggcacattgtgtccaaagaaataaggaaacaagtgattcattcataagtaaactacagatataattgcagcattcttgcaggtaaaagcaaagattcataaactagattgaatagaacatagttaagtaaagattctaaagccaagctaattaacaggaattaggagaagaaacagaagaaacaaaggaaagaataagactgaagcttcttaagagaaaaccaagccccaatattttcatttgtaccaaaaatagaacttgagaaagaaatgaagttaaaagcaagcatctcaaagcccttagaaaacggttaatcagaacatatctaatagccccaagtgcccaacagaacacaacatca

SEQ ID NO: 4679 - DNA, 480 bp, Gossypium hirsutum
  misc_feature (62)..(62): n is a, c, g, or t
  misc_feature (66)..(66): n is a, c, g, or t
  misc_feature (453)..(453): n is a, c, g, or t
  misc_feature (459)..(459): n is a, c, g, or t
  misc_feature (462)..(465): n is a, c, g, or t
taggcagttgtcgttgtcagctttgcttttcttgattatttttataccaccttgcaggatcntttngatttgctgattattttaacttggtatattttaaaatgattaaaatccttaaatcttgttattatctgctgtacacgttttctgtctatatgtttctgtattttttttttgtggtttgtctgcaatcatataggttctattgctgtgaatattttgtttagtgcattttttttgattgaaaattaatttttttttcttcaattctttctcatttatccaataaacaaggggaacttgagtacttaattggtcgtttctgtttttactatggttacatagatccaaaattataacatgcattagagtgaggttcatttactgagtcaggcaatgaatgctgttgcagatgcttaggaatggggcgtgggaccaatgtatgtctgcttngagccnccnnnnaggataaactttcaa

SEQ ID NO: 4680 - DNA, 627 bp, Gossypium hirsutum
ctttgatgaaactagagtactctcattatttaagtgaaaaggcataaagttttctgtgaacaaatcaatacaaaaatatcatcataaagttttctgaatgtgtttaatcatgatcaagttaatagtattgagctttcttatttgattttttttcccaggagttatggaatattccgagtatctgaacccaatggaatgagtctcctgaaagaatgccaagagaaaggatctcaatttcattctcacgaagaaacagtagatgggagccccatatatgaacgctgcactcatgtctacaaaaattcaaatctaaggtttgaaatctttgacctgcgctgagatacaaaaatgtacataataaaatgggtgcaacctgcatgccacactacaggatctagcttattagaaacgctgcttaacaagtgtgcatattactgtctttgtagttgtaataatgatgagaatgatcgtataatgtgttttaataaattacattttcatttgttatgtatgcattccagtttgtttagaaatcgttatttcacactaatatcatagtcttccagatgctgtaatgggatttggaggactacaacttctccctcgacccccaaataattcgcctgg

SEQ ID NO: 4681 - DNA, 431 bp, Gossypium hirsutum
  misc_feature (427)..(428): n is a, c, g, or t
aagcacctcaaattttcaagaaaatttacaatacttaaatcaaaaactcctaacattcataaataagaggataataaatacttaagtacactcaaatccttttgactgttgcaacagcagtggtgccaattgatttgaagctaaagcaataatttttataaattatttaaaattaattgtaaaaaatataaaatataaacttatttttttattttattttaaattttaatatataaataattaagcggatgttaactgaggtatgacattatttttattataacaatcaggacaatgtgaatttaaacggaattttgaatcaaatagtattgaaaaggattttcatcattatttccattaatattgtacaatcatactgcaagccaagcaagtgcaggacaccctaaggctcatacaaaccctcagnntct

SEQ ID NO: 4682 - DNA, 616 bp, Gossypium hirsutum
tagggaatcattgctcgctagagttggactaatgggtgtggtttacttgagaacgatgcctcctagagtttctggtgataaggatactgagttttcatttcgtgttgaaggaactagttcggttaagaggtttgttatacagagttctcggtgtagtagcctaggaaatggaatgtttcatgttagaactcccccatctgaggagcctataccaattttgaagtacagtttgttacctaggttgacaccattgcctctgagagttaggttgatcaagcgtcttagtgggacattactttctgtgatgatacagtatgtttcaaatccggagttactagcaccattgactgatgtaacttttgttctgaaattgcccgttgatccaacattgttaaaggtttcacctaaagctgtgttgaacagatcagagagagaactgaagtggcatgtgccagaggttccactgaagggtactcctggcaaattgagggtaaggatgcctttggattctgctgacattgatgaagaactagaagttgttggttatgtaaaattttcagtgcaaggagctacttcattgtctggggtctgtctaaagcctgctaccgagggtaag

SEQ ID NO: 4683 - DNA, 606 bp, Gossypium hirsutum
aaagcaaataacattctccaagtgaacctatcagagtctgcatcgatgatttttcaacctcactctatacaacaatagtttctcgaaaataaataaataaataaaattattcctctctatatgaataaagtcattcaaaaattggcaacttctcaactattggtttctttttactcatgctcaaatcttaatctctatacaaaataaaatttgcaatttcaccgagaccagcctctttgtaacattctgcgatgcggtccagatagtccccccaagttccatcaatggaagctaaatccagcagaaaagcagcctcatctaatgctacctgtagaggagtttcagcattgactaagttaacaatcaatgaaagaatttggcccatttttttaaaaataccatagaagtgttttttccttgtatcaatggctaaatttttgcatgacattattgtttccatgatgttacctgagccaaagccttccctttcttcaagtcttcttgtctaccttcttccgacaccttctctttgatgtactcgatttgctcatcctcccactgtgcaatactggcaacatcctgaatcataatacatccatggaagag

SEQ ID NO: 4684 - DNA, 612 bp, Gossypium hirsutum
acccatcacctccagtatcgctgttactgcctccttaacagtcctctacaggtatttcacatcattagaaggaatgtaatgatgaagccagccagtagatgagacaagtcactggaattataatttaaaaaagatactacccaaagtattcatcatgcactgaaaatatatgctgctctcaaaaggacataaaatgcatgctgataatgaaacaaatagaacagacataatttttcaaggtccaaatgaagcaaaatgtagtaagtaaaatccataatagcttcactaacagcatacaaaaaattaaatgccaaaagtatctgaatgcattctgtgtcaaattatggaacagcggccaaatgttttaccacaataatcaaactctgagatcattataccttcaaagagccaacagttgcaaattctggaatttcaataaataattctggtaccctgaaagatttgatcctgagcttcactgagtaaaaggaaagatatcttgatgtaaaaacctctttgtatgccaaacaccaatcaagtgaaaagatacatatggatagctccatcaaaggctttcataccatgaggatccctaaagttgaatgatttgcg

SEQ ID NO: 4685 - DNA, 648 bp, Gossypium hirsutum
  misc_feature (440)..(440): n is a, c, g, or t
  misc_feature (444)..(444): n is a, c, g, or t
  misc_feature (447)..(447): n is a, c, g, or t
  misc_feature (449)..(449): n is a, c, g, or t
  misc_feature (502)..(503): n is a, c, g, or t
  misc_feature (536)..(537): n is a, c, g, or t
  misc_feature (546)..(548): n is a, c, g, or t
  misc_feature (553)..(554): n is a, c, g, or t
  misc_feature (564)..(570): n is a, c, g, or t
  misc_feature (612)..(627): n is a, c, g, or t
  misc_feature (632)..(637): n is a, c, g, or t
  misc_feature (640)..(641): n is a, c, g, or t
  misc_feature (644)..(644): n is a, c, g, or t
taacgtaacttcccaatggcttaaataaaaactttcgaataatttactgaccattttataatatttttaaaattgaatgaccaaaacataaacccgttaatagtttagtgacattagatttagtttacccaaatttttaaaagtcaatgacaacttcaaaaaaaagttaaattgtgcttttaagtacctgtacttttaatatatttaaaatttagtctccttatttttatttcaagaaatttaatccctttacttttcaaatttcaaaatgtaagtctaattgttattactattaagtttttttattaaatttagatttattacaatgtcattttttacattacataactattaagcagggagaagcaagaaaacctgcatactggtctttaaaccttgaattttcaagttctaaccatcagatgttcccggaaggaaantttntgncnattgctccttgatgcaataccttgcaagttcaaaaattttcaacaactcaaannttgtgttcttaatttttgttttttttcttttcnnaggaaaacnnngaatnngttgattggnnnnnnnatgtcttattaaagcgtaatgctacagaaaatatctatcatnnnnnnnnnnnnnnnnaaaannnnnnacnnttncccc

SEQ ID NO: 4686 - DNA, 409 bp, Gossypium hirsutum
cagttgatcagtgtggtggaaaagaaacttcactgcactgacactctaaaccaaacaacacagcagtgagtttggcaccatcttttccttcaaaacgtgccgcactgcctcaaaacctcaagccaaaggaagcctaagcctcaaactagcatctctcacctaaccttcaatattccttaatattacaaattaaagaatggtaataccgtaatattatgtcaggtcacataaatttgtgtataaagtaattaacactgcatgttcaagcgtctgaactcaatataaattttttaaagttatttttaaaataaaataataataaaaagaaagtcaacatttgaaagtctatgctgaaattatgaattaaaaattgtgttaatccatcagacgtgtaggagaagaaaaacaa

SEQ ID NO: 4687 - DNA, 650 bp, Gossypium hirsutum
cgattctctatgccccagctttatacaggttctcctcttctttactggagttttgctcaagttggaaaccgggaaataaattcattttacaaaaaagattgttgtcctgatttaggtgggaatgggatgagtatattaattaattaatatttttttatatataatataatataatatcatttcaactccaatttagaggaaatggagataattagtcatttcatattggattatgtttttcattttgtaattgagattttttagtttgatgtaatacagtttaaattacaaggattattcgacctacttatctccattggaatgaaaaggattaaggaaaaatacaaaaaagaagaagaaggaaaccaaaattgaaaactattaactaaatgtgcaaagtttttattgtttaaaaacttttaaataaaaatttatattaaagatacaaacggtaaaaaaattggatacaaggaatatttcttatgaaacagtccaaataaaaatttatattaaagatacaaacggtaaaaaattgattttgttaaatttattttaattattggaggccagtggcagagggtactacattttactgctttagtctgaagatggtataaattccagtaatttactcactgtgtgtccctatt

SEQ ID NO: 4688 - DNA, 622 bp, Gossypium hirsutum
aatttcttctctaatttcataactgccttgcacctcgctgattggtgctaaaaagatgaagattaagaaattactcaaaccgcaccgtttcattaaacggtattccccaaaacgaatcggttaagcaaagctcaataataacagaagaaacagaattatgaaatgttgacggttgaggttagaaaccagagaaaatgatatatttacattcttcctttactgcctaaaaacaaaatttgacttggaaagtttaaattgaaatttccatgtttcttaaaaaagtagttggtaaatcctggcttcagcctcaatcctggacttgaaagatttgaacccctctatagttctaattgctttatatataattaagctttattaattctttagttcaataaagtcttcatttgtgcacatttggagttggttcattggatcatttataaatccaattgctgaatgcttgctccttatttgttaagttgatgaatatttctttaatgattgtattgtaagtaatttgtttcaatacagtaagaaccccatctcagaacacctcccacacaattgaagatcatacattttcattgaaacttccaacaggccaatagaatccagtgctatg

SEQ ID NO: 4689 - DNA, 589 bp, Gossypium hirsutum
  misc_feature (561)..(564): n is a, c, g, or t
ttccttgattgattctcatttttcctgatcatggttattcaacataattcagttcgattttcttaatgctttcggtttaagaaaatcatgttattcttaccttcttttacttttagattcaacatctgctccctccttgctcgcttcctcacattccccactaagaccaacggaattttcagaagctccaccggtggtaacatgttcgtaaggtgccagagctttgacttgataagccggaagcacagacaacctgacttcactatgattttcagctctagtttcagaaccttcgcccctttcattatgattattactccacaaggagttgttggcatcttgaccggttccatcactagtaaatcctaatccttgggacgagtttcgttttggaggctgaggctttggatgattgtgttcacccttgtaaacgatttcagctatttggccatcaagtgatctttcgactttcttctttacaggacaattcggatgcgtacacttatagtagcttcgcggatattcgctccctttcacttgcttttgtccatatttcctccnnnntatacccatcataagaaggtcgatc

SEQ ID NO: 4690 - DNA, 627 bp, Gossypium hirsutum
  misc_feature (25)..(28): n is a, c, g, or t
tgacttaagacacaccaacaaaacnnnntctggcatccatagcctaattaaatagagatggacacttagatgaactagtactagtcggtcacggactcatagtgactgtatgataagcaacaggtcaacggtcaaggctaagctggaagcatgtaaaaaccaggcacataactttccattcagtgttaacatgtaaagcctcaacgggtaaatagaggaggaaaatggaaaagatatatagtataaccaagtgaaatgaagacaattccagataactttacagatcccatagttttaaatctttgcaaaaggaagatgaattgaataacccccaaaacgatctataaagaggattagacaaatttctttaattaacaatttttcttcctttttacctcaattttcattttcaatgcttctttcccctaattttctcgcaaaacaaacagacgcaataactggatccatcctattgttcgtaataaaaccctaaattcagattgaatatacatacagttacttaaattgtgtgctctacttcaccgagatgcaaaaaaaatactaaaaaaagcactttaaaaaataaaatcagcatcagatccaaatacccgttactaagaagcacac

SEQ ID NO: 4691 - DNA, 571 bp, Gossypium hirsutum
  misc_feature (335)..(335): n is a, c, g, or t
  misc_feature (449)..(449): n is a, c, g, or t
cctgcacaattgaaattgtggatgatgtgcaggctgctattgaccatatacatcaacatggaaggtatgtcttactcattttctttttattgcttcatattttcctttgaatagttaagctgccttcccctagattctaagaaccttgctgtctctgcagttctcacactgattgcattgtcactgaaaatcatgaagttgctgaaattttcttacatggagttgacaggtaggcttacttctaagttgaagatctactttatttggacagtcacttaagtctaccatgagactttttctcattatcatgcattgctgcctggtttagtatgganatcaatttttcatcttccttgtccgtacaacactggtgacattgcaatttgactatgtttgtgttacatggctgcagtatttcataatgcaagcactcaatgttgtgatgcaancctatttggacttggtgctgaggtattcaaaattcaaaattcctggtggagatataagaaaaaggtacaataaactagactgattggcgcatgagtttgaagcaggagtaataacaactagc

SEQ ID NO: 4692 - DNA, 1324 bp, Gossypium hirsutum
  misc_feature (621)..(630): n is a, c, g, or t
  misc_feature (632)..(634): n is a, c, g, or t
  misc_feature (637)..(641): n is a, c, g, or t
  misc_feature (643)..(650): n is a, c, g, or t
  misc_feature (652)..(652): n is a, c, g, or t
  misc_feature (654)..(660): n is a, c, g, or t
  misc_feature (668)..(672): n is a, c, g, or t
  misc_feature (674)..(674): n is a, c, g, or t
  misc_feature (676)..(684): n is a, c, g, or t
  misc_feature (686)..(687): n is a, c, g, or t
  misc_feature (693)..(696): n is a, c, g, or t
  misc_feature (699)..(699): n is a, c, g, or t
  misc_feature (703)..(704): n is a, c, g, or t
  misc_feature (706)..(710): n is a, c, g, or t
  misc_feature (713)..(718): n is a, c, g, or t
  misc_feature (722)..(725): n is a, c, g, or t
  misc_feature (727)..(727): n is a, c, g, or t
  misc_feature (729)..(734): n is a, c, g, or t
  misc_feature (736)..(736): n is a, c, g, or t
  misc_feature (741)..(751): n is a, c, g, or t
  misc_feature (753)..(757): n is a, c, g, or t
  misc_feature (760)..(776): n is a, c, g, or t
  misc_feature (778)..(779): n is a, c, g, or t
  misc_feature (781)..(781): n is a, c, g, or t
  misc_feature (783)..(799): n is a, c, g, or t
  misc_feature (801)..(806): n is a, c, g, or t
  misc_feature (808)..(810): n is a, c, g, or t
  misc_feature (812)..(819): n is a, c, g, or t
  misc_feature (821)..(836): n is a, c, g, or t
  misc_feature (841)..(855): n is a, c, g, or t
  misc_feature (866)..(870): n is a, c, g, or t
  misc_feature (876)..(883): n is a, c, g, or t
  misc_feature (888)..(888): n is a, c, g, or t
  misc_feature (890)..(901): n is a, c, g, or t
  misc_feature (903)..(906): n is a, c, g, or t
  misc_feature (908)..(913): n is a, c, g, or t
  misc_feature (918)..(918): n is a, c, g, or t
  misc_feature (920)..(921): n is a, c, g, or t
  misc_feature (923)..(929): n is a, c, g, or t
  misc_feature (939)..(940): n is a, c, g, or t
  misc_feature (942)..(947): n is a, c, g, or t
  misc_feature (953)..(953): n is a, c, g, or t
  misc_feature (955)..(958): n is a, c, g, or t
  misc_feature (960)..(965): n is a, c, g, or t
  misc_feature (967)..(976): n is a, c, g, or t
  misc_feature (981)..(982): n is a, c, g, or t
  misc_feature (986)..(988): n is a, c, g, or t
  misc_feature (996)..(998): n is a, c, g, or t
  misc_feature (1000)..(1005): n is a, c, g, or t
  misc_feature (1011)..(1013): n is a, c, g, or t
  misc_feature (1017)..(1018): n is a, c, g, or t
  misc_feature (1020)..(1025): n is a, c, g, or t
  misc_feature (1032)..(1035): n is a, c, g, or t
  misc_feature (1038)..(1051): n is a, c, g, or t
  misc_feature (1055)..(1062): n is a, c, g, or t
  misc_feature (1064)..(1075): n is a, c, g, or t
  misc_feature (1077)..(1082): n is a, c, g, or t
  misc_feature (1084)..(1087): n is a, c, g, or t
  misc_feature (1095)..(1123): n is a, c, g, or t
  misc_feature (1131)..(1131): n is a, c, g, or t
  misc_feature (1133)..(1143): n is a, c, g, or t
  misc_feature (1156)..(1167): n is a, c, g, or t
  misc_feature (1169)..(1169): n is a, c, g, or t
  misc_feature (1172)..(1174): n is a, c, g, or t
  misc_feature (1177)..(1177): n is a, c, g, or t
  misc_feature (1179)..(1186): n is a, c, g, or t
  misc_feature (1192)..(1194): n is a, c, g, or t
  misc_feature (1196)..(1204): n is a, c, g, or t
  misc_feature (1207)..(1212): n is a, c, g, or t
  misc_feature (1216)..(1216): n is a, c, g, or t
  misc_feature (1225)..(1226): n is a, c, g, or t
  misc_feature (1229)..(1229): n is a, c, g, or t
  misc_feature (1237)..(1240): n is a, c, g, or t
  misc_feature (1243)..(1249): n is a, c, g, or t
  misc_feature (1251)..(1259): n is a, c, g, or t
  misc_feature (1263)..(1263): n is a, c, g, or t
  misc_feature (1265)..(1267): n is a, c, g, or t
  misc_feature (1269)..(1271): n is a, c, g, or t
  misc_feature (1273)..(1275): n is a, c, g, or t
  misc_feature (1277)..(1277): n is a, c, g, or t
  misc_feature (1279)..(1282): n is a, c, g, or t
  misc_feature (1284)..(1286): n is a, c, g, or t
  misc_feature (1288)..(1288): n is a, c, g, or t
  misc_feature (1290)..(1295): n is a, c, g, or t
  misc_feature (1298)..(1309): n is a, c, g, or t
  misc_feature (1311)..(1318): n is a, c, g, or t
  misc_feature (1320)..(1320): n is a, c, g, or t
aagagatgatgtacgattgaatggagtaggtttgtcaaattgctttctacattgatttatttaaaattttgtgtcaagatatattgaagcatttttcttgaagcatagcctacggaaactactaagttctgttacattccatgttgggaaagtcttatgcaactagttgacatcatttaaaagtgaatgcctccagtttgctttaactcactgctctgcataacataatgtttattagggtctttattatgaatgtactcacctcggacatcaaggccaccttcacatgtgcagctgtgtttcatcatgatcatcataatatatcctcttaaactaataaattctaatcttgcatttgtagcatttctaatgctcttggcacaaattggattgtttggaaatggacatggaaatgatataaacagcttgagttctgatgaagcagaccacttaatgcaaacgatagaagatggactagatgaatcccaattaagcgtattgtttgctgaggccatcaaaggcccacttctttcatctgacagccaagtgcaaatcagcacattggatctgattttccactacttgacgtgtggagatgctttctccaaacagattcagaannnnnnnnnncnnnccnnnnncnnnnnnnncnannnnnnnacacatcnnnnncnannnnnnnnntnnaataannnntcntacnncnnnnnttnnnnnncacnnnnangnnnnnncntttgnnnnnnnnnnntnnnnnccnnnnnnnnnnnnnnnnntnnanannnnnnnnnnnnnnnnnannnnnnannnannnnnnnntnnnnnnnnnnnnnnnntttannnnnnnnnnnnnnnttttttacaannnnntaaaannnnnnnntcctnannnnnnnnnnnnannnntnnnnnnaaacntnncnnnnnnncatctatacnntnnnnnnaacaantnnnncnnnnnntnnnnnnnnnntattnntatnnntttttttnnntnnnnnnttcacnnnagtnnannnnnnttattcnnnnctnnnnnnnnnnnnnncttnnnnnnnncnnnnnnnnnnnncnnnnnntnnnnccttcctnnnnnnnnnnnnnnnnnnnnnnnnnnnnnctccactnannnnnnnnnnncataaccaacccnnnnnnnnnnnntncannnttncnnnnnnnnaaaacnnncnnnnnnnnntannnnnntctnccctcttannttnataacgtnnnnacnnnnnnncnnnnnnnnntcantnnnannnannncntnnnncnnntngnnnnnnatnnnnnnnnnnnntnnnnnnnntncttt

SEQ ID NO: 4693 - DNA, 640 bp, Gossypium hirsutum
  misc_feature (464)..(464): n is a, c, g, or t
  misc_feature (598)..(599): n is a, c, g, or t
  misc_feature (612)..(613): n is a, c, g, or t
  misc_feature (623)..(623): n is a, c, g, or t
gagaggaggaaattgaaggagcgaaaagggattcagagctagcgttttggactgggagatattagttgggggttagaggggagggaacgagtgactgaggattctcgcatggaagggcggaggggagttttccggcgaaaggagaaccagccgatgaggggtttctgattaaggttagtaagggtgaggcgggaggagtcgactcggccgagtgagtcatagaaggaaagaaggggaagggaggagaggatgctggaaatagcaacgactagttgtgaatccggagaatattggacggaatcgtcgaagagggaagaaagggctatgctggtgaggtggacgaaaaggacgccgtctacgtcgggaggggaagatgataggtgttggatcattgacgccggcgttggcccaaatgttgttattttctgcaatacatcatcgcccatgacgtgaaagagctaaangaaaaaaatagttatggttatgggatgactgagatgcgatgaaaaaagaaagggtttttgcgtgtaccggggcctggctttcccttacaactgaaaatttgggttaaaaactgaaagtccggggggttctaacnntgccaaaaaacanntctctttctnacggggttttgtgggtc

SEQ ID NO: 4694 - DNA, 629 bp, Gossypium hirsutum
tgtctaacttaatatcgttgtttgggtgtttttagtttttgcatatgcacgaccaattccatttcctcattggacttggatgatggatttttgatgattggtgtttacctgcttgattgccacattgttttattgagatataatcctccaatgatgttccaaatacatggaaaactttgaaaaaaattaaacacatccttgttggacatgtctcatccgatacaccgggtttgagtaacacagcattgaattaccaaattaaataacgctatcgaactaaatttcttcatagccaaactcaagatagatccacttaatcagtagtgtacatcagtactgtcttttgctcagcaattttcaaaccctgatgcaggtagtatggccttctagtgtttggttttggattactcagtgacctgagaaaatacaatatacattgttaaaattctataaatcgtgtatttgtaaaaaccgactgctagttaatcacgatagaaaaagttaattgaatggttggttgcattctgattttaaaatttaatatttttttggcaatttaatgttattttcttgtaataaatttacttgcccccataatttcccatttctgatgaagctgctagggagga

SEQ ID NO: 4695 - DNA, 627 bp, Gossypium hirsutum
ctgctagatgaagtatgtttcaattaagcttctttgattacttacctcaattaacagtgaggttgaaggaaagaaatatacttctcagttacaagcaaatttaaaacggatttttccccattccatatctactaggttggtgcaggaactaatccccttgaaggagcagcactgggaatgtctctgctagaatcttttgctagaagtggtgcattgttgacaatagctacaacgcatcatggcgaacttaaaactttgaaatataggtatatagttgcttgcttcagtctactgacacatctactttttgaaggaaatataatctgtgatcaggtttatggtttatgattattgtagtttcaactcattcatataaattatatgttgttatctatctcctgtctctttcatctataataaggatggtgttgctgcaccaaattcttgatgttatattatgtttggcagtaatgatgcttttgaaaatgcttgcatggagttcgatgaagagaattttaagccaacttacaagattctttggggagtaccaggtattcagttttgagtatgtgacaataatcaactacttgattcttggactgttttctgctagctaactggtggctt

SEQ ID NO: 4696 - DNA, 635 bp, Gossypium hirsutum
atagatgacattgtgaagatacatgcatgcatgcatacatacatacatcgacactctggtgtatgcttctgtttctgcagaagtcgtaaacactatggaattttacatgcaggagcattgaactaataggggaaaaaaaggaataacattagcttaatcatcctgtcagaaaacaatataatggaactacacctagagactagttttctttattttgtcttctaagatgatctgtaactcttcaggttgacaagggacagttagagctcccatttgttggaatccatattcctctttagcttgctctaatagccttaaaaacgctggattcctcaggtaactcagctccaagataaacctctttgattttccacctttgactgcaattactgcaaaatgtccttccttcacatcgtttggtatctttgtttcatcaacatcctcatcatactcaatgttatttccatcgcggccccttgacggtaaccctgagagaaaactctttagccttttcatcaaaagcctaactattacaagccctgtatgacgttcccagttctgctgcattttcaggcacgctggataactcttggaaatactttagtgtttggttttgtgcctgattggtggatcct

SEQ ID NO: 4697 - DNA, 579 bp, Gossypium hirsutum
ctgtgagggacgattggcagctgacgacaaatacgaagaggaagaggaagaagccttggaaaaagttgttgaattcttccagtctaaatatttcaagaaggattcagtcatcacttaccattttccagcaaattcagccactgctgaggtatattttgagtccataagaaaaaccattcattcattcattcattcatgttttaatatgatagtttttgtgtatgtgtggatgtgctcaaacagattgcattcacgacggagggaaaggaggaagcaaaaatcaaagtagagaatgcgaatgtggtcgagatgatcaagaaatggtacttaggaggaacaaggggagtgtctgcaactaccatttcctccttagctaataccctctccgctgagctttgcaaatgaacctatgctgttttgttaccaagtctttcctactaagaaccatcctgtttgttgtgctttctcttccaataaattatgatatgattggagttttcgcttatttacaaatccatttccttcactcccatgattgagtgaagcccaaaaatgaaaatgccagacaatttgctttca

SEQ ID NO: 4698 - DNA, 630 bp, Gossypium hirsutum
  misc_feature (573)..(573): n is a, c, g, or t
  misc_feature (596)..(601): n is a, c, g, or t
  misc_feature (605)..(607): n is a, c, g, or t
  misc_feature (617)..(619): n is a, c, g, or t
gttgaggaatatgaaaataatgatgtggtttagggaaaaacaaaagtaaatcaatagaattaggttgaataaacgagtaagtaagttggaactctagaaaacttatggttataaaagagcctctagtatttctctattaatacaatgaaaataataagaacaataacaatattgttgctgtaaagcttacgtttatttatactaatattagactttcttgcaaataaacttttaatcctagccctagatttaaacgctaaagaactaataatcgtagccctagtgattcgcaatattgtctaataattaataaatattactgaaataaataaataaaattttaaagctctggcgtctaataagcacttacttttagttcatattttatatagagaacaatattaatgatgttggctgtaaagctttcgatttatttttactaggctttcttgcaaatgaagtttttatcttagccctagatttaaactctaaaaatatcttataatcctagatccagtcatccacaaaatgtctaataattaataaatattactggaataaaaaaatgaaaanttaaaagctcctgcgtcaagtannnnnntacnnntaaaaattannngctcctgcgtc

SEQ ID NO: 4699 - DNA, 596 bp, Gossypium hirsutum
gtggattgtgtagatttctgcctagtggatcaccaaagtccgaatttctctcaagctcatctacacttaaagaagtgccaccaaaacttggggaagtttttcttgttattgcttggcatactatggtatcatcatcatcttgtccctttcctttcccagttaaattaacaaccacagtatgacttaatttctcagatgatggagtctcaaattccgaaggccaactagaaccttttcccacttcattcttcctggtggatccactgtttcccatcagcaacggatcttcacctaatccaagtgaaactgaaggaatttgtccccctttatttgcatcgtgtcaaaaaaaatcacactcctctggctcatctctacgtgtatccatctgcctgtaagcttcaacttctttctccaaaaggtgattctccttctccctcccgacaagggtctcttttagaaggttcatctcttcttcatcataagcaattttttcttctatcatcctttgatactgcgttgcttccatttctatcgatgccttatcctcttgtagacgcaaaatcattgccatagctcatcagcagcagaagaagaag

SEQ ID NO: 4700 - DNA, 594 bp, Gossypium hirsutum
tccactatgctggtttggatgcctcgatgattgaggccgtctatatccatcagggaaaacaaagccaggaagctgcttcctaaaaacatgagaaacataaatatccattcacggtttccaatacaggtaaatacttatctcctgtctgaactcatcaactgttccacgtatgtcaaattgttgaccttcttgaccagtcactcccactttcctctgcaagcccatgaagaatgcacaatgtgcaaactgcttggatgtatctacatactcatttgggtaaggatgacattgcaacattccatttgtgtcctgctctatctgcagcgtgacagaaaccatgaaaaaaagaaaatattcactgcactgaattcttatcttaaaagtcataaaaagaaaattttagctcagacatcaaagctcgatggagtactctgttatgcgccttggcgtaggatctagccacaggtctagacgagaaagaattcttgtttcgacctatggttactcaaaaagacagattcgtccttgactgaaccccctctcaaaataacgtttcttttgatagaataattgcttaccactttaattcacatt

SEQ ID NO: 4701 - DNA, 648 bp, Gossypium hirsutum
ggaagcgccactggaaaccgtcggaagatatgaaattcgctctaatggaggacgttgccggaagtatcagaggaggacctccgtactttgataccggagctggaaccggaagtgctgatgatatttgatcagaaccactgtatgtattcattttaggcatcctttcccacatgtaaaattatttactctcacaatatattgtactctgcaacccatacaaatatatgtacatgttactcttattttcttgttcattaaaatcccacctttgatgtaaatttgaaactgctggtttccttatggaacatactgatggttttttctttcatttgtacttcaatgttgtattcaagtgtgtagctttgtaataggaacatgtgacaggcatcctggattctgtcaagtcatgtctgctttcgctaaaacctcatctttttggtacacttggctgctgagccttatgtttgcttttgctttatttttttaatttaaaggatagggtaaactgtaaaaaatagttatttttatttgttttatgtacattttaataatttatatttaaaatattatgatttaataatttagttatcttattacagcatttagtcactaaacgttaattactatcaacgatgtaatggtaattga

SEQ ID NO: 4702 - DNA, 503 bp, Gossypium hirsutum
cacaagggcaggctcactaggaatactacagtactgaagtattctctcaacagatataattttattctccatactgcaaatattccataccacccaagccagcaacatatttagattgagtccatacgtcacagctaaaccggcaatagctaaacaaaagaaaaatgcataaagtcattctcctagaacatttgctatctagtagtcaataaagctgccaatatgaatctgcatttacttaccaggatcgataattccctcaggtatagagattaaaaagaataaagagaaggcaaacataacagaagacagtaagtccaggcggaagcacagccattccattgcaccgcaaacatggaattttggacgagaatacgagtcagtcagcaccatattggtgtcttggaaccttttctcttgatcaaagctccttatagttgttgctcctaaaattgtttcagcaaaattctggattactggagctttgcatactccaaccaacc

SEQ ID NO: 4703 - DNA, 644 bp, Gossypium hirsutum
  misc_feature (238)..(238): n is a, c, g, or t
  misc_feature (241)..(241): n is a, c, g, or t
  misc_feature (244)..(244): n is a, c, g, or t
  misc_feature (248)..(248): n is a, c, g, or t
  misc_feature (252)..(252): n is a, c, g, or t
  misc_feature (270)..(270): n is a, c, g, or t
  misc_feature (272)..(272): n is a, c, g, or t
  misc_feature (291)..(292): n is a, c, g, or t
  misc_feature (405)..(407): n is a, c, g, or t
  misc_feature (422)..(424): n is a, c, g, or t
  misc_feature (426)..(428): n is a, c, g, or t
  misc_feature (435)..(439): n is a, c, g, or t
  misc_feature (451)..(455): n is a, c, g, or t
  misc_feature (479)..(480): n is a, c, g, or t
  misc_feature (482)..(483): n is a, c, g, or t
  misc_feature (485)..(489): n is a, c, g, or t
  misc_feature (491)..(497): n is a, c, g, or t
  misc_feature (500)..(512): n is a, c, g, or t
  misc_feature (515)..(522): n is a, c, g, or t
  misc_feature (526)..(587): n is a, c, g, or t
  misc_feature (589)..(598): n is a, c, g, or t
  misc_feature (600)..(618): n is a, c, g, or t
  misc_feature (624)..(640): n is a, c, g, or t
gcatctgataagaggtttgttactaacctgaagttggaaacatgtattcccatttcttcacgttttcacctgttattccgtgtaccatgtatgatcttcgaagcatgattgtttactctgatatatgaaagactgttagaaaatctaaatgttctctaaatagttgtatcaaagcattgatgtctattactattgagctcaaaaaaactgaactcctttatggttgggttaagcttgntcntgnatcntccnatttattggattaacttngnaaatgggaatacactttcnnaaccttaaacaaaaaatccaaaatggtccaaaaaatggaattaaaaattccactggctttttgcattaaaggtcctggtatggtcctggttggaattcatttattttatttannnaaagaaggctggctnnngnnncctttannnnnataataatggannnnncttgactggactgaaggacagatnntnnannnnngnnnnnnnttnnnnnnnnnnnnntgnnnnnnnncaannnnnnnnnnnnnnnnnnnnnnnnnnnnnnnnnnnnnnnnnnnnnnnnnnnnnnnnnnnnnntnnnnnnnnnncnnnnnnnnnnnnnnnnnnnatagannnnnnnnnnnnnnnnnaaaa

SEQ ID NO: 4704 - DNA, 391 bp, Gossypium hirsutum
atcgtagctagctctaggtagtgcctgctatgctcttggactttagtatataattatacaagtgttttcattatgtatatgcatattttatctcaagtatagactctaatttgtgaggaaaagatggtatgacaactggattttatattgtttctattctttttcaatagaagaatgacaaataagattttttcacctgatttttagcatttttagttagatttgaacttttttcaagagtaaaaacttaaaaatctggaagaaaaatctgatttgtcattctcctagtagaaaaggataggaatgacgtggaatcatagtttcatataattcattctccaaattcctcataagcgcaattactgttaatagtaattgttaagtttttttt

SEQ ID NO: 4705 - DNA, 603 bp, Gossypium hirsutum
tagacctgtttaagaggaaaaaaggaaaatgaagacagaatttgtgttgtctaagagtgtattaagtttttcaggaagactacctaagcagcaatcacaactttctctgttgatacgataggatttcaagaaacactgattccacttttaagcatggttaatataaggaaaaaatcaacagactgaagatattcaaacaaaacaattaattttcagaaataattaacatcagaagaaagagagtgagataaagattctcatggctttaaggacacagaaatggattattatctatactagtatactacggtggaggaaatcaaagacttctctagtgaactcaatttatcatcatgcgtccatttaactaaatatgttaacataataaatcaagatcaactttattatttatcatccaataggatgtggtaagcatatcaactcacacgctttaaacttccctataggtgtatagaaatagtaataatgagcattaatcggcaccctcaagattggtttctcaagaatctttcggctcatacatttcacctttctcttgacatcttcttttgtcgttttataaacatactcggtggcattcac

SEQ ID NO: 4706 - DNA, 599 bp, Gossypium hirsutum
ttgtccattcttgtcatatatatgaaagagttaatgatcctaatgttgatgaaatgccttgttttcatctgatatattcttttggatcgactcgaattcccttttaattttcatgctaggttttctttaaccataacaatctctcataaagtaaaaaaacaggaaacttttccctcgaaaaccagttgattgtcgcaatatcaacatgggtgcttttggttcacgttgactataaattcacttttcttattaagattatctgaaattgttatctatttaattgaagattaagtgattatggccggtaaacttacataattgttatctatttaatagaaaataagtgaaaaatgatatatttgtatgtatgtacgtacataagtataataggataagacactaaagattgttgttagttgtcgctccctccaaaacgaaaaaaaacaatggcactttcggctctccccaatttgtcttcttcatttctgtttcatctcaaaacccagaaatcgtttaaacccccaaaacctataaccataacttgcagttcacaagaacccaaaaaaccctccaaaaacccacaaagacccacttcaagg

SEQ ID NO: 4707 - DNA, 611 bp, Gossypium hirsutum
actggagagcaagcgaaagagtgacagagagaaaaagaaaagaaaaggttgagaaggccaagtgtaaattgtgttgtaaagaaaaagaaaagaaaaggttgagagacagagggagcaaatcggcagaaaccccaagctagaaggaaggaacagaagacggaaaggggaagcgtcgatcgggagggtaaaacagggtataaaactgaagcagtgcctaaactgagcaaaaggaaggattagaaatcggtgaattttgaggattaggtctgtaatgtaatagacccgtattagcaatacactgaaccaaacaaagaattaaagtggattaagtggggcccacggaataggagtgtaatggctatgccaatacacccaaccaaacatggtgtagtgtttttgtgttagaatgagtagttatcagctcaatttgtgataagagaaaatagtttgagagaatctattcctagtccaacccaaaacatttttatttttaattttctatttcaatcaaatttatatttatttgttataatatatctttttaaattgttacacgcatttttataaggttaaaaaaggtttaaagtctgcgtactcttcatacatttaga

SEQ ID NO: 4708 - DNA, 630 bp, Gossypium hirsutum
taatgagtttgtgaaggactgcaatagatttatgaagaacaagatctgagaaagttgcctaaggactaagatggtgcatttatacatgataaaaaagaccaataatgtccaaggatgtaaggatttgaggagaatgtgtttagaagacatggcaagggaattcttattgatactaaaggagacaattccttatttgctagatagacggttttggttttgtctattaaactactaaattaaggttagaagtcctttctagttaattcttgaaaagcaacccagaaaagcatggctgtgattagatggcttaaattggggatttttacagagagtaggtggataatttggctgcaatggatgtcttttgcttctggaaaagctaggttagtttttgaagcaatttgctaatgtgtggcaataagttcaggttggattcggggagaaatggattgctttcagaaacattctcgttaactaggatggaatcgctaattattttctgtctacaataactcatagttagcttaagattgcagaagtctattctgagttatggaagaccaaggagtctctggcaaggatatttcttagaaaggatagtgtagaaaataaaggttatcaagatttggg

SEQ ID NO: 4709 - DNA, 594 bp, Gossypium hirsutum
actgcaaggccaagtcgcgtgtaggcaagaccaccaaagcccgtagacatttaacagaacgagtagacagcttctgtacgatcggcaaagcgtacgctaaagtcttcccacttcctgttggtgaatttatgcagagatctcgctcgaaagccccaggccctattgtctcctgccaaacagcaacttgcactgggaagagcgaagagaagcccattttgtctaaagccacctccaacctaacttgaaagaaatcgataatcaaaactgtcaaccttcaaaaatgattcaatatcaaagtcaaattgggaaaacaagttaaagcttaaagggtgaaaaaagaaagaacttctaacctggggtcaagacaagggacaagattgagagcacaagcttcaaactgattcacgtcaactgggcttcgcatccatggaagaattggggtacttcttttcttcacttccatcgttcttttttcctttctgattcaagcttgaaacattaagaaaaaaaaaccttaaaccctaaactgttaaatctcagaacaatggttttagacgcgggagaaagaagaggacttggctcaatgctctatcg

SEQ ID NO: 4710 - DNA, 640 bp, Gossypium hirsutum
agacattgtataaaaaagagcaaatataataaaaacatataatgagattgatggtccaaaaaaaatcattgatctagtgtcactaattaaataatattagctaatattaattcaattaagtaacattaaccaaaggagttgttgtcattatatctaatatttaaaataataactttaataactagtttataaactaattatttttttataattatatattaatttaataaaccatttacaatttttatcaaagattaaagtctttattaaaaaaagtttttcccaattgatgattactttattttacaaattaaatattaagtaattgttgtgtttatatatgggtttatgcattccatttttttatatatctcacatcttacctttttaatcatgtttgtgaacatattttttaaaataaaaattccaaattgattataagtagaaaaataatattttttaatgaatataagtgaaacacgcacaaaagcaaaatactatatttacagctttgacaataatcgaaatatgaagatataagtaaagataagaaataaaatctgagaaggaaaaaagtgctgaaatgattttatatagatgtgatgaattacgataatcattaatgtggcagtgatgaata

SEQ ID NO: 4711 - DNA, 621 bp, Gossypium hirsutum
tcagtggacaagaaattcaatggtaaaaaagttgacaaagaaacagtaagagtactatggaggcccttatactaggagtcaaattgcatttgccccctttactaaaaaaataagcaaattagactaaaaaaatgagcaaattagtcctatacatcagaccaaagagcaaattggtcctttttgttaaaaatttcatcaatttctactattaaaaactggtgtggttgatagtataaccaaagagttacacttgtgtgcctcgtgtaccttatgttgacatacatggactagtttttaacagtagaaatgaatgaaatttataataggaccagtttactctttaatctaacataagggactaatttgtttgtttttttagtagagggggcaaattacaatcggactcctagtacaaggacctccatggtacatttaccagaaagaaaccaaattcagaaacagtcacacaagtagtttatcagtttattctttcctcgccttttctcagttactccatcgaggctactaaataccaatataaaactaagaaatgtaattaacaaaaagaatattaaaaaaaggggaaaaaataagtgattagcagccaggctattcgcacaa

SEQ ID NO: 4712 - DNA, 531 bp, Gossypium hirsutum
gacttcttccttttcatagccggtttttcagtttcatctgcggtttcaatttcacctatgctttgtgattcatgcactgccaaatcggctgcaacgtgtttaacttctgcatatatgacatatatgagaatggcattcaaaataataataatatctacaacaatactaagtacagcaatccgttttcatctaatagtctaaaggacaaatcaaaaacttccggaaattatccaactcaactcttttctttaaaaaaaattgaacctaaatgcatatgaaaccgaatacagcttctaagtaaagcaaaaaggtttcacctctaagtaaaggtatgaatcatacaattgcaattcaattgagtttgcaacttatgatgatgatcctacaatccatagtctatccatatctaaaagctatgctattcaatcatgaatgctagtgctgcatgtatccttgtatcaaagtccgaatatgttttgacctagtccaaaaggctgaaagggcaacccctactctcttcacttgtgaaat

SEQ ID NO: 4713 - DNA, 651 bp, Gossypium hirsutum
acatttgctaactcgttcatctgcaattcatcctctcttttttttcttctggtaattttcttggggatgtttggtttgttggaaattgcgaaaacccatttttctcagaggtatatcttccaatcttgaatctccaagggttgaaaacagcattgcaatttgaatgacagcttctgattgttcatctaatgtttcaaaaaggcctaattctcgttgtcatagagtctcccaagctactgttgcattagatttaaaattgacgtaaattgatttcaaaatcctaaatgtgaatatggtatgcatatcaagaaaagtgcaattagaagatgtggttttgtttaacattgtcacataggtataatcacaatttaatcccttaccgtttgcgtatttggataatttggcccgtattccgttttgggctaaatttagttccaacttgaataaaaggattaaatttgaacatttatcttttaaaaaattgaattactatttttttaacaaaaatattggcaaatattaaaattaaacataacaatatgtgcttttttttgaatttttttaatatttttatgatttttgaattatttgttgatgacataatatagttaaatagtatcatgacaacttcaaatacatgtggatagtcat

SEQ ID NO: 4714 - DNA, 634 bp, Gossypium hirsutum
aaacaaacatatcagtgttagcttttggcttaaaccgaaaataacgtaaaatttgatcagattcataaaaaccaagcagatcatggcataaataatagcaaaaaaaagtaacgaaactatactaacaggccatttttttttagtaacataaaatgaaattcacacaaatgtaagacaatcccttgaaattttatgattgtgatatcacattttgttttatcatgtataacgtttaccacttgaaccttctcttcatgttcggggtcatgtctgagaacaataatacaaaacaacctattcaaaatactttaaaagaacaaagtatctggctgattttcacaagataaaggagttttttcatgcaacgagtttggccttagccggacatgtctcgagggaagtgaatgatctatggtttggaatctcttctagttagtaattacggatgaatatcgaggcaattcgatattaaggatcaaggaaaactacctatgttttgctaacaatagcaaggtacactgccctcggctctgtcaaaattgaaatagttttacctgatccattaacaatcaccatagatggtgaagctattgctaaggtcgggatttctaaccaaattaatgtatcataaccg

SEQ ID NO: 4715 - DNA, 633 bp, Gossypium hirsutum
ggtgtgtggggagcgttttaaactagtctttagcttctgggacttttttagaagatgcagcaaacagcctgtaatctatctatctaaaagagcatatattttagtactatacaagtttaaccttctatgcttgccacgtggccaagctaaaagaaggaaaaagaaaaaagattttggcttattctcgtccataaaggttaaaatatttttacttcatactttgaattttaacctttctctcttattttaaaatttaacaaaatttttaaatataaaacatagatgaactaaaatttttaaaataaaaataagtatcaaatctttaatgtacaaaaagtgcagagatggttgactttcttttaattcgatttttattaactttattattaatattagagaacatgaatttgaaaagaaccgaaaaaaattatgattaatttcaagtattatataaaaaatatataaggagttacttcttcctttaaagtcaacttaatatatgtttttttttttcaaaatttgatatttgatattaatttttgtttgaatttttttaatttctaaataatgcatttaacattgtcattctaattaatcaacacaaatttaatttatactaaaaatcttatcaca

SEQ ID NO: 4716 - DNA, 619 bp, Gossypium hirsutum
tgaaggttaattgatgtgcggaggggaagatggttcacccgtatttaggcacactaaacatgatcactgtacttttgataataataataataattataagcaatatctagtgttcagaaattaggatgtgatttgtttggtagattaagaggggttgctcctgcctcatagctccacctctcattcttttacctgtaaaaaaataaaaataaaaacccttttttcataatgtttaaaattggattggattttgtggctcttttagaccaaaacccgtgtaatgtctttagtgcttttcattccaaatgctcataacaaataacattgtgatgttatgttactatgagtaaaaaaataatgaaattttgtgacttattatttgcttggtatggttcgaataagggaaatttgaccaatttcacattggctatgaaattgactggaaattggtatacttgatggtttatatatatgaagggtgaagattgttggaaatgatgtcaagaagtactttgcttttcccgtgaaaagaagtatctggaaatgtagacggaaaattaacatccatccttcgcaaaagtagttcagtatattgatggattcttaaaggcgagtgaaa

SEQ ID NO: 4717 - DNA, 625 bp, Gossypium hirsutum
ttgggtatttgggtttgtaataggacattattggccatgtaatttttttggggtttttaattatatttatttatttacttggtttgtttgtaacgggcctaggcatatttggcccactatacccccttctaacatttttcccttatcggtaaacttcctttcgttttcctttgattcagtctgtgaatcctttattcaatcatcgctactgtgatttcttggttcttcaatcggctggtaagtaaaactttgcatccttttaacttttggtttgagtttagtgatgttaaactgtagtgattaattggcggattctgtgattaggtgaaggttatgaggcggagaattgcactccaacagatagtgtgcgttagaggtggtttgtcgtcggtggttataagtcagctttgtgttggttcttgttgacgaattcatttatcaaacttctaaatcggtgttgggtattttttttttaggtttctaaaggctcgggattgttttcgcatcgaaacgaatcaagtgtgcactcctaacacgaaaaaatcaagcttctgagaaagccgaaaaagcattctgtcgacgccacacggacgtgtgcttgaccatgtgactggctatgtgtgaa

SEQ ID NO: 4718 - DNA, 635 bp, Gossypium hirsutum
ggtcggtcatctggtcaaatgaagaagataagtctgttccagcagacatgcttatactagctggaagtgctattgtgaatgaagccattctcaccggcgagtctactccccaatggaaggtggatctcttcttcttaattcctttcttgtttcatattttagtgttcaacaatgatctccccttaggcatctgatatttgatgtttacttgtataaaatcttttttgtggaagttcaattgttgaatgtaaagtttctgtagtaaaactagctatataactcttttatggttagtaatgtaaacttatttcgtcttgaaaattttgtatcgcctaatcttacttctgccttttacctttaaatgctttccctatagctttagattgtatattagatcaattggtgtgtatgtcttgcacttcatatggggttgttttctggattcgttctctcattgaagctgaaagagcaataccttgttgagtgacatctgaacagtaacagtttacacaagataaaattttttcttaggtttctatagcaggcaggggaattgaggagaagctatctgccaaacgtgacaagaatcatatgttgtttggtgggagtagaatattgcatctcacagctgataa

SEQ ID NO: 4719 - DNA, 636 bp, Gossypium hirsutum
aacttgggacactctaatcgactatgattcacagaaactccggtcacaaatgaagaatccttcatctgtacactgcccccatttgttggcatctgaggtaactccgtgttcttaggtacgaaaccaggcggagcccccaaaacccccttgcccttatcctcggaagcattcgccgatgaacttaccggaggaggtccaaagtactgacctagcaacgcttgaagatctccttgcaactccgttttgaagtccttaagccgatgctccagttttgtttccacccgagcgatttcctcatgaaatttgaaaatctcctgctgcaaactgcccacttccttctgtagccttgtaaaaactccatcgccagccatcttaagggatcgtagaggctctgatacctttgttgcgagataatttgttgaagaagaatagaagagtagagagaagaagaagatgaatgaattcagagaaagatttgatttcgtaattttccagattattcccatcatgcaaaacatgcaaaataaaagaagttacaacgtaatgacgtggccaaattctgttatactccaaaacgctccatatcactaattcatagaaccctacttatatgcctgtcgagtgagttactgctga

SEQ ID NO: 4720 - DNA, 616 bp, Gossypium hirsutum
attattgaatgatttcttcagtttttactttaaatctgctgactgttatttatcatattacatgaataagcttcagttcaattttgggtacttttagctattgatcatattaatggaaaagatgctttgttggaaatttgaatccgaatatgctaaatgttatctcttaagggtggttccatgaatcaaccaagttaagccctggttcaattttgagtacatttagcaattgattatgttaacggaaatgatgctttgctggagcttttgactttaggattagcattatggaatgctaaaaaggttgggtttatttgggaattgattaataagatattgagatgttgctttcaaacatgcatatagccgtacacataaaagaacttaagttaatcttttgattatgatgtatcatccaatccttagccaaatggttccattattgatgataatgactactaaagaaaagaggacccacttgttcttttgatattttttgaagagtgtagattatttttctgtcaatctttcttttctattgttaaattaaacatttatttgttgtcttttatcatctgcaagcaagcaacgcacaatgatcaggacccggtttgct

SEQ ID NO: 4721 - DNA, 552 bp, Gossypium hirsutum
  misc_feature (516)..(519): n is a, c, g, or t
ttgtccttctcttctcatttccccttagtttctgcttttttctttaaaacaataaagatcccttagttccttcttttctttcttcggcttttcctccaacaggtttgttacaatatcataaatccaacacactacctttttttttctttttttctcacttgctcttttaatcggcgttgattacttaagtcttttgttagattcattttctcttttctttaacgatctcttctatttttgcaactagttgtatcatgaattatgatctgctagaattaatttcattttgaatctctttttgttgttcaaattctattattgcaaagatggggaaaaaaagaggcacttcttttgtttttttaagtagttttaaattagtctagttaaaataacttcggatcaggtaaatgagtggtcttattaaaagaaaatggattctgatcgtcaacagctcaaaagtatggaaatcgagtttgataataaaggctagatttttcagttagggtttgttaagannnnaatgtttttgttttaatgctttggttttgaatc

SEQ ID NO: 4722 - DNA, 506 bp, Gossypium hirsutum
  misc_feature (357)..(357): n is a, c, g, or t
  misc_feature (454)..(455): n is a, c, g, or t
gatggtggagtgagtcgtggagatagataggtcgaactgtttctctccgccctaggttgttttggctttggttcatgggaaattttatactttactacgatgatgacactgaagctccactctctactaggttttgttgatcacggcttcatgcattcttagtttccagagattggagagttttagctagttctttgttttgagttttttgggagaaactagttctaatgatcgggattctttttttttggtccttccttaattttcctccttggtttggatttggtttgaattccggttggccttttcctttttaatttttgaagcccggaggaaggggcgtagggaaaaaattanacccgtattccgttttgggctaaatttagttccaacttgaataaaaggattaaatttgaacatttatcttttaaaaaattgaattactatttttttnncaaaaatattggcaaatattaaaattaaaacataacaatatgtgctttttt

SEQ ID NO: 4723 - DNA, 624 bp, Gossypium hirsutum
acctgcacctagtgtggtggacatgccttcacccccaccgtttgaggaagttaacggagtttatacttctcaaacgcataatgagtcaacagactgcatgggatactttttaggcgaggtttgtatataatagcattgacacatttgaattaccaaattactataatctgtaagatagccaagtaagtgatgtattatgcaggttatgtatccatataacggcgaatccgacacggaattgaatctgtcaaccggagactacatagttgtgcgaaaggtttaaccatattcatatatgactttgaagcatttatttttgtttcctcgactcagttactagggtatagaattcgtttggttcagttttaaaataccaagataactagcaaaacgaatacaaaacgaaccaaaacgaattggctcggtcgattatttcggtttttcatgtatattgggtttggttgggttggataatattgaaattctaaccaaattatataactgaataaaaaccgaatgaaccaagtttgaccggtttcagtcatttttttacattttactcacccgtacttggcattaataagtattcgttttcaatatactcttggcaggtgacaaataatg

SEQ ID NO: 4724 - DNA, 536 bp, Gossypium hirsutum
  misc_feature (64)..(64): n is a, c, g, or t
  misc_feature (66)..(67): n is a, c, g, or t
ggttctgtactaggagaatatacaaaaggtgaaacaaggaaagctctttactggcataactacntnngccgttgtgcaactcgtagaactacagtctttatatgtgacatgtatatattttttggttaaatcttttcaatttataacttcatatgatcttccagtgatgtaaattaaatataatttgtaattgatatttttattttcatatttttatgttacctttaaatttaaaaattaaaaaaacacaacctgaataaatttaaaaaaaaaaactatatacttaaatctaaaatattaaaatcttgaagttttttattttaactaaaattttattagctttttatataatttttacagtttcttttttgtataaagtttggtcttctaaaaatctttcctgtctcaaactcaacaaggaagcaataaacactaaaactgaattttcacagttttcttcttctatttcaaggaaggtaagcttctcttttacccctttttttttttttataaacatttgctactttgggcccccc

SEQ ID NO: 4725 - DNA, 640 bp, Gossypium hirsutum
  misc_feature (588)..(590): n is a, c, g, or t
  misc_feature (610)..(610): n is a, c, g, or t
aaacattaaaaacaaacggtgcagatcagataagtagatttcttagatctaggcagaccaaaagcaatatgcaaatactcctaactcgaagcataaatacaccgaaagatgcattgcctacccaatatggcatatagatcatgccttcttctgcaataaactccagtactccacaatgagagacacgctcggcagcatcattccgaagctcaaataacattggataatcaatatgcagagatgctgcataattttattaacacattagcattccatatgacttaggaagaaccaacactaattgataaagaaccatagaggcccttatagtaagagtcggattgcattttgcccctctactaaaaaaaatgagcaaactagtcctgttaaaaatatcatccatttctactgtcaaaaactggtctctctacatcaaaacgaggaacacatgacgagtcatgtgtaactgtctggttatttggtcaaccacaccaatttttaaagtagaaatggatgaaaattttaacaaaaaggactagtttgttctttaatttaaaaaaaaggaataaatttgttcttttgtgaaannnaaagcagaaataacatcttncacaaattttttgccacaattaatgccacg

SEQ ID NO: 4726 - DNA, 578 bp, Gossypium hirsutum
  misc_feature (564)..(564): n is a, c, g, or t
  misc_feature (571)..(571): n is a, c, g, or t
tctggtggcatgagctctctggttattattcacgggacgatgataaaagaacaatgcgggcaaccagagatagtgactccattggagaatcttatgatcgttaccttcgcagcacggtattaaaatataatatattttttaatgtttgtgtctgataaaggtccaaagttctatgctctttatgattatatcaatagagctaataaattacagcacccttccagcaactgtcatcatatagtgggagtcagtctggtagaccaatgagtggtggaatgcccggccgtgctgttgatgatccccgaatggtgggtattggtggtcttgatcctggacaaacaataaaagataggactataggatttggtagtggaaggcctgaacctcaccttccccctgatgcatccagtactctttttgttgagggtttgcctcctgattgtacacgccgagaagtttctcgtatcctgtcattggctataatttagcttcagcttcttctattcttttcttttttcttcaattttcccctttagttttattccttcactcagttgacagatntttcgcnccattgt

SEQ ID NO: 4727 - DNA, 650 bp, Gossypium hirsutum
actgtagattagaggatatcaacctcatttaacactcaaaattaaaccaaaaagagcagcaacagcatctactttgcttgagcaacaggaaatttttgcactaattggacaacaactaaatctgaaatagacgagttcaaccagtacaaaacagtagcaaccatgaaatttataaagaacaattttttttccctatttaactatcaccgaatcatccctgtaaaattgatacgaatttcaagcatcgaaataataaaggagtttaaaagaaaactcaccattagcaacagtcaatttgtatttctaaaaaaacatgtcattcagcaaataaaactcaatttattcattaacagcacatcatcaatatctatcccagagttatacattttaaccacagcacccaagcactgtaaattacagctacaactcctctcaatttattgttttaagatactacaatttcattattaaggccgtttaaattacaacaattaatccacttcagataatgttttaagacaacataaatacttacagcatggatacttacattttaatcacgatacagcagtaggacatcttaattataactatgacatcttctaattgcagcttaagaccttaatatttaatcaattccagccgcaggt

SEQ ID NO: 4728 - DNA, 318 bp, Gossypium hirsutum
  misc_feature (267)..(269): n is a, c, g, or t
  misc_feature (273)..(273): n is a, c, g, or t
  misc_feature (277)..(277): n is a, c, g, or t
  misc_feature (279)..(283): n is a, c, g, or t
  misc_feature (313)..(315): n is a, c, g, or t
agtgctttgacatatatactgtttaccaagatccattttgttaataatttaatggtattttatgtcttttcttgacagaaaatggctacacaaaataaggaactagcctgtgagctgttgctttcaaaaccccagttgctgaaagccatttttcaggtttgcttcattgttggaatttaaaaaaaaaaaaaaaaaaaaaaaaaaaagggcaaaaaaaagcctttggtccaaaaaaatttccctccccaaattttccaccttttgccnnntttnttanannnnncaaattccaaaaaaaaaaggatttttttgnnnaaa

SEQ ID NO: 4729 - DNA, 626 bp, Gossypium hirsutum
tgtgctagtccttaagactttctgtccaattaaaattattgtttaaattgtttatttatactgtgaagttgttgaaacatcagattgtttgatttcagtagtatgctcaaaattaaaagttaatgttttagcttctcagtgactacgatcttattgttaaatgtgcatgtttttgtatgatgctgcttcgacctggtaaaactggggtgaatggtagctgttgtatccaaaacatttttatagttcttataaataaacaaaatctaaagctaagttgatgcgtttgcatcttattcaatgcagatattcaatggcgttttccttaaagtgaataaggcaaaaatgaacatgcttcaccttgttgaaccttatgtgacttattggtatcttttacctttctggcttcctcgttttttctttcaccagttctatatagttgccatggcttatttcttcttaatgtatgcatctagataccctaaacccaagattgttcgggagctgatttacaaaagaagttatgggaagttgaacaagcagagagttgctttgaccgacgatgcaatcattgaacaggtctgtatcattttgcatttacagagtttcatgttggtgacaagcattta

SEQ ID NO: 4730 - DNA, 1282 bp, Gossypium hirsutum
  misc_feature (620)..(622): n is a, c, g, or t
  misc_feature (624)..(887): n is a, c, g, or t
  misc_feature (889)..(894): n is a, c, g, or t
  misc_feature (896)..(912): n is a, c, g, or t
  misc_feature (914)..(933): n is a, c, g, or t
  misc_feature (936)..(938): n is a, c, g, or t
  misc_feature (941)..(951): n is a, c, g, or t
  misc_feature (954)..(995): n is a, c, g, or t
  misc_feature (998)..(1005): n is a, c, g, or t
  misc_feature (1009)..(1015): n is a, c, g, or t
  misc_feature (1019)..(1030): n is a, c, g, or t
  misc_feature (1035)..(1038): n is a, c, g, or t
  misc_feature (1040)..(1042): n is a, c, g, or t
  misc_feature (1051)..(1056): n is a, c, g, or t
  misc_feature (1058)..(1068): n is a, c, g, or t
  misc_feature (1072)..(1076): n is a, c, g, or t
  misc_feature (1088)..(1090): n is a, c, g, or t
  misc_feature (1093)..(1102): n is a, c, g, or t
  misc_feature (1104)..(1105): n is a, c, g, or t
  misc_feature (1107)..(1112): n is a, c, g, or t
  misc_feature (1120)..(1124): n is a, c, g, or t
  misc_feature (1129)..(1140): n is a, c, g, or t
  misc_feature (1144)..(1146): n is a, c, g, or t
  misc_feature (1149)..(1159): n is a, c, g, or t
  misc_feature (1163)..(1167): n is a, c, g, or t
  misc_feature (1177)..(1190): n is a, c, g, or t
  misc_feature (1199)..(1204): n is a, c, g, or t
  misc_feature (1208)..(1212): n is a, c, g, or t
  misc_feature (1218)..(1228): n is a, c, g, or t
  misc_feature (1231)..(1243): n is a, c, g, or t
  misc_feature (1245)..(1255): n is a, c, g, or t
  misc_feature (1257)..(1259): n is a, c, g, or t
  misc_feature (1261)..(1278): n is a, c, g, or t
tctggtatgtatgatgttgctgatcaggtaaagtttaaatacatataagttatccacgtagtagatagtatacttcaatttgaacattgaagcctattttcatctggttaaatgttattttcagactgaccccccaaaaatttcatttttggattattttaggtgccattcaaacccttgcttcttttggcattttagatgtatgtatatatgagagccataacatgcccttctttagtttacttatgtcaaatacctgaaaaaaaagtgatcatgacatgctcctcttttttttggagatatttgttttcaaccagtacttatttggctcaatcattgagctgagtttgagcttcagcaactcgagttattgagcaagctgaatttcagtatcatgcgagcttaatcaaactttttaaattttatatatattttttagtatggagaattcttggttcgaacttgagcttgagcataaataattgactttgcaaatgattttgaaaatagcgcctagtttttactaggtaaatgagcttaatcaagtgagcttgaatagataatcttgaatcaagattcttacaacttgagctcagctcggcttgattacccttactcgnnngnnnnnnnnnnnnnnnnnnnnnnnnnnnnnnnnnnnnnnnnnnnnnnnnnnnnnnnnnnnnnnnnnnnnnnnnnnnnnnnnnnnnnnnnnnnnnnnnnnnnnnnnnnnnnnnnnnnnnnnnnnnnnnnnnnnnnnnnnnnnnnnnnnnnnnnnnnnnnnnnnnnnnnnnnnnnnnnnnnnnnnnnnnnnnnnnnnnnnnnnnnnnnnnnnnnnnnnnnnnnnnnnnnnnnnnnnnnnnnnnnnnnnnnnnnnnnnnnnnnnnnnntnnnnnntnnnnnnnnnnnnnnnnntnnnnnnnnnnnnnnnnnnnnttnnnttnnnnnnnnnnnttnnnnnnnnnnnnnnnnnnnnnnnnnnnnnnnnnnnnnnnnnnttnnnnnnnntttnnnnnnnaaannnnnnnnnnnntatannnnannnattttttannnnnntnnnnnnnnnnntttnnnnntttatttttatnnntannnnnnnnnnanntnnnnnnaattaaannnnnaaatnnnnnnnnnnnnaatnnnaannnnnnnnnnntatnnnnntttaaaaatnnnnnnnnnnnnnnttataaaannnnnnaaannnnnaaaaannnnnnnnnnntannnnnnnnnnnnntnnnnnnnnnnnannntnnnnnnnnnnnnnnnnnnaata

SEQ ID NO: 4731 - DNA, 1242 bp, Gossypium hirsutum
  misc_feature (646)..(646): n is a, c, g, or t
  misc_feature (656)..(657): n is a, c, g, or t
  misc_feature (659)..(659): n is a, c, g, or t
  misc_feature (661)..(669): n is a, c, g, or t
  misc_feature (678)..(684): n is a, c, g, or t
  misc_feature (688)..(696): n is a, c, g, or t
  misc_feature (700)..(707): n is a, c, g, or t
  misc_feature (711)..(713): n is a, c, g, or t
  misc_feature (716)..(717): n is a, c, g, or t
  misc_feature (720)..(733): n is a, c, g, or t
  misc_feature (735)..(740): n is a, c, g, or t
  misc_feature (745)..(753): n is a, c, g, or t
  misc_feature (756)..(756): n is a, c, g, or t
  misc_feature (762)..(767): n is a, c, g, or t
  misc_feature (770)..(776): n is a, c, g, or t
  misc_feature (778)..(779): n is a, c, g, or t
  misc_feature (781)..(784): n is a, c, g, or t
  misc_feature (789)..(793): n is a, c, g, or t
  misc_feature (795)..(801): n is a, c, g, or t
  misc_feature (808)..(811): n is a, c, g, or t
  misc_feature (818)..(826): n is a, c, g, or t
  misc_feature (831)..(835): n is a, c, g, or t
  misc_feature (838)..(844): n is a, c, g, or t
  misc_feature (846)..(847): n is a, c, g, or t
  misc_feature (849)..(859): n is a, c, g, or t
  misc_feature (876)..(895): n is a, c, g, or t
  misc_feature (897)..(897): n is a, c, g, or t
  misc_feature (899)..(903): n is a, c, g, or t
  misc_feature (909)..(916): n is a, c, g, or t
  misc_feature (918)..(920): n is a, c, g, or t
  misc_feature (923)..(923): n is a, c, g, or t
  misc_feature (925)..(929): n is a, c, g, or t
  misc_feature (944)..(947): n is a, c, g, or t
  misc_feature (953)..(957): n is a, c, g, or t
  misc_feature (959)..(960): n is a, c, g, or t
  misc_feature (966)..(969): n is a, c, g, or t
  misc_feature (974)..(978): n is a, c, g, or t
  misc_feature (980)..(983): n is a, c, g, or t
  misc_feature (989)..(996): n is a, c, g, or t
  misc_feature (998)..(1005): n is a, c, g, or t
  misc_feature (1008)..(1021): n is a, c, g, or t
  misc_feature (1025)..(1034): n is a, c, g, or t
  misc_feature (1037)..(1042): n is a, c, g, or t
  misc_feature (1046)..(1058): n is a, c, g, or t
  misc_feature (1065)..(1084): n is a, c, g, or t
  misc_feature (1086)..(1090): n is a, c, g, or t
  misc_feature (1097)..(1098): n is a, c, g, or t
  misc_feature (1103)..(1110): n is a, c, g, or t
  misc_feature (1120)..(1120): n is a, c, g, or t
  misc_feature (1122)..(1122): n is a, c, g, or t
  misc_feature (1124)..(1125): n is a, c, g, or t
  misc_feature (1128)..(1134): n is a, c, g, or t
  misc_feature (1137)..(1160): n is a, c, g, or t
  misc_feature (1164)..(1169): n is a, c, g, or t
  misc_feature (1171)..(1177): n is a, c, g, or t
  misc_feature (1192)..(1198): n is a, c, g, or t
  misc_feature (1200)..(1200): n is a, c, g, or t
  misc_feature (1202)..(1204): n is a, c, g, or t
  misc_feature (1217)..(1228): n is a, c, g, or t
  misc_feature (1232)..(1239): n is a, c, g, or t
tatctaatatttgtaatggatgatgaattctagctgtcctttttgctgatataccagctcaacctctaaccctgcaatgtctatctgctaaaagtttattgcccccataggcaagcggctgactctggaaggcaccggaggagctcagcatagggaagtgctcaattggaaccagggagctgctgaacgctgagttgaaggctcagttcttacctggtaatgtgccatgggtggcacatcggtgacagaacagagcaatctcattgtttattccttgccagtttccactcatctcatcaaaatcacctaaactgtgatttttactgcctctgcgaataaaaagcatatatatatatacaagctcaactataactttacatgtactttctgatcttcaataggttattcagggcttcttgtttacatcttataaaaaatcgggtcctgttctttgatactcatacattaacaccatttttgaagcactggatttgctctttaatctccaatgattctagctgttgatgcagagactacagatctacttatggctcgtaaaagcttagatctggggaaataactattttaataatttcttaaaaagaaaagttctaggtcctaaagtaaaagtcataccatgaaatcnaaccccaaanntnannnnnnnnnttttttttnnnnnnntctnnnnnnnnnctannnnnnnncaannnaannttnnnnnnnnnnnnnntnnnnnncttannnnnnnnnatntcccannnnnntcnnnnnnnanntnnnnataannnnncnnnnnnnctaaaannnngagctannnnnnnnnagttnnnnnaannnnnnncnnannnnnnnnnnncatttcaatattacaannnnnnnnnnnnnnnnnnnnanannnnngttccnnnnnnnncnnnatntnnnnncctctctatttttannnntttccnnnnntnntctccnnnntcctnnnnnannnntttaannnnnnnntnnnnnnnnaannnnnnnnnnnnnntggnnnnnnnnnnaannnnnnaaannnnnnnnnnnnntcccccnnnnnnnnnnnnnnnnnnnncnnnnncctcccnntcttnnnnnnnntccctccttntntnnccnnnnnnnatnnnnnnnnnnnnnnnnnnnnnnnncccnnnnnncnnnnnnncacctctttctcccnnnnnnnanannnttatcttcccacnnnnnnnnnnnncccnnnnnnnncta

SEQ ID NO: 4732 - DNA, 648 bp, Gossypium hirsutum
tggaagaatctgagataggatccgtatgcttgtaatggggaggagcagcagacaaacattattcaaagtataaaccacataagtaatcatctatcctcaatcccaacataggatcaactagaccaacagtggatcttctaagagacttgcatgtcttgctccctaggaagcacacttaagatgttgtttaccttattccttttccattgcaggaaagttgttgacctcaagtccaagaaagccatctttgtgcgtgaaaatgcacctaatacctgccacacaatatggtttctctgcaaagggcttcttatctacacaaggtatgcttgcttttgatgagtgtctaacttttaaaggaatcaagcttttcatctttacagaatgcctgtaccagatggtctgttgttgactcgttagagatagagtacatttgcatttccatattatgaaattgacctattactggctgcttcagtgactaatgtaaataaaatatggaaacaggaaattaagttcagatgtaactgatacaaaggttgcatcatcatctctgccagcaagtccaaaccttgaatctagtgaaaatcacttcaggtcacaatctgtaatactgcgacaaactagtcgagtaaaaccctctacttctgc

SEQ ID NO: 4733 - DNA, 610 bp, Gossypium hirsutum
attgcttgcttatattgttttgctttgtaaaatattcaattccaagcccctttaagtcagagtttggcaaatttcttaaaagatattgtaatatgttgaacaattattggcccaattgggggtcttcttggttggcccaagttgtaatgttcttcaaggttaaaattgtgattaaaaaagtgaagaaaagaactgctcaaatcttagctacagaagaggattttaaagtccatttcttaagtttccacaatttttatgaacattaaccaagttcaggacatttatttggcaaacgcgatataagtgaaactcaaacttttgacaacgaagttccgaaagcgaaaatatatatgaatccccttttacttttgaagtacagcaatttcaaacattacatggaaagaaggaaatgagacgagcctgagagaattgacggtttcattagtaggatttatattcaattctgagcgaacaggcaattacattgctcgtggatcaacataggccgctccataaaaccgtaagcggttttgtttttagtctcttcatcagcagaacatatcaccagcaaaacttctttttctgaaaccaagaggcataccagtcacca

SEQ ID NO: 4734 - DNA, 624 bp, Gossypium hirsutum
  misc_feature (617)..(618): n is a, c, g, or t
tttctaatgatgcttggggcaaagctcaaagctaaagcaactacagggaataatttcattagctaatgatgttctgtgcatgagattagagctctcaactaggccaatcgagttgaattttgatcgagacaaatccccatctgcaatttgagtcacttgtaattcggatcatttgcgataattcaattttaacatataaattatttggtttcaaataattttaagttttcataagggcataaattacataattgttccaattaatacaaagacaaatgattacatgcttacaaatcctcatgcaaagattagttgcagggaaggagaaagtaaatttacccaatcctaaaagtatgaaaatactgaacagattttgtatatttgaaatgttacagtggcatctgaaacccttggctaacactaaggtggttcctgaattagatggaatgttctacttggtgatgctcgaggtttcggagtacgattcgtgcaaagattttagcctcaataggagcatttgctgctgcggctgcagaacgtagaacccttgctgctccagcaccctgcataaggctagcatggtgcactgcatgtcgaccaccagggatggtaaactnnaattat

SEQ ID NO: 4735 - DNA, 651 bp, Gossypium hirsutum
  misc_feature (643)..(645): n is a, c, g, or t
ctctgatagaatctccacaaagaaaggccccttttgttgagctctctgacacaggcaatgatacaaaactaaaaccttcttctggggatgaggttgttcgagatcaaaatcagtctgttgaaggtgccaatgatgagcatttgaagcaggcagttggtggtaattcatgggccaggaatgcagacagcaagattggttcctctctagaaaaatctagagaactgaatgaacatttaacgtctttaagtattccgtacactggagacccatgtcttgaaaatgataaattaaaggaaaatgtaaccaccactttaatcaatttgccctctgcaagcactgtggagaaaactactgatattggagattgcaaagagcatctggagaaaaaggcaggtggagtggatggtgatagcagtttggatactaaacaaaaagggtgctcttctgtggctaatgaagataaggtcgtaggtctgtttgtaaaagttgagaaagaagttgttccaggatcttcatctgtaccttctgttgaagttgatgctgacaacaagaaaaatgtccttgaaggttcggaaagaagttcacagactcatcagaagtcaccagtagttggacattccatcaatggtacagtgacagaaannntgcctc

SEQ ID NO: 4736 - DNA, 607 bp, Gossypium hirsutum
  misc_feature (599)..(604): n is a, c, g, or t
ttctaattgtttaatggatggttaataaaagcaaagaattagaacactaattgtttaatgcaggaaattttagattgctgttaatatcatacataccttccaaggtggattttttcagctaaaataacggtccctagcgcagcagtgatgatcatgcacagggggctgaaagctgttacaaaaaccggccctctttgccggatcacgatgccttgcacgtaataggctatcccggagcacactattccctaatcaatcataggttatattgaagtgttaagcacttgtgattcgtaacacttttcgagagcatcatggctggtaagaaaagggacttacagagtaagatgcagcaagaagcctggagtcgaagcctattttccaggcacttaggtcacgaaccatgataaatgacagccctgcatcttgcaccgttcccatgaaacatatccaagctgtaagagacagctctgctgggtacttcttcaatgtgaaggactgaaccagaaacaataaccgattaacgttagctcgtaaacagtaaagtaggttaataaattttgtttattgaaagagacttgacatattcaactcactgnnnnnnaac

SEQ ID NO: 4737 - DNA, 629 bp, Gossypium hirsutum
taatggtttaaattgcatgattaattttttagagtggtcaaaaataaattttccatttgaccattaaaaaattaaatctcaattcattaaatccatggacaagttgatttcttccattatggtcctgccatgtaatacaacattactaaatcagtgagttttacttacatcttactttaagtgcaaaaactatcaaggtctagaaccaatacaaacgatattaatataaataatgtaattctatttatattaatttgctcaaataattacaaatacaaatgacgaataaaagtacatttatggcattaaatcctaacacaattaaatggaagcttccttcgttggaatggtgtaagcaaaatccttaatagcacatgctatacttgtggtgcaatataatagcttacataagggtagtccgctaaaaattgaaggcttaatcacattgcatgatgtatgtgggaattgtttggagaagaagagtctaaatggtgtaaaacctgatcctatgacttccgaggaactcaacggaccttccaatgaagaatgtagtcagtaaattcgaccaaagcttaacattcgtatgcaggcgtagacctaataatacaattagcacaaacaagccacat

SEQ ID NO: 4738 - DNA, 634 bp, Gossypium hirsutum
  misc_feature (60)..(67): n is a, c, g, or t
  misc_feature (612)..(612): n is a, c, g, or t
tgactctcccgccaccccggcgaggtgaggtctggatctttttttcatttaacagctgcnnnnnnnnttagctactagcttatgtttaggacctctccggttcatgggtggttatatttgttaatgttaagttattaattgaaaagaaagataagaaatgagaagtattggtgatttttcaatttttttctgcttttccctatttttcagaaattttctttttttaggttgtgctcgttggacagggaacttgtgatctgatcagttcgaccactggttcaattctgaaattgaccaccaaaccattataaagaaagttaattataataatttttcagaaagatcctttctccttttggcaggcattttttgttgtggaatgtgcttgggaaaaaagaaagaagcagaagaagaatggttcacagattttcaactagattattgaatgtttgcatagcttcactatgtaaggcccataacttggagaaagctgaattagttattatcgatggtataagattgggagtgcttcctgacgttgtaacttacaatacattgattgatgcatactgtcattttggaattgatgctggttacgccattcttcatcgnatgagagaagctggtgttaccc

SEQ ID NO: 4739 - DNA, 697 bp, Gossypium hirsutum
aggtgcacagcccataaaagatttaattgaaatcaatgaattttttaacaaccctaactttttcaccttttcacacaaaacttgttcaataaatttcctctcattgattggtcaataacttgtaactaagaattcaacttccatggttggtattcaacccaaatcaggtgaaatacaatttctctttttaaaaaagtttactagattaaagtggtaaatgtatccttttatattaaaataatttaattaaaaatatatttttatcctaataactaaacatctaagttaacatttaaaactcatttagacggtcatgcaggatcaccattaggaagatcatttcgtaacaaaacaataacataaatgattaaaacgtaatatttcagatataaatgactaaaatataatctaaaataaacaaaactaactatttttatagtttaccctaataattcattaaccaagagtaactcatgttgcttactattatcatctttgacaactctttaagttgaagtatatgatatgtaacatttccaacttttattttattttatctttttcttcggaactggtaaattggtaactgcacaacatcccaaactacacctaacgccctacagttacacgttccacacaaatttgtcgacgtgtcaaaaaggataaagcgagtgcattcggatcacaatactctcgg

SEQ ID NO: 4740 - DNA, 670 bp, Gossypium hirsutum
ttccagatcgaatctcatcgcggattaattgcaacgacaaatttaaaggtcgaaagtttcttatttgcatagttggtataagataaccatagaaatgtagacaaacaaaaacaatgcagcaagagttaaacgaacgaaacaagtatatcttcagaagaatgagttagttagtggattttgcaagccaaatgcatttcgtagtattggttatctggaataaagggagggtcgatgcaatgatgctacagtttcaaggaaagcaaagagttaggagttttagaaatataggaacatacacaagttcattaccacacacaacgagagatggtccaatggaaggttggcaaaatatagcaagaaaacaaaagcatgaaaaggaaggcattaacaacacaaacaactagttcaatccaactaatactttcaccatgattatggaaacttgaccaaccagttccaccaccccagaaaagtccatgtttataacaatagaaattagaggtgtgaaacagattcagtgttaaattccacaacaaatgaagtatttattttttctttagtcaatgatattattaacaatgaaaattatctgtttgcttatgctgatagaaataacatggcttttttatgagaccatttggaagagaataaagcattacacctttctgag

SEQ ID NO: 4741 - DNA, 610 bp, Gossypium hirsutum
tcttgaggggtgaagatgcttctactagttcaatactgttattgttgctgcaaaggaagcttctaaaaggagggtggaagctgcttcagctgcctcaaagcaagctgaaaacatggatgccattgttaaagctgctgagctggcagccgaagctgtatctcaggctggaaaaattgttatgggggagcctttcccattgactgaattggtagaagctggtccagaggcatactggaaagtatcccatgcatctcctgagccaaatgttgctatcagagaacacttagacaaaggtggtaatgtggaggctcctcgttcagttgtcgggcgttcacaagaggttcccacagataagaacgaaaagcaaagtaataaccatgaaatatcaccgattcttagagagatggccagagattctgtgcaggatcattccaggttgacagatggcattttgggttctgctgcaacaagtggaaatgacaaaaagggacaaaagggtcgcaaagcttcagatattgccaaaagtaaaggggtgtccactaatactgaacatgggaaagcaaaggaaacttctaaagataacaatatgaaggaaggttcccatgttgag

SEQ ID NO: 4742 - DNA, 652 bp, Gossypium hirsutum
agcatctttcttcaatattaaggatgattcagtattaactttttgaacatcaatataggcatagaattatagctacaaataacagtattttgcaaattgtctgaggtgcttttgttgtccaccactaaggcacaatgtgcaggcacacctaagcgcacccctatacaacactgattttatgtgcactaccaaaaactagttcttacatttcctcacacttatctctttttcccctttctcctccctaggttgcggaaggtacaaaagtaagataatatttacaaatcttgcagcctaataacaaacttcatccaaccaaactaatatacaaacgtctgttatgttaacatttataaagatagaacacattcagttagatcagaactacaaaataaaattggcatatttctatattatgatgttgaacttcagccaataaccaaactgtaaccagtaagaagattaatcatcaattatgaagtgatcacacaatttggaagcacacggatgcaaacacagacacacataaacagaggagagacatacggatcagctcgcttcagtcgacaaagctcacaataaaagaaatcaggaactgctggatttccctccataggcttctctggaattataacacaaccaagtgtgccct

SEQ ID NO: 4743 - DNA, 593 bp, Gossypium hirsutum
  misc_feature (64)..(64): n is a, c, g, or t
attgaagttcttcgaaatcagttccttcctattgatttaaaagttaaattttagtattgttgtnataacgtatttttgaaaaataaaatatttattttagatttgatattatgaagtaaaaatatttatttaaatattttttaaattcattaatattattacattttagtaagagtataaaaaaatgatttattgtaattcgttatttatatttcaatatatgaaatataaattttaaatatttataaacaatcaatattagttatttgtaaaatttaatttgaacatataatttatattttaaatattattaaaatgtaattattataaatttaagtatataatgttatatatttaaaataaattaaataaaaaaataattatgtactcaatatatataagataaaatataatagattataaataagggttaaataaatcatttagttttaaaagtgtttttttccaaaactgaaactaaaaaattgttcacttttgggttcaaaaacattttttattgcaaaaattatttgtttaatattatttacagttccaaaagcaattttgattctaaaaatcacttcataaaacct

SEQ ID NO: 4744 - DNA, 664 bp, Gossypium hirsutum
atgtaagtcgatattatataattgactgtaacataaggaaaccaaaaacatacatcttcaagaagtccatgacatcaggagacaagggtgaagcaccggaagccataaaacgaacacgtcctccaagtctagcttttattttgttgaataccaatctgtcccatatgggagaaggactctttcctgaataacagattatatacatatcaatatagtaaagtgataacaaagggcatcttcttttagcaatatatatggacttcttttatcaattttgactcatttttttctagctaaatttaatgtcaacattttaaagaagttgaatttaaccatcttttaaaaaaagttaaattattatttttaactaaatatgataagctgcacagtaatctatatgtactttatactttttttaatgtttttataatttttaaattatttattgatgtgacgtataagacataaaatttaatattttagtcaacattttcattaaaaaatggtacaagtccttttaaaaaattaatggtcaaaattaattaaaataagaataacaacccaaatttatcattatgtccttaaaatattggtataaatgttatgagaatatatagccgaactatttgtatctatttatacttatattaagtcatttgttgag

SEQ ID NO: 4745 - DNA, 653 bp, Gossypium hirsutum
  misc_feature (10)..(10): n is a, c, g, or t
tttcttttgncattgccatttgacaattctaccttgacaagtgatgttccgcgtacaacctttttctttttagacaacaatacggatattctattatttattagcaacatattaagcaagtggaattatgaaccaaatacaaaagccttccacattctacatcaagtgataacaagaattcatgttcaaccatatttgtgtgcaagattctgaagagaacaagtttatttcgtttcacttactcccttttaacatgtaataccgttgggataataataaatactcaaaactcttgggtcattaattatttggtatgaggtacattatggagaattcatcctggagacagaagagttattgaaccactgcatcaccacggtgttttatttacaatctttctccaactcttcatttttcttaagatactcatgtccgaagcatatccagacaaggtacaaggctatgaccttccaagagccctcttaatatatggaaatttttcttaaatatgatcatatatgtgtcgcacacattcaccgtccgacacataaccccaggtccaagtaacttcagttaattatatttatagttagaatcttattccttaatgcgactaaaaaaaaaaccagtctttcctcaaaaacaactcctat

SEQ ID NO: 4746 - DNA, 605 bp, Gossypium hirsutum
  misc_feature (596)..(598): n is a, c, g, or t
  misc_feature (601)..(601): n is a, c, g, or t
tatgaaagagagaaggaaaacatatctctcttctcttcaagcatttgtaagttgttagtatctataagacttccataactcctcctccgcctagcaaaaccatcactgctttcgtgaccttgggttaaaagcacatcttctcctaggtgaccagattgattttgcatgtatgtggtcctcacgctgaagcaaacaagaaaataacaaagctaaattctatacaattaaggaatcaaatgatttgagtatatgcatgcacaaacatgtatgatctttaaaacattcaacaatttgaatttcttccatcataaaagcacaatataactaaatgtccaagtttcggacaaatattgatgcccatgtcacatgcgtattaccttgaaagtagtgcagtttggactcctccatcggtatttcccgaggatacaggttcgctttcctcttcaacagaagacaccaaaagtccatactggtgataaccgttaggtgcagcctgaaaccaggcaagaccaatgaatacgccatagattctcaaagcaggattagcatgggtttcaagccatcgcaggacaggtcgaaatgttactctcagctgnnnacnacaa

SEQ ID NO: 4747 - DNA, 375 bp, Gossypium hirsutum
ttttcaagtaattgattttttatcacttttataatttagtctatgtaacttaattaattattaatctagtaaaattacttatttaaaattcaatttacctgtaaaatcactccgtaaatatttagtgaaaataattacagattcagtttatagaaacaagatcccgaaaccatattttctgacgctactaacttttgagttattacaatgaaatttataaatagatataggataatgtattatttcacacttacaatatctattatttaaataaaacattttttattcttttccccttctaaagcaatagaatgaattttttttaatgtatgaaattttctccttatataaaaaaaactaatttaaattcgcaac

SEQ ID NO: 4748 - DNA, 862 bp, Gossypium hirsutum
  misc_feature (367)..(367): n is a, c, g, or t
  misc_feature (438)..(438): n is a, c, g, or t
  misc_feature (447)..(447): n is a, c, g, or t
  misc_feature (633)..(633): n is a, c, g, or t
  misc_feature (821)..(821): n is a, c, g, or t
tatttttctaaaccatatttttgtttggtttctaaaaatatttttaattattatttttattctcattttcaaaaaaatgattttcattttttattttgaaaattgaaaagcaaaatttttaaataaagataaaattttatttttaataattttaataaaataatttttgtatcatttatatagattaaaattagtgtattagatttaatatttaaaaaaattctttttacatttataattactaccttagtccctattcaatgttctaattaaaaattttcaagtaattgattttttatcacttttataatttagtctatgtaacttaattaattattaatctagtaaaattacttatttaaaattnaatttacctgtaaaatcacaccgtaaatatttagtgaaaataattacagattcagtttatagaaacaagancccgaaacnatattttctgacgctactaacttttgagttattacaatgaaatttataaatagatataggataatgtattatttcacacttacaatatctattatttaaataaaacattttttattcttttccccttctaaagcaatagaatgaattttttttaatgtatgaaattttctccttatataaaaaaanctaatttaaattcgcaacatttcatctcgcaatggtacaacttttgatttccgtcaattttgatatttgtaaatttaaaaagttatatcaatttttgtaaatttgaaattttatatatttgtaaatttgatcaatgctgtttttgatacctgttttacgggatgaaatgtttttaacatactcatcanactttttttttttagagaagaagaagattcatacattaaaa

SEQ ID NO: 4749 - DNA, 627 bp, Gossypium hirsutum
gacttgtatagagcttgtgtatatacatccttaacctgctcatcccaaaaggaaaaggaaaaggaaaagccaactctcagcccgcaatcacagatgctgttttcaagcaataagtgtaacacacacaagatgcatgtaactcaattttgatattaaataaattggtttttcaaaaaaaattgatacaatttagtccttgtcaatttcaaaagtaagaaactaagaacaattaataagaacatttattttttctgtcaatttatcctaattttgattggtatactaataaatttaaccatcaatctttacaaattttgtcaatttagtcctggttctaaaatattcagtacaaactgtttttagatttctaaaaaaattgttgaaaattttaaaatcagcatcaaattgacaaaatatataaatatttaaggcaaatttttttattagtaagataaactaaaggaaaaagtaaaaaaagatattaattatctttagttactcacttttaaatttaacaaggactaatttgttcagcttcttttgagagggcaaatttgctcaatatcaaataccatattccaacttctataaaccatatgtataacataacgtaacacaacccaatgc

SEQ ID NO: 4750 - DNA, 652 bp, Gossypium hirsutum
tttctcaagacttcttgaaacatcatgcatgccaatgtttgtgacaaatttatttttgacatgacttctaaattgaacagtcaattgaggagtgataaatatttggtccatttgaaggatgaaaggagaaaagggaaggaaaaaaaggaattagctgttctgtgtttttcctagaagcctttattggaactctttctaagagaatattgaagattgcttattcgtttgcataggtggtccgcactagtctcatgcctggcatgctgaagactgttggacataacaaagaccatccgaagcccatcaaggtacagttttggttttaaataattcaggctgaaacactcgcagaatagtgttagaattttacttttttgaactatggcaccttctgtaataggtgttataactatttcttttacacatctttcattggaagatggtcccttataattaaaagttcttggattattgttttactgttatgcttctcaagtttgacttcattcttaatttatgctcaccacttgtattttcttttctatatttttgaaatttccacatgtccagatttatgaagtgggtgatgtagtacttttggatgagaagaaagatgttggtgcatcaaaccgccgcctacttggtgcattat

SEQ ID NO: 4751 - DNA, 642 bp, Gossypium hirsutum
gtggaattaaaaagtgcaccgcaagtgtactaagtattcacccaaatctatatattgatagtgtattaaatataaactttttttttcctaaattatctcacatttgtcaagaaaattattaactttttttgcttgttgaagtcggtgtgttataatctaatataaattccatagttgctttaatgaagctcgttttttttatttacttctacttgaaaattctcaaaatctttttatgagaaatttttaattttgaactaaacttgattattattatttgatacattgccggtggaaatttttactccacaaaccgagttgagattttatcatgtgcacttaagttgtatttaaaaattctagaaatgaataaatatgaaatgtatcaaaatcttaacctcacttctggagtaactagtgtaccaaataacccctattattattattattattattattattattattattattattattatctataaaaccatgtcatctcactgcccaattctctataaattgagagtaaacaaagttgaaagagtctattatttttccctaaatctaatcagtggcctctgaaatctctaatatcactgaaatctctaaaattaagcaagagttctatggatgatgttc

SEQ ID NO: 4752 - DNA, 615 bp, Gossypium hirsutum
gagcttgttcaaaaaatgttagcaatttatgaccaagcccatacaataaagtatcagttgcctggtgaggatcttgatgcattggtctctgtatcatgtgatgaggatctgcagaacatgatggaggaatgtaatgtgctagaagaaggaggaccccagaaacccaggatattccttttctctagtagtgatttggaggatgctcagtatggcttgggcagtgtagagactgattctgagatgcagtatgttgttgctgtcaatggcatggacctaggatctagaaaaaactcaattgcagcaagtgcttccgagaataatttggatgagttacttggtttgaacattgtaagggaggctggtcgaactgtaagtgaagcagctgctactggttctgcttctttgacagctcatgcaccttcatcaacagtccaatcttctcatgcaccttcatcgaccctacaatcttctcaacctgttttggtgagttcatctaacacttatgaatctagttcacagccatgttcagaggcaaaaatgcgtcatggagaagttagccagtcttccactccccagatggatggaaagagtaatgttcctttgtctcctccattg

SEQ ID NO: 4753 - DNA, 602 bp, Gossypium hirsutum
agagtaacaatcagcaggaaatagagacacagacaaatggggatatcttacaataattcaactgaatgaactgcagggaacacgtgaattttcctctcttttatgagtttgacatgtgcaaacaatggctcaccagaaaaaagctgtcaacaagaaaaggaatgagaaaaggtaaatattgagacgataagtcactgattaagatgtaccttctcttgccgctgcttgcaaagccactctggaattatattggtaaatgctaataattcttctgctacagaagatataatgtatatcggaacctgcacaaaaaatgtatggcatatgactgtttgcggcctcacttgaagcaagtatacaagttaaaacattattatttgttcttctattagacaactgctcaaccgggaagcttaagctataaggtcaatggcctagaaataggttatagttgctaaaatgactatccatacacaagccttcggtcttaaaagtgtggacaaagcctgctgaatcaggaaacttaagctataagagcatagccgacctcaacttgtgattatcaaaaaggtccaatggtgaaggccacagttccgaggtaa

SEQ ID NO: 4754 - DNA, 622 bp, Gossypium hirsutum
tacttcagcagtcttagaatggagctcacacaccttatgtcgcctatggtagtcccgacaattactaaggtccgtattacattcgtcaacgaggcacacaaccggatgagtcccgatattagtaggtcgagctttcttcgaactcgaagaagaagattccatctttaaaactctgggttccttccatttgttagaaggtaattcacctgaatttcctacttggccaagcttcaaatcaactctaaaatcccctatagagttaacaagtttatagctatttgattcattgccattgatgatatcagtgtctgcgtttgatacagtttcctcaacaaattcagtaaaatcccatgatgtagctttcaagttccagtccattaaaataaaaaaccccttcgcttcaacaccttgtttgttaagcttcttcctactgttttacgctcacctaatataaaactccttttaaataagagaaggaaaaaaaaaaggagtcaatattgctataaaaaatagctaaaaaggccaaaaaaacaattattgaaatattatgggtattgaactataaactccacaaggaaatccccaaatcaaacacaccctttgccaaatccccctttaaaaa

SEQ ID NO: 4755 - DNA, 623 bp, Gossypium hirsutum
acttgcgtggactataccttgttaaggagtggagaaaagatttcttgtttttgacacgtcgtctaaaccattgttgtttgttttagccattttgcattttgaaggtcattatagttctttctggatgtagtttgcggaagagaaacaatctgtcaataatttaccacaaaccaaactggaagagtttgaagatgtaaggaagaggctgtaatgacaacattgcacagtgcccttgatttttattcaacaatacaagcagatgatggtcattggctaggagattatgggggccctatgtttctacttcctggtttggtaaggcttaacaaagctatatctgattctgatctgtctgttaatgtggaaattactaatgtcttttctgtggcttaatctacaaagaaattaaattgctgcttctcaaaatcttttgacatttcacatttgtacgtgtagtggaagaaccaatcctttattttgtcattatgtctgtctttttaactctgagatcccctgataattacatttcaatagctttctgattaccttgacattgttgcattctcaacaactaataattggatgatatgtaatttaatctttgtttataagctgccaccagg

SEQ ID NO: 4756 - DNA, 646 bp, Gossypium hirsutum
aaatagaagggggtttgtattttgtatctaaaagctgaaattgctgtactgaaaattactagtggtactacattactgttgcctggaaaggttgagagtcattgatgaatgatgagttgttgggttgcaagtctattatatgtataaattattgtggggtatgtatttttgtacgtgctttttgtctgtacaatttatatgcgtagtgtgcttccataaacaaaatgactgacagcaatgcaaagttcacttcaccaacgccgccttcattgctttatatcccatgtttcagcaatttggaaatgatgcaactcaaacctatatctctttaaattcatattcccaatcatggtatttagaaacaacaaattttatcaataactttaacattagtaatacaataatcactatgttaatctcacgacaacaattcaattgataaattttaatattaatttaattagattatgattcactcgtaataagtgagtgaataaacaaaattatataattaaaagataaaagaaaatacttgcattactttaattattattatattatattatatttattttctttaaatacattaatcaaattgatgtaccttaaaatgtgtgatattaatttaaatggaggcttcgaaata

SEQ ID NO: 4757 - DNA, 891 bp, Gossypium hirsutum
  misc_feature (445)..(453): n is a, c, g, or t
  misc_feature (491)..(492): n is a, c, g, or t
  misc_feature (681)..(681): n is a, c, g, or t
  misc_feature (753)..(753): n is a, c, g, or t
  misc_feature (863)..(863): n is a, c, g, or t
  misc_feature (868)..(868): n is a, c, g, or t
cctcctgtaaaaccagccacaccgcttgtcgcctgttgattggcaaaagatagatatatgcatatagtatatatataaatagcctgctcagattgcagtgttggatgttggtttcttgaatacgatggccgaagttgtgattcagtagggtttgtatgtcattaccaaaaatagaagggggtttgtattttgtatctaaaagctgaaattgctgtactgaaaattactagtggtactacattactgttgcctggaaaggttgagagtcattgatgaatgatgagttgttgggttgcaagtctattatatgtataaattattgtggggtatgtatttttgtacgtgctttttgtctgtacaatttatatgcgtagtgtgcttccataaacaaaatgactgacagcaatgcaaagttcacttcaccaacgccgccttcattgctttnnnnnnnnngtttcagcaatttggaaatgatgcaactcaaacctatnnctctttaaattcatattcccaatcatggtatttagaaacaacaaattttatcaataactttaacattagtaatacaataatcactatgttaatctcacgacaacaattcaattgataaattttaatattaatttaattagattatgattcactcgtaataagtgagtgaataaacaaaattatataatnaaaagataaaagaaaatacttgcattactttaattattattatattatattatatttattttctttaaatanattaatcaaattgatgtaccttaaaatgtgcgatattaatttaaatggaggcttcgaaataagtatataacatggtcctaaccattttactaatcaaattgacatcttgnggctnagaggagtacaatgtttttgcgc

SEQ ID NO: 4758 - DNA, 629 bp, Gossypium hirsutum
atattgataaaactgaatatctgaagactaaaatgaattgtatttgaaatatctctcttaccgatgaggtagaaagttcagttcattatgcaataatgtatgatgattttcattgttgggaagccacataacgggttgggcttcttgcactgcaccaatcattacagacaaaggtatcctattctgaaactgtaagccatcataagtcgtaagatatctctcccaaacacacacacacacagacagggggagagaatatttttgctacctggttacagcattctagtgacataagatggtgctttccaaaattttcctgcaaagaaagtagaaggcataagtcatttattgttgacatgaatcagattttattgaactgataaatcaattagcattctctatcagtatctatcaagaggctaatgaatcaagaagtttcaaacaacactattttccacaccaagaaaaaatatgcaatatctttattatatattatatatcaatgcaagaggctaagcatgtttatttatgtgtcattgactttgaaagataacgtacaaaagcagtgcatagaggtcattattactagaacaaaacaacataccttgtgtatacgcacacgctcaatg

SEQ ID NO: 4759 - DNA, 620 bp, Gossypium hirsutum
tgcagaaagaacttagcatgaggaaccaaagagaagctgccctggaagctgcattatctgagagagagctaatggaaggtgatttgcggagaagaattaatgaagcaaaaaggcacgaggaacatctggaaaatgagctggcaaacatgtggatgcttgtggcaaagatgagaaaacttggtgttaatgtggaggacatatcatcaagtattgcacaaacaggagaaagaaatggacctttgccttccaatgatcactcgtttaaattattgaaaccggaagaagcttgtgaaaatttacatgggatgaaaacatacgaagagttaagagcttgctatcaagaagaaaggagaagatgtgaagaactagaaaggcttgtttccagaatgaaggtatgctgtttctctagattagttttgaagaaatgggaacttgtatgtttttctctagattagttttgaagaaatgggaacttgtatgtttttctcgtaccagtttattgtggttgttttctttcttcaactatggatctatctttttggttgccttcttttaaggtttcattttccagctctagtatgagtataaaattagtgtttgatttatcattgggatgtaag

SEQ ID NO: 4760 - DNA, 609 bp, Gossypium hirsutum
agagatcaagatgatgttaatttagccatttatgttaatcaacgggccaccaatggtgcgatcatggaagttgtggatcaacagctacttaaggagccctcagctgatatgttgaagagttttaaacttttctcagaccttgcatttgcatgtttaagggagaagaaatcaggtagacccgccatgaaagatgttgtccaagaactccattgcatcattcagattatagatcaagaaaatgtttctaaagaagttagccaggagattatataaacgaacagtaatataatatatatgtatatgtaccttgttgttgatgtctgtaatttttgaatattcatatatatgatagcaaaggaaaagttggaagagctatggggaaaatgatgctgagaaggacattggttttgaatattgcacacaaagggaaagtggattccaaggatggatttgagtggatggaaagatgtaaagaaaagatctgggatcagattcttgctttttcaaaagtattaaatgaccaaggagtaggcgagacttagaagttatgggggaaactggaatctgtaaggttttagtaagaatttaaggctgtgtggacttaaccaa

SEQ ID NO: 4761 - DNA, 622 bp, Gossypium hirsutum
  misc_feature (612)..(612): n is a, c, g, or t
ctttcaagttattactacaaggatgctagccttctcttttgtgtatgttttctgtactcgtctttataatttgatccatgatactgggtgctttgtgagacaaactaatgctcggttccttgtccaggtgctaattgctcaaggtttacttcatttgaagaagggtctattgactcttaatccatatcattctgaccgctttttgctatcaccgtaagtgcctcttccaaaaacacataatctaatactctgcttcatcttgattaactggatgaaattttctttcttttgttgattccaggactgcacttgctggtttggttacaatgttgcacgcatgcctcgatatgaaagctatggtactgggaaaataccattatgtcctctacttcattgttctggcaatgcaggtcagtaatcagttacagtcgtactagttattctcccagtgcatgtgtttttcaatgctgttcttgttctcgtataatattgttttctattgtctacagccaaggatgttgatgaccgtcgacgaaaacctcaaacctctatcgcccccagtccgtgtaggtcaagctgttgatgttggcgggcagggtggtccacccaagnctatcactgg

SEQ ID NO: 4762 - DNA, 286 bp, Gossypium hirsutum
tgctgtgtcgaagaatggtgaggtggcttgtgggtttaacaccactgggatgtttaggggctgcgacaccgagggtgggtttatggaggttggtgtctggtaaaataaaatgttattattaggattgcattacaattttttcttgtggtgttcccccaagagggtttgcttttttcgtgatttcagacatgtgcttcatccacctggttttgtttttgggtttcatccatgtaattgagatgtcgaataaatatttagcatcttcaaatctttgattttgtaattt

SEQ ID NO: 4763 - DNA, 606 bp, Gossypium hirsutum
ttaagtgagcaacaatgtggtctaatttgtaatgtattatttcttcctgtattactaaaatgcagccagctagggtgtgttccaataaattattagcgtggtgggaattccagttattctcaggtggtcaatattaaggctcttactcactgtaacataaatccccagtgaaagaatttcaggggtgagttgtacttctggtctccaaaaactcttgaagcatattttcagaatctttatcccgttttattttgttgttttactctctcctaatctaatttagaacccttttataataggtaacgtatcatgctgtcattattgaagcggtagtactagaagaatgacgcaaaatctgtggtcagaattcagattattttgtacatccttactgcaacatttttctcaaacaatttatggagtccatatttagatatgtcggattatttatcttctgtacttcgagaagaggttgcctagaaagcttcccatggaaaaggccatggaaactcaaggtaagggacttaaaagtttgggaactaaaggcaaccattacatgctaatacaaaacatcgcatctgatatcaacgctggctaccaaagctg

SEQ ID NO: 4764 - DNA, 613 bp, Gossypium hirsutum
tattttggtcggacaatcctgcatggtggtgcaagggtatgctttgtctcgttgtacctgattcccctgtttctttatttaaaagaaattgggatctaggtgagtgttatgtattaacacttttttcttaacagtatcaagctacaggtagaggttttgtggtccgccatattaaattttctgagaactacagactgtattctcgcagtcattttgttaaagggtatttctctctctacatatatgtctatatatgtttatttttactgaaccaaccatattaagttaagctcttgtggtgcattcaggctagaagttgtgcttctgttggtggtataccttgcatatgggtataatgatagtgcattgtcgtacattcttctatcaattagcagttggtttatggctctttcatggcttttcgcaccctatttgttcaatccttctggatttgagtggcaaaagtaagcaatcttttatttatttatttatttttaaatgtgggatcctacctaattatgcatcttttttgccattttcattttcaggattgtggaggacttcagagattggacaaattggctattttacagaggcggaattggtgttaagg

SEQ ID NO: 4765 - DNA, 518 bp, Gossypium hirsutum
  misc_feature (457)..(457): n is a, c, g, or t
actaacaaaattgagattgaatctcttacatttttatgaaagaaatatgagctcatttatctgaaaagtagaatgtttaaatattattttagtagatgcatctacaatataattacatatgagttatcaaatcgcaatctatcatttgagagattatttgtttaatgattagtttaagaacaaaacttccagattgtataattgagacaattattgttaatgtttgtgagttcatttcttaggcttttaataatcattatatattaaattgtccacacgagtaagtatcacaaaatctgatgtttatgtatataaaatggttcagcataattaataattaaatgactctagttagtagttaaactttatttattttagaataaaaattgttgtatttatgtataagtacgatattttacatatttaaaatttgtacctatcatgttaataaattgtnataaacactcctcgatacagttaattttacaagttttgaattactattaagagacacaacg

SEQ ID NO: 4766 - DNA, 633 bp, Gossypium hirsutum
gcaaattgcgaagacagatcctcggtgcttaagttaaggagctcaggtaggcttttcctggaggcctctaacttatctccatattgcataagagctcgatcatgaaggtatgttctgatctccagagcatcctgaagaacatagaaataagaatatatagtgataatttactatacttagagaggtgaaaagatttttaaccttttgatgttgtgtcatattgattgcatccatatcctctggattcatgatctttaaagttgggacgtcatcccaaccttcttctaataactttggaatcaattccttgagaaccccatgaccaacaaaatcttctattgagaaagaagccattgtctgttggaacagggaatgattggataagaccctgctttttgaatgaatgagcctgtattagaaaagctggtgctttatatgtcagtacaaaaataacaactaaaatacatctcggatcggtaaagtgctttgaatatgctccggatgtcggcattgtcaatgatgtaattctttatttgaagttgaactaattcaacaatctcttattttattaggagtggttacttaaaagttgagatcaaacaaatagaacagaagctgaatgtaatttggcag

SEQ ID NO: 4767 - DNA, 437 bp, Gossypium hirsutum
tcttctgatcaaaaagcctcaaattataattgaaaaagtcaagttaattacggattttaaaatttttacgatcaagtttgaattatttcgagtttaattattctaaactcaagtcattcaaaatttttaattcggttcttatatcgaggtcaagtaatctctaatcattttaagttattttaagtttagataatttttaatttaatttattgactttttactattaatttaaattgattcaaacttaattaatcgaaccgatgtataataatttactctaaaacaagataaagaaaaaaagttggaacagaagtggatagcattagcaaacatcaaaattttgagtttccctttatttacttttaggtctttttttgatgggcagtgcatttatcacaacaataacggtgaaattaaatattgtaacgtgagaaaaa

SEQ ID NO: 4768 - DNA, 603 bp, Gossypium hirsutum
tgcattttgatctctggatttgtgctttatttgggtttctttatttaacagtatacaaatatgtatcagactctatgttacagtgattctttgttacctaattaccccccggttccggttcctatccatcactttaaaaaaatcccgggtataactggccaaaaaaaggtatatttatgcctttaattatgtatacagtagatgccgttagagggataacttgtttgaaaggcaacaaatggggctcactttgcttgtttgcttttaccagcaatattgaagaggttattgtgaagtttgcgcaattaacgccgcaagaaagggcaaagaggtgtcgaatctgaattttaatgtctttcagtgaatagtctgttcatattgaaatgacattatagctaactgattttcgttggtctgcaacaggaagctggagagcctcgaagtaagactacttgcaactcatattcttcaatatgttcttcttccttccttgccaagtgaagattttaatttttgggtcttgtgattgagaatataggctctgaagaaaaccttcatgaaattggatcatgatctaaacatacctgactttctatgcgcaaa

SEQ ID NO: 4769 - DNA, 648 bp, Gossypium hirsutum
  misc_feature (625)..(626): n is a, c, g, or t
gacaattactgaacagaagggagggtgggtttagcagtgaattgaaagtggtttgttctgggactgaggaatacaagaaagcaaaggaattaagggatttatttttgcagtttaccgatcatcaaaagagactttacaagaagctatgcacggaggagacgagtatttctagcatcgcccactatttgcaactgtaagttaattttgcatattagatgaagggctggtataccatggtcatatgttgtataggaaggaacaagggaaactaccgctaacttgggtcattttgagtaatgcaaatgagagatttcaattgcagttgtttatatcgctgttattttcagacttgcatccaattgaatcccagcaatcaattttaattaaacaaccgataaaattgaaagggtttcatataatataatataaagctatcatatagcatataaatgtcataaacaaaagtgttcaacacatgacataatatatatatggacaaggcttcaaaaactgcaataacaagctaccagcatcacataaacataaaaacaacattattttctcatccctgaacccgagtttgttgccaacaaccacgattcaatcatgacccatcctaacttcnntcaatcatgacccatcatagct

SEQ ID NO: 4770 - DNA, 631 bp, Gossypium hirsutum
gtctacaacaataaagcgtgcatgttcctggccaatgatcttaggaaacactattttaaaacggttaggaatgacttccattaccaatttatacatcacagaacataaactaatcgaacagaattttgaatacttctcgggactagggacttaaggaatgagaactagccgcgtgttattcaattcaggctcaatactcttaccagcaaatacctctttcacccattcacagatccctgaaccaattaagtcccactacttctggaaaaaaaagtgtctggaaaccatcacttcctagagccttcaactcacgtcgtatcaaaaagggttgctttgatctcatcgtttgacacttcctttcctaaaatttgagaatcacaattatccaaattagggaaagagttaggaggtaacatactcatgggtctaagttggtcaccatacagcttttgaaagaatttaatttcttcgagttgaaaggcttcatcatcatagatccaagaaccatattcactttttataactgcaatacggttatatttccttctttgtagggtacgacaatgaaaaaacttagtattgcagtcccccaaatttaaccactcacacctggattctgtttccaaagaac

SEQ ID NO: 4771 - DNA, 622 bp, Gossypium hirsutum
tcttctggccttattcgatccatctgaatcacatccatgcaaacccaaaagataaaaagaaaatcctacccaaaatcaataataatgccaagaaaagcaatcatttctttttctttttaataacaaactcaaaatgaattaaacaacgctgaatagaaccgaagcatcatcaaagacgtgaaatcaaacccagaaatctaaaataagttaccataatcaaatgcaataatgaatcaaataaatcactgataaatcaaacatttagcaaagaagctaaaccagctaaacaaacaagtgatgctaaacagacaaattatgaacatcaacgagtaaacaaagagtttaccttaaatacgaatttgttggcgattcgggaataaacaaacccttgattttctggaactggaactgggtggaggaccggaggtagaccggaggtggatcgatggaggacggaggtagcttgatgccttgattttggatttgggaaaaaaaatggaggaggggagatagggttagggaagactgtcggcagtaaaacaaaacaataatgttgtggatacagtaaaattagcaacaatagcagaggagatgaggcagagatgatgaggagctatggaaa

SEQ ID NO: 4772 - DNA, 644 bp, Gossypium hirsutum
tgtgtccatgcataggatttactgtttatatgttaagatggggaaaagtgcatggatcacggttgctagtttgtattgcgatcacagaactcatgttgtaagactggtcaatgtgtttcctttcaacttttgtgaggtgagatttatttcaccattcactagtgtttttgggatcagatttatttcgttagatctgttaggtacatggaaaatgagataatggatgagtatctaaagcaatgggggacacgcgtaagagattagattgagggggatggaatgtgactacaacatgtaaagaggtgacctacaaattccttcagggaaacatctgatttaatggaagatgatcttgtgaatgggcaaagttcaaagaggatatggaagaaaactataaaaacagaccttaatttactgtgactactaactcattttaattagtgttcagtggcacaagatgttccatatatttagctctacatacagggaaatgactaatttgtttattttttctgttgcactttttgtggggagaggaaaagctgataatctatcttagatagctaagtggtcagtggatgcactgtatgttcttgagttgtacaaagaatgatgtaaatcctccctggttactggaaagtctg

SEQ ID NO: 4773 - DNA, 621 bp, Gossypium hirsutum
  misc_feature (613)..(613): n is a, c, g, or t
tttgagggatctggactgattataaattttggggaccaaaatgaaaaaatgtaaatttaccatttttagcttacaactttaccacttttagattgacaaaaatataatcataccatttttcttccatgactttggttttgttttttcatgcccggctaagtggtgaagcattgaaaccagaaaattttctgttttttaggggcaatggttgaattttacaattttgatgtcaaaatgtaaattttccgttgtattagcttacaacttttaaagtgacaattataattttatcattttttatggccaatgcctctcccaccatggatttaaaaaaaaaaaaaattaaaggggaaaaaggaaaaaggtttaaaggaggtcctttttttttttttttttaaaaaaaaaattggcgcaacccccaaaggaaaaaccccaaaggggaaaaaagaaacccccccccccaaaaaaacccttccgggttaaaaaaaaagggggaaaaaatgaacgtaccaaccacccccaaaaaggttaaattggttccggaatccaattttgaaaaccccctaacctccccaaaaaaatttccccccccaaggttaaaaccccccctttnaaaaaaaa

SEQ ID NO: 4774 - DNA, 634 bp, Gossypium hirsutum
ctcttttttccctttgtttatctgtagtaagaaaaaaattttctttatttgaggccatttgtgactatcatttcaggttgaaacgctgtcaagagatgacttggcatccagattgactttgacagtagatactgcaacagttgaacctcttctactttcggattcatttattactataatggatgtaagttatctgaaacttgcttttcatgggtgcatgcgctcactaacatgtttctatttttcatgcttttaaaggaaaataatgtttctttgctaagctggacaaatgatggtctctccattaatcccttcctttagaagtgaatggaatagatattgtacttgtatttattgtgattttataacatttttttttcttataagcacaacatgatttccttatagcagcatttgcattccatatacatattcttattaggaagttgaaaaaactaaaggtaaagctttatctgatagctctattgttgacatggttctgtatatgggctttgaagacaaacgactactctgcaattcctcaacaactcaaagatcagctgagtgagaggtatccaggtgcaaggcgagcttatctgaaaacaggaggtgatttcccatttctttcccgtcc

SEQ ID NO: 4775 - DNA, 607 bp, Gossypium hirsutum
aaccgcaacaccataggaaaacattaaaggggaccattgctattcgtttaaaaatattccgaggcagcagacaattgaataccatagaggaagaccatgtgaatagaagcaatgatcacctgtttagcctttggcatttataacttcagcaaatcctggtttctggctgagaaaataccttccaaaattggtatgtccatgtgaggatgcaggacaccacagtcaaaggagtctccacgagaagtttaattgcagtagctgtgtttcctatgcaagaagcctcactcaaatggcatatcgttgatttgggaaactggagaatagaactgtcagagtagaacataatagaattcaacaaattgaagcaatcaatcaaaacaggatataaaagactgaaactaattggatggcaacatatatcccaatccaaagatcatatttcttttacatattgtcttgaaaaaacaccttaatttgctttgcatcggaggagcatgtcaatggagtaggtaaatgaagcacttgtagcttcttgaagccgatttcctaggtcagtcagtgaatgaacctatcgttaatgccccttgtactaaagggtatgcttagc

SEQ ID NO: 4776 - DNA, 859 bp, Gossypium hirsutum
tgctttgtttgcttctatggtgtttttctttgtccgtaacccctttaccagtttggcaccactcggttatcaaagaccagtctgaacgcagggctaataaacccgcaacaccataggaaaacattaaaggggaccattgctattcgtttaaaaatattccgaggcagcagacaattgaataccatagaggaagaccatgtgaatagaagcaatgatcacctgtttagcctttggcatttataacttcagcaaatcctggtttctggctgagaaaataccttccaaaattggtatgtccatgtgaggatgcaggacaccacagtcaaaggagtctccacgagaagtttaattgcagtagctgtgtttcctatgcaagaagcctcactcaaatggcatatcgttgatttgggaaactggagaatagaactgtcagagtagaacataatagaattcaacaaattgaagcaatcaatcaaaacaggatataaaagactgaaactaattggatggcaacatatatcccaatccaaagatcatatttcttttacatattgtcttgaaaaaacaccttaatttgctttgcatcggaggagcatgtcaatggagtaggtaaatgaagcacttgtagcttcttgaagccgatttcctaggtcagtcagtcaatgaacctatcgttaatgccccttgtactaaagggtatgcttagctatgcctgaactattcatttccctgatagatctctgtgtctgactaatatttagacataataattatagatatatccttcaaatatattaaaatactttagaaaaaattcgaataacataggttacagtagaaaaggtcaacggggggcata

SEQ ID NO: 4777 - DNA, 685 bp, Gossypium hirsutum
  misc_feature (614)..(623): n is a, c, g, or t
  misc_feature (625)..(636): n is a, c, g, or t
  misc_feature (638)..(641): n is a, c, g, or t
  misc_feature (644)..(645): n is a, c, g, or t
  misc_feature (652)..(654): n is a, c, g, or t
  misc_feature (656)..(658): n is a, c, g, or t
  misc_feature (665)..(665): n is a, c, g, or t
  misc_feature (667)..(671): n is a, c, g, or t
  misc_feature (673)..(674): n is a, c, g, or t
  misc_feature (678)..(680): n is a, c, g, or t
tctgagtcttttaaatgtcgaagaaagaagtacatgaaggttgttgcggttctgcaaaatgttgagaccaacacaaagagtttgttgtacgtaggagattgatatctatggttaacttgatttggatgtgacgaagaggtaaaggatgctattgttgtatgaagccgtgatgatgaacatgatgagaacaagtatgaatttgaagctgatgccattaaaggaaacttggggaaaaacgaagctttaatttgactatcagaatagattttgataaattatgataaatcaattttattgtaaaagtatagcatcgtatcaatttagccattaaatggaatgaaaatcatgtgataactacacatgtttgtaatttaatttatgtgttctaaaaatactctatgataaattaaaaccggcgtttaacacttaaaagtgatggctatactaacgaaaaagacgtgattgatgcaatattcacgcttttaggattcaattgaaaacagatttgaaatttgagaactaattcagaatataaataatagtttagggatgctccttggatttaacccaaacaagaaaagcaaaagcgcttaaagtatctggtaataatccannnnnnnnnntnnnnnnnnnnnngnnnnggnnaagcgcnnnannntaactgngnnnnntnnaggnnntcgat

SEQ ID NO: 4778 - DNA, 630 bp, Gossypium hirsutum
agctaaagcctcatctaaacgacctgatcgagaaagaagactaactacacatccataatgctccatgcttggcgacaaatgatgtttagaggccatttcaatgaaaatctctaaaccttcatttaccaggccggtgtgactgcacgcagataagacacttgtaaatgttataccatcgggttctataccagcttccttgagatttttgtacaccgcaagagcttctccggcttgaccatgtaatgcataagcagaaatcattgcattataaacaggcaattcattgcttgagatatgatcaaacaccctctttgctcgacttaaacatccacatttagcatacatgtcaactaaagctgttgaaacagaaatctgtgaaccgaggtcatgccgtatagcgtatccatggattgctcttccatgttgtaatgatgtcacatttgtgcaagctgaaagtgcactactgatgcttacggtattcggtttgatccccgattcttgcatttcttgaaaaaccagcaatgcctcgtcgtgaaatccattatgagccaggccagtgataagagtagtccaagttataaggttagggtggacgccaagcaattgcatctgcaagaagaactctttagc

SEQ ID NO: 4779 - DNA, 604 bp, Gossypium hirsutum
  misc_feature (23)..(23): n is a, c, g, or t
cagttacagccaactaaatttangggtgaatttagacatgtatttagtttatttcttatcttatgttataatatgtaattttattgttattgttatttttatattaattataaataaatacgttgtctattcaaatctaccattaatttgataaaaatcattattattttgttattttattgttattactactcctacttcttttgtaaagaaaaatggaaatccatttactaattttttattatatctatttttttatacaataattaaaattatttataatttctcttcaacccttaagtagaggataatttactttagtgcactcaaactcatgtcctcttacactagtaataatatcgataccaactgaactaaaactcaattcacgtgtatatatattttttaattcttaaactttttaatcattaaatgagatgagtaatattattttaacagtttaaaattccactgacaagcgtagtaaataataatttaatagttattaataaaacttttacatttccacttatttatcttttgtttatttttaaatacaaattaaaaatatgtgttattttttaatattccgactacgatgtca

SEQ ID NO: 4780 - DNA, 615 bp, Gossypium hirsutum
tcacctgataacttgattaatttttattttaggacaagttagtcttacttttatgattagcagttatagcttctgaaaaactggaaattttagctacaaatgccatttattatctttatggtacttacctatagtcatttgaagttttttcttcttgaagttctactataccatttactatcaagtcaagttcaattcttgttttcatttttttttctgcggaaatgatttttgtacttcaattttttcttaagcttagttcaaaactaatacatgaatgtgtgtatgaatgacctggtgtaatctttttcttgcttgttcatcttcattttggaagtattactgtttatgtcgaatttaacatgtgggtggcatgatgcagggatacattttcgcggcctccctgtacgttagtgcaaccatctatggaggctgttactgattcttgtcttcgtattcctaactttggtatcagttattattttatgttacatagaaattttcatcatgtgaatgtatatataatctgtttatagtttagattactagaatttatgtttctgtttgcggtattgaatatcaggtaaggatttttgtcctccgatatatcctctg

SEQ ID NO: 4781 - DNA, 586 bp, Gossypium hirsutum
agagagaatccaactttaaactttggaggcgatgttgttcagagagatagctacggaccccaaaagaattagtctctttgaatcgtaaaacaggcatgaaatttaccttagttataaaaaaaatgaataatataattcttggccttctaacttggcaactaggttaactttggtacatgtacttttttttgtttactttggtccctgaacttgacaactaaattcattttggtccatgttccagtagcactggtcataccctcaatttttggcagttttcaagtttagggaccaaaatgaatttaattgttaagttccaagaccaaagtagataaaaaagtacagatactaaagtagacctaattatgaggttcaatggtaaagaattatattttaaaaaaaacactaaaaatggtatatgcatctctcttcaagccttcacctgttagagacaagtccgagtgggtttaagggtcagacccttcaccaactttcagtttccatggtaaggtgccaccccattgctcgactcaacacgcgtgttagctcgtgaagatgctagtgagagatacaatgcttatttgag

SEQ ID NO: 4782 - DNA, 610 bp, Gossypium hirsutum
gtgtgaagattgtaaaagggttaaaagacagaaattaagtgaggatgagacttcatgtcttcaagtatattcacccattccatcagatgatgaagatacttggtgggtgaggaaggggcccaaaaacttggagggttccaaagttgatcccttgcttaagtcaacaaagcaagcatctcgtggtaggcaaaagcctgtgcgtaaaactcagagtctagcacagttagctgctgctagaattgaagatagccagggagcatcgacaagtcacgtttgtgataacaagataagttgtccacatcatagaactgaggtggaaaatttgaagccagttgatgggatcagaacaacccatcatgcagatattatttcgattgggaggggtttaaagcagcttcgctttgtagagaagagggttgtcactatttggttgctatctgtagttaggcagcttgttgaagagtcagagaaatctgtccccaaggctagccagtatggtcgaccctttgttgcagctgatgagaagagtcccttaagatggaagcttggtgaggatgagctatcagccattctgtatctattggatgtttcttgtgattcagcttcagct

SEQ ID NO: 4783 - DNA, 640 bp, Gossypium hirsutum
  misc_feature (633)..(634): n is a, c, g, or t
atattcctagttttgtttaattcttgtatgtatcataagagcgtgcttaaatgaatcttaaatgtctatatccaatggttttttcttattgtaagggctgcctgttaaaaacgggtatactctcactgagtgaaaattggattactttacagggctctgctgggaaggaacaagagtttcctacagagtcaactaaaaatatgagaactccctgttctgcatctggtgacaatgacattaaagattcctcagctagactattgctttatctagaaggacatcaactagaccgaactttgatgctatatcaagtgattcttcaacagctactaaattcagagaaagaatttatgacatgggcaaagttatggagtcgagtatacacaataacatacaaaagagctctagaatctaaccaagatgatcctcaagaacatacatatcaagaacgcaagttctcagtatcagatcaaaagattgcctctattcagaatatgggatattttgcgagcatgtttgcttgcaaactcacttctgatttggataagtcaagtcctatttatgatatattgtttctgctcaaacttttggaaggcatcaacaaatattcatttcatctgatgtcttgtgagnnagttcg

SEQ ID NO: 4784 - DNA, 574 bp, Gossypium hirsutum
  misc_feature (557)..(559): n is a, c, g, or t
  misc_feature (563)..(567): n is a, c, g, or t
aaagcagattgaatatccgatatgttttatttatttatttattttattatatatttaaagaatttttagagggacaggttttcgcttatgcccgagaatgttctcgttaagcagtagcacattattcacaccgggactaattttcggttaaaaataaaaaattaagttattgaggtttgaatatttataaaaaacgaggttttaaaattaaaatagaagtcgtacaattatatttttttggtaaattattaaaatagtcatttttatttatcccaaattacattttagttatttatatttgaaatgttacgttttagtcacttacgttatcgtattgtaatattttagtcgccaaaacgttaattatcgttaatggtgtaacggtaagctaacgtggcacgttaaatcatcatttcaaacaaaaatttaggttaatttatacaattggtccttatattttttcattttgagcaatttattttttttcttttatgttctttttaaatttttatttccattctctttttgcttcttcctctattttcctcccttctccnnntctnnnnnaaaaaaa

SEQ ID NO: 4785 - DNA, 651 bp, Gossypium hirsutum
ctgtccctccttttgcttccattttggtgttgacatttttagaactccatgttttctctttagaattcaaggttgaacaaagttctgttcttatggttttagcttcttcagaagtctctttagcagaaccagtagaactggagatgatttttacctcttgttgaccatgtttcttctcaggaagttctagatccggaactacatcaccaataactgattgattatctgatgtgtctttttgaatttctgggagaggtatctcatcaatggcttcttctaccagctttataatctcattgttgcagcctggtgagtaattctcaatcatgtcctgacctgctgcaaatgaactgtgaccatcagtgtcgttctctctagaatgtttgctggcatcatcaccttgtacttcctcatctgataaactctgaagccgttgtgatccattttccgtggcaccaccggacaacatgtgcttatatattaagtaccaaagcctcgtgtatttttgtctttccgacttagaaatatcagctgcgaaatttgactcgggttgttcaagtggtgaatggaggaatttatattttggctgagctccttcaccaatttctgttggccattcaggtgtaccaggttgctgatcaggtgaattac

SEQ ID NO: 4786 - DNA, 663 bp, Gossypium hirsutum
ttcttgcttgaaatttggaactgagaaacaatttggaaagtcgtttgaagagtttaaaaatagcagaaataattgtcactagaatagtgttggtgaaacttatacaatctgcagtgattataaactttttaggcatatcattgaggctgaaaataccaaactgcactacacaaaacaaccaattctccagcacattcaaaggatgaaagtgacttttacaattctagtagttgtcaaagactgacatgttggaagaagctgggcaagaaaggaagctttcaaggaaatacatcaagtttaaacccctccccccagaaagaaaaattgaaattcccatttccacctctacatttatccataagttgagttattaattacataaatagatcaagttgatttatacgcatattttatttaattttaattataaaaatttaattatgtttctagcttttatactcttcacgggtttgaaatttaatttatttattttttaatttaataattgaaatttaattggttacgctgtaaaaaaataaaacttctattaaaattagattatgtggtatttaaaaaaaaacttatatggccctagtacatatttggaaggctaaataaataaataaaaatgttgaatattcggttgtgaggttctatattgct

SEQ ID NO: 4787 - DNA, 620 bp, Gossypium hirsutum
agactgtccctttgctaaatgatccttgagatctttccaaactgcagcagcatcagaagcaaagacgagtcccgctgacaaatctggactgacagtgttgaaaatccaggaaagcacaaaagtattacaccgatcccattgagcacggagagattcgggataaaccgaacgaaggcaaacaccatcaatgaattcgagcttgttcttcgcgagcaaagcaatccgaagcgagcgactccaaacagtgtcattttcaacaccagtcaaacgatgagaaacaagaaccgttcccgatgtatcagaaggatgaaggaacaaagggtgatgaaaatcaatatcatccatgataatgccagtaaaaaacacaataacaggaagaaattagggaaaaaaatgtgccctaaacaaagaacggtcaaacaagacgaggaaaaaaatatcagcccaagaagagaaaaaaaacgaggcccaaattacctataaaatggctcatatgataccatgtaaaaattcatctgtatatctcatataaaattacaattactaatgtatttatacaactcatatataactgattcataacaaaagaaactaactactctaactgctttaacagccta

SEQ ID NO: 4788 - DNA, 621 bp, Gossypium hirsutum
gttggttgttatagggagatggattcaaaatcattttggtttttttgcctcttttctaattagagtaatgtaaagttgatggaagttcttaatttggcctattaaaatttaactgttatttcagtgcacctcttttcttcctcggttaccaacaattattacaaacaaggcaagagttgaataatactttattatagctttgctttttcttggtaaagactttcaaacgatgaaagagctttaactttcaaccaaggtacaaacaaggatacgataggaaaccaaaggcagatgtgcttagttcgattggaggatatgccccgtcaacaacagtccatcaaatgttttcaaggctaaaattatttaaaattcataaccaagatcgactccaactttattgatttaagacttgtgaataaatgtgttgttatatacataggaataacgacaaattatgaaatagcggcggactaccaacaatttttgatgctaggtcaatccgtcgccagcttcgctattaatttatgcaaccaccccaaattatttaagcctgaaatcaaaggatatccatataattagctaaacaaatactagatattaattgtggaaacatccactgct

SEQ ID NO: 4789 - DNA, 622 bp, Gossypium hirsutum
atttgtttcggtttttaagtgtcagtgattttgagcaagtagaatgatttccgtatcatatcatgagaacacattaataaaaatatgggccttgtttattcatttgcggatggcaggtgaaaagtccaaagatggggtgtctgttgcaaagaagggaagtaggtaaataattgcttttgattaaccatgctgcaatattaatgttcttttggcttggtatcataatttgacttagtggtattctcgcttcaaccttatatttttaaaagcttctataatatcatgaaagattttcgtatagcaccttgttgcactttgatatcactaaatttgaaaaaaaaataaaatctgtcaggtcctttttttactttacaaaggaaatacatgttacttattatcttctgaatttaaactcttatccccaccccattgtggaattactaccttttttagtttatatataagtcctaatctgcatttcaaaatgaaactgtttgggaagttaataatatgttgatttttgccatctctggcatagtgaagaagaatttttaagtgttttactttcagttgacgaaaggcaatgtactaattatagttggctaggaagtttattctggaa

SEQ ID NO: 4790 - DNA, 620 bp, Gossypium hirsutum
ctcctaaattctgcctccttctcccccttcctatatttccctactttccacccctattcatgataatgaccctacatttgccatttccaaatcttggaaaccaaagccaaaaagtacagaatgttatgtttcctttgtcaatcaattagctttatgtaatgtaaggtctctttcatgggatgggattctttgtttcatcctccaaattgtcccaaaaaaaccgtacctatcatccaatctaacaactgaaaaatataagcatatctacagtagttctcaatctcattaactcacttgcccacaagatattattaagtcttactgtaataaaagtttaaaactgtttgatacatagcacaattggctttgtttataggattccattgaactgcggagtcggagattctttgtgtagtgctgcactgtacattttaataattcgataaagcaatgagaaagtgtgaaaaacttaaaccaggcgttattgtggttggaaaatgacaggatggaaatttaaaaaaaaaaactgaaacaagggtgagctagcagctagcgttacgatatttggtttcatgcttgctgttggctgttgtgcgaataaaaatgaaataagagtcacc

SEQ ID NO: 4791 - DNA, 602 bp, Gossypium hirsutum
  misc_feature (502)..(502): n is a, c, g, or t
  misc_feature (505)..(505): n is a, c, g, or t
  misc_feature (507)..(507): n is a, c, g, or t
  misc_feature (510)..(510): n is a, c, g, or t
  misc_feature (512)..(512): n is a, c, g, or t
ttaagacagtgatattagatcttatgtgaagacaatcatgctatttctcttaaaacgaaaatactcatttactaatctggttctcttatagatggaatctatgctgccgaagcaggaaaagaccactgggaaccaaggggctccgactcaaagggcttcagctttagctgccttaacttcagcattcaataaatctccttccaaatcaccccctccggtaataaactgcttatgccaataaatgatgatacttgtttactaatctggttccctgatcgttggaatcatgctgccaagacaggaaaagaccactgcgaaccaagggggtcctactcaaagggcttcagctttagctgccttaactaatgcattcaaatcagctactcgcaaatcatccactctggtaataaatttcttatgccattaaactctttttttggatatggggaaggaaggcccccgggcgccaaatccaaaaatggtttcctaccccgggaataanaangnagntnggtggggccggtttccccaagaattcaaaccattcataatagggaacttggctttcaggttaaacatactggaaaggcaccataatggcc

SEQ ID NO: 4792 - DNA, 462 bp, Gossypium hirsutum
ggcaagactagatataaggattctgcaccggcgttcttctaacgggacggatatttttgggtaaatatttgcttcgttttactctactttgccttttaaacttattttttaccctgaaatattctgtgcatcttttaatatattcttctaaaagcacatatacacactaaattatggtacacatgcaatgtttgtattttcacaaaatgttgaatatagtatttgtgctttaaaaatgttcaatgtgatacttaaattatcaatatgtgttttattattgtacttgtactttcataacatgtctaatgtggtagtgatactttaaaatatccaatatgattaatgaattatcaatatgcgtttattatagttgctaatgttaacaacattaatgaattattaaatcaatcaataaaaatttaatagtagaattttttttccaaatcctcaaatccacatgag

SEQ ID NO: 4793 - DNA, 567 bp, Gossypium hirsutum
  misc_feature (389)..(389): n is a, c, g, or t
ttatgatttaagatgtatagaatacttatcgttggtgtcaagttttctttcggttggcacatctaaaatatgaatgaaatgctaatgtaaatgatgtttcttttatatttataggtctccatgcttcagaaaatgctaaatcaagaagaaaagatgcttgagattctaacacgagtacatcatcaagaggctggctcttccatctccatccccaatttcctccctccaaaggcaaggctgttctttcccttttccttgcatgcatgctttgagggcatatttgacttgacttcttaagttctcttcatatcattaatgtatggtaggaagaaacattagacaaaagaagcatttagtaaacagctgagtgatcaaatccattatccatnttgtttaaaattttacagacgaaggagctgttagcagagctggctatggttgagggtgagatagctcgtttagaaagccaaataagccaacttcaacttgatctaaaacaggaaaaggaagctacccaggcaaaacaatggcaacctgggagtctaatgtcttaccttcaaggccatc

SEQ ID NO: 4794 - DNA, 608 bp, Gossypium hirsutum
  misc_feature (196)..(196): n is a, c, g, or t
  misc_feature (198)..(198): n is a, c, g, or t
  misc_feature (202)..(202): n is a, c, g, or t
  misc_feature (206)..(206): n is a, c, g, or t
  misc_feature (286)..(286): n is a, c, g, or t
  misc_feature (297)..(297): n is a, c, g, or t
  misc_feature (325)..(325): n is a, c, g, or t
  misc_feature (375)..(375): n is a, c, g, or t
catcatggcattcaatagtgtttatatattcatttatcaaataacatctgttgtttacatgcccctcgaaataaactatatatgcatttttacgtattggagtacgcacatttacttccttcatcactttatgctttgaaatgtctggttgaatcatacatatcttgataaatggtggtcactcatctttctcctncngatngatnccgtacgcttgaacaatttccaaagctgccacggtcaatactattgatggttaaaaatctccaaattaatggaataaagntgggtatgganaaaattacctggtagataaacttcaggnacaaaaggcctcaatacacctcttgttttgatcttgttttcatttaaaanctgaaaccatcaaaattccattaaaataactttaaatcattttcaattctttgtgatttgttacagaagaagagaaatgttgttaaagtgtaccagagctccaattgctactggaacgccaacagtaagggccatagcagatatcacttttccattcttagccttcccgaattccagcaaagtcgcggtatggcgctcggtctgtttgctatcagggaaatctacttccactt

SEQ ID NO: 4795 - DNA, 404 bp, Gossypium hirsutum
ctagcaattgtgtacatttgcacatcatacaaaaatttgcgacagtaatatcatagcactattgcagcacagagtttaagcttaccaattatgcatctggacataacaaggttaggtgcaatcccgtcatctcttgccttagagagaagcatgaggcctacttcaagatcaccatttctgttgaggacaagacgaaagaaaacaggagttaatgcactaaacttaagaggttgtaggatgaaagcatagatatacagttgatgtgtcatcgatactaccagactccaatttgcacttacctttcacttgccaccaaaagtatggagtatgtgataatatttgggctcaatcccgactcctccatctctgacaaaacttccatggtctttaggcagttgatttgc

SEQ ID NO: 4796 - DNA, 639 bp, Gossypium hirsutum
ggcaggttcgaagttggttggactctttaacataaaagccaaccatgaaagtaacatattactattgttgctaagcccacagtttcaattttcaaggaaagatacccctgcaaaaataggttctttttttgctagacacagttaatgggtgggaccatgattttgtagtacaaaacagtgaaatttagtgttatattgaaattgtaaccttgtctatagcgttacaagcaacttaatccactgccatacttaccaaccaaccgccattactctcctcaacacaaagtcaagccaacacatgtgctgaaaacaaaaatttcagacaaatttcctttgtctaggtacttatagttagctcaattctaaagtacaaattatagaaaatataaagggactaatataataacttaaagttttttatcactaattgaccaaagtggttctacaatgcaggcaaagaggaagtatgaacaagggttgaaccacgtaggtcattgtctggtcttggactgcttccagcactgctgttagaaacagaaccgaaggtagtctttgttaagactccagtgggagatgaggctagccgctgccgaggactattgttccaatcatcgcatgtaataaggttaagtgctgatg

SEQ ID NO: 4797 - DNA, 583 bp, Gossypium hirsutum
catcttaaatgcattctattcttcatgctttttctctttttgatttgagagcgagaattttgcttgtcagtagtcattatctgagttaacataatttgaacaagaaataaaaagaatcaaataacctttttgagtatttttacgtgattgtgatatttgtagtttgagaagtgatggtcaatggattagaagggcaacatagtaactgaattgttacttaagacactcattcttatactagtgttgtgttgcctgtcaaaatttagtactaaatgcaatcttcagttgttaactttctgttccttcatatattttatatctatgcagatattttctcagagaaggggtcaatggagagcagcgacgcagtcccaagaattttttaggacacttcaacgttattatagcaatgcatacatagatgcggagaaacaaaatgcaattaatatgtaggtttcagtcttttatttgtattactcttttgggtgaaaattgatggctgcctctctaccagtttgaagtatataaaaatttggtcttttggggggtaataaaaggctggccttatctccctttgaagtta

SEQ ID NO: 4798 - DNA, 615 bp, Gossypium hirsutum
  misc_feature (14)..(14): n is a, c, g, or t
ctagatacgcttanacacgagtacttcaagaaagatgaaaagtaggaatgtaaatgattgaagctacttgagcttggctcattgtttatcaagtctagctcaaactgcaactacccaaataacaagtcaagtcagctcaagtaatttaataccgaacttgaaagctcgcgagcctaatcaaacctttaacgtttaatatatttaagatgtacatataagtaaatgacaaaaatctaatgtctgacattttacaattttactaagtttatcaagttgagctcaagtaagttatgagccgagcttgggtatgaaaaacaaagctaggttgagctcgaacaaggctttcagactcgagttttcaaaacaagccagctcaaacctggcactggatcgactcaatagcatctccacatacaagagtagcttaattcaactagatacttgaaaagagatatatatggttccataacatgaaaaggtgcacatggtccgtaaaagtttttagagaaactttaaggaacagaaattcagcacaggtaaatatttcaaaacgttggacaagtactattaaggttctcgaggataccggtctcaaactgattctgttatctggaa

SEQ ID NO: 4799 - DNA, 385 bp, Gossypium hirsutum
atgaatcatagctgtgtaagcaaggtgattaaggagaattttaaataagaaagaaaaagaacctattcgctttttgtccaaatgggttgtagtagcttcttgaatcattatttacctccttcaatgccctcgtgtgtaattgttgagcttttgctagcagacccaagttttaatgaggattcaataatatagctattaaaattatttattccatacgattcaaatattatagagtatcctagtctgattcctcttactattttaattatacatatacatatacatatacatattcatatacatatgcatatgcatatgcatatacatatacatatacatatacatatacatatacatatacatatacatatacatatacatatac

SEQ ID NO: 4800 - DNA, 499 bp, Gossypium hirsutum
tagtttaagctttttggtaaccttaggtagtaacgccatgaataaaaccattccacaagacatagttttggctacagttgagtttcagactggcactattcacatcctccttgccttgaatttggctttgcatgtgacgtcacctagattcctttgaaaccattaattagcatgctttttaatttcccttcgttgggcgttgggactccacaacccagtctaacatgccctccaatattacatttaaccagtgccaagcattataacctttaagcaatgttgaacttgatcacccaaattttcacaattactgctaattacttaattcaaactgcttcagttttaggtgtttcagtcaaggagatagagcaatcatgtcaacaaaattttctcattagaaatgcattgtacaaaaatactagtcagctcatttcaaccttccagctaccaattcatatgttttccaattttctagcccaaccaaactttacaatatgca

SEQ ID NO: 4801 - DNA, 629 bp, Gossypium hirsutum
  misc_feature (64)..(64): n is a, c, g, or t
  misc_feature (399)..(402): n is a, c, g, or t
  misc_feature (409)..(411): n is a, c, g, or t
  misc_feature (614)..(614): n is a, c, g, or t
  misc_feature (622)..(626): n is a, c, g, or t
ctcttagtgaagtgatgagtcatttagtgctgaagaaagtagctccgatgactcatcatcggtngataggagatcaaggaaatcgactaaaaggcatggtaatgtaaagcaggaagcaagtaaattaccaaataaagggaggaaagatgatgttaactcgtccagggttttgcgttctttcggtaaaaagcatgatgaatataagatgtccgagcaggatgctcgttacaatacgaaagaactgaaagccgcattggaggtatgatgagagtagttatttatactaatttttaggcttgattaacactttgaatgctcaggaaggaaaagaaaggtgcttgcaatttgtcaagggaaccattcttggtttagcgttttccatatttttgaaatatttannnnctttttnnnttaatatcttttttctcaacttattaggtgattaagaaaattatgaagatggatgaggctcatcctgttcagtgttcctgtagatcctgttgcgttgggtaaatctgtaaggatatattgctatgcgatttatgaatgcattgccaaattatcttcaatagcagcgtgctgtgggttgaatctattctagcaatcttagtggngctaggtnnnnnctt

SEQ ID NO: 4802 - DNA, 645 bp, Gossypium hirsutum
tgatgcaacatttttagtaacattttaaatataaacttaaagtgcatctatgtcacccattacacatatgtcaggtactggggctacaatccgacactcaattgagtcatgggaacataggtatttagttgttttgtgtacctcttctgggaaccaaacaccaggttgcgtgcttccctcaagaattgctactgcaaaagcagctgtggcgtttcccactgccctgaaatatacggaattcgatattcttcatatctattttgtgacatcgaataaaaccattctgcgaatgaattaaacttgatgccttctacaagttacatgttgaagggattttaagggcagaggctttattgaacaaagttacttgtttctagaagctttctacatacacagatagtctcctgtgactaaacaaagcaagtgtactccgtccatttgtgcattccagatcaacctaggaaaagtttaacagaaaatatttgattcacatatgatcgagtagcataaaaccactattggaatactatccgttaaagtttgctcagttttagtatcataccctcattgaaactcgctcaccggcaattccgtcaactgctcggactagaggatcaaaccattcaaccaactgttggactttgc

SEQ ID NO: 4803 - DNA, 534 bp, Gossypium hirsutum
  misc_feature (516)..(516): n is a, c, g, or t
ttgatgtctatttgtgagatctcagctctatcattcgaaaaggcagccaaatagactcccctttacttcacttgtgatgcttgtgatccttaccctgggccaactgattcctctggtgcttaactatgaggccttattccatcaaaagaatgatcagggtaccgtgttgtttcaaaccggcggatggctcgaagtaaatgaggtaatcgtaaggataacttcaatggtagctttcttgttgcagctccgtattctccagcaagcatttttgagtagatcgaacgacagaaacggaaaaggcctatggtttgctgagaaaatgaccttgcttgtcacactaccattgtatctttatggtgcattcgttgttctgcttgccgatagggcgaactatagatgcgacaccgtgttgcttcccactcgtccagttgactactggcagcgttcgacttgggatgacctgaaatcatatgcaggtttaatctcagatggtttccttttgccccaatactgttnaatatattctcgagctct

SEQ ID NO: 4804 - DNA, 628 bp, Gossypium hirsutum
  misc_feature (624)..(624): n is a, c, g, or t
ttgattttcaactgctgtctatctgtaaattgatgaatgtaggtggaattcaattcaaactgttggaactttatcttgttgtctgaaactgttattgtaagagttttatgtagatgttagaattggagtttctggttccttaattttctcagaatcatagtttccattttccatttcgagtacaatcttgttcttttgtgagtgcagtctaaagaacaagttaatcttttcactcgtttacaggtaattccaggacaaacaatggggtcctagaaggtgactcaaataatctgtaccatcgacacgtatcaacggtacgttcctggaaattttctctgtgtttatggtcactacattgcttcaattgttgctgaaatctgtgctttatggtcttccggtttccaggaaatgaatatagacagaaccgtgaatgagaaacaaaaaatctctacggagtcttcacgagcctcgttttcgtcatcatgttcatcttccatgtcatcacttgattgtaacaagatagctcagcaagaggcctcatcctttgacagaatgctttttcccgaaactccgtctagggatgcaatgatgaacaaactgagtacgtctccacatttaggggtnacaa

SEQ ID NO: 4805 - DNA, 591 bp, Gossypium hirsutum
  misc_feature (581)..(581): n is a, c, g, or t
ttgcaatacgtgataagcaacaagaatggcaggtttcatttttcaatttctttaattatgctcggtcatcctaggtccaccttacaacaattcgttttttatgtttataatatatatgaattagttcatgcatatgtgtggcatctctcattctgtttggggcgtccatgcctaaatgtgttgtctgtgatcttttttattcttcctttgccccctttgtgtttttgcttttttatggatttgaaatatttaggtcctagtagaaaatagatagtatgtgctcggtgtatatttaaactagtaactgagagaatatatgtacatcctgtatttctcttttatgtattttatacgcatgcttgccccttttctgtcagtaatttaaatgttgctaatatctatcttctataggagtctcctgaaggccaaaagatgcttgaatttcgtagaagcttgcctgcatataaagagagagatgcattgctaaatgctatctcacagaatcaggtgaaattgatgtcactgcaattcatttcagtttcctactgttgcagtttatatatcacatttttaggtctatnctggtataga

SEQ ID NO: 4806 - DNA, 625 bp, Gossypium hirsutum
agtttgagttttaagcccctaaactatccctactacttacatcatcatcttactagacttgattatcggtcggctcatttgtccaaatttaaagatctgtttgaaaagtaagaagatttagataaaaatataaactcgaaaaatgggtttggacaaaaaataagactcttcttctaaacaggtcgaaccttgggtaatgatttttttggcctgggctcaaatctatctagaaattttttctgttcttattttgttactgtcttgctgtcattttgctattgtattactactattttgttgcttattttattgttaattttgctactattttagaggcatttgcttgttaaattttaactattttaactttatttaagtataaaattttttaaatgtatttttaatttgttggaaaatatttattttaatatttgtagtatatttaatgtattaattttttaaatttatttttatataaaaattttaattcgagcgaaccgggttaaatttgaatttaaattattattattgaatagatcttgagcaaaattttaaactcactttttcaagttaagctaaacccaaacctaaaatttaacatcaattttatccgatgaatgattag

SEQ ID NO: 4807 - DNA, 566 bp, Gossypium hirsutum
gtgaccaaagttgtcttacgtggatttgtagaagtacagaatactgagcctgacagcatgattataattttggatatctgtcaagaattaaatgtaagtttggattttctttgatgtttctttccttttgcattagattgtgattttgtattttattgattagaaaaaaaagttgcttcaggatttatttgcatgttatatctgttttctatttcagtaatttctcttgttgttattgttgcagattctatcatcagtgttggagatgatgccttttccttctgccatcagattagcagtccttgcttccaggaaggaggttatagattttgagaagtggttgagtagtaatctgaatatgtataaagatgttttctttgaggtaatatagagtcctccagtatcctattttactgaagttaatttggtcaaaagaatgttttagctaacatgcatggtccaattttcaggagtgcctaaagttcttgaaggagatacaatttggtggatcacaagagttttctgccaaacccttccatcatactactgctgttttaaatctttat

SEQ ID NO: 4808 - DNA, 624 bp, Gossypium hirsutum
atttaagagcttctatcaccatttctcttgcaaaccccaactcaataagcttggcaactttggcttcaaattcaggtttctgcagaaaaaataacgaaagattaggaactgaaccaaccaaattccttgggttatcgaatacagcttaaagaaaatattctgcaaagaagctagcaaggagctcaaagaattgtttagagaagacatacatgtgttgcatcgcctcgtgcacctcctggagcaaagaagaaaaaacatccagagaaattcataatcgtaatacaaatcctttacaaatgacttacgtaaggcctctttcaagaaacaagagctcaaccgatgttgctaggactcactcatttttcttatgtgttccatgcatgttcaaaaataagtcccagaatatcaccctccaaggacccctaaagacatgataaaacttggaaagaaatgacaaacccatgtagggtacatacgcattctcaacactcaaacctggtcaaaactaactaatgccagaaatcagaacatgtacttaaaaaaaagccatatgcttgcattaagatgaatttctggagtaaaagcaacatgaaacatgcatgacaacatcgtgagatgccaaaa

SEQ ID NO: 4809 - DNA, 620 bp, Gossypium hirsutum
atatatatatatacataaaagcatgcatttttagataaaaagagaatacctgagcttaagtcaacataatcatcgtgatgaaaagcattagcgggattaaaatcgtcgtcccccctgtttttcaactcaaaacacaaacaaaaaacggaagacaccgaaaagagttagggaaaaagtctttgttttctcttttacatgcataaacaaaagtgtaaccattgagacgtgtataccaaaacgatgccttaaggtgaagggcaagtaaatatacctaaaaaaaaaagaagagtggcaaaacatgtctggggtagtatgaggtgctgcagctttgaagctctgcattttcttttttctaagaacagaaaaaaagggggatgaaagaaagagacaggtaagtgggagaaagaaaaatgaaaaatggaaaatccttggggaaggatctttaatggagggtaggatagatagaggtgatttttttttggttttgttttatatgagtttccaaaaaaaaatcacctcaggcttttttattaatgcgttcagatttgggattttagtttcccaataaaaacctccccattgtttcctgtatcatcctctccttgaagagcgtctgtttc

SEQ ID NO: 4810 - DNA, 610 bp, Gossypium hirsutum
gataattacaattttttttgtcccatttttcttttaccagtgtgaatttccaaattattagatgttttggcattagaatgtggacagtgcctgaagctgaagataaggttgtatcactagaaaccgggattaaagatgaaaggttaaaactagttacagagggttgtgatccgattcaagtgagtgtttattcaaatacttgaaagttaagtcacctattgttaggtttggttagctcatatgatgtattctgtcaacagaaggatgtgaagcgcggatcgaagaatatacttggggaagtttcaaagactcctaatgctatacagtaagcttatatccgtgctttttcccttacatttttggttaatttagcggaagacttatgttttactaaatgtaaaatgcagaacactggataaaaccatatcgaatttggagatggagttagctgctgcaagggccatgcaggaatccataattaatggctctcccatttcggatgacctgaaaatccctgaatcgagtgggaaacggaaatatttaatggtcgtaggtattaatactgcttttagcagcagaaaacgaagagattcagttcgtgctacttgga

SEQ ID NO: 4811 - DNA, 495 bp, Gossypium hirsutum
acaagtacccaaattcaattcaaaaagcaaaatcaaagctgcaaaagaagagaaaaagaacctgttgtttatcaccaagaggagaagttgtgatataagaaacagtccaatcatagaacacataagggtcacctgcaaaagaactcaccacaaacaagaagaagaagaaagaaacctgtaaatctggtgacccagataccattagatctctctatttgcacccccgaaaaaagagctttttagggtatatcttatcttctttgctataaagacaaagaaaaaacaatgggtttttttttctaggaaacggtgagctgtagtaagggttaaccgagttattcagtgagttcgagggtgctgattttgagcacatgggaaagtggcactggcaaagaggccatctttaaggcgccaatttgttttatttttctggctttgggtcccattgttttttcttctttttccctttacaaactgacccaccatgaatttaac

SEQ ID NO: 4812 - DNA, 640 bp, Gossypium hirsutum
gatgaaccaagatctcatcacagctggtagacagcagccaaaaagccaatagtttgtcttcttgcttatgaaaaaagaatgcaggattaggaacaatattactatccttaccaacaactgactgtgaaggagtattaattgttccaagcgcaaaatcttgcaatccataaccttcaagaatcaacagaacttgttgtttccacaaaagaatattatgctcaccaagtttcacagtgtcatgcttgggaaaatgttgtatctttctgaaagaagcatcaccaggatcgggagaagaaccagctacttgagtagcagtattaaaagactgacaactttcatcattgttaccaaaaacaacctcagttgccatgagcgagaggaggaaaaaaaacgattatggctcagataccataaagagaaacaagaaattaaccataaagaggagaagattgattgtattccatcctttagctgaataaccaactaccatatttatacagactttaataaactaactagtaactaactgttaactacctcagtaactgctaactactaaccgttacttaacgaataactaccaacaaccacaactgtttctattccttaatactctatgcatggaggtgagggacaggat

SEQ ID NO: 4813 - DNA, 711 bp, Gossypium hirsutum
  misc_feature (612)..(612): n is a, c, g, or t
  misc_feature (644)..(644): n is a, c, g, or t
  misc_feature (646)..(648): n is a, c, g, or t
  misc_feature (660)..(672): n is a, c, g, or t
  misc_feature (674)..(674): n is a, c, g, or t
  misc_feature (676)..(676): n is a, c, g, or t
  misc_feature (678)..(699): n is a, c, g, or t
  misc_feature (701)..(707): n is a, c, g, or t
cgacttcctttttgacacctatcaaatttgaaaaaggataaggattatataccgaaaagaataaccgagcaggtcaaacacatgctacacccaccttcctattctgctcacttccagggaaaagataaatacagaacatatcactttggtcgtaatcatataaagactgcaaaagtatgcctccaaatatgttaccggaagaaacctattaaaagaagtagacaagacatgattatcaatatctcgatgataacaagttgagatattcctcatgaaaatatcaggagatggtcatagctgctgattcttacactatatgagaagcggaagtcagtattcgaccatttgaaaatttcagcttcatataagaaactgaacttcccttcatggggtcttatttcctgcgaagtgaggagaataggagggtaggcagatgacagtatctgaattgaatttctttagtcccaagttttttttatctcatcatcatttaggggatactaagtttttgttatttggcatgagttttcttcttcattctttatatgtttatatatcaggggtttgttccttttattacattgattgtggagtttatcctaggccttttcnacctcttttggtttctttatctttgctatccntnnnccccccgggaannnnnnnnnnnnntngncnnnnnnnnnnnnnnnnnnnnnncnnnnnnnttct

SEQ ID NO: 4814 - DNA, 615 bp, Gossypium hirsutum
attctgttgtaaaacatataataagttatcaagaaaaccagaatcatgtctagtatatgagcaggaaggcatcaaagaaatgtaccaagtcaactatggactgagattgggccggtgtgtcaactattggaggacttagcttccctgatgtggtcaatgagcctttcgctggagtcacttctggtttgctcagtttacctacttttacagtgctagggaatctacattgtattatcagatttcaggatgatttcattgcaatattcttaaagcaaactctgagcaacaaggattcgaatataaagatatatgtctgtgtatcaattcttcaacggagttgatataactcgactgatagcattaactcaatcaagagctttataattagcatacatacttcattctactgattgctacaagttatgataatacaaacagcaaaaagaaacactaaaccttattatgattgcctgactaccagagaagagatttttaaccttggattcattcacctggaaacaaatcaaagtagaaattatgtactcgctcttttttaaaagaaccaattcagccaagtgagcattgtgagaggtaggtattgagggataccttcag

SEQ ID NO: 4815 - DNA, 590 bp, Gossypium hirsutum
aaacttcttgtagttggaatttgtcaatggaagcagccatgattttgtagctgtattcctttcttccattgatgaaccttaagctcgacaatttgcttgacttgctgtttatttaagtcccattggtttgaagtgcaatagtgtaacgagttccattttcagccttactagtgtcttttgttttttctgcatgtaaactgactcgaattactgtctttgatgcaagtcgaagccgaagcttagttttgctggttcatacaatcacctttacgagatggcgtccaatatgaatcaatgaaatacttttcatatggatgactctaacttatgatgttggattgttaaaatatttattgtatataaagctgtgaaatgattgttaaaatattcattgtatatagagttatgaaatgatgtaaaatcatttaagttttacatcgatgtaagtgaattctttttcgttatattttttctatataaaaataaattgataaatttatttctctaaaggtatacaattgaattaaaattaaaatttcatatatatatatatgaatcacaatcaaagtttcgttgtgtataaataattg

SEQ ID NO: 4816 - DNA, 624 bp, Gossypium hirsutum
aaaggtaaaacaaatgcaatcactaattactctagataactatgattcctcatgacctccaggtttagacagaaggagaggtggtgatctcaggtttgggcctatgtgctcgattataggatatccttaccctatcactataaggtttttgagcaccctcagggccagtattttcataattgcatttttgtactcttcctcctcattccctgatccatgattctaatagatacatgtttatgccacatttttcgtcatcaaataccctaaatgtaaaacaaattcttggaaaattagaagtcctttggtgaaaatatattctaagcagttgttgagtggtgagacattaaaaacttcgtgcagtccaacaagagcatctcaagtatgactaaggtcaacagattgaatgcctaattctgcaatttaataccttgcagccaatggtatctagcaaagatctgtcagagaagggttattcgaaaagaccagcaacaaacttcactctcagtattctttcaactgcatcgtctatcctggtcatctgtatctcccctgattctaccagggatatcaagtcttcaataaattgcttataccgataaggcaacatcacctgcatatatg

SEQ ID NO: 4817 - DNA, 630 bp, Gossypium hirsutum
agggtttatctagaagccattcaatttcaaagaaaaagaaaagtagcatgggagtcttatggattttctctttcgcatcaagatgagttgaaaagtcttatattaaggactattattattatgattattttgtaatttaggtttttctaataatctatattattattgagttagtgtcacaagttaacaaagcaccgactcgattagagaaattataaaaatattcttttgtaagtaaaataagttattttattctatgatactttaatttttttatttgttaaaaaaaagccaatgaaaaacttgcaagtggtgaaatctaaacccacactaattatattgacaaaacattagctttaccacttaaccaaaaccttatcctagtataatgtttacattttaattatattatccatacttttttatctctattaatgtcactataagtgccacattggcacaaattaagagtgttagtgcgggtgacggaatacaagtttaagtaccgataattagatagttttaaaattacattttaacagttaaaagaaaaggaaaaacaaaaaatattccataattcaatccatgcgaaagaaagaacctggaaaattttgaagtttgacatttgaa

SEQ ID NO: 4818 - DNA, 610 bp, Gossypium hirsutum
tcagtgatggtgtaaattaaattaaaattcaatccgcaaaatcataaaattaatagagatagactcgtactacaaagctgatgaaaatatcaaccttctataatgttgtgaattgaacgcatttttctctcaactttctttaaatggtcagagttagtttttgttgaggttaaaaataataattgtggtgaaattagttattataatggtttgattggatattttagtaacgagattaaaattactggtacgatgtgtgtttaaattcaaacataactttaagggtaagaaaataaaatgattattaaaggtattatattaaaaataatatataatagaagttttaaattattttatttttatgaaattattaaaaatatgtgaaattataattttatttaataacatgtatcacatgcaaacatattaaattattgttttataatcaatttaaattatttaggcttaaaaattaaaatgcaatttggtacttaaacttgccgtttttcctaatttggtacttgtggtttttttgactaatgtgatacctaattttggtaaaggttacatatattagtccaataacttaacaccatttgttctttttttt

SEQ ID NO: 4819 - DNA, 618 bp, Gossypium hirsutum
  misc_feature (511)..(511): n is a, c, g, or t
  misc_feature (515)..(515): n is a, c, g, or t
atcacagggcgctcatttttcctctcggaagcactaaaatcgaaacggataatcgcaattaatcaacgaaatcaacaaatttcaaaaaccatggctataatactgaaggggaataaagctcaaattaccagtaagtcagaccatcccccttgagagagaacagagttagctagatcctttggagacttgatctgataatttacagattccttcgattcaacgctagagaaactgcaaatcacaaaccaaagatattcgaaataaatgagatcccaatttacaagaaccctaaactagaaattttcaattcttttacaaattgattcaatgaaatcaaaactacgaagaaaaaaaaaaattttccccgggaccccataaaaaagggggcgggggggatgctagtgaaatcagagccgctgcgaagaaccccaccatcatcgccaccacaaatatcgtgaaccccatcgagattattcatagtgtgtttttgcaaatcactctttttttctgntgtnctctccaaaattgtggatccaagaacactccactcaaaattcactattttttttttttttttcctttataaactaaattgtttgatccgatccattcatgtgt

SEQ ID NO: 4820 - DNA, 408 bp, Gossypium hirsutum
  misc_feature (347)..(355): n is a, c, g, or t
  misc_feature (358)..(360): n is a, c, g, or t
  misc_feature (362)..(367): n is a, c, g, or t
  misc_feature (374)..(377): n is a, c, g, or t
  misc_feature (379)..(379): n is a, c, g, or t
  misc_feature (386)..(386): n is a, c, g, or t
  misc_feature (388)..(397): n is a, c, g, or t
  misc_feature (399)..(404): n is a, c, g, or t
ttccatatcagatgttgataataacttaaataaccaagcaactgcggataaggctccattagccaagggtaatgcttcatatgttgctggaacccatgcccttgttgctagaaaccgtccaagttttggtcggttgcttgacttcgtaagttaattctgtctgaaagcaccaatctcccccccttcctcgcttcattattattttctatgttttattaagcatcgattatgcctataaaatattcttttctccttgaatgttccttggtagttgaaaaccaattatatgaacttgtaaagtagttatgaggtggttggagatggatatttgtgaatttggtggaaannnnnnnnngtnnnannnnnnaatgacnnnngngtgtacntnnnnnnnnnnannnnnnatgc

SEQ ID NO: 4821 - DNA, 611 bp, Gossypium hirsutum
  misc_feature (581)..(584): n is a, c, g, or t
cgtattcatgtcgatcgttttgtttgctcaaattaccggaaatagaagatcgggatcaattttctggtaagtttgtttttaatgtactttttctttattgcttcttaaggtttaccgttttcttttttatccctattttgtgaagatttattgagtgaaatcgtttttattaatttacattttgtccattgttcacatctggtaaattgattaactaataggcaaggctatagttcattagcagctgaaattaatttgttagcttaaagtttgcatttagtcagtcctcgtaatatagttaaaagtgtaaatttagtatgaaatactatccaaaggttgagattgacatttgaaatttgactgtgcagacttatagatcgagctaaaggtgcaaaataattgcttccattgagaacaaactctttgttagatttcaactcatagacaaatttcatacgtcaatgtccacatttagacggtttttaattaaaagtgttcatttttacttgtttgtaccaatatcatacatgcaagaataaattactcagttcaatgatgtatggactgaattgcttctcacnnnngtgatgtagggactgaattgcttctca

SEQ ID NO: 4822 - DNA, 627 bp, Gossypium hirsutum
atatcttttgcagcaaaaaccttacaagagaatgatctagcttctacccgaatatttatacacccggccttgacttaattctttgtatcttggtaattttatagggaggaggaacacttgaaacttgccgcagacctcaagaagcagcccgaggtggcatctcggagatcctatattgagcagataaaagagattacaaaaaacagtagcaaactcgattctgacatagaacgaatcttaagagatactaggacactccaattagaaagcaattccattcaggagagccttcatcgcacctatgctgtcatagatgaaattgtcttcaggtatgagctgactgctactgcaactctcataataccctccttttccagcattgtagccttaatttaggcaacatgttaaatgaaagtgaaactagataatgcctttttccttagaaagaactgtgtatatgcagggaagcaaagaaaaacacagaccggggacaagcttatagactgctcacaagcatccatgatagctttgagcaaatctctgagaaaattctcacgaccgacagaattcgaagagaaatagctgatcttgaaaagaaactagccgccgtgtcttcccgaagcttaa

SEQ ID NO: 4823 - DNA, 660 bp, Gossypium hirsutum
tggaattggagagagaccccgggaaatggtaagtttcgtaaattagaatttttatggaaccggtttgcccaaagtatatgatggttttgcatgtagcataacattcaggtgtttagttggtccatcatgggggcatttttcttcatatttgctcaaatgaatgtgattgtggcaaacactcgatttggagtgttatctcccaaatattgtccaagatgaaaaatttaaatccaataaaaattcgtatatcgacttctcattttctttcactccttttttggtaggtggggactgccagtcatatggaggaagggttataactgtcaagtacggggactacaccagaaggatcggtatagatggaactgctgatgccattagagaggcaattaaatctgcatttggattgagaacaaagcgatcattttggttggaggatgaagacaatatagtacgcagttttgacagggaaatgcctttagggaattatacactccaccttgatgaaggtaacattttcagggatgccttcagacaacttagttcgggtcatttagagattggcattttgagtttgggtcgttctctgttagggttttccactttttatggtcaaatcaagttgggccaggttgggttcgggtcagaattgatgtctaa

SEQ ID NO: 4824 - DNA, 494 bp, Gossypium hirsutum
  misc_feature (32)..(34): n is a, c, g, or t
gagtagaagcctttgcatgaaagacaagcatnnnctgtattaatattattaggtgaaagtacacaggtagtccctctattaaaaatgaaacaattaaatccttgtaattttaaaattttcattttttttaaaattttactaagtaaaatcaattatattttatttatttacgaaattaattaataataataattaatcaattacttaaacacacggtagtttctttaactctattagtggaattaaaaaacttcaccatcattatactgaataataccttttaattagtacttattgaagtgagtgagtcaactcaagcttaagttcaagaaaggagagcttggcctatgtgtagagatggtagttattgctgttgaaaactgtataaatacagaacctcttgtactgcagaagtcagtcttgaaatatacaattttctcaatatctcaataagatttcttcatttgctttcgttagttctttttttttttttt

SEQ ID NO: 4825 - DNA, 484 bp, Gossypium hirsutum
acatttggataaatatatatataaagttttattttcatccaattaagtctttgaatttagttttaagatttaatttagtatttgaatttgatttattgatttaaaattgatacttgaactagattttttagtccaatttaatatttaggtaacttatttaaattataaagttaagttcaagtactaatttaaattaaaaaaattaagtttaaatattaaattagacaaaaaaatcttaaatattaatttagaccttgaagacaaattcaggtacaaaaatatatatttacccaaactattattcaggtacaaaaacttttattttagtcgccgaattattcaaaaatttttatttaagtaactgagttgctttcttttttataaaaaaatagtccgagaattccaatacgacgatttaacgattaatacaataaatcaatatttatcgataagtaaattgatcatgaggaggagaagatcctga

SEQ ID NO: 4826 - DNA, 585 bp, Gossypium hirsutum
  misc_feature (30)..(32): n is a, c, g, or t
ttgtttgtgtatcaatgggagtacgatacnnnctgataaaaataattacacccccaaataataaaaatcaaatcttaattaattattacagaaagaagaaaaaagagacagagaaccttgaatagacttgaaaagttttatcattgccaagtgccatcctggaatatcagtatccaattgcaaaatacaagtctacggcaaaactgtgagcccttgttaattaaaatgtttaacaggaaaaaaaaaattcaatgaagaagtaaatgatgattaccatgccgattggttgttcagccattgatagaatagaagacggaaaaaggcagataagtttttatgtcaaatgagtttgctaaaatttaattgtttggaggggtaagaatttttgtttttgtttgtttcttttaccttttatttgatgatattaataaaaatggatggagaacttagaaatgaaggaggatttggaaagttttttacaacttgattttcggggttttcctatattacatattttgatcagaatctgcctttgattgcatatgtttaattgaaagttcaattagttctcttggatgtctcttc

SEQ ID NO: 4827 - DNA, 596 bp, Gossypium hirsutum
  misc_feature (584)..(584): n is a, c, g, or t
gctgcgttagtcatagagagaagttgctccaacagcgggttgcgcaccaggagagagtgactgggctcacaggtgcctgcaccaattaagttaaaaacagcttcaggaatccctatactttagcagtaccttaatgcaacaatgctgattatcctaccgagtaatgactccagcccggaataggaaccactccaggggaaaagagtacaggaccataagccccttgaacatatgaacctggtaatagtggaggcctagccactctcacactggtggatgctcccccatactgttcaggcataggaactgaaggagactgcaccggctgataaaattgaggtgcagatactggcattgatgtaccagcaggttgaggatgatggaatttacaagtaacgccaaatttgcactgccccattttcaaatagtaggagcattcttcctcaccctgttatatacgcatatcaaaccagctctggatgttttacgaatactcaaaaaagattaatataaattgagaaagaaaagaaaacaagaagagatcatccaaaccggtcgtaatgggtatccatatatattcagtngaacatggctaa

SEQ ID NO: 4828 - DNA, 639 bp, Gossypium hirsutum
  misc_feature (532)..(532): n is a, c, g, or t
  misc_feature (548)..(548): n is a, c, g, or t
  misc_feature (587)..(587): n is a, c, g, or t
gatacgtcgacttggtgtctccatttccatacaaagtggttcattccctaaaattggtggataataataattggactttttatatcttgtggttttgtccttgatttatatcatttttcactttaatacattaattttttgtcattcaacggtattaatatgaaagagaaaaaagtatagttgagagaaaaatagtgacttaagccttttacttatattttaaacaatatattattaatataatttttgaaattaatataaatttttacaaaaagtttttcttagtacaatgaaatatatatatttaattatcagcacaaatctgacattaagttttgaaggtgtaattaaaatttttaaaatttttaagagattctattaagtctaattaaagctttagaaaaattttgaaacttaattagaatttaatttttttagtgtaattaaaatttttaaagttttaatgaaaaattttcaaagtaaattctcaaaaacttttaaaaatttgctagccttggcttcataacaaaantatgaaattgcgaganaaccaacttaaagcttacatttttgtttgatgatttggntcacgttgagtgcatgaatcactcatggaaacagacttttgctcaggctgtt

SEQ ID NO: 4829 - DNA, 630 bp, Gossypium hirsutum
ttttttgggaagagggttgtcaatctggcatggggagggatatgagggtacatgaatcatcctatatttcttttaaatacaaaaggaactcataaagaaggttacacaataagatgtaaatctttcaactgataaccttcattcctcatcctaagcttaaacttgtaagctccatgctgaaagtctctagatctaatcactggatttccagttttgggccataaaacatacagattaatctttgcttctataaatttccattattcacttttatttggaccatgtgaagacatctttacattaataaccacctctgcaagaatcaagctagaaatatatgacctgaaagtgatatatttaaggattaaaatttatgcgaaatcccggatgctaccaaatctgcaattaggtgaagatgaaagaaacatcctaggatcttgcatttgcactatgctaatgacatacagaaattagcaaagaacaaagaacaagcaacaaattactatgaagaaataacatatcaaatgaaaatgcatgtttgttcttagctgattagtctttccaaagcatctctgaacacctttttcctttcaaaaaaaggaaaacaatttatccttatgcagagaatct

SEQ ID NO: 4830 - DNA, 653 bp, Gossypium hirsutum
atttctggttagagagtcagaagtagaacttaattcctacagtttaatgatatctaacattcaatctatccaatagtgagtctacatttctatttgggatgtctgataaatattatccgcaatcaaaagttatagtagtgtgatttcggaaaaaaacaaacagacagttgcagtagtgtgacattgtgaacaacatttagttttaagtacttctgatcaacaaaggaaaaagaaattggaatcttaaatcagataatgattagttcttttgagtgcagtcaattatgaggaatgtgttaaaatacacatctgattccgttttttttctgcatccaattaatttaactctgacatcattgttttaacacattccaaattatgtcatggtcaatttttctttctttgcatgcctgcatactggtctttaaaccttgaattttcaagttctaaccatcagatgttcccgggtggaaagtttctgccaattgctccttgatgcaataccttgtaggttcaaaaattttcaacaactcaagagttgtgttcttaatttttgttttttttcttttgacaggaaaacagtgaatgggttgattggcacactaatgtcttattaaagcgtaatgctacagaaaatatctatcagtgggctg

SEQ ID NO: 4831 - DNA, 607 bp, Gossypium hirsutum
cgcttcgcataagatttaactaaaatcccagtaggaaactttgtctggtgaaagaccaatgtatttcttgggaatttcatcgaacagctggggaactctgtcaaattgcctagactgattgcaagcggagagcaaggcgttgaaagaaatggttgatctgggggtaccaaattggtccatttgatggaaagttttgatggcatgatctaacatgccagcgataccataggatctgatgagagtagagaggaaaggctcctgagaaatcttggggtcggttttgtgggactctattaaggattcgatgtcggagaaacgacgggacttggcgaggcggcggacggtgaggtcttgagcgtaacgggaagaagaaggggaagagtagtgtttggaaacggaagagtagatttcgagggctttgtcagggtcgtactcagtgcggagtttgcttttggcttgggaaaccgaaatggaggaggagtaagcggaggaggcggcggcggcattggaggtggccgaaaagtgacggaagtggcgaagacgaatggaaaaacacatgtttttttgggaggagacttgttagggtttgggtttagggttttatagt

SEQ ID NO: 4832 - DNA, 584 bp, Gossypium hirsutum
  misc_feature (22)..(22): n is a, c, g, or t
  misc_feature (25)..(25): n is a, c, g, or t
aactgtccttcattcgcagtanttnggatagcaagaaacgctatcgtctttaataagccgtatgatgaagactccgttattcttaaggttctctctctcgcgggcgagttctcggcttttccgttgcaccttaaagccaaaggacctcctagaattattcatgtcaagtggttttgtcttccattggaatgattcaagctttattgtcatagatcttcccttggaaatcctgggattgctttgagactagaatgggcattggccagctggttgtcataggtctgtgggtactatgttttggttactcatttttaaaaaattacaaaatagttattaaatattcaaaattttttattttatttaaattattgggctgttaaaaaattttcatttaagttactgagctattaaaatcacatcttttctactcgctacatctgcaccaattgaatgtttcccttttttttttatgaaataactttaaacgtcatgaatctactaattaaaatccaaacaactttcttcttcaatttcaaacactgaacatctaataggcttaaatccaaggaatgttattctattca

SEQ ID NO: 4833 - DNA, 647 bp, Gossypium hirsutum
aagtttgatgacattcgagcaaagttgaagcatgatttataaaacttccttgatttgatgacccagaggacaatcagatgaagcatctaacactagggtcaacaaagagtgacactaggaagacaagcctttactccaattcaaccaaggtatttggatcaagggaatcaccgtttcttcaagtgaaataccccaacttcaatggtgaagattttaaagggtggttgctcaagctttgagcaatacattgtggctgcacgagtagctaacaaccatacggtcaaggtggtaatgctaaactcggaaaggacgtgcccttcaatggcaccagtactaggcccaaaatacgagggggtctgggtaatccagtatgagctactgggaagcaatgaaggctcgttcgctacaggagaatatggtgatcctatggaagagttggtcaaccaaaaccaatctggtaccattgatcactaccatgagaaatttgtaggtatactcaatttactccagcttgatgacacttgcgcgtcaattatttgtgttagcaacatgaaacttaagatatctcaaatctttaaggctatttatatccaagtccatgaatgaggccatgcacttagctaaacatatcaaggctataaacccta

SEQ ID NO: 4834 - DNA, 616 bp, Gossypium hirsutum
tgatgcaaatatggccatgagaatttaggctcttattggttgtcacttttactccttcgtttctctagttgatttttgcttcctaaaaggttgctaaaaaataaatctaaaagagagaagcaaagtcgtaattgattgagaatatataaatgactagaatactataaaatttctagtatgattgttcacgaccagcttgttgtgaaagcatttgtttgctatatccccgttcatttttattctatagttaaattaagttgctaattttattttcttatctacctgtgtatctgaatgatgttttatgaatacagccatgcttccaataatgtgttagatgggctgaacatgtttgatggaactgatggtcattacttccacacggggtcaaggggtcaccactcggtgtgggattctcgtctttttaattatggaagctgagaagtatgtacttctacctaaacatttcttaatgaatagcttgtttaaagattttggcttcctcccttccagttgtaaatattatttcttaattgttgctttaggtactgaggtatcttctttcaaatgcaagatggtggctggaggagtataagtttgatgggtacaaattgga

SEQ ID NO: 4835 - DNA, 600 bp, Gossypium hirsutum
atgacaaatagtttataatgaaataacatcatacaacttggaggtacttagtgtaatttatctacctgagcagtggtgtcagagcttataggagcgtcggcagggccgtcgaactccttaggtttgctcgcacagcctcccatggtaggtttggagtttggggattaaagggtgcgcgagtttctggaggtcgtcggattgtagttggttgaggatgcttttagatgcggaggtggaatcgaaggtgaggcaaggaaggaatggaagccaatccattaatatagtaaaacgagcttcgaatatttaggaaatattgtagccccgtctatttttgactttgtcagttggtgtatagacggtgccgcttacttttctcgtccgcatttcatgcctgagacatcacaactttgtgctcaaaatgctattcgattcaactgaaaaaccttagaatttcacaagagcatccggaggaaagttgtggcaattatatacctatgcctcaggaattgagacattttacataattgatattcactaaattctcgtattctcatatgatttaaaatgaaataaaatcaataactttctctattttgatca

SEQ ID NO: 4836 - DNA, 587 bp, Gossypium hirsutum
tccaaagtcaccaacaataatagtccaaatgggttggcatctaaacctaagaaacagcaatacaatcatgtagcaaagcctaagaacacagatttcaagtaagctgcctttaccactcatcaatgttcacatatacacattcatttttcattctttacttcttgagtccttcacgttttccattttttctttgtatgcaaccaggagtgcaattccatcactaattccttcaccatcaacccggaagccgtctaatggagccaatccaaatacaaacaagccaaagaggaaaactggatattcaaagtgattaaactacagtgttaagagaactggcttcctcatttcatttctttttctttcttcgtgaaatttgtatcccttttcttgcccttcttacttgtactatcacttagttgcactgaaaaggagatactgacaaatataaaaagtggcaacaattttgggttgccttgtgtttagtgcaggtaatcataatccctatgatgatcatctaccttcttgatgtgatttggaaattctttggttttttttttcttttatttttctccctttccccccccatt

SEQ ID NO: 4837 - DNA, 538 bp, Gossypium hirsutum
  misc_feature (441)..(443): n is a, c, g, or t
  misc_feature (445)..(445): n is a, c, g, or t
  misc_feature (465)..(468): n is a, c, g, or t
  misc_feature (482)..(486): n is a, c, g, or t
  misc_feature (491)..(501): n is a, c, g, or t
  misc_feature (504)..(504): n is a, c, g, or t
  misc_feature (507)..(509): n is a, c, g, or t
  misc_feature (512)..(519): n is a, c, g, or t
  misc_feature (522)..(535): n is a, c, g, or t
gttgcttagttctatttcttctatgtgatctttaatttaatttaaaattgtgcaggcggctgattcatatattttggatgagagagtgggttttgctgaacctggcgctggtgttgaaatttatttttgccctccatacacgaaaacacttgaaatggtgaccaggatcctaccaaaggatcaacctcagcttcttaatgctattgataatggtctaattggtgttgttgtatggagaagagctcaattaatttcacccaactcaacttcacaccataaacataacaccaaaaagcaacagcacttcacttctagttctaggaaacctcacgataaggatgatgctatttctaatgtgaattctaatttcctatcaaaaacccatgtcggacctcctctccattctgtacctcctgatgatgatgatgatgatgatgaagnnncngcattagttcctgctgcatnnnngcatgatgatgatnnnnntgatnnnnnnnnnnntgntgnnncgnnnnnnnnatnnnnnnnnnnnnnngct

SEQ ID NO: 4838 - DNA, 617 bp, Gossypium hirsutum
cgcaatcccaagtttgtctatgaagagcagatctaattgtattagtgtctataattgattcttctgtgtaatactaatcgatagggcctcattggtaagtgctacaagatctcatgcattggaacccacggttatggacccgaatccattaatatggaacattttcttttccaagtgaaatcccctagtatatgaaaaagtgttttcgttgttgtggaataagaagccttcgaatcttaatacatgtatttaatttattcagggctattagagtgggatccactttttgggctcctaggataggtgaactaattaacttgaaatttgtttgaaggagaaagataaagggataataaaaataatttaatcaaaaaaaattaaataatattttaataatatatatttttcttcttaacaaaaaattattttaataaaattattttatgaaaattaaaatcaagaaacatggcatgatttaattggctagagatcttttttaacaactgtgaagttttggactaaaaattataaccaagaaatactttaagtatcaaaatgggccaaaataggtttaagtaccaaaataggaaagcgggtatatttcaggatatttcagg

SEQ ID NO: 4839 - DNA, 612 bp, Gossypium hirsutum
gtactctccaaaaccttggtcaatggtctccggcgatttttcctttttaggaattcatgaacatttgccacttgagatctctttctttttagtgatgatgaatggtttctgctaccatttatgggacctccattagacaggcagttgttagtgtttggtccacagaatgaagcattctcttgttgaactgactcgagcacccctgtggcctgagcttttctttttgatcctacacccatgcctagatcctcaagtcctttcattcgtttgattccttctgctccatcatcctctgaatcatttggagtttttcttctctttaccagcatagagcgccccttagtaccattaataagatttgtctcttcaaaggatatgccagactgtgataattctggagctgaattagagccatcctcagatccactcatttcatcatcattttctttcccagaacgtgacatgttaggtgactctttggctgaacaaccttgatcaccaccagatctatcttttctagagaaataatcaggatgatccttgcctaaacgggcgctctcaatctcaagagcatggagaattgcatcttctcttcgagcatatttcactgca

SEQ ID NO: 4840 - DNA, 627 bp, Gossypium hirsutum
tagtattgctttagaaagagtattcttttgaagtttgattaaagattgcatgtgcttagaattgctgtaaaaaaataatgcgaaaaataaaaatttaatttaaaaatatccaaactcgttaattttatgatatatgaaatattaatttttaatctcaatttcgaaacggaacaaatcgacccctaaaaaaaacagaccaatttaatccctgtcaaattttaaaatgagcaactaaggacaattaatcacgacattaatgtcttaattctaaaaaaaaaccaacaaatttaacctcaatatttacacatttacatgcaggctaaacttgttaaatcaaaataaaattgtcagaatgtgtaaactttaagtactaaatttgttattataccaatcaaaatgatatctttatctcctcatgtatttattattagcatgatgtcatgttattattattttagtattaacaaatattcggcttagattataatacaaatataacgagaattattgttaaaattatgatatatgaaatataaattttaaatacgtcttaagcaattataaattattagtaaaatctaatttaaatatacaaatgaaggtcacatttataatttgacacccgaa

SEQ ID NO: 4841 - DNA, 614 bp, Gossypium hirsutum
attcatttgggttagagcatgtattcagatccaattgctatttactaactggttgtcgcataatgtgtgaattatagcaatttggctgttcaacacactgtgaaataaaataaagggcatttgtagttaaactacttgcacatttgaatgttcttttgcataccaaattgattcttcttcaaacctatgccacaaggacgtgtgcttcatgactaaggttttaacccagttactgattcactctcctttaatccactaaccagataaaaaggagatttcttacttacaagctatgtcataggccccactctatttcttgtttatatgtgtgtatttgtttagtttctgatattatctgagatggctggtaatctctattatacattttgttcctcttagattttggtgcattgcaaataacttggaatcacttttacagttgaaataataagagcatggtggcataactatagattctcattcattacttggtgcttggtgaaaggaagcttggttttctaaaagattgaactatatgtattggctaaactattatgaatgcggttataaagatacttgagtttttgatgggtgaaattacagaggataattgt

SEQ ID NO: 4842 - DNA, 598 bp, Gossypium hirsutum
tgactacaaaatttcatttgattagttgtctatgtacttgtataccgatgtttgcgttctttgacttttgaggtgtccattctgcaaaaccccaaactatgctgtggagtatagaggtgtgaaaacaaaagaagaaaaaggcatggagcaaattgtaagaccaccttctctctcccaaacaaacaaagaaaggtgtaaaatcctcctatggttttcattagatagaaaatggatttattattttttgtttgaattgagcaggaagaacaacgtgtattagaagcacaacttagaatgaggcagcaggaacttcaggatgaagaagaaagaatgcagaaaagacgagaatcgagtacttcaactggtgttgcaccaggagaagttcaaaacagttcggttgcaggtatcgttatattgtggttctgttttccacttatattgattcttcattccttctagcattgtactatcttggattttttttccctttatttttcttcttatttgcagctcgttcatctggtgcggaggaagtagtttcttttcaagattcacaacctgccttgatgattaaacaaccttcaaatcctaggtcaaa

SEQ ID NO: 4843 - DNA, 551 bp, Gossypium hirsutum
  misc_feature (453)..(453): n is a, c, g, or t
gagggcttaaaaaaatgtaatgaaaaattaaactgagatgtctcgaaattaaaatataaggacaaaatattaaatttcagaagagtatagggacttcggacagaattgaacttttttttttatttcttctcttctataacccaaaatcctgaaaaaagaaagaaaagttcaaatcgtcacttcatgtagcgatttggtgtaggaatttaaagaagtgttaaaaggttatattagtttggtatttcattgtatgttagtgaaagaaacctaattttcagggctcactttgttattttcatgattaacattaattaataggtccacagaattcaggggattctccaaagcccttaccttacctctccttctatcaatttttttttggccggctccctccccatcaattagccctcctcccccctttgaaatttttcaaaatctttcttctaaaancaaaaggtttaaaaaacaaaaaaaggggaaattttaaacaaaaaaaattaaccctaaaccccttttccccaagggcccttaaccttggtttttatttt

SEQ ID NO: 4844 - DNA, 633 bp, Gossypium hirsutum
  misc_feature (627)..(627): n is a, c, g, or t
tatggtttggtttgtaagtaagagcatcatagataagcaggaaaaaggcagtttatgctttgttgatcaaatgattcttctaataaaaattttagatgcctttttttttccgttcatgtagagtttaattgtactgacattcattctctcattaattacctcatactattcccagaaaaaaaattgctgtcctagtagttgtacagtgttctcctggtgcattgttcgtttcttcatttatgtatgatagtctgtcttctcccttgttaaattgtattgttattcaaccacatgaaactttaacaactagacctaggtgtggcattagactcggttattgtgttgtaaatcactaaatctttgtgcagattcctgtgagcaaggttcgaactttcagagacttgagaaatgttctgatgaaaaggatatttctgtctgccttgcattttcgtattaatacaagatacaaggtgtggtgattcttcaactccgtttcacccctccagctttattacctagaaaacttgcctttttatgtaaatgccttggtgtatgattaattctgaaattaccctttatcatgcttccttcatgttgcacaaataaagctttattgagtcccaattngcatgc

SEQ ID NO: 4845 - DNA, 612 bp, Gossypium hirsutum
ttgttcttgttgccaccagcgtaaatggcatgcttcaattcttcagttgcacgtcatagcatagccaattttgtttcttgacactgattttgtcttcctcaactactaacgtgtccgaccatggcttaataggaaaccctaatataaacactcgaatctaattaggctttgcttaccaaaattgatgtggttcgagggagaaaacaacaacatttaaggctgaacaaactgtaggaaatcaatctaggcatgtaattagttgtatcacgctgtgtagttgattcttaggagattagttacctaaaatattgatattctatattagttaagattttgtattatagatcctaattataggagcctatcgaggccatatgtatatttgtatatattggcattcaacttcacgtaaataataataagcatttttcacaattctcacaaaacttcacaaacgaataggaaagatggaactctagaaaacttagggttatagaaaatctctagtttttctattaattcaaataaaataataagaataatgataatggttgtacaactacaacctacaacttatctatataagttttctttcttgcaagtaaagttact

SEQ ID NO: 4846 - DNA, 620 bp, Gossypium hirsutum
tctctaatattctttaatcatctttttactctttttagagttccttttttccttttgtttgattgttaattaacaatatgacctatgagtatattacttcttatagggttgtacgacctatgagtttcatgattccagatgagtccttataaggtcatacacccaacactaatatcaaaaacattcttggcaatgttgctaatccttgtgtttgcaaattatgcaggctaaggtcattggtaaaacaagctatgccggtagcttcaaaggctatgatgaatatcttcccatggttgacaaagctgttgactcgagttggatgaaacaaacttcccttcagaggttgtctgcttccaaaggttaacaaatataatctagtatacttcgtcatcttttagatgcttcatttcttcttaaaagcttccttaaaccttttattaagaaaataaaatgctgttttgcactacagatacgttaaaattgcctgaaactcccaagaccccagaaggaattgtatctcggattttgttgactatttggtctttcttcatgacgctttacactatcctccacacggcagcatgccgtataactaaaaagcttcctgacagagttttctg

SEQ ID NO: 4847 - DNA, 637 bp, Gossypium hirsutum
gatttaggcatgcatgtccactgatacaaagtggatgctaattacctattatacatattgatagtctcattaaatttctagtatctgtaattaaggttgaattttatttttataactatgattcattgaatcaaccgtttattaaccatgtttatgatttgccactccattatcagatttcgatttctcatcaaacaatcaatatattgcatcatcatcaaaggacaaaactgtgcgagtatgggagctatcaaagggcctttgcattagaatcatatatgaagtctctccacaactgtgtattcgatttcatcctgtaagtaaccggtggttatgatacatacccttcaagtcaggcaatctttttaagattatttattcttttgtttattatctgcaggtaaataacaactttctttcagttggaaatgcaaataaagagatcactgtaagcacacctccatgcctttaatcatctctagtcaatcttaatggtcatagtccagttgatgtgatatgctaaatcggattctggataatcgaacgaaatgcgtgctttctttgtcttgtaagaaaaattctgtctgtataaatatccggtcggctagttccatatgtttaatccttcaccgactcc

SEQ ID NO: 4848 - DNA, 577 bp, Gossypium hirsutum
  misc_feature (517)..(517): n is a, c, g, or t
  misc_feature (519)..(519): n is a, c, g, or t
tgttcgaaggattatgctccactatctatcttttgttcttttatttcttttatatgttcacttttgagtattgcatttgtgacattatttgtttccatagtcaccactttatcttcataaagctatatgttagattggccccagctatttttctaattataatgtgtttcgagtttggattatcatcaaatttgaatgtgggcactccttgttcaaggttgttgattttcgtgttttccccagtggtccttttttatttttgcaattttcctcgctattttgatgcttgaactgttttctatctcctttttgtcttttctttctcttgcatcagtgaaagtggggagatgtgtgcaatgaaggaagtaaccttgttttctgatgatgccaaatcaaaggaaagtgcacagcagttgggacaagtatgtcctgtttttttagttttatttttttattagaaagaaagttgctggcaattgtggctataagaactgaaatatttttccctggtgttcantnaggacttgatttcttgttttggtgttaataattttagtgatctttatactcatgggta

SEQ ID NO: 4849 - DNA, 670 bp, Gossypium hirsutum
acaaccaaagaaaataagacgaaacaaaagccagggaattattaggagatctgtgtgttgtacccggtgcaaaggagttgggcataacaaggtttcatgcaaggtaagcttatagggaaaatgtttacctccccttgtatgtatgtataacgctgtacagctttcatggttactttagataatatccagctcctttgaactcatttgtaggccatgaatagttgtattgttcttcaaagttgcattttatgtattaggctaaattacttggactttgttgcaaacttaatcttatcatcctgttatgttatggtggcaaataggtaggttgaattccatttggattgatttcttgttcttcaagtttagtacttgcattatttgcttttcaaatcaattttaagtttgaattagtctcttagagtgcgtgcgttagaaaataatgtatttttttttaattttcaattatatttaaaaaataaaattactttttcttttatttattttttttcctattaagagctagttttttattgttgtggttaaaaagtgtagtagaaaagtaccggaaggaagtggttaaaggttaatggtttttttcggatacaatagtaaaaagttaaaaattaattaagttttaacttcagaaaaatatttttgtaccttgaaa

SEQ ID NO: 4850 - DNA, 599 bp, Gossypium hirsutum
tatctatattcacacccttaaattgaattatcccaaacattcagtttacatttgctacgactcctaacttgcttcgcattcgaacaaaatcttctagcttgagttgcttggtcatgacatcagctacttgttcttgagaattacagtgttgcagcacaattgtttcattccttgtaagatctcttagaaaatgaaaccgtacatcgatgtgtttacttctcccatgcataattggattctttgataactttatggcaaaactattgccacaatatattaccgtaggacttgtttgatttcttcccactgcctcaagtatccgtctgagccacacaggttgacatgagtttgctactgctgttataaattccgcttcagttgttgataaactcaccactggttgcttcttcaaactccatgagatagtagcctcacccaacatgaatacatagcctgatgtagtttttctgtctcgacgtcattagcataatcactatctgtgtaacctattagatcattccctccatttttctgatagaacaatctaaattcacaagttcctttggatagtgtatgattcgctttactgctgcaaaata

SEQ ID NO: 4851 - DNA, 641 bp, Gossypium hirsutum
ttgcagtcgatggaaaaatcgtgcttggattgtctgatatagaccattaaacccctcgaagcttaactgcttcttcccaatcatgtctatcgtttcgagaaccttcttttccatccttcacctccataacgatggcaggttcctgttgcaatcatgtttattttcaacatgttattgtccatgtaaaaaaaataagacaactggtaattgattcaactgtatgccactacaattcaaattcattggttcaacgacactttaatccaaaacaacaattatcattggaaatggaactaatataggtagcttcaaggacgagttttttaagccattccaagtttcttttcatcaaacaatgttacaatattggagaagatatcaaagaaaacataatttagatccagtaattaattatataaatataaatgattaaatttgtcaaaattataaacatgaatgcattatgtgtattgaacatctcatgcttaaacataatatacattacttatattattttcgtgcttattaaatatgtagtattagtgtagcttaatcacagttcttttttaccttttaaagaggaaaacaatgacagcaaaaaaccataactatatgcattgggaagagactaactgagtgta

SEQ ID NO: 4852 - DNA, 596 bp, Gossypium hirsutum
cggttcctccttcgaaaccatttctcaagtctttacaagcaagactcaaggagactttctttcctgatgacccttttaggcagttcaagaatcagcctatttccaacaagttcttgctcggattacaatattttgtaccaattattgaatgggctcctctttacactttcgacttctttaaggctgatttgattgccggtatcaccgttgccagccttgccgttcctcaagggataagctatgcaagtttggctagcattccaccaattcttggactttgtaacttatttatttctttttcgatccctcttattctttgttaatgaataaaccattgtgtttgcgaaaatttttgaaacttgaaatcatgaactccattggaatgcagactcaagctttgttccgccgctgctatatgccatgttggggagctccagagatttggcagtggggactgtagctgtcgcatcacttctaatatcttcaatgcttggcaaggaggttagccctactgaaaaccccaagcaatatgttcagttagtcttcacggctactttctttgctggagtgttccaagcttcccttggcatcttagg

SEQ ID NO: 4853 - DNA, 634 bp, Gossypium hirsutum
tatagatcattccaatgctttgtaaatttgccttacccaaaattcagttcaagtaatgctaaatttggaggctaacactgggatttttaaacaagatgagttaataattttcctggggattttcatgattaaacatcaacccataaggtgggaaaatatcaattaaaatttccctccaattatttcttcccatcataattgtatagacgacaattatctgtcaacgtagagacacacatgttatatataggaccgatagtattgttcctcttgttcagccgacttttttttagggtaaactatacccagatcactaaactatggataagtttacgttttggttactcgacttcaaaaagttacaatatagtcactgaattattcaaaagtcttcatttaagtcactagcatgttaaatttgttgttgtatgaccaatctaaagctctcagtccctgtctcttttacagttcattttttttatgacacaaatttgtgaaccaaaatttaaacaacttttttctttgatctccgacactgatcgtcaaatcgacttggatctaaagtatgtttttctactcatcgaggggtattgattcaccgtaccaataatcaaatcgacgcttgaaggttgta

SEQ ID NO: 4854 - DNA, 636 bp, Gossypium hirsutum
  misc_feature (608)..(610): n is a, c, g, or t
  misc_feature (612)..(615): n is a, c, g, or t
  misc_feature (620)..(620): n is a, c, g, or t
  misc_feature (626)..(629): n is a, c, g, or t
aattgcatcgcaattgctcacagaatgtttctactactggcaatactggttcgtctactaaagactttgggacatcttacaggggtcatggtcggtcctctcgtagtcaaggcagaggtagaaaatttttccacaacaagcttcagtgtcagttatgtggccggattggtcatttgcgggtgtttctgatcagccgatgcaggttcagtatcatcagtttcaaagtccttccccttgtcctgtgatgttcgtattgttgttctcacaatagcaaggttcaaggaatgaatttgcaggcaaatgtagtctctaagcaagggctatgttcctcgaatggcaaggtctggtaccctaactcctgtgcgtctcatcatgtgaccaatgatctcgacaacttactggaatcagcaccatacataggtaccaacaaggtctttatgggaaatggtgtacccgtgtctgtagctcatactagttccagttgttttacatctggtaatagagtttttcacctgaaaaatattttgcatattcctcatatttgtaaaacctactatctattgcatagtttgctagtgataacaaagttttctttgaattttatcctnnnannnntgttntggaannnntatcaag

SEQ ID NO: 4855 - DNA, 328 bp, Gossypium hirsutum
ttctcttttgtactctcgtttgcagagctcatcgctcttacttgcttccatcgtgacatgtcttctatagagatccaatcactaattcaatataccttttttgcctttcgtaatgagaggttccacttctggaggcacctcttccatccagaagatcagaacgttatatcttccccctctcgctgccagaacgtgcgctgctcctttcaacgttcgagatgtgtgtttgaaagataacctcttggacctggaatttctatttttttatttcatctactatgtttctgatcatcgatttgtcaatattcgctaactttagttttttttt

SEQ ID NO: 4856 - DNA, 595 bp, Gossypium hirsutum
gaagccatgaacacgctcatccacatgcctaatcattattaggatatcaaacatacaggaagagaggctggaaaacatacatttacttaaagcatgcaaagccaaatacatatgacactatccaaatcagccacatcaccattacagaacttcataaataggtagaaccaaattctaaaatattgcacgcatagaaatggtaatggtcctttaagaaatattaaattttttgcaactacaaactttctccttttttgttttttgggaaaacgacaacaaagatacttagaaacttatatttggaagaaaactacactcaccaacttcacgggcccaaaattttgaggaacggacagcatgagttcctcattccaaactggattcaggttgctctttattacagccgtctgaatagtctaacaagaccaagtacccaaagttgtgtcattagtaaaagaaatagcatcaatcaaagtaactaatcctattaacgaacacataaatatgtcgagcatatccaaaagggacatgcttgtagcaccaattaaaaggaagaaaaatatatagattacaacaagagctttaatagaaagag

SEQ ID NO: 4857 - DNA, 635 bp, Gossypium hirsutum
ttcatttgcaatccatagagatatgataagtgacaaggtataaagattacttcttttacttcaattgaagctttggaaggtttgactagcaatttgatgcacatatcttttggtgctacagataagaacagatgcttataggcaagctttattgaaaaatccttctctcctgaatggtgcagttgttatggatgtaggctgtggtactggcatactaaggtaacattttccatccagtttccttctaagttttatttaactataagtgtttattttctttgttcaaatcaaatgtttaaactatgtcatgtgcagtcatggaccaccccactgtagcatttgatattagtctataccattgaatcctctaccatgtcttatggttatagcttccattttattttagaaaagttgtccattttcctattatatgagtatccatggatcattgtgatgaaaatttattgtttctgctttgatggttgcggttcatactatatatggcttcaacagatagactcttctttagaaatagtaaacataccaatgttgccaggtttctgattttcaagttctctcttttatcagtctctttgcagctcaagcaggagcatcaagggtaatttccatttgag

SEQ ID NO: 4858 - DNA, 582 bp, Gossypium hirsutum
  misc_feature (58)..(60): n is a, c, g, or t
  misc_feature (421)..(423): n is a, c, g, or t
  misc_feature (437)..(439): n is a, c, g, or t
  misc_feature (443)..(443): n is a, c, g, or t
  misc_feature (445)..(447): n is a, c, g, or t
  misc_feature (459)..(461): n is a, c, g, or t
  misc_feature (518)..(518): n is a, c, g, or t
  misc_feature (540)..(544): n is a, c, g, or t
  misc_feature (561)..(565): n is a, c, g, or t
  misc_feature (567)..(570): n is a, c, g, or t
  misc_feature (576)..(579): n is a, c, g, or t
gaagagagaactcatttccttctcctgatttgacaattttccatatagaagacaatannntggtttcatagaataggatctcaaaacaaaattgatgcgttgctgtaaaagtaaaaccacaaaaataaacacattgatatcacatgaagaaaagaacgagaagagaagctagttacaatagatatattagtaaagagaagagtacctagttacaatcgtcggcaactccagcagccagcagcagcgcggcagagggagacaaagaaagaaaaggcgacttttttttggtttactacgcgacacagacacaggtagtagttgactatagcttaacctgttttggtgaatggtaaagctaaaacccagcttcagagttcagacttgatgatgaaatgaaagagtagaagaaagaattacaaannncatttaccaaactnnntgcntnnngccttgcatcannnttttctgctgctacaacaatcttctctattcatatctatctacccttttttcttctnatatttgttacagttttatatnnnnntattaaggtactttttnnnnntnnnntttacnnnnaaa

SEQ ID NO: 4859 - DNA, 621 bp, Gossypium hirsutum
aagggggaggagagaatgctttgcgggggaggaggatggcatgcatggtgaatcctccaataccaaatcctttttctgtagtttaatgaagagaaaagaaaacattatcagagatagtgagacaccattgaaaatggggggacctttacaatattagttttaaggaaagtgccactatagcagccccattctttcaaggcttgatagccaatttgtaagtcatagttccataaatctcatcataaatacaaaatatttttggttcctttaatcatccatttctgcaacattttctgtatgttgatctctcctacagcttttctaaaatcatgtttcagatatgataaacttgcaaggtaaacaaacaggttgggaaatggtaaagtatgtgaagaaaaatacatatgaaaatgaacagaaggaaaacatagaccgaaatttgaaagattgatgatgacctaatcaagtttcaaacactcaaatgcgagatggtgttcatttgtcttccctggagtggtctaatttggatggtgctttgaaaatccaccgccatcccttgaatattcttctattcttttttattcctctttcatccattgtcatctgatatgaactcccatt

SEQ ID NO: 4860 - DNA, 604 bp, Gossypium hirsutum
agtattcttataaataatgacgttcttcacgtttgcacgtgtatgagatctaacttcaccaagaattggagtttgtatttgtatataattttaaattgtaattatagaattcttattcatttttatgtttaatatcatttacctttttactcatgtatttatattactatttttaagtttgataaacttttaaatctataaacgttgttatatgtcacatactattaatctttaaaataattaatatcactaatcgtttgttaaatatctaactttttttactaataattttatttaataaaattttcaacatctaaaattttaatttaaagacatgcaacttcattacttattaaatatcgtattacaaagcttaactctaattatactttgatagtatatgataaaaatttatctctatgctgtcaatccattatttttagattacttatcatatattatttatttttaattatgaaatttaccatataaataagttacacatataataatttaactaggttactcaactactaaaattattaattttaatggtaatgttgaggagataacaatttaatggataacattaggagtctgaaca

SEQ ID NO: 4861 - DNA, 914 bp, Gossypium hirsutum
  misc_feature (251)..(260): n is a, c, g, or t
  misc_feature (409)..(409): n is a, c, g, or t
  misc_feature (881)..(881): n is a, c, g, or t
ctaattagggagggttgagtgttgacttgaaatggagaaataaaagtaattcttataaataatgacgttcttcacgtttgcacgtgtatgagatctaacttcaccaagaattggagtttgtatttgtatataattttaaattgtaattatagaattcttattcatttttatgtttaatatcatttacctttttactcatgtatttatattactatttttaagtttgataaacttttaaatctataaacgtnnnnnnnnnncacatactattaatctttaaaataattaatatcactaatcgtttgttaaatatctaactttttttactaataattttatttaataaaattttcaacatctaaaattttaatttaaagacatgcaacttcattacttattaaatatcgtnttacaaagcttaactctaattatactttgatagtatatgataaaaatttatctctatgctgtcaatccattatttttagattacttatcatatattatttatttttaattatgaaatttaccatataaataagttacacatataataatttaactaggttactcaactactaaaattattaattttaatggtaatgttgaggagataacaatttaatggataacattaggagtctgaacaccatttgccaaatttcatgccttttcatcaattgatttgatgaacattttcattgtagcctagctgaagggttcaatggattcatatcagtgaagaaatcttccatgcaatggtatcctatgtatgtatatgtatctgtggtttctcacattttagctttgaattgtatctgacattaacacctaattttaaaaaaataaaatagatggaaaaaatcccctgattgaatcanatttctttaccgtttctgtataaaaaacattaa

SEQ ID NO: 4862 - DNA, 638 bp, Gossypium hirsutum
tcgaagctatgtacttttgtgagttgaatactccaacagagtatttgggccctatgtatgcagttcttgcacggaggcgagcccgagttttgaaggaagaaatgcaagaaggctctccactttttacagtgcatgcctatgtgccagtttctgaaagttttggttttgctgatgagctaaggagatggacatctggggcttctagtgcccttcttgtgcttagtcactgggaagcacttcctgaggatccattttttgtaccgaaaacagaagaggagatcgaagaatttggtgatggttctagtgttcttccaaatacagcaagaaagctcattaatgctgtgaggcggcgaaagggtttgcctgtagaagaaaaagtagttcagcatgcaacaaagcagaggacgctagctcgtaaagtgtaaagttgatcaatcaagccaggttattatctacaaatatggtgggtgtaatatgttcttatacacaaattaattttccttaccaattttgtcttcttttcttttttcccactgggaacagatgtagcaaactctttttgaaatgaaagtttatcctgaacattgatcaataaaaacgaaactgttgcaaaccatgatcctgtccagtcataaaaa

SEQ ID NO: 4863 - DNA, 636 bp, Gossypium hirsutum
ctgatgccgagaaatgttctggattgagtgatgctgaagttgaatcccagttccttggtgatgctgcttttggatctgcttacgaaccgtttagtagcgtgtttcatatgaggtgtgcttttaatcattataaacacacacatacatacacatgtttgagcatttgaatataaaaagtctagtgcaataaccttagttgtcttgtctcgaagcatataatcaatatagttgtctgttcaaaacaataggggtttcctgttttcggttctttccatccatatctttatgggtcgaaacattacatgatactcgtcaatctttgactttgccatgcaagcagacatgtcgcaatcttatattattgctgtttcatacatgccctttaggaagaagaggctgacaagtcattggaggagcttcattcggcctctcatgtggcgctgcaaatgggcagaactcagaatcaaacaaattgagtctcaagcaataaaatacagcagagaaatatcttcatatgagcagagcaagttctccagaatcgaccaatctgcactagaaggttttggttcaaagtcattgccattttgtagtcagtataaccgtagaaaggccataaagcggaggagacgaaagaaa

SEQ ID NO: 4864 - DNA, 630 bp, Gossypium hirsutum
ggccttcttcttctcgaggtaaaccataaaccccatacttattatcactcgccaagctatgctttttctgatatttattaatattcttgttagaaatatatttctcaatgtgtactgaccctgttaacttaaatcaaccaaagtatgttatctttcaaaagaaaaaccaaagtatgttagagacaaaatagcacttgaagggaattcgattattttggcttgctcttggtgtggtgtgcttgattccaattggttaacctgttacatatgcttggcatgctaaggattttgatcgccaattgtcataaaatattaggtattagcaatttagctatggcaatttgagatggttggtttttcaaaattaaaactattttccatggtttgattaaattattgccattctttcttgattgcacttatgttgttttctaactttcagttttatccacatctcatctgtcaactgcatcatatttttcgcttaaaaataaaagaaagtactatcaaaacaatttgtagtcttttttggttaatataccatttgttacttgagtttggcttcaatgttgaatttggtacccagacctaatggcatcttgtggctcaatggatatttgacacgtgtgg

SEQ ID NO: 4865 - DNA, 605 bp, Gossypium hirsutum
  misc_feature (599)..(599): n is a, c, g, or t
acttaaatatgaagtggcggaattggagagtgaattcaaagaggggtaatcttattggcgttggtaacggattgtgatttaaagtcggaagcatgatcatcatagtcatagacacagttctcattctctggttgttccaactcatctccagtgggagaattgttgtgtggtgggtgcaagtggccaagagttgggttcttgttttcttgggcaatttggttttacagacggaaaatagtaataactgcctctttcagtcgacaaaaaaggcaacttctaattgtgagggtctcaaactattttcttctatcaattcagtttaacgtttaatttaatatataaaaatatactaatatttaagaagaatgttatcttctaaggaaaatttatttggcattgcagtcttctaaagaaaacaaattgcattttgcatcatgtgcaaaagattgtagattcttataagaaatcaaagtagaattgtgaggagttccttcttttcttttacaacaacaatacatgttcaaataaaacccaaactaaaattttaaaatagaaacctcacatgatatttaaacacatttggatactcaaggcaggcncgccag

SEQ ID NO: 4866 - DNA, 634 bp, Gossypium hirsutum
caccatcagccatagttatatatagtgagaagaaaccaagattgcctgtctgaggactctgtacattgccatggataagactaaaatctacctcaagtagcttccttcatttgctcatcagtcagtaagcataactgagaagatcaaaagcttcggtatctgagaagatcacttcaagtaaaatgggtttgactgctacagtttaggatggtaggaagcttttaggttaactctaaaagacttttgacacttgcgaagggttgcaaatctggtttttaccactggttgttctcttaagatgattaatgccatgtagcctgcataataatcagcttactgttgaatcgaaaaaccaaagcttttaccaatttgattcccaatttttttagctcaaggaaaactagcttatgtttgcaagagagatctcaacggccaaaaaacaggtcaagcaaaacaccaaactcgtatttcataccatagtataatcgaaagatattgggaaaaccaaatacaaagcctcagacgccataagaattaataaagaacaaaaccagatttagttcatcacaacatgaaatgtcagacacttgcatggagtttttttttcctttacacggaagtagtatcatcaccc

SEQ ID NO: 4867 - DNA, 652 bp, Gossypium hirsutum
atcactgatttcgtagccaatggatggattgttcatgtttcagtcataattatgtgcatttctacgggcttcagtgcacaatcgaatttaaattgccttggatttgcagtggatatctttggtaaggagccatgctgaagtcgtcgtagatgatgaggttgttcttccagtttttaagaaattctgcaaggtatgcaatttattatatcatgtgtttactttcaatttgatatctctttttgttattgtgaaatatttgtgacctcgaattttgtcttcatagagctcttttctttctttagcttcctgctttactgcataaatgttacgatagtattctggtcttcttttggtgtaatcctaaactctttttggtgatatcctcttttgatttgatttactgaagtaaaaagtatgctctgaaatgtttatcaattatgctaagtctagtgtaaattgaaaactatattctaaactagtcaatgggacaactgtttgatgccatgcacgactccccaacgatatttgttaggttctgttagcacatgctggatcatatggaactgcaatctgaaatttaaattttcttcttggtttgcagcgacgccctgctgtggacaccagtaaaggaaagctgaatcttgtaagcaag

SEQ ID NO: 4868 - DNA, 657 bp, Gossypium hirsutum
tcttgaaaaccaacgcctcttaacctggacttgtccttgccttcgattcaggatattagatggaactttgcgcggctactgtatttattcaacattcaaatggagaaaaatgttgccacgtaagtgaaggttaccatcctatggagaaaaatggatgctcctttggacctgctttacgaagattgattagtgatctcttttaataagcatgaacttattttcagagtaaattggtaacatgcaacgttggcagggatcaaaaatgtttttgagatacaatgctagtttggccaccatttcttagtgtaagcttttaggcctactggtatcatggaattaaaacaaggttaacttaatgtcctgggcaacccttgttatgttagccttaatattattaaatggtaagtatagggcgtcttggaccacttccatttccagaactctgggcttgcaagcgaagggaagtgtaaagagacataatgtcagtttacctcaacctatcaatttaagcttttattctgatgtttgcttttatgtaataaatttactaagaaactaatattaactgaatggtaatgaattaagcacgttaacaaggcaatattgattctaaattgtgtatctttactagccaaaagaggcttgtggactgttagg

SEQ ID NO: 4869 - DNA, 608 bp, Gossypium hirsutum
gtttcgtggtttgtttataaagaacgaatatcagcttctttcttttttaagggcttttttctgactcagtttgggggcaatcaagatgacagaacttctaacagcttacttgatttatctcgatgctctaagaaacaaaaaaacagtagtaactggaaagatcatcgactgaactagaatacagtgcaatcgatgctacggtgcctgatattgcttggattcaatcattattacaagggcaaggtgacgaatttttcgctattacatcgggtactattctgagaattgtgtttagtgaatttaaaggaaattggaaaacgggtcagataaattagattcataaggaaccaattgatgaaaatcaatttagaaaattgtgatgtgaaaatgtgggaaatagacaaaatagtaatttttgtaaagttagaggattaaaagtaaaacttaaacaaaatgaaaatgtgaattattattcaatatttttcatggggatgacttccaatatttattggtcaggtggaaatcatttttgaattaaattagaaaggatttgaaagtacatgaactaaattgtaaatttaatcatgaacccaattatcaaccaccag

SEQ ID NO: 4870 - DNA, 620 bp, Gossypium hirsutum
atttgatctgatctttacattatggatattctttatttattaatggaagtttgactacaatgttgattttatactacaatgttgattttataggtgaagaagctgcaaagggcatgtctgagaaatcctgtgaaggttggtaatgctattcaagcaaaaattttctgcgatctccctatctaattttaattttctcaagactttcagtttgttcttttcctttttagattgaagctgcctcaaaatattctactgttgacacattgaagcagcaataccggtttatacctgcgaagtacaaggttgcttaatcttcttagattaaaattcttcttcaaagataagaactataatggttttgtgctgaaattctatctttgagagagataaacttactgaaaaagattgagtgaactttttagtccatgttatactagatgcacttgattttagtcataaatttcgttgagtttgtttaagtaatatgaaaataatatataataacttgagttggtagtgaatgtgtcataggtctagcacaccttgtcaccccagagtggtgtgcaagaaatctttctggaaccttctaaacttatcctgcagctaaaggacccatgatt

SEQ ID NO: 4871 - DNA, 580 bp, Gossypium hirsutum
tttctggtagcaaacttaatcgtgcccttaattgttgtgtcttattttttcctgattattgtttatttcaggatctcatgacaaagaagatcattggtaagggacatgagtctgatggtctctacattcttgatgcccagaaaccagagtctatagtctgtgttggaacaatcactccttttgaagaacattgtcgattggtcctccttcactttctactttgtcctcagttttcaaacattacttctttagagtgttagtcttgtcagtttgctaaacatcatcatcttagttttagttctagagtcaataagtgaatcactgctctctttgtacattctgatgtttgggacccttatacagttacctctaaaactggtttcagatattttgctacatttgttgatgactattttagaatgacatggctttatttgattaaaaatcgctcaaaattattctcatttttcttccttttgtgctgaaattcaaacccaatttggtaaacctgtacaaattttatggagcgataatgctaaagaatatgtttatggaaattttcaaaaatacgtgcttgacc

SEQ ID NO: 4872 - DNA, 560 bp, Gossypium hirsutum
gtgttagccttttccctctctcttctctcgcgccaaacacaaccaacattactaatttactgttaatgttataggtatttctatttctattttgttcaaatccaatgttttttgccccgtgaactcagtccagtactggacttgttttttcattattggaactctctttctctccatttccttggcttcccttttccgtccaaccaaagtgccttttttttcccaagtcttttcatgtttttccgttgtcacttattaacaccttaatacctgtagttccggttcctaatccgggcttcaaccgcaaatgcatccaccccaacagccgcggccgctgtctgagcaaccagaaactcaaccaccccagacgcttctcgacttaatcaccggcgttctctctctcctcctcctttcttctctcaccgtccggtctttcgtcggacggtggcaagtcctccgatcgaagctctgttccctccaatcatctctctcctctatctccgaatctcctcactggaacgacaactctttgcttcataatcttttcccttcccttctct

SEQ ID NO: 4873 - DNA, 624 bp, Gossypium hirsutum
ttttgttttaaggcttagccttctcctattttaccaaatatatatataattgatgaccattttgtaattgaaatttatttaattttattatttaatttttgtaaataattttttatatacataataaatatttttttaaaaaataatgataaatctaatatgatgtgtaaaaataaatcaatactaatatgtatactagaaaattagtacatctacctaaacagttctaaatgtcttgcaccaagtatccctcaacaatatttgaggaaaaaaaaatgaaaggaaactgagagagagaaaaaatgatcgaagtgattattctaatggtatgcttagttttttttaaaaaaagtattttttagataaaaatatatttttaagataaaactatttttaaacaagtcatttttgaagagaaaaaacgcttctttcaagcctaaaagtgactttttttataagctaaaaattttaaattctttcaaaaaaaatttttcctcaatagtacttctaagaagcattactaaattaagcttaaatcaacacaattataaaagaatttctgtatattatcaacgatagaagagttacagtatatataacctgcaacacatgaagctttatagg

SEQ ID NO: 4874 - DNA, 615 bp, Gossypium hirsutum
  misc_feature (24)..(26): n is a, c, g, or t
aaatctgcgtttctgagatcctgnnntgtattaggcatttgaaaaggttttatgctttaggaacaaaagatgcagatcttatttcaccccatagcaccgaaactcttgcttccttgacgttaattaagtaatccccatttccttctttccaggctatatgagagtgagtaatttcatatatccaagttcactggctattggctaagataccaaaatacatcactactattcccctccaccaccccaaccccttccctttattatgtaacaaacattcaacaattccacatttattcagttgtttcagttagaatttagcatatacccggtaggttttgtaataagagatgtttccaaaagttttagaagtgatatatcatttctaaaacttattcggtctaaaccaaagcaatttatctttacagaccagagataaacttattcatgtgtgcattagaaagttgaaaggaattcagggttcaagtaaacacacctcattcggcttgccccacaatctgcgtaagtataagtctgattcagctttaacaattccaggtggtagtctttccgcacctcgaggatttgatgggacccaaatctgcatcagtcataaag

SEQ ID NO: 4875 - DNA, 635 bp, Gossypium hirsutum
atatgttccattatatttgacctgacttcaatttctaataaatattaataagaaccccatattggtacaatagtgatgaaagatgtccatagaagaatatgtctccaaaagaacaagtacttggtcagacatgaagaaatgggcttttcttcctggtaggattatcttgtccaggatttagatttagggttgggcttgttagtttctgcttatatatataaggtaaactattaaaataataatttttatttgtttttagttataatttagtcacttatatttaaaatgttacattttaatcacttacaacatcatgttctaacattttagtcagctgacatgacacattaaatcatcattttaaacaaaaattttagattaaactatacaattagtccttatattttttcgttttgagtaatttaatttatttcttttatgtttttttctaactttctttttttctttatttttcattgtcttctgcttctctttttgttttacttccttctctatctcttttatttcttttaactttcctttttctttttcttttatgttcttttctctcttccccatattccaatcgcagtttcaaaagttgcctcaaatgattttcgtataaccaggccctt

SEQ ID NO: 4876 - DNA, 599 bp, Gossypium hirsutum
acctaggagcttgaacattgattagttttatttctgctgtggagcagctttatttttcactaatttattgcttccttatatacactgagttaggtgcggtgtgatggttgtaaagtttgggtgcatgcagagtgcggcaaaatttccagccatcattttaaggtctgtggcatgctgtctatcttgaatgattattttgttccatcttctaatgaaactaaggattcaaattttttatttccccaatcaaatcatatttgcttctccaggttctgggggccactgattattactgtcctacttgcaaagtgaaatttaactttgaattatcagattcagagaagtggcagccaaaaactaagtaagtctgttctattttggaatcagtagttgtctatgtcagtgtgtatgatttacttgttgtataaaatatatctctgtgtatttgaaaattatttaaggattctggctgattctttattcttcacctcaatgtttctaatgattgtaaaacctttgatgcagatcaaaaactaacaacagtcaactagttttgcctaacaaggttactgttctctgctgtggtgttgaaggcatat

SEQ ID NO: 4877 - DNA, 620 bp, Gossypium hirsutum
ttctgattgaatgttcctttatgagaagtgtgaaatcgaaagaaagagaagaaagaggggctgctgctggttactgttttggctgtaatagccgtgaaaaagacagtgagaagaaaagaaaaaatgaagaggaaaagagaattatgttctgaaaatattccttgtgtgtatacactccattacacaacctatttatactaataatcagatatactaagaaggaaagtcaaagattacacattacacaacctatttatgctaataatcagatatacaaaggaaagtcaaagattataaatcctaatgtggtgctagtcaatccctagaatcatgataccttaagactactatcacaacaagaagcatattttcgtcaaataatttatagccagacaaattaaacatgcaaaaactaaaagggaatgaagtaaaagtatcactgagaacttcaataatgcatcttcttcacaagtgcacatgaatatttacacatagatcaaacaaatgaatgaaggatgcaacctagaatgtaatccatctaaaatgacaatgctatatcctgataggagtaacctcttgtctggacaagtgatcaagatccttggaggaacagggccaga

SEQ ID NO: 4878 - DNA, 732 bp, Gossypium hirsutum
  misc_feature (50)..(52): n is a, c, g, or t
tcgggttgttgtatccttaattaatatggacggtgtgctgcggacctgcnnnttttggttggttgctttgaaacgagaggggtgagtggttgcatggattaatggtgaggataggagtaatagacagcctacaagctgaactttggggatttcaggaaggcttacgtatgcccaagttaattatgaaacttgttgtgctttggttgatgaatcagctatctcgaccttttgaagcttctcatccgttggacactttcgttaaaaagatcttgctcttgatccgggaggattggtgatggaagtccgacatatttttcgggagggcaatcgttgtcctaaccaccttgcatgtttagctcaggacatggcggaaggttatatttttcttatcggcaccgccggacagcttacaaatgtttttgcatgcttgtatgtagggccagggtaagatgcatttctcgtctcattatttcatcataatgtacttttcttatcggcaccgccggacagcttacaaatgtttttgcatgcttgtatgtagggccagggtaagatgcatttctcgtctcattatttcatcataatgtaccccccaaaaaaaattaagcatcttaatcccataaataataccttatacaatcataacttaagattaagttaacaaagtcttaatgaaaaataaatatatatatataaaaataaaatatgcaaattcaatggtctgcacttaag

SEQ ID NO: 4879 - DNA, 670 bp, Gossypium hirsutum
tgcctgtggccttgctacccactattgcttaaatgctgtttgttttttcttctgcttcttattttgtgcttttcctcctttcctcttttctcaacttatttgaacaaactgcccctatagaggcttccttggattgaagaacgtcttggcaacttgatgaatgatgatccagctgtcatagattcttctcttgcacaatatggtgaccttgtttatcctgataggagcagcattcttcgcaggtaacctctttttttgtggttattgtagaacttagaaacagattttatatctcgactgcttaattttatttgtaagaatcattgtttttcctgatagattttgtcttctcttatcttgtgtttttgtttcaggattgagacagttgataaatgtttcagccatgacactgttgaggaaattattgattctctggtaagcataattatatgcagatgtgtgtgcatgtgcatgtaggccctcgcctacattttccaagtgaatggggtgtgttcctgggcagtcagttaaagactttgatatctcaggaaaatgaagcagctggagcttatgatgattggtgcaagacagtgctgagaaaaatgaaagaagcctcaccattgagcttgaaagttactctaagatccgtaggttaacaatgtcccaagtg

SEQ ID NO: 4880 - DNA, 615 bp, Gossypium hirsutum
atatgttttaattgtccttaattctcatattactattttttttattatatagaatttggttacttccaactgatttatatttaaatattcaacgttttcacatatgcatgaggagaaaaaaaaaacagtagtatggtaaaatcaaactaaaatctattgtttctttctaaataaaaactaaaccccaaaaataaatacggataaaatagcaaaaattaattctttatatatacccttccttgtatttgaaaaggcaaagtaataaagggccaacttgcaaattttggcagctgcctttcaagcctaccccatcttcacgggatgggcttctgcttgaagggctggttcatttttgtttgttttcttctactctttgatattttgcttataaatcttgcttctttacaatccttttttacactcaattctctctttgggtttgaaacaagggagtccaacaccaaaatgtcagctcttcttttgatttgcatgcttttcttttcttcagtgacaccaattcttgggtgtggttcatgtgggaaagcacacaagcatcgaaagcctaagggaaagccccctaaaggccccatcactttgcctccccttgtgaaacct

SEQ ID NO: 4881 - DNA, 517 bp, Gossypium hirsutum
  misc_feature (334)..(334): n is a, c, g, or t
aaatctttcggtaagctaagatcatttagtatttccccatgcttattccattgaacatgtcttgaaagtttgtaccaactctcctctgttattttcagatgggacagtggcaccctgctgatgaatatgacggcctagtgagagagataacattcagaaccatttgtaacagtcccatgtgtcctccagacactgccatgacagagtaccagcattccattttatcacccgataagaaaaagcttgtatgattcgttcttattcattccgtcaattcttatttaatgatctgtgtctctcagttaaaaaattcatttcctgtgatgctttggcntattctttttgttggttttatgtttgtttcatttgattgaattcagtcaattttgtctattcagttaaaaaattcatttcctgtgatgctttggcctattctttttgttggttttatgtttgtttcatttgattgaattcagtcaattttgtctcttcttgtaggtttttgaaactgtacaac

SEQ ID NO: 4882 - DNA, 624 bp, Gossypium hirsutum
gagttagattatatgttgttctttttactcaaaaaataaaaaataattctatatgttagatcaaagagtaaactgatcattctgttcaaaatttcattcatttttactgttaaaaattagtctatgtatgttatgttgacgtatatgtggtactacttaattattctatcaattgcactagtttttaacaatacgaataaataaaatttttaacagaaataactaatttactctttgatttaatatacaaggactaattcacccatttttaaagtagaagggataaaatataatttgactcatagtacaaaacttgtatgatacttttaccgaatgtagttgaatttcttaacttatgttaatcactctaaaaaagaaaattattaaatattcatctctgtatattttggtacgaatataaaatataattcttttaaatatatgagaaaaatatccatattaaatacataatactcgtgctcaaattcaacctctgacctgatgccaattgccaacagactcgaatcagtagcttattggcggtaaaccggagttagccacttagaaacccaaaaccaaaagaaccaggaacacccaaaagccctagccgactaaagctctttg

SEQ ID NO: 4883 - DNA, 646 bp, Gossypium hirsutum
tgatcgtttgaggggacctcacatttatctgcaaatagatcattaggtcataagtaaataacaagaatgggcaacattattttattcctggccaattggaactaaaataaaattaactatatatttaccttcttccccacttctttctccatctttcttaagtactctgtaaccacatttccacctcttgtattttccacaaaaattctcaagtgcagcttagactggcatgcctgagccaacttaccgtgcagaggaacccacacatcagctagatctgatatattagatcttacaaaattaacctcagcatgtcccaaagatgtagcttcatcaaaaggcccatcaaaatcaaaaacttctaaatccagtacggaaggaggctctttcattgcatcaaattcaaatatttctgcaaaaagaacacagtttttggaagaatttattaaagtttagaattttttttcaaaaaagttgacaaattataggattccttttctgaactagaaaagctatacgattctaagtaagattcattattcaagacgatgctagtgcaacaccaaacatgtacaatgaatccagacatagacaaagcataatgttgaattcaccattccactggggagcagatttctggtacttg

SEQ ID NO: 4884 - DNA, 602 bp, Gossypium hirsutum
  misc_feature (477)..(478): n is a, c, g, or t
cacagatgatgtcaagagcaactgaagtctcaaagatagaggagaaggcagtaagactcttgatcttttaacacttggaattgaacttgaagctcagatttgcaggcttgaaaaacactttgctaagctgaagaaataaagatttttgcaaaaaaaactggttttatttgcacaaatgctatagattcagtagattgtctaatgctagttcttgcagcatatactgatcccacaattgtgtcactaatgttttttgtgacaccccctaatatcctacttattaacttttgttaatggcggggagaaatatgtagaaaaggttgaacatctaaaccaaaatgtaaagcttattatgggatagagaatgaaaaacaaacactatatgaacatttattgattctgttcctttattcttctgatctttgctacacgtgcttcttccttttagagtgatactcaacactatcaaaattactnnaacggcaggattcataaccactactattctacgaaattacacaaatattactgcattttaacaagtgaatatcatttctttagtgttgattatcttttaattaagtcgattgacttgcttccag

SEQ ID NO: 4885 - DNA, 377 bp, Gossypium hirsutum
  misc_feature (367)..(368): n is a, c, g, or t
tgcttgcggctgctactcctcaggctaggatttcccatttttactttattggttttgggcttgtttagtgggtttgtgtttgtattgggctaggttttgttttagtggttaatttgtttaggcctaggtttgggtttgtttaaaaatttggtcctacaatatttatttatatttttgttagagatagtaagaaaacttgggttgcaagtaataaaataaagaaaatttagataaaggatacaagggcttagtttggatgggcgattggatgcggtaaggtgcgtttaccttactttttgtctcacgctacagtattactacagtatctaatatcaccgccaccgcccattcaaactcacccaaaaannatgaaatct

SEQ ID NO: 4886 - DNA, 505 bp, Gossypium hirsutum
tttgttggtatatccaaaataagaacatatgcgaaaaaaagttgtgtataattgcaaccatatatttgtttttgcgttgaatacgaccaatcaatttccatctaccagacttaccacataaagaatcccatccgtcattccaatttctttttctttctttttcaagagattgaaaaatgccaaattggtaagcaataataacgaacaagaatatcccaataatccttcaaaacgaaaaaagttcatcatcccaagaaaatctgagttatggagccatcaaactcaagcttagatactacagctctcttgagtgaagcttcccaaagacaagaccaaagtacagaaacaaggtgtttgaggaatgttttagatgtagaagaagcgaagactcaaatcttattttcactgcccatgatccttaccaatgtcttttactatgccattgctttggtttctgtcatgtttgctggtcaccttggagagcttgaccttgctggtgctacac

SEQ ID NO: 4887 - DNA, 652 bp, Gossypium hirsutum
  misc_feature (16)..(17): n is a, c, g, or t
gatattccagtaacannctgctcaaaatcagcagtaagaaagaataatatggaatacccacaaagagattgtgaacatacaagtttattcatattagaaaaatttgattgagcaaccaatttttcaagaactatgaaaaaactagcaaatataaagattaggaacaagaacagtgaaagtaacgacccttttctaaaaaatttacaattagcttgaatgaaacaggttcatgaaaacatacatgttcacaaacaatttcaaaaagttgaagaaaatatcaagaattttaatttagggttttcattaaacaataaaaaattcaatcttttgtttttcagtattgaataaaagagacagaggaatgcaaagaagacatacctagactctccactgaatccatctttatgaagcagtcaatttgatttcaactattttgatcttaataatagtttttccagttaaatgaaaaaaaaaccctaaaaaaagaagagacgaagaaaaattaaaaagaggagatgaacaattttttcagttaaggtttaggtttaaaaattttaattaattaaatttatttaatttaaaatctattttcatcctatttagaaatccaaattggcacttaaaatctagttggactgccacataggattaa

SEQ ID NO: 4888 - DNA, 622 bp, Gossypium hirsutum
tcttggcaaaaggaagcaaaggagaagacataggtgccttgagcaaaaacagaaccttataaataagtatgttcatattttctgtcccttatatttaatctaaaattcatttgttctaaaattttatttttatatataattattgcattgttattttcccaattcaaatttatccaattctatgttaagaaagaatctggaatgaatccaattttccccatctttgatatattatctatatttgaggtttgcaaacacaagtagagaatcaatgtcttggctgtctaacaacatgaacctggaaacatgtattttaaaaattatataaaagcaaataaaaagaaccaccaagcagtagagaattgaacatcaacacttaaaagcttctagacaggcagcaccaaagatataataagccgagatatttaattcattgtgaaatgggtattagtataaccataactacttccataagcagaataaatgactaactacttaccatctttccatgtttgtacatagttgaagtcagacgattctgtcagaagttcagctctcacacgtggttcaacataaatgtttaactttttcttttctttcaaccatctggatgaaaggtttg

SEQ ID NO: 4889 - DNA, 628 bp, Gossypium hirsutum
gatcacctgagacatgatctgatggagttggtagtaaaattatggaaggctttaatgaaagggatagaaaggacttctagtagatcataatgaaactctattgtgtgatgggactctcaccattggaatataatctgatgaggtccaccggccacatgagaagcacatgaaaatcttgagatacatgagcccaccaatgagcgaacctgcggttgattctacttgttcttttaaaacaagtagtataacgacttttgggttttatattttcccaagccaactggagtttggattttgacttcaatttatatggaatttcataacattgaatatcccattcaaaaaaaaatgataattgttaatctcaaaattttacttttcactatcaaaatatatggaataaccttcctgattactatccctaattagaaaaagtgtcattagaaatgaaattccaaatgtctttgacgtcaactaaatgatcaaccttactgtaataactagagctgtcactacaatcatgaatgcatctcctatcatataataaatgtgaaatgcagtttcccacccctaccctgtatacatgataaataagccaaactactttcctgcttctaacaacatagcg

SEQ ID NO: 4890 - DNA, 632 bp, Gossypium hirsutum
atagtaaatcgtacttttgtgattattcggtatattcatttcttatcttcttttatttttaatactttcataatatatattaggagatgtttacaaaacaaaataaaaatatacaattaattaatataattaattaattacgtaaaaatatgggtgtaatgcttgacataagtgaaaacaaaagacagtttgaattgagcttccaccttaaatgtcaaggctaagcttgaagcttttatccaaatgaatattttatttcaaatttatttttttaaagtcttttatttttagtaaaactctattattaacatataaatttttggactcattcgaatttcttaacctttgaacatgcttagtttaatgagggaaagaaaaaataattcattttaatccattgatataatagaaaaaatggagataaaattcgaagtttattattttatcattataagataatgaaataagacaaaacaatactaacaaccttataaatataagggaaagtgaaaacatggaaaaaaaatgctatatttgtatactaattttctttgagtaattacttttcgtaattacttttcgttttgagtgttttttatatatacctggtgcttcacaagctaaaagatttg

SEQ ID NO: 4891 - DNA, 590 bp, Gossypium hirsutum
ttccagccacaatattcataataagcaaacaataatgcaaagaaaaccaatcataaagcaacaatccatcaaccctgagtcatctttcaatgaagaagtgaaataaccaaaccaaaatcaaatcatagaaaaagaaagagcaacaataaaagtggatccaagggaagacttgaacctgacagaaaagctgaaaaaggagctcactgaagagaagacccctcacaacagaaacaaccaaaaaagctcccaaaccgagccaatcgaagaatccagtgagacccaactctcagaaccccaccagcaatgaaaagaaagaaacaccagcagcctgaaaaccccagctgaaaggaagcaactagcagcgagcaaacacagaaaaaagaatttccggagggaacccaaacgctccgacaaaatcccgagataaaacggagaaaaaccagcgaacaagagttgaatcgagacagcgccgagaaggaccttttctcgcacttcggcttcaagaaccatagatcaaacaagaaatttcgacagaaacccacaagtttcgacgaaatcttgagacaaacagagaaaaatgggcgatcact

SEQ ID NO: 4892 - DNA, 635 bp, Gossypium hirsutum
cttggtgagaagatgaatcagctaccaaggagtgtattataccatggttggtgataaggaatacctgccctgtgtgccatcatgagttgcctacgaatgatgctgcctatgaaaggaaagaggttaagaacaagtagtataagaatgttcaatgactgaaccttggggattttgtttagaataattatctattatttatatacattgactggctggctgcttgtcttgatcctgcaatggaatgtttgtgcttcaattatgttttatggcatccgagatgtatgattattcaagagttcgggatgttatgttttgtgaaatagaatatctcattctaccttctcatattagatcagctgaagggatgcatcgtttgatcttatttagttagtcatacatgactgacatgggactcggatgatacaaactcatcaagaaaaacttgtgggaggtggtttcaggtaagtacttggccaaggggggttgggatttttatagatcactataatgctggagcatcagcatactcacatttaaatgacgagcctgacggctctagtctttttagtcagttgtagagcttcattttctggtagccaaatcttgatatttttggactgagcatttggtggatt

SEQ ID NO: 4893 - DNA, 648 bp, Gossypium hirsutum
  misc_feature (544)..(544): n is a, c, g, or t
tctctgatgtcatgataacaaaaggaatctccttttgacatgtaccttaatttaagacacactcaggagttagagagcaaagaagttgtaaaatgcaacaatcaataaaatattttctgaaggcttcaaggttaattgtttttctttgtacttattgaggcaaatatgttgacctagacacttcaaacataagaaaatgatagtaagaatatgaactgcttatgctagtgagatgaaagagattggttaaataaataagttcatttgctatagttgattacaaagaaaacaatacagcctgacttggaactcttgtctacttgttcactctatcaattttcctaataaaatgatggccattttacaggtaaagtggtaaattcttgtcttattcgaaagtggcttttctgatgatgctcaataatctcccattggctgctgcaatcaacactactgaaggaaaataacacttaatctttcatgattaagtcaaggacaaaaagctcaaaaggctatttaatgcggaaggcctcctaacaaatangataccacacaaaccttgtatgaaccaactactagctttcctgatgaaccggaatagattcaatatacaaaaagttcaaaaaggctatttaatgtggaatgcct

SEQ ID NO: 4894 - DNA, 617 bp, Gossypium hirsutum
agatattagttgggcctaaacttcataaagatttcaataattactaacccgttgcacaatatgaaatcacaccaagccctgacatccttagagaaaatactaatacacaacaactgcatcagcttacttgatactgttctagtagaaagtgtcctggaagctcaggatcaggaactgtttcaaactgaaatacagagcaaggaaagcagaaacaaattaacattgtccaacattaagcattcgatatattatccctcagccatcatttaaatttgaacccaagaaatctaaatgaaaagttataggttgtattagcatccattgctactttgcttagttggagactcttcaaaagttaatgccaaaaatatattggttaaatgaacaaataacaagagaatatcagtagctacaaaaaaagttggacatattatttggttagcaaaataaaaatgtacattaggaacatttataaagattgaagtgtatctagtttatgccattaaatattagttcaaaattcaaacaggtatttagccgaagaaaactacctgattaaatgatataactagcattccccatactaaccttgtctaccactgaacttaaaagtcgga

SEQ ID NO: 4895 - DNA, 630 bp, Gossypium hirsutum
aatatttttgtcataaagttataatagcatcaacatattctaacacaacttatatttaagtcgttattagtcaagaatctagctcagttattttaatgagaaacaagattacttataatataaaaacaatttgttaggtttccaagtactaatgggttctatccgctttggataagttcatttttttaacacttcatttaaatataaatgattgagtataaaaaattgaggaaatatctacttagtccagtgtaaaatttaaataatttaataatcatttaataattttttataacttaataatttaataatttaacggtcataatttatgttccatttatgtaaattatgctaatcaagtttagcataaattaaaatattctaactatcattttacataaaaaaaattgttaaataaatatatatacatattaatataaataatactttaaattgatatgcaaaagatattggatcgaataaaaaatttatatacatggcaaatacaaattatcttgacaaatttaactgttgaaatattaaaatattaattgtataaaaattatgaaaaagtgtaaaatcacttaagttttacattagtgtaagtggatcactaatgtggtggttacg

SEQ ID NO: 4896 - DNA, 631 bp, Gossypium hirsutum
gatcaattgaagacgttgagtacacatgcatctaaacacgagcgtgtatatgcatacatgcacgcttattcgataaaataactcaataggaaaagctatataacgaccaaaattcactcatctgtaaaataagatattccctgacacaagtacagacaactaaaactataaagtctccactcatttcattaatacacgtacaaaacttccatgtgaactgggaagggtacctgagttgacaatgcagggcttcaactccacatgattagccaaaatgctttttcattttcatcttcttgaattcagtttgccacgtcgttcttcgtatgatgctggaaacaattagttaggtttaggtcaaaattaactagcaaaagttgaagaaaaacatacagaatgcaagttgcattctataaagcgtaaagaaggcaagtacaaatacagactaccacaatctcttgaaaatgcatgggagttatcggtagctaattgctgaaagcttaaatcaattttactattcgacaccccaaaatttggttcagttaatactttggagtcagtcacaacacatctaccataaaaaacctcaaataattaagccatcaaacttctatattctactcctcgttac

SEQ ID NO: 4897 - DNA, 591 bp, Gossypium hirsutum
tgtatagcagtagtatactagtagttgtgccaaatgtggccaagaataagctcttggtgagggacatttcttagggaatgtttacctccaaaggagtatctcgctgttgtagtatattatattatatatatcctttcaaggtttagattgctaaactactttgtaatttaagctgtttggaaatatatttaaaagaaatggtgtcttcccttgtatgtttttctttcataattatgctaattttcaatcaaacccatctgtattttgggctaaattcatgtttccttaagctttgatttgatgtcttgacagtctattgttaataggccctgccatttttttatacctcaaataacccccagtttcaattccactttcctccgactctggcacttagatttcaagcccaacaaatttgacttaattctagtaagatttattgttagtcactttgttgtgttctttaagaagaaaaaaggaatctcctgcaaaataataatttgtctttgaatctgacttgagttctattacatatatttattccaaaaaaagaaccaaccaattttctttttgttttacagaaaaaccaag

SEQ ID NO: 4898 - DNA, 607 bp, Gossypium hirsutum
  misc_feature (11)..(11): n is a, c, g, or t
cgtagccagcnccgaggagctccaagacaccctgaacatccaccttgacaccgtcaaccccacaacttgcttggtagctatgaaaatcgttgtaaaaatcacggattttggagggatcaattagcccgattcccttttcctgtatattgtccagggttgaacatacaacatgggtcagattaccaggggactgaacaacaggttgaattttggggttgtattttttcatcacttcagattctggaagaacccctccccagtaaccagccatagcatgccaaatgtatacatatctgcaattgttactgctatgattaataagaacaatctatacttctatagcttctgatagagaaaaaaaaaactcacttcaatccatatttctgcttgatagttttgataaaatctctgagattttttcctgatttatccaactttgagcccttgaattttgcattttcctcaagattaattaatcttgacaattcccttcaatcaaacagatggaatgactaaagctactaatgcaagagtgaacttattgaattaattgtcttaccctgttgggttctcttcatagctgggaaaaatattttgccagccttca

SEQ ID NO: 4899 - DNA, 585 bp, Gossypium hirsutum
cattttatacttatatggataattcttgacataattttgctttttgcttaaacggtaagcatgctatgttgctttgactctccttttttcttaaaaagtatccatgtttgatgcatattcagatagtgaggatatgacccttagattcatggaaatacttcaaaatattgagtacagctgttgcgaacacatagtgtccagcaagtctgagtccgagtagcatagaatcaggaaagtttcctagcttacgctaaaactcctacttgtaaaaggatgtaatcttctttataacttgggaaagcctatactcaatcagtttgatgaagcattatacattagtgattttatattattgatggtaaaagtaccattgaggcttctgtactaggaataagcttgcattttgtctcttctactcaaacaatagataaattattccctctacattagaccaaagagcaaattggccattcttgttaaaagtttcattcatttttaaaaaccgaaatgactgacagaaaactagatagtgtgccatgtgtacctcatgttgacgtacagtgtccggtttttaatagtagaaat

SEQ ID NO: 4900 - DNA, 610 bp, Gossypium hirsutum
ggctttcagacaaggaagggttccataaacgtcataaattgttgatgtcatttttagtgagataggttctggcttgaagatggctggatggctctgcaaaagggaagggaagaatcaaatggcactggagttttaccgagcacccttcaacgcttaaggccccgttcggctttgatttttagataggcttttagaataaaaagtgtttttatattaaaagcattaaagaacatactgtaaaagtagaaactttttcaacttaagaaaagtaatttttcttagatgaaaaagtaaaaatttggtgctttttttcagccaaaagtatttttgggctgatattacttttttaaccttatttgttcttcttccaaatagacgttagaacccatttttttcccattttttcttttttctgaaccttaattttcctctggttcttcttcttctccacaggtgagtctctcttttcttcttcttccctttaaatgtttattatgctttagtatttagttattttctgattgtttgattttatgaaataattatgaaataaaaaaaatactttcacatttttttcagcttttctcttttgcttgtacccttggttctt

SEQ ID NO: 4901 - DNA, 523 bp, Gossypium hirsutum
tatatggcatcttttctcctttctttccttttttgacactatctgtctctattttaactgtgaaaaaattcagtaactgttgtttttctaacaatacaatcggatatcaattacctaaagcttttagagtgaaataatctaaacttttttcacaaaataaaaacaaatatcaaatatccaaattgcttaatcttttcatatgttgtcaattttttctttaaaaaaaataaatttgaaagtaagagattatatcttattaaacttatattaacaagatgaaaaagattggtgaggtagataaattcttaaatccaatctaagagttaaaaatattttggttctcatgattctcattttaagagttctcactatagttgatgttgagtccaaattgatattttaagatagattcaagcaatgctcgtaccaatttcaactccttcatgcacatgtaatgaaaagtgcatacaaaataaataatactaaaggtgtttacgcaacttggtttcctaacatctacggg

SEQ ID NO: 4902 - DNA, 644 bp, Gossypium hirsutum
atttattctacactcgcaccactcaagttttcgggtgaaataaacaaatattcttttttaaataattttgcaaagcaactggaaaaaattgttagttcttttattagtttaattaaaatgttgaatttttttagtggataattatttcaaggtaaattattaaaatagtcacttttgtttgtctcaagttatattttagtcatttatatttgaaatgttatgttttggtcacttacgttatcatgttctaacattttagttactgaacgttaattgttgtcaacggtgtaacaataagctgacatgacatgttaaataataattttaaacaaaaaatttaggttaaattatataactggtccctatattttttctttttgagtaatttaactttttttatgcttttcgaactttctttttttctattatcttctccttatgttttcctcccttttctattttttttaatgtagcttttttatattttccatttgttaaaactagtcattatacttttattttcatgaacaatttaacttttttctttttctttttctttcttcattttccttttcttcttaccttttaattttatctcttctcatattcttcactatagaaacataatttttacgcacgaaata

SEQ ID NO: 4903 - DNA, 641 bp, Gossypium hirsutum
ggaaagaaaaagacaccggtgattcaaaattaattagacaaacccaagttaaaatgtaataacgaaaagtaaaatttgtggtgtgtgattgaataggtaattagctcgtatattaaatgattgatgaatgtgatttgtgtgattgtatcactattaaattctctactaaaataatatcttcatgtacaaattttaaaaatcaatgtatttgtcaaattttaattattgttgtgtattacataagagcggcctaaaaggatcaacaagtgtacaattttttttatttctttaataattagaggacttaatttaagtaacattcataatttagagatgtaataaaaatgttttgaaatttaggaatcaatttaaaacaaaggcagtagcagagggatgtttgaagcaattaactcttttatttataaatttactggataatttatttttacccagtttaaataaaatttgaaattgaattaaatagattaatccatttagagttctactatgatagggaaatccctattatagtggtaatatagtttagtttttaattttgttgttgtctaatttcacactagtttccatctcggaatccgatcgacgccgcccctcaaattccgccagaaagctccaccctg

SEQ ID NO: 4904 - DNA, 582 bp, Gossypium hirsutum
tctggtgagattaggcataggttgttccggctccacttttggactttgatgtttctgccagcttgggtggctgtttctcctcacatccccaccacccagttctagggatgtaagtgttgcaggaatggtctcgattccacgccaaggtatagcaaccgatgcattgtgggagaggaaactctcgcaagacgaaatgcttttcaccttggaactgttcttctcctggttggcgtaattccagatgtaggtattggaatcctcgctggctgagatgatctgtttcccatcttggctaaaagttgcagatatctgactcgttgcaactcgaaagccggatgctggaagacgaaaagaagcgaaatcaactactacctcgtgatcataaacaacagattatataaacagaagtgtgaaatactcacccttcactttgcatatgacatctctcccggacacgacacggacaagtgaatcagctgaagtaatgatcactttacttggatcagtaggagagaactacaaagtgaaacagctaatatgtaagccttcacctgggagaaaaaaatataagaaaaagaaata

SEQ ID NO: 4905 - DNA, 603 bp, Gossypium hirsutum
  misc_feature (593)..(593): n is a, c, g, or t
ataaatcgggtatattaaaagtaagattgcattttatcctctttacttaaaaattgagtgaatcaatttctgtgttagatcaaagagtaagttgattttttttatttgttaaaaacttcatttatattgttaaaaattaacatgactaacgaaataattggatcacgtgtgcctcatattgaagcaaatttttaacaataaaaatggattaaattttttaataaaataattactttatttattttttcaaataaagagaaaatataattagatttctaatacaagaatttttatgataattttaccagataaattagtaccgaatactttcggaacaaaatagtctataatctctactttgtattctcgcaattaagaaactttcatgttcatttactttgctcttggtacaagccttttcaagtaattttttaattttattttagttgaaataattttttttctcttccacggaataattcaacttcccttttttatgtcttgacattaggtcagaagattgtttgtacaatagttcgactttaatgtgattaatggctccccgattattcttttagggacttctgcctganaatgatacct

SEQ ID NO: 4906 - DNA, 370 bp, Gossypium hirsutum
cctcaagtcaggcagctaccaatgctttgaaggaggctaaagatttaaagcatctggctgatcgtctcaaggttttccttactattttcttgtaactttatgttgcatttctgtattattctagcctctagcaagcctcttcttttaacttctaaaacttcctcagaattctggatcaaatgtggagagcacagcactttacttccaggcagcactgaagtttcttcatagtgcttctctactagaatcttgcaacagcgagagtaacaaacatggcgatatgattcagtccgtgcaaatgtacagtagcactgcaaaactctgcgagtaagttaaatgttaggtgatctagttggtgtttttcttcctt

SEQ ID NO: 4907 - DNA, 554 bp, Gossypium hirsutum
ctttatttgtcataaagaacaaattggagatattgacatagagaacggatgctgcaattgtgagacttatttaatatacaaaggtatagttaaaatttgtatcagaactcgaataaatgtaacaacaaatatttgaattaagagaaaggggaggaaggacaagtaaggaattggaaaagaatatatgaatgctttctttagaaaagtggaaaattttaaaaatgaaggaagacaaataaaagagtatcaaaatacaattttctaattgtgccattggctcaaaccaaaaataaaaccataaagaggcactcttaaaaacaaaaggaaaaaaaatctaaaagagtgaatgggcttaaacacgaagggaaaaggagaatggttgccactattgctagaatagtattttgcaagtaattcaacattaatctggattcagatttaccatatgggataatgcctctgcattactgggttttcatttcttttctcttttatgagtttcaaataattattctggaatccacatagtgcagattggggttgagttggggtgg

SEQ ID NO: 4908 - DNA, 617 bp, Gossypium hirsutum
tttttgaactaaggtttcaacaatgaaggttgataagttttcttagactaaggatgtaaatgaatggagaaaagtttttaggaatacctagctctgataacataagtatttattgtttcttattcccaatgatacaatagttattctaggaaagaaatcaggatcctatctcaaaatatcagtctatccctacaagtttgaaacaattatagatttacagcactacattatttgcacctaaagaatccatgagattctccaacaaaaagtaccagcaatcttctcttcttcctttaaaaatggaaaaaatcaatagcttgataggtaatcttccttgaatggtaactttaaacatattagttatttataaggttaagttgaatggtccccaaatagctttttcttttttttggctatgtaactccaactcttcaattttcttgaagtacctgcatttgtcatatattaatctatcttggaaaaaaaacatttaagaatctgaacaaatccatgttggaaacatacccataaacaaaactaaccctaagttcaaataacactgttttttcagacatctagttattgatatcaataacaatctcattccaagccacatc

SEQ ID NO: 4909 - DNA, 636 bp, Gossypium hirsutum
caactctccaacttccatttttaactaggttaatgaaagggcatcatgagcagagcaaatcacacaagattatgaagttggaaaaagtgattgagatgtaaagaaaatatttcagcaatgtttcaaaattgtgaacatgcagagcccctaggaaacatatatatttaattctgcttagatcaacctcttgaaatttgcaaaggaaaaaatgtttgatgcattaaagagggaataccaaagtcatgcacaaaagagatgataccaaaattaacctttactgcaaactgaaacttgataatacaacacaaatattctgcacctaaaaattgtactgcatcatcaaatatctatggaagaaattggaagagagaaagtagaaaaggaagatagtgttttgttaccaaatatctatggactcgattgaataaaaaatgaacagttaggggaatgggttgctctctctctctctatgctttgtttttgttaatgccataaaggaagaatggtaaatgttataacaagcagctagcctacgggatgaaagatagaatgccactagatcaatgatgaaaatagctatggtttagtgatagtgtccatggagaggtgaaagagttgctttggttcaagtcagaa

SEQ ID NO: 4910 - DNA, 630 bp, Gossypium hirsutum
agacataaacagtactattgcattgtgaactacacaagcgcctgtttgagacatgagaggaagagtccgcttatacaattctcttgcaacctgtttattttgttttattttttaatttagaaaaatgaaaaattgtcaaccagataaatacgtagttttctattttgtttgaagttgacacatgcactacatatgcatatcttttattttgggcacttttgaattattagaggggttgatatcagcggtactaggtgaaggctctgacgattgtgcgtatactggagttttgggtggatattttttgtcttggcaatgaaaaaaaaaacaatatcttggcaacagttattcactcgttcaccttcagtttctccagtctcaaatgcaagcgttattctaatacaacttcagatcccacaattataaatttggtagaaaagatcgaaaaattaaaagaaaaaataaaatttttttcgtcaatacttgatacagttgaaaaatgaagagaaaaaaataaaatttttaaaaaatgcataatcttaaagtaatcatctctcttattctctctcattttttaattccaatttgaaaaacttgctcctattctctttcttctcacactcttcttcc

SEQ ID NO: 4911 - DNA, 655 bp, Gossypium hirsutum
tcaatgggaaggtaaatcacatacataaatattcaccaatctatatgtgcatattccaaaacaaaattttaattgcagtgttgtataaatgcagccttgctggaatgttactcatgttcagcggtctctacatcgtcttatgggctaaagaaaaagaagaagattgctccgatggggagggctcggaaagtgagttcgagtcggagaagcttctattaagttaacattgctatcatctagtaggccacctttagcttttggaagtttacttgtgctgaaaaaccaataattgatgcaaagcagtatatatatatgaagtatgattgaagctttgaatggcaataaataatataaatggtgctatagttttctactgtgttttgcagaaacatgataaacccgcagggctgtaaagtaggttggggaagagaaactcaggagtttccaccaatgttattagttttgttttgtttagaaattgtcttcaaatgattttttaatctctgattaatctcatcataatcaataaaaaactacctgtctgtgatattagcactgtttataagatttttttaaaatgcttaattttgggcattataggaccaatttacttaatctaatatagaaatatttttctgggtaatccatgtgagga

SEQ ID NO: 4912 - DNA, 615 bp, Gossypium hirsutum
ccgatcttgagacgactttgcatatctgtataattttatggttttattggcttcgttatttgtatccttcagcatgccttaaaatacatcctattccttatttgatctaatctaaattatcaaattgacgaatatatctaatttttacatttatgcatgctttttcaatataatattaaaattaaagagtagaaagatagagaaaaagggtttgcattaataattttgtgatgataaaattagaaacaataatagtgataaaagaggggttatgaaatgaataaagaacctgacagaggatgatgttaagccacctttttttggttatgacagaagatttgtgggtcaaagttttttcagggaattggatattaaatattaaatttgtctgattgataatttcggtgaaaaggacgaatttaccttgagagagaaagagaaaaagaagcagattccattgttaatgtgttcatatattctattataataagtagcatcattatttaaatagtctctatatattctaagttagggcaacttcatgttattaagctttccctttttttcccctggtcaaatcagttctcattggaacttttttaaaaagagagggaa

SEQ ID NO: 4913 - DNA, 488 bp, Gossypium hirsutum
tgattcttgtattagttgaccagtactcaattttgaactttcttttgcagaactgtagactacttccaattgcagtcgagggaaccgagaagaagactacagtagagagctggagaaaagtgtgttaaaatctaatgatttttctgcgtattcttgcatctaccggacccaagaaaaggaagaatccaaataacatagatacacgaactacgaataaccaaagagctttaactatgaacaaatgttttccagataaaagggtggtagaagtggaacataatcacattagaacgtatttcaatataattcaaaacaatatatccgaacagtttattgttaagttaaattctaaaccaacactaccagcatcttctttgccccttccaattaagcaggcgattttaagtgtcagaaatacaccttcaatgccaaccggcaagctagcgatgactttcaaatcaacggccaagtagtccctttcaatgaaa

SEQ ID NO: 4914 - DNA, 600 bp, Gossypium hirsutum
ggcctggtttgattgcaatcttgtcagatagataacagggtcaaatttatgatcctgatatgcgtatggcattctcatttagacagattgctgttttatatttcaatcatatattacatggaatttgtactgtgtatgatgttatttttctctgagaaactatatcctcaaaacctgattttctgggtactttgtatagcttttcattttgtaaagtaaataatatgtgcatctttctatttaatggtacaaaaggtcatacaagcgtgcatttcgggaactcttcttgtcaagtgatgcaaatattggaaaacaggaaagtgctactggtgctcctgattatttgtcaaagtaccatcgttttgggtggttactgtttttggcactccgtgtacatgcattcagccattttgcagacctagtgacttgcacaattggttttgtttctgtactggtcagttacacttttctttggctttttgttttttgttttttgtttttttttccaacttctgcgtctttcttaatagttgattatgagaaggcagacctggttttcctaagtaataacatgccatccttttcttctaaaggaacgtg

SEQ ID NO: 4915 - DNA, 636 bp, Gossypium hirsutum
  misc_feature (626)..(627): n is a, c, g, or t
ctcggttgtttggcatgagagtcgaactgtagcccattttgttcaccagaaaatccattgtagccacgatcttatcctccaaaaccgtcatacacaacggatacctcctgaaagcttcgttaatctattggtcagaccaaccccatcgcctataaacatcaatcttcttctctaatgtggatttggtcattgatctcaaagcacgaaccgcaatgagaagcttcttcgtcgaagaatcaatccccattcttttgatttcctccacaatctccttaagccgaaccggattaaacaaaagcgctctaggctgacagttaagcagcataaggatatttgattcggggactccaattcctcttttattcatattcggacacaaatacgactcggaatcatagacaagaataccagtatatcgttttatagccttgacagtcttatcatgagattgaaacaagttcctgagtaaattaaatgaagggataatttgtttctttaaactagatttcagtagaagagggtagctactcaagagtttggcaagctcaggccttgaaaaacctatagagtaaagaaactccaatttgggcaaaagggttttctcagtatcagaaagaagcaaagtnngctgtcaag

SEQ ID NO: 4916 - DNA, 625 bp, Gossypium hirsutum
ggttttagagccaccaccgaagcatatgagctgagaacatcttccaaaaatatggtttgactgtaatgctaggaggtttccattagaagacttctcatatgatcaattttatgaaatgagagctagggatgtctttatttatttttacatatgatattggcctaacaatgagagaccagcttccaccattccataaatctgagtttcgtaagatgaatcagactgtagatcaacatgattaagtctttcagctctaactattaatgctgttaatgacggaaggtgcacttatatgctaatgtaaaatgcaacgtgtatacccttatcttacgtgtctatacataaaaaaaaaggaaaaagaaagcttaagatatataactatgataataaacttaaagatcgatccaatttaaacatgcaaaccttttccttgaatttcaatcaggcaaccttgttttgcagctttcaccttaaggataacacacttacgcaccccaaacctgtgcctaatcaaatacaactcagcccgaagaaagaaagaaaaaaactgaagcgctttttccgtcttgcactaggcacatgcattgacaatacttctaattaatacgttatccttctagggtct

SEQ ID NO: 4917 - DNA, 606 bp, Gossypium hirsutum
aacgacgtcaaggctgctaaaagatgcatcgagaatccatagcttgaaacccaatgaagtggcagccatggtagattgtattgcagatttaagtgattcggtgcagaagttgcaaatgtctactaaggtgatggacgggggcaccaaaaacaatgacgtcgtccgtgtggatggctcggatgatgttattcaggttcaaataaacgatattcaaatgtgggttaacatggctttggaggaagaggagacttgcatgattgcattggctaatatgaacgtaaaaggtagggtaaagaaaggaattaggaaacgcattgttaaggttgcacatttgacaagcaatgctttggaccttgttaagagctttgccttggctcataacaaattacaaattccccttaataccctttagaatttaccgtattagaatatttgtacaataaaaaccaaatgaacccacaattcattggtttatttttatatatgtaatttctttttttcaaggcaatactaaaacattttattaatagaccaaaatgcccacttttcttttccgaaccggcgtaaatttcaatccatacaagttgcattggctttgtaataccc

SEQ ID NO: 4918 - DNA, 603 bp, Gossypium hirsutum
tttttctgttcgagtatctctagtcttaaatatcaaaaggtctaaaaataaatcactaatttaagtgatacatcatcaagactcgaatacctcatagaatagtactgacataacatcatttaagctgttttatccaataacttcagtgtctatgtgcaataaacttaatgctgtaagactcaaacttaccggaactagaaatgcagcagagtttatagatcgacaccctcatcaaggccattcgaaccaatcatcacattagagtcaatttgcttgtcaaacttcttcttccttcttgcttcgaattcttggaacccttccatctgaatatgtattttttcagttaattaaaacacatgaagctttagtgatttttattttctggattacttgaaccatatctggaagtgaatcatggagatacttacttgctgaaactgatccattgaaataggattgccgtgcagagagatattctgaagagctttgcagtctttcaataaattaggaggaatctgtcaaccaagagatatcggtgtataaatcgaaaatgaactacagaacactgtcctcaaacaatgtatataacaaaaatcacagacc

SEQ ID NO: 4919 - DNA, 658 bp, Gossypium hirsutum
ttatgtatagggagggtatcaaactcatgtacggatatgtgtcggactgtgtgtcacttttagaaagctagtgagttgaaataacatgtataggatttgatgttatgttgataaatagtgaattggagtaacatgtataggatctgaaggaatgtgaatttctaacctatgttggtttgattttcttttttttggctttcctttcactggagattgtcgtgcttacgaggtttattcggatttcaatgtttagatgcaatgaaaatgtaatgcgtagttaaaaatttgtttgttcgaggcagaggtattaagttttggttgaagcagattagaatggaccagcaaggacatggacagccccctgccatggggatgatgggtagcggaggtcaagttccttacggtactaatccgtatcaaaatcaagtgactgggacggccccaaatccgggttccgtcgtaacatcggttggaggtattcagtccacaggtcagccgacaggagctcaacttgcgcagcaccaacttgcttatcagcaaatccaccatcagcaacaacagcaactccagcaacaactccaggcattttgggcaaatcagtatcaagagatcgagaaagttacggacttcaaaaaccataaccttccattagcgagga

SEQ ID NO: 4920 - DNA, 655 bp, Gossypium hirsutum
  misc_feature (69)..(70): n is a, c, g, or t
  misc_feature (575)..(576): n is a, c, g, or t
acccttaaacaatacttgatagttcagcccctcatttagcttattagtgttctgatcaggtatctcccnnataaaatctaattcactcattctatgctaatcaacgatttgaaatcctattctcttctggtgattaccaatctgagaggatatttttatttttatatcaccctgtctaacatcctgtaaaccaaatgcatccttaaataataatgaatttgactgaaggaaatactagtaaataaattttttttgatcaagctgaattttttaagtttatgagatattttatctacacctttaaatctgaagcatactggtttcctacttttatattctctttagctggctgttagttctgaaactttgagcgaaagacaattcagacctgggctggtctaagacataaacttttattaaattagctaattagaatgaaatttgggcccaaatatgtgttcctttctgaaactcaagttgtaatggaaacaagagtcctgatcaatgccccctattcccccccccttctttttcaccatttccctcacaaccacaacatcccctttcatttattnncctggtcatagcaatggaactggagttccttccaccttccctctatttctcttttctctgtggtctagctcatgcatgt

SEQ ID NO: 4921 - DNA, 655 bp, Gossypium hirsutum
ttacatccttaagtagaatggtaattggtagtcctcatcctttctgctatataatttctttggcactttaggaaatattgatgtgacttaagatcagacttaattatatatcaaaaatggggtaaaaacatggagctaaattttattctttttatttaaaaaaatgaataaattagtatcgtgttagattaaagagtaatttaattttttattaaaaatttaatatatttttatggcaaaaaataatgaaatttttaataaaaaatttgtttattttttatctaacacagatattaatatactatttttttttaatataggcggcaaaatgcatttagatcattaatataggtgcttccacaatacttttactcaaatattgtcaaagatagaaagttgcggaactttttcccctttatgctttacccttctcctttcttaacatgtctaattaggtatctcatatttttttcataatccttgtggactgtatattatttcctggattactcgaaagatggtttgaaaaattaggtggatcattgatctagatatcagatatcttgttcatcaccgttgaagtagccactgttgaagtggcaaagttgtatgttgatacaaaagaccagggttcaagcctaggtaaacctcatcc

SEQ ID NO: 4922 - DNA, 636 bp, Gossypium hirsutum
gatgatgagatttgggtaagtgaagatgttaagaaacatgcattggttaagggatttgagatatacgagacgatgtgttcaaacaatgtaccgatgaacgaagcgacattaacatctgtagcaagaatggcaatgtcaatgggagatggtgatatggcatttgatatggtaaaacaaatgaaaccattaggtataaatcctagattacgatcttatggtcctgctttatctgttttttgtagtaccggagatgttaacaaagcgttcgaagtcgagaaacatatgttggaacatggtgttcaacccgaagagcctgaattagaagcacttttaagagttagtgtagaggctggaaaaggtgataaagtgtattatttattggataaattaagaacaagtgtgaggaaaatatcaccttctactgctgatataattgttagatggttcgagagtaaagcagcctcgagagtggggaaacgacgaatagaccaaaagttaataaaggaagcaatcgaaaatgctggcggaggttggcacggacaaggttggttaggtaaaggaaaatggagtatatcatatacagttgttggtgatgatgctttatgtaaatgttgtggtgataagttggctttaatc

SEQ ID NO: 4923 - DNA, 640 bp, Gossypium hirsutum
taatagcatgctgctaaatctgttgatgtatttacatgcttggtagttattagtgtttcacatttcagtttcagatgaaaagtggcagtgtcgctgaaagattgctatcgtcctgttgtgaggtgagtttgatgtgcctatcattttttgcttgtttgatttgcagtacgagtgtttactaattgcagtttatcatttctgatgatgtttactattttgcatgtgattgcccacacaaacagttttctgtccccaattgaactgtatggtcatgatggaggggatggggttgttttcagagcctactccttcggatgaaggagaggcaaaatagtgggaatatgatgattgattttaatttaagggcaacttttggagatatttacatggactaacaattgatatcgtgtaaattgtgcatgatggggtttctagtataatacctcattctttatcctgggttaaatgagaattatttctcgaaattagctgaaattggacttatttgtatatgtatttgttctctttaattttttttggaggtgtgttattctttgttttcttatccttttctctcttgattttcatagaatactccacaagtttcaatcaaagaggttaaaacaacagatggtgcttg

SEQ ID NO: 4924 - DNA, 630 bp, Gossypium hirsutum
gtcatgcccttaatggaaaatatttttgaaaccattcaagaaacaaaaagttttgaaggtcagagaaactgtttgcagctggcgaattcatgtaatttgttgtgcatttccttgctctcgaacttgaatgactttaatttactgtttatttccttctctttagatgatagatttttagaaaaatttcaatcactgctaaatagataattgctctggggtattcaaaatttcacaaacaatttttgttcttcgatggtttctatttggtttgttaccttaggaaatgtgttagcgacttatatgccttgtgctaatttgcctagactatgttagagactttgccataacatctcaaatatttggaataggtgtgactatattccttgtgctaattactttatgtttttcaggtgtgcttacacatgtttactttggattttctaaatcaaatggccttgagaaagacagcatgttagtgtcttattcctgaccttcagcatacacattttgatatgttatgccttgagcatttctttttctattaatgctgtttagagaataaaaagctcatgaaatgatgcagttccatgtcctgcatgattgatgtatttcctccctcccctctctctc

SEQ ID NO: 4925 - DNA, 633 bp, Gossypium hirsutum
tcgagtctagatcgatttggagaatgaatttctatttgaccacggtgcagattacttttcaactgattgggacgttattgttattgtgtcagttatgttcttttcgctacaataatcggcggtcgatatttccttccgaagagagtctaatactctgtgacagctgaggaacttccagtggatacatactattttgacaaaataacccaccaaatactcatgcccaggaagatattatttgaagttgcagacgtcaagtaaacttctaaaatagtagaatctgtcttgagctagatatcgtccatatactcgatataatctatataaagtgttcaataaattgtagggtaaactattaaaatagtcacttttgtttggttcaagttacattttagtcacttatgtttgaaatgttacgttttagtcacttatgttatcatgatgtaacattttagtcactgagccgttaatttctgttaactgtggcacattaaatcatcatttcaaacaaaaattctagattaatttatacaaccggtccccatattttttcatttggagcaatttaatttttttcttttatgtttttttttaactttctttctttttcattgtcttatgcttctccctttg

SEQ ID NO: 4926 - DNA, 1009 bp, Gossypium hirsutum
  misc_feature (731)..(731): n is a, c, g, or t
  misc_feature (764)..(764): n is a, c, g, or t
  misc_feature (819)..(819): n is a, c, g, or t
gtgacaaatcgtcttcaagtgattctatggattgtgagatcctcgtgaaaatcaatttccctccattgaactcggacatgagaaataagatcaaaggaagcatccagagcatgcgcgaaaaaaccgatcctctgtccttcaagcctctgcagttttcgggaagatctgattatcgcagtgggatattggaacagattgtgataactgatttcgagtctagatcgatttggagaatgaatttctatttgaccacggtgcagattacttttcaactgattgggacgttattgttattgtgtcagttatgttcttttcgctacaataatcggcggtcgatatttccttccgaagagagtctaatactctgtgacagctgaggaacttccagtggatacatactattttgacaaaataacccaccaaatactcatgcccaggaagatattatttgaagttgcagacgtcaagtaaacttctaaaatagtagaatctgtcttgagctagatatcgtccatatactcgatataatctatataaagtgttcaataaattgtagggtaaactattaaaatagtcacttttgtttggttcaagttacattttagtcacttatgtttgaaatgttacgttttagtcacttatgttatcatgatgtaacattttagtcactgagccgttaatttctgttaactgtggcacattaaatcatcatttcaaacaaaaattctagnttaatttatacaaccggtccccatattttttcntttggagcaatttaatttttttcttttatgtttttttttaactttctttcttttncattgtcttatgcttctccctttgttttcctcctttctccttttctttcagcgtagttttgctatgttttactttttaaaacaatttaatttttccagagaggcgagcttttggactaggtacaaagggaaaacatagaaaactatgttaaaaaaaaggaagaaggagaaaaataagggaaacccaagaa

SEQ ID NO: 4927 - DNA, 612 bp, Gossypium hirsutum
ccatacccttcaagaatcaacatgatttaatgcctccataaagaaagttattctcaccaagtttgacagtataatgcttaggaaattgttgaactttctaaccaataatagaagcaactgaactgggcttcgaacatggtgaatttatctgcttaccaccatttgaggagtgattctaactgccttcttttcctgaaactacttttggtgccatgttgaatcaaccaccttgtgaacaaactttcacctacttcaacaagaaaaatcgtggctctgatatcatgtcaagattgaccaagaacggcaagaagaagagatagactgatagaaacaagaagatcttgttttattgaatgattcttaacattcataataactgagtgcttgccatttatagaagagcagttagcaagtcagttgattcaatagccgaataacaaaattacctaactgaactaatcactaacagctgacttctaaacaaactaactgccaactacctaactacaatttctagcttattccttaacactttataatttttaataaatatttttttacataattgttttcactcacatcgtggtgtgcaatatacgaggaaatggctaa

SEQ ID NO: 4928 - DNA, 650 bp, Gossypium hirsutum
tgtattgatattaattattatgttactttagtttgaatcacccgatatacacgttcacagagtctttagtatcccttgcttgcaatctcgaaattcattcttcatttgctgcatcaccggatataacgaactcgaagaaggaatgtgatatggattatttcggaatatatcatgtacaacagcagacggaacttttaaaaaccatgatacatgcaatttgtataactaaacttaagtagcaatccttagacatggagctcagaatgactttcactagccagaagatgctgttcaacatgttcctcaacttccacctcagactcttcatgatggttgtctgcctctgtttttctgtgtaaggtctcctggatttttgttacgcctttctccatgggtcctattgcttgattaatggttaatacaacatcctccaccacctgtataggatgaagttcccatggatgtttgaaattttaaaatgtttaaagtctaatatgcagcattgaaggaacacgactgacttacccggtgaccaccttcaacaactatgtcttggacactctctttgatgcttgttccaggtgcctccacctgagtttctgttttttctaccatggctggtttttcctcattgctttgctctaccttca

SEQ ID NO: 4929 - DNA, 535 bp, Gossypium hirsutum
ttgattgataatatataatccttttttatattattttaaacattttagatatctccatcttcaaaataacataaatattttaattcaaatataattgaagaccactagtttaacacattgtgcattaagtataaacaatttttaaaaatattcttttattgaaaaaatctatttttctttttaatctttgggagagttttctaatcacaatgttggcagttgtcaagggataagtatgaaattaaataaaaaataaaataattttgttggtcggataacgtatgatttttttttttctgaaagataacgtacgaaaggttaaatggctaatttaataatcgccttggactgactcattggacaacacatggtatatatatggataacattaaaggatccaccacggccttttcttacaacattactccctacctgtcacattcatccacgtgttacaccatgtcttccaccgtgacgattgatgatttttgagaactgagatgggccccatccggacgtggtcgtttgtatgttc

SEQ ID NO: 4930 - DNA, 601 bp, Gossypium hirsutum
ttctcttctttcttcggtgtcatatcgctgatgcttgagctcacatccctagtaaaaaacaacagatatcagataaaccactgggtactggtatcaaaagcattggcttggacatggtaaagcttaaaagaaacagaaaaaagtccaggaatcactcactatatatagaatgctcagaaaagtgaagtaggggaactaaatatacgggcaaaaactatgattaacacattcaacttaaacatgggttagatacttacctgcaaccatctccaaaaatagtgggatggtggaattgatgggattatgggactaaataaaatctcaaaaaggcaaagtagcataagtactaattcacaagaacattgttccggtaatgttagtgcaaaaaagttatactactagcctatagaacagagccctttgaacaataaattaaaccaatctaagtccctaaaaatacttgcaacagacgtaccctcaaccatgaatctcacgtaaatggtattacaatcaaagtccaagccttaaaaacataagaaacagaaacaaaaactttcagaaatttaaaaaaaaagataaaaaaataaaaacccaaatatgc

SEQ ID NO: 4931 - DNA, 630 bp, Gossypium hirsutum
atagattaaagctgaaaatagtagaaagaagttggaactctagaaattgtagggttgtgaaaaacctatagtttctctctatcaattgaaaaaaaaaatgctaatgttgttggcctgaaaatgaatagaaagaagttggaactctactaatccgtaggattgggcaaaacctatagtttctctctattaaaaacccaggctttcttgcaaaaagaaaacctgataaatctagccctaaatttaaatcgtaaatatatcttataattttagcagtccataatatgttcctgcatcacatgggctaggaatagctatttaagcttatggttggaattgcaggggacttctcctgttcagggggaaaccacagtgaaaactttgctgaccaaagggctgaaaaaaagttatgaattggggcctggaaaggtaaaaaaaaaaaaaaatttttaaaaacggttttataaaaactttttttttctctctccgggggattttttttttttgggttgaatttttttttgggggccggtttccgggccaaccggggtttgggaaaaaaaaggaaaaaaggggtaaaattggaaaatttggggtttggggggggttttttttttttttggggcccccccc

SEQ ID NO: 4932 - DNA, 625 bp, Gossypium hirsutum
  misc_feature (25)..(27): n is a, c, g, or t
  misc_feature (616)..(618): n is a, c, g, or t
ttatcatgccagaacatttatatcnnnttttcaatatataaaattaaagttaaagtaaatgaaacgcaaattttttttgtagtatatatactgataaggaattgcagacgtttaaaagtagtgatgtgttaagttttttgggttgaaaataacatgtcatcaagccactaaagattggcctggcctattgtgggtgacagaagtaaaagataatcatcatatcattaattgttttcctttcaatattattaaaaagttaaaagtggtccagttggagaaccaaattttctatcgacccttttacttttaccttttttatttttatttttatttttatttttatcttctagcgtttagccattgcttgttcataaaatcactggtaactggaccatacatacagcgaggggtggcatgccgcatgtgaaagttggcttttccctcctaactactataaaccatctttgaagctaattttcaatgatgaaaagggataaaagttcgaccatcccttgtatcctgacataaatctagaaacccaccttgttcaaaaacaaaaaaaaaaattcaaaaacccccccttttaaaaaaacctcgggggaaaatttgttgcaannnaatttgg

SEQ ID NO: 4933 - DNA, 618 bp, Gossypium hirsutum
tattcattgttcttcagctagttgcttggaaatctgtacccaaagatgcacatcaatttctgaaaggggggtaaaatttgtgaaaatattaaggccctatagtgaaatttgatgtggcagattgcactttttcatcctgataatgacatgttaaagacgatagctcttgattctaaccatcctttctcaaaggagcttgtaaatgttggagctaacgatgcaatatctgcaacagcacatgctaagctgttgggagcaaaacttatgtcttcaacttcaagggtagaaactcgttactatctagttatttacttcttttctatctacactgcatatagctatttggtctaaggaatcaaccgaacaccaaatattattaggatggtattttatattttaattttttatataaatttataaaaaccaatttaaacccataataataaattaaatatatatacttatcattttaatcgaagtttatttatttatttattacattaattttttataaatattttccttacattttttcattcacatcatcggtataccataatttagcctgtatattttataatctttaattgagttgctgtctagagtaaattgagcacc

SEQ ID NO: 4934 - DNA, 670 bp, Gossypium hirsutum
catccttaataacttcgtggccttcgagcattgttctgagacaagctccaaagactttactgcttatgtctctttcatgagtaagctcattagacatccttctgatgcagagttgctatgttcaaatggcatcatctcaagattttcccacaatgagcaaaaagtggtacaatctttccatatgctttggatgaatattctagatctcgacgtccaacattcctatctttccaagaggttgaaggaactagaatggtactatacacaagatgggaaaactcggccttggcggcgtcttgtgtcgagatattggagaatttgtttcttctgcatcacaaaccttgtgttgggtttcaaccgattaagatcaggtgttaatttgatgatccatttcgtagagcaagttaaatttaatggcataaatggagagtttcagggtgacattacatgtcctcaagaccatacctcttttatctgcgattctgtgttccgtatggctgggtttatatataaaagtgcaagaggacgtgtaaaatccatagacttgagccttagaaatagcaaattcatggctttctttttcctcaatcttgtcattgttattataatactcatgggtcatgaaattcctcctcctcctgcaccatcaccacgccaacttgatgagaag

SEQ ID NO: 4935 - DNA, 635 bp, Gossypium hirsutum
  misc_feature (630)..(630): n is a, c, g, or t
ttatggtctctctcacaggctgcaagtttgaggattgcagagcagtacattcaagccttcagcaatattgccaaggaggtaaaagggagatctcagacttgttattgcaagtggtaatgttgtcaaagtttattcattctatcatcctgcttgaacttggcctttttgttcatttgttagggtacaacaatgttacttcctagttcagctgcaaaccctgccaacatgattgcccaagctctcaccatgtacaaaaacctggtgagcaattcttctactggtgattctcatgtaaacaattctcttgagctatccagaagcacaaagcatgctcctcctggagagactgaaggcgaaatccctaaccccagagctgtggaagcaagggacacaaatcatgttggtgaagtaggattttcacttcagagctccaagaagaaagaatagaagtgattttacccaaattcccattgcctgaaaaccagattttgtttctggggttcttgtacgggcacgtctttggtagtagttaaaaggttctgaaaattaccaaaaggaagtcaaggatttaagggatttttagaatttgatgaaaggatgctcattcatttgccaagtgtttagaactgncatgt

SEQ ID NO: 4936 - DNA, 625 bp, Gossypium hirsutum
agaatctgcaccatttgatgtagttatccaggactttcaagaaaacctcattgattgctttctcatcaattttctagaaaaaatggaaacataattaatgaaaaaagaatttgatcagcaaactgtaagttatataggatgcctaacttgaaaaaataaacaaggagcacatcgccaaacaaaattagtagttgcaaactgcaaagaaaagcacctaacctaacatgctatcgcaaccaatttcatccaatcccttattttagtgctaaatatgggtcagtttaaggcttctaaaatccacaaaaaatttactattatataatttcattaaaaaaattaacaataatgagaaatttcctaaaaatctagccatccaggtttaaaaggaaagcttggcaatacataaaaattagcatgtttgtaattagctaaacccctaaaccatctccaataactaggccagcagtaaaacctttgcatacaacatcaaactattaagcttcagttttcaaggatatctaaaaattaagcattccagtttacatagcacgtaaacagaattttgtattttagagcatagacagtaacataaggagttcccctcctataatccagcaactaaaaa

SEQ ID NO: 4937 - DNA, 636 bp, Gossypium hirsutum
acatccaaacttccccgttaaacaaaactataaaccaactttgttgatgcccaaaagaaacaaaaaaaccaattaaaatataaattaaacaaaggggcaactaacaaaatgaaaaggtctctgtgtaattattagcaagccaaagaatgcaacaactagtcaaaaatccatatggatgctattgcatcacatctcactacttcaaagtgtggtaacgcatgccttaagagaaaaagaacaaggtgtgcttgttagaatgcaagtggaagggtggatggaagatgatggacagtggaaagaaaatgattttaggacgtgcttggtaatagaaaaaactgtggaacgaaaatggaaaagatactaatattctgcttttattcacaatatcacattattgcaaattgaaaggataagagagaaaagggtaaagatgtgagttaagtattatacatcaacaagattattcatcatattcagataaactttacaaagtaatggattgaaagaaatttatatttgctttcaacttctgcatctttcctaccaagaatggaaagaaaattatgttttcaattgtctcttccatttttctatcattttacttttctatctactctaccaagcaaagcacatgag

SEQ ID NO: 4938 - DNA, 600 bp, Gossypium hirsutum
gatcagcttatgagtttcctttttaactcgaccacatatacttagcttaaacccctagttgtaatgatccacaaaatgagttggttaaacgttagtccaagtggcattccatcttttatcctccaaaattctgcgcactttcacacaatcaaatggattgcttgccccacatgtctaatcttcagtgtcggttgtatcttaaagtatatgttatgatactaattaacatcttttataaaatttaaagacctcgctatgtagtggtggaaatgatggttttttctttgaaagtttaatgtggttgaatcatggatgcttcttcaagtttgaaaggaaaagagtgggtaaaattgtgcacattgttcctatcctagtcaaaatgtagatctagtgctatatttagtcaataattttgccccctttacttttccagattttgaaactcaattcaattttaaatggtgtgaaattttcactgggacagtggcattaacctccaccaatggtgaaaacttgacatcatttaatagtaaattgattttttgaagtaaatttaatttcaaaatctggaaaaggagcaaatttatttgaattattaat

SEQ ID NO: 4939 - DNA, 618 bp, Gossypium hirsutum
gtcagactccaccatcggttcagttctcttgcaccaaccaggtttaccccttgcagccccattgacgttaaattttacgacacccgcgggtggaggagtccaaagccgcctgtgcatggtgcacactgcaatggatgtttccatcacgctctttcaacgatgaaagcatctccccagtatgcttgagctcaaaagattgaccttttaacttctttgtgaaaaatagctcatccgccgaccatagtgtaccttgaaatacaaattcgtttcgagtcaaccagatccaccacaggaactcacaaggaaggatttaagattaacaggattataccaaataatagcccgccaagagaaaatttgctccagaatactcggatccactcacactcatcatgagccattaaaaatcagtggagtttgggcggggcttttaacttccataacatgttgtagttgaaatttcccaccacacagacatcattaaaaaaacacattacatggtgatttgacagaaaaggagccagctttgtcgttgcggtcccacaaagaaagtaaaccactcacatgacacactgaatggcactaccaagcccccctaatcctcgttaccatagggtg

SEQ ID NO: 4940 - DNA, 619 bp, Gossypium hirsutum
cagatttaaagaacaccttcagcactccaggaacataaaacaatatccaatatttcccttaaaattgatatgtttcgagcagagtagttcttcccaaggcggtaaaaactactatatatgtaatccaccccctccctattaagcacttttgtaactcaataatcatcttttgattgtactctttttttttctttaataatctaattaatttactcttgaggctttaattttgtgagtaaaaaccatgaatcaatcgcggtttgcctatgtttaaatattccatctccatacatttttcttttgtggcttaaactcatccgatactatctactgcaaaaataaaaacaacttgttccatgaattgtattggtatcttaaactttccaggttaatcattttttaagtttatcctaatagctacgtagccatatatatatatatatatatatatatattaattctacttgtttataactttggcaacgtgaagaatatgaaggctaaaatagaatttacttgaaccccattgttggtttttaattgtttaatcctacggaacattccactttctttgtgattaaactgattcttattccccgatagctccccttaattgctt

SEQ ID NO: 4941 - DNA, 630 bp, Gossypium hirsutum
atgggaaaacccacttgagttcagaccagagagtggaggcaaggaaagaagcagtttttggatgcgaggggacaacacttcagcctgttgccatttgggagtggaagaagaagctgccctggagcttcactagcagtacaggttgtccccaacagtccttgccgtaatgatacaatgttttgattggaatggagcaaacagcggggttaatatggaggaaaaagccggaatagctcttcttaaaccccatcccttagtatgtcacccagctgttaggctctctccatttccctccctaagaatattctcattactgttccttgtcttgttccaaaattttaagcctaagcccagaagccaatcataattcccttgcagtgttatttgtttaatataatgcaacattaggattgttcttattaatcgaattaatagaaatttcaaaatgtttaattgttatttctttacttgagaaaattattaatccaatcaatctaacttagtttaattccgtctatttttataacaatttttccctttttatgggatttttttttcaatttaaactgaccaatgcttttaataattttcataataattatcatcttcgaaactgttcagtgctctaat

SEQ ID NO: 4942 - DNA, 503 bp, Gossypium hirsutum
attatggcactgcgagatattcgattccaagagttgggaatggaaacaatcagacgatttaaagttgacatacgatgactttttcaagaacgagcaaggcgtttctgcatgcggcggtatccattggcttatttccaacagagaacaagacaaggacatcgtattatctttcgacggtcacaaagaggaatggacaatggcttcgttgccgaactcacttcgtcgaaaagaatattgtgagcagatagcacttgtgtcgtgtgaagggaacctggggttagtaaaggtttcttttaaaactagagctcagatggtggatgtttgggttttaaactatgaacacatatggattagaaaacacgccatgaatttgaacaaagagtgttatcttactcgttttcattcattttacagtgctgacactctggttatgaaggatatgtggagtgtgtatttttataatttcaagactcaaaagttcgttcgggtaacagctggtaatc

SEQ ID NO: 4943 - DNA, 659 bp, Gossypium hirsutum
  misc_feature (651)..(655): n is a, c, g, or t
aaccaaggttacgaggtttggaaaagaaacccgcctgatcccttgacttgcgtcacaaagatcgacccacataacaatctctaagtacatgaatcatagtctcttatgcgaatccccaaacatcaaaagaagggtcattggacatttccctttagaacttctccatgtttgtcgagagcttatcctgtaaagcaattcataagaattgcctagtcctttgcggtcctcgaaagagccacacatctaccaatatgaaaaccaagtttgtcagcaaagaacaaatgtgatataagcgaaccatgtgtggacaatttaatcagtttccgccagttttccctcgttctcgttgaatagaatttttttttaattttggcctctcttaaaaattaaattatacaatttaagttcttttagaatacaatttttatattcaacccctcaaaattttaaaactttatctttaacccctaaataaagtttttaactttgtccttattcataacacgataaatgttatggaaagcatagttaacgttttccaactttaaaataagtttggttaaaatatctaaggttgattatagtttgtgcagaaaagaaaaaaaggaacctatctataatagtggcaccgaaattcttgacctaattgtnnnnnttgg

SEQ ID NO: 4944 - DNA, 613 bp, Gossypium hirsutum
tggtgactggagctttgtcaatgaaacctagtggaagcagaagagttaaaatttttagctaaagggatcagtgactgcacaacgtccaccattagaggtcggtaatcagcttctggttgcacacacatagcagcaatggcagccacctgtggaaatattataagtttcgtcagcagcttggtgaaggcattcatttgatggtatattgatttaaaacattaataaatatcatagaagcaaactttacctgaattagatccttctttgaatactgtccttgtatagctggatcaaccatttcgtctattttctctctgtttgttagccttggaagtgcctgttaaattgtcaacaatatctaagctattcatggcattgaaattagagacttattttaatttcaaaaagttgatcatgttctagttgtcttttaaaccttgcaggtgcaagtttaaattgtaaaaagctatacatatgcgacatttgtgtccaatacatatgagagattccgtatctaacactaacccatgaaacaaggacatgttctccaggaggcctcttgatgtcaactggtacgcggcctgttaaaagctgtaaaagcaccacaccatag

SEQ ID NO: 4945 - DNA, 597 bp, Gossypium hirsutum
  misc_feature (48)..(50): n is a, c, g, or t
  misc_feature (510)..(512): n is a, c, g, or t
  misc_feature (541)..(541): n is a, c, g, or t
cattttcgacttttttttatttctttctttattattttttttatgacnnnttattggctttgacatgcattttgctttaataggaagcaaagaattcttcttatgtcaaatcttccaaggaagcaagttgacaagctggctgacaacattgccaaggattttaaccatattgatatccttacaaagagctataaaaacaatgtctttccttcccttaatttacaatttccaactacgtttccctttcatagttattttcaggcctgggtaaacaccaactatgtttcccttccatagtcaataaccactgtaaaacatttcaaaatattcatcagtatcgttttaacttaaaaatcgtgttaatgacagggcgtcctttgttggtgatgcactttagtaaaggaccttgtcctattgatctaactaaagatattatcccgaaagagcacaatgtgagataaaataattgacccttttatgcgggggggggggggggggggggggggtttnnnttaaaaactaaaacaaaattttttccggncaaacccaaaaaggggggggcccaaaaaaaactttttaacccatttggggttttgg

SEQ ID NO: 4946 - DNA, 900 bp, Gossypium hirsutum
  misc_feature (615)..(665): n is a, c, g, or t
  misc_feature (667)..(670): n is a, c, g, or t
  misc_feature (673)..(685): n is a, c, g, or t
  misc_feature (687)..(691): n is a, c, g, or t
  misc_feature (697)..(710): n is a, c, g, or t
  misc_feature (712)..(712): n is a, c, g, or t
  misc_feature (716)..(727): n is a, c, g, or t
  misc_feature (729)..(746): n is a, c, g, or t
  misc_feature (748)..(751): n is a, c, g, or t
  misc_feature (753)..(759): n is a, c, g, or t
  misc_feature (762)..(765): n is a, c, g, or t
  misc_feature (770)..(819): n is a, c, g, or t
  misc_feature (821)..(821): n is a, c, g, or t
  misc_feature (828)..(831): n is a, c, g, or t
  misc_feature (834)..(843): n is a, c, g, or t
  misc_feature (851)..(883): n is a, c, g, or t
  misc_feature (885)..(885): n is a, c, g, or t
  misc_feature (895)..(896): n is a, c, g, or t
caaatttgtaccttttcataaggctcaatgcaaacctttgcacaattgatttgtcaagaacatggcctccgattctatgaatttctgcacatgcttgacataagaaggatatcacatagagagacggcatagacgggagtgatattttcatctctgatgacccctcaccagattgttcttgcttaacaattatctcttcccaaccctgagcaatataatgaataagctaataattaacataattgcattttggaacttaatatgcaaaaaagcaatatacttaaattacacaaacaaacaatacgaacagaagatagtctaaaaggtataaaataccaatcaagcctcagtcttagtgttcaaaagttttaaaatcacttgagaagaagcaaagtgcaatacttctctcatgatttccctattgcaagattctaaaatttcattcatccaattactaataaactaatttgttgcattcatatatcaaatttcaagattctacatgccaaaggggaaatgtaagatataaatagataactatgatgaacttgtatcagtgtgtgcattgcatacatgcaggagaacacaaatgttgcatgtcaaaagggactatgnnnnnnnnnnnnnnnnnnnnnnnnnnnnnnnnnnnnnnnnnnnnnnnnnnnannnnggnnnnnnnnnnnnntnnnnngggaannnnnnnnnnnnnntnttannnnnnnnnnnnannnnnnnnnnnnnnnnnnannnntnnnnnnnggnnnnaaatnnnnnnnnnnnnnnnnnnnnnnnnnnnnnnnnnnnnnnnnnnnnnnnnnnanaaaaaannnnaannnnnnnnnntttctttnnnnnnnnnnnnnnnnnnnnnnnnnnnnnnnnntntttttttctnnccct

SEQ ID NO: 4947 - DNA, 604 bp, Gossypium hirsutum
tgggcaggctttcgacggctaatgttccgaagaaggtgtttctgacctcttaaaaacccctcatttgcaaattcccagcggtctggatcaacctttcggaaaccctgttaaaatagaggcaagaacaaaaaatatggagaaaacagataattcagcagaattgctactgacaataaaaaaaattaaataaatatcggtcccaagggaatgacaaaaaataaaattcatgggcaatcactaacaagcagcgcttggaactgattggaactagtttaaataaaataaatcgaaactgttctttcagcttgtttggaaaatgagccaagactgagcaaaatgggccccacctctgatccccagtcaaggacaaagcttatcactgctctaaactctgaaggcaaaaaataccatataacgagctcaaattgagctcagaaatttgactggaatagaatacctcaatagaaactaatacagggaaactcaagtaaaagatggcagcttgagtcaactaaaccttgaaattttaattagaaaaagttccagcattccgataaccatcacagtcgaaattcctattttcactggaggctgtagaacaaag

SEQ ID NO: 4948 - DNA, 463 bp, Gossypium hirsutum
acaagaaaggtcttcctgtaggtaccaggttgaagggtgcttgccaacagctcatcgtgcttcctactcagatacaaatcaagctcatacgcccctttcttagttctacgacacacctcccaaaagaaaagaaaggggaaatgaatgagaacaagccatatatgtgataacactaacatgagaaccaacataaggagttaggatattgggattaaagaactgaccgatcagcatgaagacggtggtattcaggatcataattcatgaaaacaaagtatgactcagtttttgtgcttcccatttcccactcttaaaagtatcccttttttgtctttttcgttcttcaagtttgagttggtcagtttgcattttcagctgcaaatggggtagatatttatacatgtcaatagtgattaatgcatataaacacttgcatgcctctcaacctggtatttccattgtt

SEQ ID NO: 4949 - DNA, 977 bp, Gossypium hirsutum
  misc_feature (550)..(575): n is a, c, g, or t
  misc_feature (577)..(610): n is a, c, g, or t
  misc_feature (612)..(612): n is a, c, g, or t
  misc_feature (614)..(674): n is a, c, g, or t
  misc_feature (677)..(813): n is a, c, g, or t
  misc_feature (815)..(819): n is a, c, g, or t
  misc_feature (821)..(834): n is a, c, g, or t
  misc_feature (838)..(863): n is a, c, g, or t
  misc_feature (865)..(865): n is a, c, g, or t
  misc_feature (867)..(875): n is a, c, g, or t
  misc_feature (877)..(886): n is a, c, g, or t
  misc_feature (888)..(932): n is a, c, g, or t
  misc_feature (934)..(974): n is a, c, g, or t
cggaatatctttttttcttctaaaatgacttaccctttaaaaaagcgtaagtcattgttgggaaaaaagctcctcaatagataattttaattttattatattgataataaattttatttttatttttaaaaatatttaaaatattaatataaaatattatattttttaatattattaaacatacatatttaattatttatatttagtcatataataaattattaatataattaatataatttattatttttaataaattatttaatatttaaattttattttaatagtaacttttaaaaataataattttaaataatattattcacatattattgaaagtatcaatattaatattttaatactaaatatttattacaattataaatatattaataataaatattttgtaatataaatgttaaaatatgtcataagtctatatacacttcacaaatttataatttagtttctgtacttttgttttcaagaatttaatccttctattttccagatttgaaaataaagtccaattgctggcattgttaaaaannnnnnnnnnnnnnnnnnnnnnnnnngnnnnnnnnnnnnnnnnnnnnnnnnnnnnnnnnnncntnnnnnnnnnnnnnnnnnnnnnnnnnnnnnnnnnnnnnnnnnnnnnnnnnnnnnnnnnnnnnctnnnnnnnnnnnnnnnnnnnnnnnnnnnnnnnnnnnnnnnnnnnnnnnnnnnnnnnnnnnnnnnnnnnnnnnnnnnnnnnnnnnnnnnnnnnnnnnnnnnnnnnnnnnnnnnnnnnnnnnnnnnnnnnnnnnnnnnnnannnnntnnnnnnnnnnnnnntttnnnnnnnnnnnnnnnnnnnnnnnnnntntnnnnnnnnntnnnnnnnnnntnnnnnnnnnnnnnnnnnnnnnnnnnnnnnnnnnnnnnnnnnnnnntnnnnnnnnnnnnnnnnnnnnnnnnnnnnnnnnnnnnnnnnnttt

SEQ ID NO: 4950 - DNA, 653 bp, Gossypium hirsutum
  misc_feature (645)..(646): n is a, c, g, or t
cttagttccttcaactttgttattttaagaaactatattgaataagaaaagcaaacagttaccagatgagactgcacatttgctagtttcttctcatcaaactcgtattcctttacaggaacttttgctgactgccattagaaataaagaaatgaaataaacaaattagaatcggttctttaattgacccaccactaatttcgggccgtgctgtttttcatactcaagcatttaaatcttaataacatccgttcaaccatgcaccacaccagaagtacagcttactttttctctcttgagaccctaaatattttattgttcacagttttttaaaagaaaagtgcctttactctcctcagtcctcaccccatttctatattcaagaaaaataataagccatttggcagaaataatgcacctttagatagcgaagaaattgcagttcctctgggatcaggaacagaagagcatttccttttgcaccttccccacgggcagttcgaccaaccctatggatatattcctaaaagcaacaatccaaagtactcaagatggatggtacatagcaaaacacaagaacagcaatatgtatttatataaagagcacacacctttggttcatccggaagaacatactggaaaacnncatcctg

SEQ ID NO: 4951 - DNA, 617 bp, Gossypium hirsutum
ttgcaaaagtgaagtgaatctgctcaacaaatggttgcaattgtgactaaccatgctgaactaaaccacagttgcggagggagagaattgctgaaagaatcagggggttgcaggaacttgttcctagtgttaacaaggtcagttccttatgcttatcgcgtcgtaaatttacttctgttactctaactatgtgcaaatattgaatgggctaatgtcctaattcctcgtattgtaataactttacagttgattatcgttgtttaacttggctaagttgcaatctttttgaaacatgggtggctttaatggtagattttatgtcttgggaagaaaaccatgtataatgcatcttactccatttaaggtcatgtatgtttctttgtgtagactgatagagcagcgatgcttgatgaaattgtagattatgtgaagttcctgaggctccaagtcaaggtatcattaactattttacctgttttctctcacatttcctattcatatttctgctttactgaatattgtgttgctgctcatgtttatgggatcagtctttgataccttatcagttgaatatgccttgtactttcagaagttttcctctgtcatatattcaggtc

SEQ ID NO: 4952 - DNA, 605 bp, Gossypium hirsutum
attatcttatcatgttaattataaatgttagaaaagtagaatatattcgagtaatttttcctcccaatatttgcagcactggactatttggaaagttgcagcagatcatgcagcaagaaaaggagacagatacgcattttcttatgaagttacagaatggagctagctttaaaagtaacatcttgttattgtttgccttatccctttagcaaattttgagggaaattgacttataaagactgcgtcacatgagcaattaacgaaaaagttgtttatgggttttgatacattgcttattctttgctcttctttattctcctttttctcagatgagccaagctgcattgccgtgaacattgtttcaagatatttggatgcaaaactgacagtctgttattgctcttttgtcaagaccatagaggtttggaatcttgaagaagttttaagatgcagtaccatgagaacaaaaaacttagaaactgaagttatacgtgtgtttttgcagggtattttgcagccggagagccccaaaatattggaaaatgaaggacaaaaagtaactgttattttcaatcaaagaatatgtgccaatgttgaccttgaca

SEQ ID NO: 4953 - DNA, 639 bp, Gossypium hirsutum
tgctcccttttcacatcttccacacttctatctttccatggttcatctttataactagttgtacttgctacacttctattgttctatgtctacctcatggataataaggtgttattagtattattttctttgtagtggttttgcataggtgaattcaaagtgtaatagagctagtatgatgagcaagtatttaagcagttgttagtgcctagacgtgagctcagccaatctcaagtctagtttttcctattcaaaacctcaagtaagaaggccggccaattgaaatttcaagactacctctgatttagaagcatgactttaagacattgctgtgtttttaagtcttttgtctcatagttatttacgcaatttttggtgatcgatcagaatgagagatgtccttcaaggaagatgaaatgggctcgaatgcacttgagttcctgaaagacaaacgtgagttaagggtgcactggagcttatactgggccaacacttggcctaacattgtaccaagtttggcagcctttatagtagagactatttttgtgcttgacagtttgcatatttaatatttggcataacacttcgattagatttgaactgtacatataattcttttcatgcgagttctttctcaag

SEQ ID NO: 4954 - DNA, 615 bp, Gossypium hirsutum
cattcgacgaggagtgaattcaactcccggtggacccttgagaggattctgagtgtctttcaagaacaatgcggtggcaataaacatgaaaacatcaaccacagtattcaaaaacacctgaaaagaagaccaaaagatggacgtaattctccaaaaccatgtatggtcattcttcttttcttgcttcttgattggaacagttggcaaagccagaggatcattcatttggcgagtacaagcgagtagaagagacatgagagaagtcatcgccaagggagtgatggatcctgaaaacaccaacggcctcagattctgaggatattaagttgagcaaatggaggtcccaaagaggctgcgattcgtcaatgctggttttgctcaggttgtaaatgtaatcctccaggaatttttcgggtgaatcaatgtttgggtccagctttggaacaatcacatgtttttccaaatccacttgagttcgaacccatttcattcctcccttgtttctctcatccatcacctgacattttcaatacagagaagaaggggaaacaagtaaagcatacatttttgaagtacccagagaaatttaagaaatttgaatatgaattcgagcat

SEQ ID NO: 4955 - DNA, 599 bp, Gossypium hirsutum
  misc_feature (592)..(593): n is a, c, g, or t
  misc_feature (595)..(595): n is a, c, g, or t
gacatggcaatagcaaatcatgaatggactatggcttctccgtttgccaattcatattccttgacttttgctgctaaaccaactagctggaattcatatactttaaagtcaattgagtaaagctactatgaacaatcaactgaaccaaggttggaccacggaagaaaaaggcaaattttgctgccatggagtgtcaaactaacaaagtaaaagtaccatacaaaagtaaaataaaacatttctatgccttttcctggatcacatgatacaattaataaattaattagtaggggattagaaatgctcatgagtcaagctacatcgagtcaagatctaattggtcgaaactagaagtgttcatagatcgggccgggttgaagctcgatttcaaaatatttttcaagcccagatccgtttgcggattggaccacccaaagaatccattttactattcaaaaaattagtaaaatattaaaaatatattttttgttaccattttatatatttttataattaaattttattttaaaaatattgttattctttaaattaaattcgaattagattgaactgattcaaagtgcaaaattcnntnccaa

SEQ ID NO: 4956 - DNA, 599 bp, Gossypium hirsutum
ctaggggacgaccagctgacggaccttcttctagcctagtattacctcagtggtcaaagggtagagtgttttggacgaataagagagttatcgtgattgctgctgctgggattataacacttattgttcttggagtggttctgcttttggtgttgagatgctttagagggaacaaagattctaataagcatggtgcaaatgcatataacatctccggtaaaaagcttaaccaagttcaaaaatcttcatctcgaccggcttatcaaacggagaaaggtaacttaattatagtctatccttgtggtagatcttgtaaaattctctatgtaattcaagggcactatgtttaacagttgataaagcaacagtcatgaggccaatggatggatatggactagaaagtggagatacgggaataagtccaaatttacaagatgaacagcttcttgatgcaaatacaaggcctgcaagttcaaggcaccagaaaaatcatgagataaacaagggaggtttggatgtcaagtccttatcaatacggccgccactacctcctcctttacttcctactgtggaggaggccagtgtaagcccaataatac

SEQ ID NO: 4957 - DNA, 617 bp, Gossypium hirsutum
agtctttaagctttcaccaattcctgttgtaaggttacttgcaaactaatcttgttttatttggtttcctgctttgccaacctgaatattgtcactgaattaaacgagaattatgatgattttggtgatcatttgctttagttattaatccactttgttgttaccgccattcaaggataggaacagagtggaaaaggtaaagtgaaggaccacacgttgttgccacttgcctccattacaatcaaagaattatatttttgcttacttttttccatcgtgtaggtccaacattggccaagacggtccatcttttcgggctcaataatccagttatgaattatgattaaaacaagaattttcatgctttctatcaaaatatattattatgtccttttctttttcttttgccgaatatcagtctctttacaacactttcttgctgtcttgtgttatactttaatagcaataatagcaggctaattttctcttgttttcccatttgtcaaagaggggtctggtcatcgatttccgtgtatatattttacagttcgtgaaatcaaaattggaaaaaaactgaaaaaaaagggggtcaaaaattttacctaaatggaaccccc

SEQ ID NO: 4958 - DNA, 638 bp, Gossypium hirsutum
gcaacgtagatcattttgactctccaactgtttccactgctcatacaaatgggggccatggcggtcactcgtcttggcatcgtaggaagaggagtgaagcgtgttttgatgagtgcaggtgccgtagaatcgagctcaataaagaaacctacaattgacccataatctgagggaggcggcatcagtgcctcctgattttgggtcctagattttgataatgcctaactagtagttatcggggtctgccgttgaatcttaccatctgtagtagcaaactacagttttggttgcctgtattcataattgatatattctgctgtaatatgcttctgaaaaactcttaccattttcgtgcaaagctctcatctagtagtgtatctaatatgtaattgcggtacatcaatggttagatataatcatttccctacttttaaaagcctgattggaatttttgtattgccacatgcatttatccttttatgttgctattggtgaatcttaaacagtgccaaccttttttaatgcattgacatatctatcaacaattattattattattattattatgaaaacaggggcggaaaggatagttgcgagtgaataggacgacaggaatataactaggcaaagcgatacaa

SEQ ID NO: 4959 - DNA, 250 bp, Gossypium hirsutum
ttcatacaactacataacaacaccaggacatgttcaaccttgcggccacagaactagtgaagggagatttgatcatcatggtcataaccgtccatattctccatctataactcaccatgcattcaacctatcctggttctgcttccaacccctccatggaacttacagtcaaaatattttgcaaatctgatccaaatcttaatctttcagttagagataacaaggttgttcttgctaaaactaatccctc

SEQ ID NO: 4960 - DNA, 627 bp, Gossypium hirsutum
tttaagattctgtttcacaacaataagttgttctaaacagtacaattgtttaaagattgtaagcagcctggaagtaaatttcgttttctagatagcttcaacttggattattttcgattttacgatcaattatcaagttatatacctatgttcgagtaccatctatgtaaaccatgattaatcgtgagttgaattagttttacgaattaattattcaattcagagcttatatacctatgttcgagtaccatctatgcaaaccatgtttaatagtgagtcgagttagttttatgaattacttattcagttcggtgctttataagttgtaactttgggaaagatgttttttgaaatttcagcttgagcttccttgtgcatccaaggatagcttttagtgcaagtaattataacttttaaattcataatcaagaatttgagggtatctcagtaaaagtaccatagaggcccttatactagaagtcagattacattttgtcatctctactcaaaaaatgagaattaatacatgtacgttaaatctaagagtaaatttaccattctattaaaaattggtctttgtatgacaatatgcaatatatgtggcatgttgtatgtcgctgtcttatt

SEQ ID NO: 4961 - DNA, 649 bp, Gossypium hirsutum
caaactcctcaatactttcaagaagctccttctgaagttcaccttttgtcactaaagatacagaataacatacgcacaaaagggatccattagatggacacagaccagaatctgtaccttctatatttatataactcgcatcattttccaccacaccattcaattcaggttctttccctcccaaagtttcattatgctgacagttacaaacagataggcattttacaacttccttgaaaaagatttgtcgataaaacttaatatcaaagacattggctaattgtttttctttctccaaagacatatatgtgtcctttaaatatgcattcaaccatgataaaacttttaaggaagcactctggacagcatcattttgcttcttatacaaaacatcgggtgcacactccaaaatcaaatcttgacactttgcgtatatttttacttcacaagtaaaactgcttcccaataccgccaattttgggtcaacatcaacagattcattttcattggcatactccctctcttgctcagctgattctgaaacctcaggtttattgtttgatcttgacaactctgatgatgcttttaaaggaatacttgagacacaaaagacaggttctaatagccggtactggcgacagaatgaatg

SEQ ID NO: 4962 - DNA, 710 bp, Gossypium hirsutum
  misc_feature (656)..(657): n is a, c, g, or t
  misc_feature (675)..(680): n is a, c, g, or t
ccccttttctgttattctacaatgtaatgaatcgtcatatgagttagtttaaccagaatttaaagattttaagaaaaatccatctaaaaaatgcatgctttagttgggagtcatattgtagtttctaaaagattctttcctgtaaagtatcagttcagctcatgaatgaaggattctttaattaattctcattgaagtacaacctgatgcagttgctgcgatggctgctgctgttgcaactgctcctgttgttgagaggaacaatgtgacatttgactcatcttcttctgttaatcacccagcaaaagttacatgagacacaaggcatatacaatagtccatattaacagagactgactaccgtaaatcatcagaacgaaagcaactccagcataatgattaaagagttacaaacatcaatataacccaacaggtcaaagcaggatttaataaaagcatgtcagtataccccaagttattggtgctgctctcacacaacacttatagatctggaacatgcatgtgatcctcattccatatttggaaatttaggaaaaaaatcctttcaataatatgatgtagcttctctgtttctggaaatagtaaaactcaattttcatgagtagccttctggtatcaggaaaaaaaaaaagagnnttactatttccagaaacnnnnnnactacatcatattattgaaaggattttttt

SEQ ID NO: 4963 - DNA, 465 bp, Gossypium hirsutum
  misc_feature (435)..(435): n is a, c, g, or t
  misc_feature (438)..(439): n is a, c, g, or t
  misc_feature (450)..(451): n is a, c, g, or t
ctgaggttctcaagagcagatgactccaaggtactccacagctgggcaatgattttattacatgtccagttccagctctgttttcatgaaatcatgagttaaaatctcagtacaaaagatcaaacaatttcacaaccaggaagcaaaatctaaaaccaaaacatatggcatttcttttcagacttttttattactttaaaatctttaaaaaatcatttatcatgaagacttttaagatattttaatataaaaagttcaaagcttttgattcagccaggggaaattcatagccaaatattaccattttgctaattttcttttctacgttttctataataaaagaaaaaggtaaaaattaccatattgcatgcaatcagctccatcaatgataagatgtcaccgatgtcacacaaggtcttggtgacaactgatccnganngtataccagcnnaactgcacttatct

SEQ ID NO: 4964 - DNA, 618 bp, Gossypium hirsutum
aaaccattctttttatattttgtttcattctttcttaaacaaattcaaatattgtttgcttatgatgaaaccagtgttgtttgaaaggactggcaggcaggggtaccaatgtcgttagaggtgtaaaaccggttcatcttgaaaattggcatggatcaagttaaaaaaattgacttgtttttttttataaaaatttaataatttattttctttgaattcattgataggaaattgataatttgattggtttgattattgattcaattctaaatacattaataataaaatagatatagaatctaatgcccttaaattgtttatcctctgatttaaaattttgagtactatgtgtagcaataagaattgtataaaaaaattaacgaatatatcacgaaagcaaaaggaatcaaaattacagccaatgaacaaacttaagattgataaaaatttatcttttatcactccacttgttattcaataaatttttatattttttatatccgatttactatccacgataagagtttgtgattatttttctcatagtcttcaaaattcaaatatgcattctctctttaagagtataatatattttaccactacccaatacttcaggga

SEQ ID NO: 4965 - DNA, 636 bp, Gossypium hirsutum
ggctccatccacaccagctgtatctacctatctgtctgatttttccgagaaagttccgtttgcaactttcccagtggtcaccactctttcattatttgcactccgtttttcaccacattatccatctataaataatttatatatgtactcatcaaatttcgattaattacaattcaatagcctgacaagataaactttttggtggaccttactgggcttcaccgtataagggtatgttggtagacatatataggaatcatttatgtatagaaatccgccataattaaagagaaagtttcttagtccaatatcccagaatagttaaaacaaacgagggtttttttatccatatttaaagtaaaggggcagtccactgtgtaaacagtttaattacttgtttagcttaaatatgtctattatgaatatgccaatgactgacaatatatatgccaatgccaatggcatggagcatctgttaaaaaacgctttttcctttgtatttttccatttatttcttctctcttaaaaaaccccattcttgttcactcttcttttttgtttgtttccatctggaatcagaaaacaaaaaccggtggcaccgacaaccggttttccgatcccagatctttcactctc

SEQ ID NO: 4966 - DNA, 649 bp, Gossypium hirsutum
tattttgttttttgatcatcatcataataaattttctaaatttagcctctcctacattagatctataaaacataaagtgttcccaaaatattgtacatgaatctatatacaaatatggaaaaataagaaaaatgataaattacaaacacctaacatgatgccaatcacctcttcctttttctagaaatattcgtgactgacatagaaaaatcacgtgtcctagttcgtttttgacctgattttaagctgcaaaagactaggatggtgcagtgtcatcatcagaatcatagtgtgggttcccttgaaatccaggaaaagcttgttgcatcattggatttactggaactgggaatgtttgttgcatcattgggttcactgggactggaaatttatgcgcagaactaacaatggttcgttcgtttatcgtcccgacttccttacagactcgatcgagaaccgtaaggaaatccctcaccaccatgaagattctaaagggatgagtttcttcctttgctgaattcccatggaagtattcagtaatctccttgactagtgatagtgctagcctttcatgtgcttgaatccttgggatttcctgttcagccattttcataaactggttcattgattccgaaaatttctctttgct

SEQ ID NO: 4967 - DNA, 618 bp, Gossypium hirsutum
ttctcaagaagcatgatttgctctgtgacagttcctgctacaaagcattaagggaaaaaaagctactttaacattcaacatttaccataaattataaaaaggatttgttttgctctttaattaaaaaaaagtcctttaacttgtttttttgcttccaaaatccaaattagaaagacacagtttcgaagaacaaaataaatggcttacatgaattttcttctacatcttacaatttcctctttgtcaatgaaatttagttctgtatttactgtctaattttgaattttctaaaaaatattcaaaactatcaaataataattagtaaaagcaattacctagtaaagctcttcctagttcgttaagccctggaatcgctttcaggatcagcgtattctgcaaccaaaagttaataaataaaatcaaacaaattgattaaattaaattctccaattaaatttgcaacataaatccccacctgtttatcgagcggatgccggaaatcatcagcgtcgaggtcccgaaacacaagaggagaagctctggagtaaaccgaaaccctaattcttccatttctcctcttctccggtcggaatccgacagttaaaggagcgggaatct

SEQ ID NO: 4968 - DNA, 599 bp, Gossypium hirsutum
tggatgataatggataatgtttatatcaaagcttatatacatacatacatctcttatttgggttatgaactagtaattcaactgtgggaaatatagttattttataaatcaatatatacctttgattatttgtttggtatacatttactatttttatcctgctggtttgctgatgataagattgttcatttgctaacagtaaacaagtacaaggggtcagcatgttagcagttgaacgtgatatatattatttactgttgaattgattttcaggactcggaatgaatactcacactcaaaattgggcgaaaaattaataataaataataatttttggaagacctagaatttttttttaaaaattttaagagtttaatgagattttttttaaaattgggtctaactaaaatttttaatttttttttgagattaatgagattttttttaatattttaagtgaactaattaaaaataaaaaaaagtataattgaaatttcaaaaatttgaaggggtctaattaaatttttttaaaagcttcaaggagaaatattaaaaaaaaaacatattttcccaaatttttaagggggaaaggccctaaa

SEQ ID NO: 4969 - DNA, 564 bp, Gossypium hirsutum
  misc_feature (11)..(12): n is a, c, g, or t
  misc_feature (290)..(295): n is a, c, g, or t
  misc_feature (297)..(299): n is a, c, g, or t
  misc_feature (306)..(306): n is a, c, g, or t
  misc_feature (308)..(308): n is a, c, g, or t
  misc_feature (321)..(322): n is a, c, g, or t
  misc_feature (326)..(330): n is a, c, g, or t
  misc_feature (517)..(520): n is a, c, g, or t
gggttctcccnnaatatgagacagtaatgcaatttttttttatgtatctccaggctatggagaatgcaggaaagaaatttcttggagaacatgacttcagaaacttttgtaagatggatgcagcaaatgtacacaactacaggcgtcgtattacacagtttgaaatttcttcttctaatatgaggtgactatctatttgttctggttgattcaagtgagattatatatgcttatttcttaggcagaatggtagattctaagtgtcaattttaaagtgccatgaatatgtnnnnnnannnggataancntctgttactactnncagnnnnnaaggcggtcagctttgtgctattaaagttaaaggtagtgccttcctgtggcatcaggtgcggtgcatggttgctgtgctatttatgataggccaaggtcttgaatcagttgatgtgcgtgacagttattctcttcaactctttgttttcagtctttgataaattgctttgctaggtcagaggtggannnnaacagacactggaactaaatagccttccatcaaaccggtccttt

SEQ ID NO: 4970 - DNA, 611 bp, Gossypium hirsutum
ttctgttttactgttcagaatggtacttaggcagacaggttgctgatttttgaacaaaccttagaaggttagaaacgggaaaaaacggggagcggggttgggtggggcaaaatgtgctgtttctcttctgaatgtattttgtttaagctgctctgcctgctccatttcgtatgcttcttctacttctggttctaacttaatactagtagatgttgtttgacctttcttttcttttcttttctttttctccaaatatgtccttagcaaagcaacacagagtgtgggacttctatcttatacttttctacgccgaactggacaggatgatgtcattgttcctatggtaattcattgtatccttagtattttggattcttttccttgtcccttgaaggagctaggtttgaggatttggattaattcctaatgtccacaactcagttgctttttgtttcacttctgtttgcagattgattttgatatttctggtcattgggctgagccaataatttacagcacgcacgatgattggtcttctaacttgaaaactatcttggaatggtctcccttttcattaaaggaggatctactgctacaggtttggcaaacta

SEQ ID NO: 4971 - DNA, 604 bp, Gossypium hirsutum
ccactacgcattaagacctgtatatggtccaatggtaactatattattgtgatgcattttactgtatgcctaattctaccacctgtttttgcacttggtctcagttaatgatcaattgcattgatatgttgattgcttctctcgaaagtaattatctgtacattgataggtatgttattgattctggttacgtgaagcaacggcaatataacccagcaactggaatgtattcccttgatgttgttcaaattagcaagtaagtggatgacttaatgtttcttttggcttttgcagcatgttcatgtgttcctagtagcacaacttacagttgtgattctttttggtctttatttgtttgcaagttcaggctttcttgcatgatctaagttttactcttattttgcatcaaacaaatttatgttcttatctttcttttctcacttcagtgatgatgaattgttagtattcttgccaataacttttttcccttctttctgaatctttttttttttttttttgagggtaaaaactaatcaacggggtggaaaaaccggaaaaaaccctcccgggaaaggttaccgtttaatcccctcccgggtttaaa

SEQ ID NO: 4972 - DNA, 627 bp, Gossypium hirsutum
atcgtggagtcaaagaagtaactgaatggatgtcaaaggtacattattcgttggactctatagtttgtgatatttacctctacgaaaactccaaattggcagtagtttaagtaactgcaaattggttgcagactagtggtatcccagtttcagagatttgcgagcaccggtttttgttgtacaacaaggatgctacacagcacatctttgaagtatctgctggtcttgactctcttgttcttggagaaggtcaaatccttgcacaagttaaacaagttgtcaaagttgggcaaggtgttgttggctttggaaggaacattagtgggctgttcaagcacgcaattactgttgggaagcgtgttagaacagagactaacattgctgctggggctgtttctgttagctctgctgctgttgaactggctttaatgaagctgcctgagtcctcgcatgctactgctcgaatgttggttattggagcaggaaagatggggaagcttgtgatcaagcacttggtggcaaaaggttgcaccaagatggttgttgttaacagaagtgaggagaaagttgcagcaatccacgaggagatgcaaggtgttgaaattatttacaggcccttgacagaca

SEQ ID NO: 4973 - DNA, 604 bp, Gossypium hirsutum
  misc_feature (543)..(543): n is a, c, g, or t
ctttttggtcgggcaggcttagcctccatgatcctaattttccacctgaggaaaaatgcatatctacaagagacaaccctctttatgttgtcaatgaaatgaagcaagtagtcataatccaaaacaccaatgaagattctgagaatagattgcaaaatgaactgatggcagaaggctctgcactgcaatgtaagaagttggtgactacggaaactttcgaggaaagattagagaacaagttagatgcagttcaaactgttatgcaaagtgaggagatgagatgggatacttaccatcagtacagatatgaaagcaaacaggctgatgagactacaatgcaatgtgagaatctgacaaggaaggaaattaacaagtgttcttactctatcggatatccaaagggctacagtgaaaacttccgaaagttgtaccggtcaatgaatgcgcctgtgcctaagcctcttccctctttagtggagctaaggaatgccatcaaacggtccaagagaatttaatttgttatgttatgtcccatgaaagaancaactctactggctttcagaccaaagttaatgcttgcctggtgaaaatatatgtactgcag

SEQ ID NO: 4974 - DNA, 593 bp, Gossypium hirsutum
  misc_feature (38)..(38): n is a, c, g, or t
  misc_feature (243)..(243): n is a, c, g, or t
  misc_feature (501)..(502): n is a, c, g, or t
  misc_feature (569)..(572): n is a, c, g, or t
aaagaaggaaccattcctggttgaaaagccccttaatngatttcccgttaaaattcctccctggattaaccttaagggtttccttaaaaacctttaatctaaaaagccttgatggatggcatggaaatttaaaaattcctccaccaattgaacttctaacccattcctttaatttccgggctggaaaaaccctggaataagggcctggaaaaagttgggccaaccgaaaaaagaaaaggtcantataaatatcaatataaaatattttcaatattttaataataaaattaaacaaaatttggagtttggaaccataccagaacaagcatggctaagcaaaatatgaaattctgggccacgtggcctctggaccagtctaatcctaaaagaaaagaaccatgccctggacccactccactgcggcgccactacaatattaaacttgcctgacacgatacagtatggctagcataatatgagctgatcatactatgccttganngacgcgatggtaaccttatgctgctcaacgacctgaccaaacaaaacaattgatttcctgccaggcnnnncaatacattgtattctggaca

SEQ ID NO: 4975 - DNA, 471 bp, Gossypium hirsutum
  misc_feature (445)..(448): n is a, c, g, or t
  misc_feature (456)..(458): n is a, c, g, or t
  misc_feature (466)..(466): n is a, c, g, or t
catgggtaggtcgcacatatttttgctaactgtgaaattttggaggaaattattgctttgataggaaatttttgtgaactgttgtcaagatttttctaacttcaaacctgatctttcgtattcagtgcagcggagatttgtctgggtttacgcatcgattcaatttgctttggtggttttcttcgctcatatattttattctttggtaagtggttgtttacacattttagcaccggtttccttgcaatgctgattcgaaactacttgactggactattgtattgcggagagacgaaatttatgattagagtaatgtcattgtcattgtaaaatactgtgattgtggtccaagtggaattgccattacttggacttgatcaaaatggaacctgatcaaacaatggatgcgaaggctatgcttatagtggaactggacctgaaatannnngattctgnnntaacatgnctgag

SEQ ID NO: 4976 - DNA, 631 bp, Gossypium hirsutum
caacaacatcttttgtttctcatgtttttgttgttttcatgattgcaatttagtgctaacccctccattcccatggagtcgctgatatgcctctttatcacaattttaaagcaatgcactatctattcaacattctcttatcatgataaaaatggaagatttataacatcattaagaaatacataaatttaatccaaaacaaacatagaaaaggaaaccatacctgagagtttgctctaaatgatagacagactaaagatgcttcagggacagccaacttgctagcatcaatgccacttgcatcaaaaacaatcggcagttttgattttctaccatcagaatatataacatccacagcaggaaacttccttgctgcaattccgggacattaattttactcagaaatcagttgcaattcaactaatttgaacagattttcaaatgatatagcctatatgtatataaaaagaacaaatcagttaataccttaccaccgtgttgtttgagctcagacatatcatcaaaatatcctctattcaattcatcagcactgccctaaatcaaattaaaacaattatttatattaaatttcatggaaacgattttgaagaaccaaattctcgcacacttt

SEQ ID NO: 4977 - DNA, 407 bp, Gossypium hirsutum
tgttggaggtcgtttgcctccggtaagaactgcgatcacttttattttgttttatatgtaagcattccaagatagctagtatgctacatggaaagaagcttctggaacttaagatttgttttttaacattttaatttaatgaacttatattacttagtgttttgcttatttgccaagtattgggattgtatgatcatatttggtactttgcgtttctattttgtttgtttttttagaatttctgcatttgtgcattgactaagacatgcttttacttgagttcactgccttctaccattttgtgccatgattatgcatagtactgctagaattatgtacatctaaaattgttagagattttctagggaaagacctatctgacattgtggtatttaaaagtagcttgc

SEQ ID NO: 4978 - DNA, 646 bp, Gossypium hirsutum
gatggtcttttatggtacaaagattcagggcagcatttcaatggtgagttctcaatggcagtggttcaagccaacaatttgcttgaagaccaaagccagctcgagtccggttgtttgagtttacacgagtcaggtccgtatggtacttttgttggtgtatatgatggacacgttggcccggaaacgtcccggtacatcaacgatcatctctttcaacatctcaaacgtaagcacatcgtcttgttcctagtcgaaaccgagaaatatctttgttatttgtctgtgctcacttttgttatgttcaggattcacttcggagcaacaagggatgtcggttgatgtgatacgtaaagcatatcaagcaacagaagacggttttttgtcactcgttaccaaacaatggcctatgaaaccacaaattgcagctgttggatcttgctgtctggtcggtgttatctgcaacggaactctttatgttgctaaccttggtgattctcgtgctgttttggggagagctgtaaaggcaacaggggaggttctagctattcagttgtcggccgagcataatgtgtgtatagagtctgtaagacgagagatgcaatcattgcatcccgatgactcacaaattgtagtattgaagcatacg

SEQ ID NO: 4979 - DNA, 606 bp, Gossypium hirsutum
aataatttaatttgaaggattatttaaaatatgaaagagtttagtgatttataaaataaatttgtttaaaatatgggtcgggtttaagttttaacatttaatgtttgaatctaatttcattcgatttggctcgttttatatttttatagtatttttattttatcttcatatattatatattttatatatcacataaaaataaaaatataataatacaataatatactatacacttctatgttttaaatttagttaaaatatgcaataagttcttgtattctttctaaattttgaatttagtccttatactttttttttaggaatttagtcctactttttatatttcaaaatttagatctaattattaacattattaaaattattcggtatatactcatttaatagtcatacaattaaaaaatagcattgtaataaacttgaatttaaccaaaacaaatttaatagtgttaatgatttaatttgaattttaaaaactaaaaagtagagggattgaattttaaaactaaaaatatagagactaaaatttaaatataagaaaagtacaaggacttaggactaaacaaattaatgttatttatttataaa

SEQ ID NO: 4980 - DNA, 641 bp, Gossypium hirsutum
ccatggagaagagccataatgagacttctggaggacagcatggcggagaagatgctggctggggaaatcgagggtgattctgtgactgtggatatcgactccgatggaaatattatggttctcaatgggcagtagtagtggagtggtgctccaattccagctgtgtaaacccaaacagccatttccgatgtgtttgttgtttgtaccttttattttctcttctttttcattttttcattgaattggccattatattgaaaagaggactgactgcgtgggggtagaattggaaggccattgattcttttattccttgcacattctatgatataaatttgttccttgttttatcctcattcttgtgcctaatttctttattgcccttattttatgaaccaattcaaattactattttctttatacttgtaacgaaagtggaggaaaattatgagaagaaaaacttgtattattcacgtatggtattctctatatataagctcaaaataaacaatactaaataaacatcatcttgataagtttctttaaagaacgcggaattatattattatttgaaatacataaaacttccaatacaacactatcagatgcatccttctgtctccctctcttccataccagct

SEQ ID NO: 4981 - DNA, 651 bp, Gossypium hirsutum
ccccaagactccgagattttattatctccttcgggctcacgatttttcttggcaaatgaagagattatgtttcttccataggcgccaagccaaaagtccgaagaggcacgcccactagtttctccaccgtgaaaatttgggttgacctgaaaattaagagacaaccattcgtgcaaacctttataaactaaattatttttgattttatacttattattaatacgtgaagtgttgttaattacttggtacaaaaaaaccataatattgatttaattataattattaaatattaaaaatgattaaatacacaagttaattttttagtagtggcctaaattagtattgattatgaaattatttgcttttattttgactgattatatttagaaaataatattttttatttctttttaaatagaatttaattatatttagaaaataatataaaaatcagttccaatactcctgaatcagtaattggaaaactaaaattacgtttaacattttggaaagtattgagattttatatatgtttaacattcccataaaagtgtgtccatttagtaaacccccaatttctgcattacgtttttattcaatatttctgcactaatacatttgaggattcgatttttctcaacactgatggag

SEQ ID NO: 4982 - DNA, 485 bp, Gossypium hirsutum
  misc_feature (52)..(52): n is a, c, g, or t
ctggtgaagttaggtgttattaaatggtagaaacaagaaacataatgttctntttctgcctaagcagaaaatattcctcttggtcttggctcttttatgtgcaaatgaatgacttatcaaccaacagcattgccttgtgatttactgtttcttcgtccaaatggtgccttaaaaagtagcatagcagttaaaaaattttgattaaaagttgacagtctacttacgatgccttggcttccaaatgaaagcctcacagtcctttgcataatgaaataaaaagccaactttattggtttaattcacggtttgacttttaaagtatacctgttttcttattttggtatctaaatttttttgtccaaatttggtattaaagtatactcgaatttccaatttggtttctaaagtgtgcctgtcttatatttttttagtctatttttttgtagacattaaatatcacgtggcatcattatgtaaaaaaaaaa

SEQ ID NO: 4983 - DNA, 622 bp, Gossypium hirsutum
tcgtatttctttgacatctgtgtttgctatttttttgttagtatggtgattttagtattgggttttcacttgtcaacattgatatattagtttattatggctaccgaagtttagtggaatgtttttcccttattatgcttgatatctttgtgagaactggcttaattaattgggatctgtaaaatattttaaatctcatgtgtcaaatgtcactagattttacaatattgtgcttttcatcacatagtgctctgtcattattattattgttgttattgttgtgcccttaccccttatctgaacttctgttctcattgtggcaagtagaaatttccgaagatgaagctgaagatcgcttgcaagatgcaattcaggaaaagtttgctgtatttggtgatgtatgttagctatacatggcaattgaagcaatgataccttgcatttgaagcttctctttctattaggtttatgcagtttcctgccttaattgactatgcatttaatattgtagaaagatcatcaggcaattgatattcttctggcagagattgatatctatgagctttttgctttcaagcattgcaaaggaaggaaggtcaagcttgctctttgtgatggtacg

SEQ ID NO: 4984 - DNA, 605 bp, Gossypium hirsutum
agaaagaaatcaaaactgctgtggctaaggcagtacaatttgttgaaggttcacaaatggcagatggttcttggtgattttccgttcctttctcgtagttgattttaagaaaaatcatgaatggataatgggaaagaaagttaacatagatatttaagctaagattatcattattgtgtatgcaggtatggaaactgggggatttgctatacatatggcacatattttgctttagcagggctagcagctgtcggtaagacttgtcagaacagccaaattgtccatagagcttgtcaatttttgctttcaaaacagcaagagtctggtggatggggagaaagctactcatcatgccctaatatggtaactgtcaccttattcctatgttgcatactcaaatctatgtctaagctagggagcatgaattatgtgaggttcaagcagatattgctgtaattgttgctttgttggacatataattagcaattttccttaagaaactatggtgttttcaaaaacaataccgatatttaatatttctaagtgttttcccctcaatatgaacaggaatatagagatttagctgaagggagctgctcacatct

SEQ ID NO: 4985 - DNA, 428 bp, Gossypium hirsutum
agagcagttctccgatcaagttctgctcgcaacgctgcggctcggctcgccccataatcgaaagctgcaccatcgcagtttcgtgtctcctccaggattcctctttccaactgcatttgcaggtacccctttcatcttaaactagcaaaaaggaaaaaaaatcaaagctttttacagtatataaaagggattcttggttttggggggcgaaagggggccgggtgaaacgagtttctgcttggaatccatgctgccgtatcactcggcgactgcttcggctttgatgactttgatgctcaccatttctcgccgaagctatgtttggctctcggaagggattaagatttcaatctgtttccttatttgctttctgggcttgtttattatgagcttcaaggaaaaaccaattgctttatctttttgttttg

SEQ ID NO: 4986 - DNA, 605 bp, Gossypium hirsutum
aggaacatatcaccaaataatgaatttgctgagtaaagaacctgctgttgaagctgctgccagtttagcaggtatggttaacattggtcacaagtggattgtagatacttgtgctactgatcatatactatctgatcttcaattcttagaatcgcctgttgaatgtgcattgggttcatcttgtgttcgacttccaaatggttcttctgtttccattacccatgttggtacttgtaatattttacctaatttgcagttagccaaagttctttatgtccctaattttcactataatcttctgtctgtttcaaaacttactaatgaccttaattgtgttgtttctttttacccccaattttgtcttatacagaatctcttcagtggaaagatgagggggattggtagggcacgaggtggtctttacatcctcgacccatcttgacaggctagtgtggattcacccagtgtagcagttgtttcttctgttgactcgtcatttctttggcatacccgttttggccatgcttcagtttcaagactaaataaggttcctaacctttcttgtacagtttcagatatagatagtataaaaaaatgctcttctt

SEQ ID NO: 4987 - DNA, 646 bp, Gossypium hirsutum
cttagcggggttccaaagtggtaactaatttccttgaatgttaagatatttcaagtttcaagttcagttattggtgtggattacttcaatgttatggtttgagcattgtttaatttgtttcatttactgtattcttttttttcttttcttttcatgtgtttgaataaaattttaataaatcttgttaatagtgttataaatcaatgtaaaggcccaaagggctttcctctttaaggcacaaggcacacacccactcgcttttttttcttcatttcaagtaaaggaaccggaggatgtgtgctacatatgtattaaaaggaaaaaaaaagttttttttgaatttcttttagtatatagcatggatttgagatttaatttttatgttttaatttttaaaggaatttagtttttatatttttattaattaatttaaatagttaatattattaatttttcaattaaaatattatgtgattatatataatataaaattagaattttaaattcataaagttgagatattaaacttttgaaaataaaatttgaaggattaagtttcaaatctacgaagtgtagagatttagagccatagttatttgaatcaatcgaaccagttaggggtaccaatccaaaaagaggcattaga

SEQ ID NO: 4988 - DNA, 613 bp, Gossypium hirsutum
gagagttaaaggagcatgtgagatgagattttgatgcatgccggtgagacattgatgttgatttttttccattactcacttaaattatttgttttttggtgaaggaatttaggtcaaaaaaagaaaatcagaaaaacccttttgttgcttggaattaactattgtgccaattgttcagtaatttgtttttatttttatatttttttaagaaagaaatttgtttttttaggttaaactgagttgatattttaattaataataataataataataaaagatacttccattaataaaaatagttagtgtagattacacatggtacagactgcaattaaaacattacaaactccatcgtcttaagaggagaaagatgaaatgaaattacttataaagaaattaagtagagaagcatcacttgaatcaatcatcaataattgtttctaattctgtcattatcaaataattctaataataaacttcagtcagtcaattttagtatttttcatcaaaattataatataattaacttttgaactggatcaaaatattttttttatagaaacgaaaaacccaacatttgatccattggctaaatgtgttcacctcatccctc

SEQ ID NO: 4989 - DNA, 915 bp, Gossypium hirsutum
  misc_feature (538)..(538): n is a, c, g, or t
  misc_feature (565)..(565): n is a, c, g, or t
  misc_feature (898)..(898): n is a, c, g, or t
aagctaaaagataaagataattattcttttcctaaactatataaaaaatgagttgcatttaaataaaaatataaatttaattattttaatattgaattttattgttacaggttaaaaattttatttaaaagatattgagtaagtttgatggtaatagttactttccattgacatcaaagcatccaatcaggctttccccccatgactagttgtttccccttttcaacattgcccaatgcccattcccattcccattcccatttctagtgactgtcgtttgagcagttaaaaggagcatgtgagatgagattttgatgcatgccggtgagacattgatgttgatttttttccattactcacttaaattatttgttttttggtgaaggaatttaggtcaaaaaaagaaaatcagaaaaacccttttgttgcttggaattaactattgtgccaattgttcagtaatttgtttttatttttatatttttttaagaaagaaatttgtttttttaggttaaactgagttgatattttaattaanaataataataataataaaagatacttncattaataaaaatagttagtgtagattacacatggtacagactgcaattaaaacattacaaactccatcgtcttaagaggagaaagatgaaatgaaattacttataaagaaattaagtagagaagcatcacttgaatcaatcatcaataattgtttctaattctgtcattatcaaataattctaataataaacttcagtcagtcaattttagtatttttcatcaaaattataatataattaacttttgaactggatcaaaatattttttttatagaaacgaaaaacccaacatttgatccattggctaaatgtgttcacctcatccctcaggntgcaggaatagtttgta

SEQ ID NO: 4990 - DNA, 600 bp, Gossypium hirsutum
gatctgatggtcataaatgggattggcagatcagtatgtttatatatttagttgttcatagttcttcagacctctgttttattttcgctgttcattttaaaatttgaaactgaagaagctattatagaaacctaaagcatcaccgggattagaaccaagctccacaaaagtcaattttcgataagtattacatgctgttgtctagttgtcatctttctcattcttttgcattggaaatttttcctatttataaactataaagctattagtaagtcgacactgtgctttttctttcagtaatagttttctagtctctttaatggcattctgattagaactgcactattcggttacatttgacagtccttatcgagacccttataaataagaatctacggcttgaggctattacatatatttgtgctttcgatcttgctgacaagttccctcctgcactccttctgaatgcccacttgaagtattcgaagatgagaaaataccggaagggcaaaaaatcaaatatgaaactggtaacctttgcacttattgtgtctctgtattctcaatggttaagctggtgtcctacattatatctttata

SEQ ID NO: 4991 - DNA, 689 bp, Gossypium hirsutum
  misc_feature (677)..(678): n is a, c, g, or t
actttgtggagtaatcttagtatcagctctgatttcatttgtctgtcagccaatttctgtcattgccggtgatatagtacacgacgacaatttagctcccaagaagcctggttgtgagaacaattttgttctagtaattattctaaatcctttcttctatttatttattcatttctttgtttctccactggtttccttaattttgtttttcttattgaatttggtagtggtaagtaaccaagcactttcaataatgttgcttttccctatcactctatacccgaccaaaaagccaatagaatacaatacgccatgtttgaagcaactcaaacaaatattaaaatgataaccgaagctaaaaaaaaatcaaactaaaataagaagttcatacaaatgttaaaccaacataaatgaactcaaaaaaatccatacacaaccatccaaggtcaatgatagttaaacatagagtacgttaagaatcctgggttaaactagtaaaatgtaggttatgtctcaagaaggaagtcatgtcactgtcttgagataggtcattgtttataaattttaagtttgaagtttcatctcttgagacaatggacccatgtctcgtcatgtctcaagaccttgactcctatgtcttgagacaatcacactatatagcgagacttcaatcttcnntcgtaaaaaaa

SEQ ID NO: 4992 - DNA, 572 bp, Gossypium hirsutum
ttggagtcgaatagaagaaacaagccgcaactttgcaattccgtgtctctttcaaaatttgttcactctgtagtttgacagaaacaaaataatgtcaactcttgttaattattaatattttctaaaatggatcaactaatcaccctgcattttacctactctaacaaacacaattgacattcccaaccatggcgtcccttatttcattttaaattttaatccctaaactgaagaagtcataattgctaaaaagtgaacccatgaactcttccatggtttaggcatcaaaattgaattcaatcaactgggttgataagtagactccaactcatgatccccgcatttttaaaactaaattattactcatatcattatcttatattttatttacatacattctatgcagtattaaaattcttcttattttataaatatatcctcctggatctttagctaaaagttctatttattaagtgatccaacatctttccctattttttatcaagatttttagaatgtgggcttttggtttaatttgtttagtttaacagaataaataattaaaatataaa

SEQ ID NO: 4993 - DNA, 643 bp, Gossypium hirsutum
aattgttgcaaaacaacagtcagaagagattgctccaaaacaaaagttaagctcagcaaatcacttgttgacaaaaagagaaaagatagataatgcttctattagggatcagttcaagcttcctggaaacattaataccctacttggggatgttgaacagagcaatcattaccttggggagaagtcaacaagaggggatacacctaaatatgaactttcccaagattttaaacaacatggcatgcaatctcctgtccttcatcaaaatatttctgatttgtttaggaaaaatgatcacccttttttaaaaaagattaccatggatgatttaaactcattgatgtctgactatgacagtcaatcagacacgttcggaatgccttttctgccattacctcaagacagtatgaaatgtgaagggatggtgctagtcgcctctctgctttgttcttgcatacgtaacgtgaagttgcctcacttaaggagaggggctatacttttgctgaagacttcttcactatacatcgatgatgaagatcgcttgcagcgagtgcttccgtatgtaattgcaatgctttcagacccagcggcaattgtgcggtgtgctgcccttgagactttgtgtgacattctgcccctttag

SEQ ID NO: 4994 - DNA, 600 bp, Gossypium hirsutum
  misc_feature (584)..(584): n is a, c, g, or t
catttgttaagatcccctagatgaaaatgcatgtaaatatgggtagttaagctcaaatgatgatgctgtcccaaaggagttttgcgctgtagattctgcagaagcattaataggaccatatatatgtttcttaatgccactggaactggtccctgtgagattgcgaaagacagaaacaaaactgtcagtaaactgactaagaaagctgcaacgtagacacaaatatttcttaccgctagtccataggggattaccttgttttgtgatgattctttgtctataaacaacccgaatatcacaagtatctggagcacacttgaggacagaattaggtaccccaggacccttcaacttcctatagttcacattgctgaagattactccatagccatgaaaaagctaatatgcatctgaaaactagctaatcaatatttcctatccaaaagctttgcattcaactcatatagcaaaacttgcaaataaatagatgccattaagctcagtacatacattcatttctgtttctagctttacacaaacacctgcatatgcataccttttccttgttttgtaattgtaacaanccaataccaaaacctg

SEQ ID NO: 4995 - DNA, 656 bp, Gossypium hirsutum
gtacatacacatcagattattgttttttctttgttataagaacataaaaaaagaggctgcttatgtcattgtgatttttgttctccattgcttttggattttcaatggaatcttactgggaaaattttattcatgcattgaatccgcccgatgcaaatgcaaatgaactgtgcgaattagccattcgaagctttcattttgatccaaagattagtcctttttcattcattgatataagtttcttctagccccagtattgaggtgaacttgcttgttctctcatataaagtttgaaaggttaaattctgttattagtttccaagtattggtaatcttctttgttagtcacctaattatgaaaagttttaaaaatggtcatgtaactatccgattttttcttttttagttgctagtcattaaatggttaatggaaaaatgacatgggttaaaattggcataattctatctttagctctcaacatttatacactatctcaatttaattttgattcttaaaagtttatctcgcaacatttacacattatatagttttatcttttttgtagttttgtttcaactgaaaagctaaaaaatcaactttattagttaaatttgattgaaaatatatcaaaaatggaaacactcagaaatccaag

SEQ ID NO: 4996 - DNA, 270 bp, Gossypium hirsutum
  misc_feature (257)..(258): n is a, c, g, or t
  misc_feature (260)..(261): n is a, c, g, or t
attttttatttacattggttcctcacaaactattagtattttcatgcacaaataaactaagttttatctgtaggtttatcatttatatagattattttcccattagatttgcaccaatttgtcaaatttccccctcaaaagtagtttgtttgtaatttccagctgtgattggaaggagagaaatttgatgctcactaatggtacagagattggtaaagatgctcatggaaatttaagaagcatctggagtgttttgnntnncatgtgcta

SEQ ID NO: 4997 - DNA, 623 bp, Gossypium hirsutum
  misc_feature (600)..(601): n is a, c, g, or t
gtagctcaaagccctacctggaggagaatgggtaatcggagaaccaacttgatgtctaaaaccccgagattcatcttgttcaagatcttgattaagttgcaacatcaaactacaagttgaaaaagattaacaatcaaatatttttatcattgctatacttctaataacaacaacgcaagaaatcaaacaaacaaatagtaaccgatggtaaacacagaataaagagagttttctaaataaagaaaaagagaatgtcgatgaagtccagcacgcagcagccaagataaatgatccatataattacacttgaacaaggccacaactgcagtagttctcatagtttctatttccttgcagagttttaatttacaatctacctcttccaattaatagctttgtgcctcggtaccagtagaagagcaaatagcaaaacactatcaggtcacatagaaaaaaggaacagcccaatgctatcacagtgtcaaatactataaggaaagacttatttaagagggatgacaagattcatcaaataaaagaaattacagttttatacattaatactaataaaagaacaaagaataagatatacgcactttnnaccagctcctccagggcgacta

SEQ ID NO: 4998 - DNA, 473 bp, Gossypium hirsutum
atcatgcacacacatgatatctgtgctgctagaagcccaaaccatagaccctcgaacccgattttgaatgtgaaagtggtgagaattgcaaccggcaatccaacaaggtaaaacgaacataaatttatgcgaacaccatcttttggacgtgcagttcctgttaagacaccacaagctgctgtttgtggagagttgccaacttcacataaccccagaattggaagcacagtggagatcaaatcaaggatttgtggctcatcagtgaacaaccttccccaccatgatctcaggactgtcatcacagcaaaggctgagaggccaaacgcaaaggccatgaggagaccgatggtggcggcccgatgggcacaggatggtcggccagcacccaaagcctgactcactctcgtacaaatgctgttgcttagtgagaatgggaaattatataataagcctgttgtttgaatgaggatgag

SEQ ID NO: 4999 - DNA, 525 bp, Gossypium hirsutum
  misc_feature (132)..(132): n is a, c, g, or t
ttagcccgcttagcctggtgcttccaatcggttcgaaccaatgtgtacaccatcatgcacacacatgatatctgtgctgctagaagcccaaaccatagaccctcgaacccgattttgaatgtgaaagtggtnagaattgcaaccggcaatccaacaaggtaaaacgaacataaatttatgcgaacaccatcttttggacgtgcagttcctgttaagacaccacaagctgctgtttgtggagagttgccaacttcacataaccccagaattggaagcacagtggagatcaaatcaaggatttgtggctcatcagtgaacaaccttccccaccatgatctcaggactgtcatcacagcaaaggctgagaggccaaacgcaaaggccatgaggagaccgatggtggcggcccgatgggcacaggatggtcggccagcacccaaagcctgactcactctcgtacaaatgctgttgcttagtgagaatgggaaattatataataagcctgttgtttgaatgaggatgccc

SEQ ID NO: 5000 - DNA, 627 bp, Gossypium hirsutum
agttgagtctaatattctgaatccgcaaataatccgattagtgatgctatatttgttccttttagtgtttattaaggcttttaatggagttgtcggtttgccatagctgtgaagtaatgtttggttcgttgcagacggatacagcttccgtcctactcgaggcaatgggatacatacgatttcttcacgaacaagttaaggtctgtttttcttgcctacttttacttgtatcatccgttggtcaattatttagttttctttaaggcccgttttcgaatacttatgatagctcatgtcattggaaatgtttactatatgcagaaaaccattttccgtataaatggcaattttaactaaaaaaaacatctcggtttttctgttcttttcggatggtttcaggtgttgagtgctccatatctccaaaccataccagcaaatagtttacaggttagcattaaacggactccattacacacagagacagagacattaaaaatatgtaacgcggagatataaaagtatccgacacactagagacatacaagctagggtcagtgataggagttcaaaaggtccgattttggattcgatttaaaatcttctttctctttccaggatgatgatcag

SEQ ID NO: 5001 - DNA, 911 bp, Gossypium hirsutum
  misc_feature (320)..(320): n is a, c, g, or t
  misc_feature (345)..(345): n is a, c, g, or t
  misc_feature (570)..(573): n is a, c, g, or t
atacggaaaggtgcgtttggcaattaatttgtttacatttacggtgacttctgtcaattgtttctggggaaaattgagtcagaaagttgagtctaatattctgaatccgcaaataatccgattagtgatgctatatttgttccttttagtgtttattaaggcttttaatggagttgtcggtttgccatagctgtgaagtaatgtttggttcgttgcagacggatacagcttccgtcctactcgaggcaatgggatacatacgatttcttcacgaacaagttaaggtctgtttttcttgcctacttttacttgtatcatcngttggtcaattatttagttttcttnaaggcccgttttcgaatacttatgatagctcatgtcattggaaatgtttactatatgcagaaaaccattttccgtataaatggcaattttaactaaaaaaaacatctcggtttttctgttcttttcggatggtttcaggtgttgagtgctccatatctccaaaccataccagcaaatagtttacaggttagcattaaacggactccattacacacagagacagannnnttaaaaatatgtaacgcggagatataaaagtatccgacacactagagacatacaagctagggtcagtgataggagttcaaaaggtccgattttggattcgatataaaatcttctttctctttccaggatgatgatcagtatagcttgagaaaccgaggtttatgccttgcaccggtctcgtgtaccgtaggacttgctcgcagcaatggagccgatatttgggctccggtaaagaccacatctccaaaatttgacgaggttatctcacaattcaattgaagctttcattttcacagccaaactttgtgacatagataggacgatgatggtaggtggaa

SEQ ID NO: 5002 - DNA, 512 bp, Gossypium hirsutum
  misc_feature (466)..(467): n is a, c, g, or t
  misc_feature (473)..(474): n is a, c, g, or t
  misc_feature (476)..(476): n is a, c, g, or t
ttattgattatacaacataataattatggactcgtccacgaacactagacaaagctggcttttgtagctatgggatatacatgattaagtattaacattggtaaaaaaagaaaaaattaccgacctcagttgatcatctctttgaaatgagagaaccgtcttcgccacaatgtccattctccaacaattgatttgattgctcttcatcgcctgtgtcttcagtggagtctttgaggcacaaaaagcttggttgattcgttgaagacagaagccttgcccacatcctatccgtaatcacaacgccgtttcgtttctctataattctctgcacagaaatcatcgcaaaattttaagcacttcactgattaataaaaaaaaaggaaaaactttagtccaaccatcttaacaatttgttctcaatgttactgttgttagtgtttttcatcagtttagccctcatgatacnnaagggnncngtgttgagagtgtttttccacgtttaacccctcgag

SEQ ID NO: 5003 - DNA, 645 bp, Gossypium hirsutum
atttaaagaacattagttgtaacttcgtataactcagaatacactttctatactgcgtgtgaaaattttagtttcgggttagtgtcattcgtagaaagcagctgacagtttcttcttaaattcgcagttcatcgatgttggcacaatggtttctccaactattttcgcacggcgtagcttgtgttatctcattaacgacatgcctcaagaagcactaaacgatgcaatgcaagcccaagtgatttccccagtctggcacattgcttcctatcttcaagcaaccgcactcgctgcccttgggatggagaacgagtctcaaacggcacttaaggaaggcgcgactcttgaatccaagagaagttcagtgacggggaaaaagtaaacagctccgcttcaaaccacgcaaccaagtgttcattcattctgtaattcaaccatagaaaaagcagtcgttttccatggagaatggccatagatggtcataaggtaatagtcactgatatctttgccttttttctttaatttttttaatgttttcttttacccttatgagtgtatgtgagatttgtttcattctttgttgggtttgatcaaatttgtgaaatttgatgttaacaaattattcccagtcacattgattgggac

SEQ ID NO: 5004 - DNA, 659 bp, Gossypium hirsutum
tgacagcagtgatcttggaatctttgttacatttggcgtggaaggagtgaaaataattatagtattgttaaaagaaaaatagaaatcgaaattggaagatagtgaacctacggcgacttggtttttagagactttgagagagacatctgaaaatgagaggaagcatagatttttacagagagagagggggaagaatggtcaaacattaccggtggcgccggtcaatggttgatattccccccctctctctctctttaaagctctcttcatctctctcccttatttctctctctttttgtctttgaatttgtgttgaaaggttcttttggtcgtagaacttttttgggtttttgtttgtaattcgtttgattaccaaaagaaactgatttttttttcttttttgggttattttgtggatttctgggttttctttctcaagtttgctcgagagataaatggcagtaagtttcttttttctccttttaatctccttttctttctctgtcgtttgttgtttttgctttggtttagttttcgctatgcttctgtttgtttcctgagaaaatttgccaaagacaaaaagaacgccgagaattatggagtctgaggttttaacgtttaagccatgttactgttcacttttcgtattctcgatctcc

SEQ ID NO: 5005 - DNA, 590 bp, Gossypium hirsutum
agcaaaagttcatatgtcaacagggagtaatttctcagcatcctcaacttttggttgaaaagatatttagaacaatatgaagaattatttggctgaagttttagctatggaaaatgctgcagccattacatagctttcaaatacccaataatatacccactcaatggtattatctctctcaaccccaaaatttggcccatatgctggcatcaatgacaaccaagaaactggatcaaaacagacaagtaaatggtttctctttcactctcatggtttcgtccacataaaatgttccattataaagaagaaataagatcaaaagataaggtacaaacatagatcacctgtacgagtcttgaagcatggacgcattaagccctcaccagtcacaacctcatataatgggtgtgacatttggaagaactctggcttccttgctgagactatcacctacagacatacagaacagcaggaaaacacaaatgcgtcaacatgtttggatgccattaaatcaaacattcacatttccttctgttagagcaatttaataatactcatgagaaaaccaattgcaaaaagttgtgcaagga

SEQ ID NO: 5006 - DNA, 603 bp, Gossypium hirsutum
ccgaactcatcctaaaggcatttgaaactcccaaaatattcttgcatgttctgatactaggaaggtgtttgaagggcatgcaaagtacgtataagaaacatcttaaacttggatgatgtgaaaggacatatagcagatatgatacaagtcattgcatgtagagagtgaaactaagaagcaagaaatacctaccttgaacatttacgtttgattcaactgaaggtggaccgagagaatgcaagaaagggcatagacagtgatcaagaagtgtagaaggatgaggggagcaaagtgattgagcatgagtactgcttaatatgaactaaaaatgctataaagtcaatttaaaaaaaatactgccatgaaattaatttttatagaagcttagagaagtttgaattggaaaaacatttactcatcagactcatacaagagtcaagacggctttaactttagccaaagatatctccccatggacatactcatagtgctcctccttctcaacgcacactgcacatgagagagacacagagatggacattaatattcgaaacaaggaatccaaggttagagaaaaaaaaggaaaaaaaaaaaaaaaaaaac

SEQ ID NO: 5007 - DNA, 645 bp, Gossypium hirsutum
acactgcatcaaagctaaaaatagaaagggcgaaccaagaatgaaatttctacctgcaaatggagagcctttgaaaatggaatcttcttcatgtgaggaacagtaagaagctgggatggagtttgtccaaaataagctatctggtcttgtatagcatgctgttttaccttttatttatataataaatgtgtaagacaatgtgaaagttccaaatagagcagacaatggggaaaaaaatagtaaaacaacttactggatcagagatcttgtcaatattaactgtcccttcatatgtaatataagagaatgtgttatttgccaatatagcttctttaccccgttgcttatacctgaacattccaattcactccagtaagttctaataaattcaagattgcctgaaacaagaatctcaatgaacaattactattaaaaaaaatccaatagcctttctttaggaaagaggagaaagcaaaagaaaacagacccaaatataaggtcaatccattcatgcaaatgtgcagacacatgctcactttcaagagccattcgatgtttatgaatgaaatcaacagggttttcagcccaaggtggaagtttgactgaacctgcacattggaaataaataaataacaatcagaacta

SEQ ID NO: 5008 - DNA, 614 bp, Gossypium hirsutum
aatggagacgcagattactgtgggtgctttatattttatgttttgttttgaaggtaatatattttgttatacttttttataacattaaactttgtcatcttacttttacaggcattgatttcaaattgagttttccccactactttgaacattacagagttccttttctgttcggtatctactcgtctatgtggatgcttccctgtgcggtaaaagtaccccgcaagctttcaccttcatcccttgcccttcattgtcctggttgatgaaatggttaaactacttctttggctgacaattccggctccaaccgagtaatccatttggtgatgggcaaggaacacattggttttcctcccattctgtgccccacattgatttcctagagaagagtgcaatgtctcttcccaagcttgtgaaacgaacttgtcatagtaggtaaaagccccatcggccttgtcaaaaatgagaaccttttgccgatcaacttcccaatgcccaaactcttggaagctctcctctctgtgggtaacattttatgtttgtggaagtgggttttatttgttttatagcaattcactgaaattatatcaagaaactattggaacacccga

SEQ ID NO: 5009 - DNA, 598 bp, Gossypium hirsutum
tggatggggagacctgctctaatagtagtctcctgccacaagaaagcagataacttggctctcaagttttcaacctctttatcttcatatccaacagcatcaactccaagcctgaaaaaacagacatcattaatgggatgaacttcctcagttttacacagcatctacagcttaatgagatatcatggcacatcaagttatcagcctgggtacaacaaaaaattttctccccatattaacatattcttgcctctctttttttacaagagatttttaagctttacaatgggaggtagcactgtctcccatcccattaagcccaccccatatgtcccaggatttgaagcccgtatctccaagatgatctatgaagtttatacaactgcagtaacttaaaatcactagaaaaaaagcttctaccatcagattcagaatgcaaacgaacttagtacttccaatatcaagctccagttcagtcaggttgtttctctgattaatgcattttccagtttgattaaattttaagtcatctcataataagttttcaccaatatttagcaatagactcaaccctttcttaaatctgctatatccaact

SEQ ID NO: 5010 - DNA, 598 bp, Gossypium hirsutum
  misc_feature (571)..(573): n is a, c, g, or t
  misc_feature (585)..(590): n is a, c, g, or t
cagactctgaatttctgctacacttacacattgctgatccattgtcatgttttaaattttagttaaatctttcagtgtgttggttatagttcctcatttggatgaagacttggtatttagtagaaagtatgactgtactctaacatgttagtctgcactgttattttgagttattttctcatttttaaacacctgcgaaggtacgtttcgttgttggtggagatggacctaaaagagtgcggttggaagagatgagagaaaagcattctctccaagatcgagttgagatgttgggggctgtaccacatgcttctgtaaggtctgtgctgatttctggccacatttttttaaacaggtaaatttttggttcctacagaccacccttttttagtttatttcttttttatgtaaccagaagccaagaaaaaaaaaaaggggaaaagaagaagaagaagaaacacaaagaagacaaattaacattcattgatcatttgataataaagtgtaaaggcggatgaacttaattgcttttccttttgacagttctttaactgaagctttttgtatagcnnntattggaggctnnnnnngttgtgga

SEQ ID NO: 5011 - DNA, 586 bp, Gossypium hirsutum
tcagtgcatctcaatatgacccaggtggccagagctacccgtaatttctcttccgctctaaagataggcgaaggagggtttggaactgtttacaaggcccagctagattctggccagatagttgccattaaacgagcaaaaaaggtaagtaaatatgcttacctatatttatttctataacatttctcccaatcgttttctgttttattagcaaaatttgtgttatatatgggatgacgagtaaatcattgcactcaagttagaatcattacatttacaaaacagaatgttcagattgttaacagatattaactgtctgcatattagagatccacaggattctcctattggatgtgttcctacataagagtgccacatataaaagtagatggggataaaatatgtttattttcagattccgatgacttactctcttttgacatgcattctttagcatgttagtttaagacagaattgcagaagcatcttagatttcatggtctaataatttgtagggaagataacagtgaatcagttgacctacaagaacactaacatgtaaggctgacactaggaatacaacata

SEQ ID NO: 5012 - DNA, 523 bp, Gossypium hirsutum
aacaaatgttacttcctcattgatctggaaatcaaaacgaaaggaagacaaaaagcatcactactagaacaacactaataatctcttcaaagaaaccctctctgctctaagtatgcatcaatggggtcacatagattttgatcttgcacccaaagccaacaatttcatgaggtgaagcctgtttgtccatcaatgctggtatgagaagtgagaataatcgtgtgagtacatacatacatattctatatccatatatattatatatgtatatatacatttctttgtttcagcataaagcgaaatggagagaagatgctggggtttgttagctgaaaataacaagttgaaatgtaagaaaccccgtgatatttgtgtaataatggtgacaatgtagaagtgagcctgctcatatcagaataattaacttcaaatatttgctctctccataaatcctggatccatccctattcaagaatattttcgaatgacttataatcattaattaaatatgctattcaaacta

SEQ ID NO: 5013 - DNA, 622 bp, Gossypium hirsutum
tgtacttcagcgcattcgaatacatgtctcaattattttcaatctattaaaaagtgataaatgatgaatccatcttttcctttctgaaaatgataatattaagaaacttctatcagaattttattttattttatttattttaaaatattatcctttcaagaactccacatttatttttgttagactattccataatttatggaatttatgaaccacttttatttatttaagaactccacatttatttttgtaagtctattccataatttatggaatttatgaaccacttttatttatttatgataatttatattttatatttaatagtagaagttatttctatatttttaaatgtgcaaagtgaccttgaatttgttgaaaataacataaaatgttttaaaataaagataaaattgtagattttataaattaattttatttacttaatttttcaaccgtttatatcgttgtaataagcgataatttataaaaaataaaataaaatatttgacattaaaacgacaccgttaacttgtcaaaccagaaataaggaaccaaaagcaccgagtttccttccttactaaggtctctcgtgggacggtttattctcatacagcaacct

SEQ ID NO: 5014 - DNA, 638 bp, Gossypium hirsutum
gagaaatagaataaaataaagaatactccaagatgaaagataacactcccgaaaaacatcttcttccctacaaattaaagctacatacatgcacatgtttcccagtaaagactatcataaacacaaggcccgtaaccattggcacaatcctctgagatgtattagatgcactatccaagaaaaataaaatgatgttcaaataaatatcccacgtcactttttctaatcaaaagaacacaaaaacaggtaaataacgacaataacaagagacgatgattacagagcatcaacaatcactaaatgaccattccattcaaatcacacataaacttccacccatacagaaaaagatcactcattgatcaatgcacattctattcacaagatcgagtgataacttctggtactactttttacttacaaaagttgaatccttcaaaattcaacaaatattttgcacaatctacgattaattttcagttagagagttttccaggagtgttgaattataatatgtaatgaaattcccaatttacttccaccgcatcaacgacgaagttctcagatctagaacgaagccaaacaaaactcaaactcagctatttgaacaacaactgcacaacccaattcctcaaagt

SEQ ID NO: 5015 - DNA, 612 bp, Gossypium hirsutum
aaaggtacacggacaactgatgacaaaacctatatttacatggcaggacaaattccacattctttcacttttaagattttgaatttagaaagatagtcaagacacctacaatcatgcaaaactgtcctttcacccaaatcccaaaatcaccaaagtaaccaacttatatgagtttcacagagggcctatatgaagaatttttcagaatttaagtgtctcggttagagaatattcaacaaagtgaataactaataagttcattggaagggatcaattttcaactctaaagaccaaacaaacaaacgaagaaagaaaagaaaaaagaatgatcacaatatggtacataaaatcaatctcgaagcataaaaagcattttagcatattctaatgtccacccagaagcctttttattctttcgatagacttttaaattgctcagaataagacaagtcaataacacagaaatggagacacatgcccttccatcaatacagaagccaggcctcttgaatggtaaatcaagacaagattgacaattcctagaatgtgacttgaaaaatcactaaaattagaattagatcatataggataggaactaaaaacgaaacccaa

SEQ ID NO: 5016 - DNA, 639 bp, Gossypium hirsutum
acatcgtacgcaggaccatcttcaatggagtagaccttccaaggaaaaataattaaaacacaagattaacttactttctaagattctgttattgtcactgctttactttccaaaaataaccccaaatttaccacctgaggaacaggaatatggtccaaaatttaccaccaaggataatccctttaaacctaaaaaacggaaaagaaaaggaaaggaaaacaatcaaactcacatatggtgaagttcccagaacttaccgttatttacctgaatttcataaccaacctctctcaatgcatttgcaatggtcaccattagcaattgttgtgggtcaaccaatagatcaccaaacaccttcaagtatgaatttagaaaatatatatatcataagtagcagcatggagaaaaagatccaataatactaaatgtccccttataattcctccattgtataattttttttaaaaatatttattttcactaaccaatgcaacctaaggctttctatattgtaaacgttgttgactacggttgaaaccaaataaaaatccaaagaaaattcgtttattttgactctaaatttcctgaaaaattttacagggttccaaagggatatcttcaccaaattctacccaaccc

SEQ ID NO: 5017 - DNA, 433 bp, Gossypium hirsutum
tttctgatgatctggtgttgcattcaaactttccagcaataagaatttcaacctgccatatcaatctttttcaccttaacagcttgccaaaaatcctagatgtaatcttaaaatctttatccaagacataatatgatagtaagggtgaaaacaactggggaaaaaaaagagtaacgccatacgcagttacctaagcagatctgcagtgctatattacaagatagaaactaataataataagcatgaaaaagacaataaaaagacaaatttctttgcatctcttgaagcagactatagttaagtttactgagtaagatccctgtgggtgtaaataacccctttgtcaccatccaccacctgcccactccccctcaagatcctgaatttttaacaagacaggtagttagattgatagaacctaatgttcgggact

SEQ ID NO: 5018 - DNA, 446 bp, Gossypium hirsutum
  misc_feature (395)..(395): n is a, c, g, or t
  misc_feature (400)..(404): n is a, c, g, or t
  misc_feature (406)..(407): n is a, c, g, or t
  misc_feature (409)..(415): n is a, c, g, or t
ttgaggactgcatcttcatccaatccctgcaataaataaacaataaaacttaagattcgttaagtagagaaatttcccaaaaccgagctgaaaattttcaaaggttaggacatatggttacatcaacatagaggtcataaaggtcacaaatcttgttctccaatgttgcatccatgccaaatttccttctattaactctttcttcagaaccagtttcttgaaaatcatcagaagctccaggtggaggctctaatatctgaaaaacagttatgaacttttttatcaagagcagcaaaattctaactttagttgataatacaagggtaacaatgaacaagatcaaagatcattgatcttatatagcaggatcaaaaaaaaaaaagggaaaaaaaacnctggnnnnncnncnnnnnnntttttaaacaaaaaaaccccctgaaaaaaaa

SEQ ID NO: 5019 - DNA, 654 bp, Gossypium hirsutum
ttgagaactgaggccaccgcctcatcgaatgcaagttggtaagtgtcaatacattgtaatacttgtacatatttggattactaattgatgtgtggaattttcttctataataagctagagattatagtgatttattttcctaggttgagccccaactcgtggtttgctgtaacagcagccactcccgtcttggaacaatcatgatgttgctagacctagtcttgatagaaacctttttaaccttggacctctaccgttcttacagttgaccttgactgactttttagaaattttggtggtttgactactcttcaagtcttattatacttgtaaaatccctcatcgatctactgtcatgatggaagaatatggtggttgtaacttttttgccatgcaaagtttaatatcttaatactcttggattgagaataataaacagaaaaagcttctattatcacaagcaactgctaaaatggcattaagctgaccagtaatttggtgttcatattagagtataacatgtgtctactgtaagaaaacaattgccatctaagaagttgaatggcatatgatttacttgtagatgcagtattttatgaaggttttttttttttttggtttttttcccgccccccccccccccaaaaaaaaaaa

SEQ ID NO: 5020 - DNA, 649 bp, Gossypium hirsutum
tccgttacctcatgccttgatagggaagccaggcctggaaggatgtccctttgaaagtccctccgctgccttcctcgccttcccgggccctttcgtgttcgacttgttaacaaagatgtcgttcctgtttcttctactttaaagttttcaggaaacataggcttgggcatataatcctcttcctgggtttcagctaagttcaaaatcattgattcaaaataatcaatctcttccgaggaagattcatttcgatccccgtctttacctcgcgaaagagcctcaaacttgctctcaagatcctccccaaaagaggaaattgtctcaacaaaccaattaagggggtctgtcgtagggttttcagatgaactgcaatcaacatcatccgaactactgtcctgaagaaaagatgagatggctactattgcttcagctgcaatcgttatgagttcatcctgcatagagtcatctttgctttgtactgattgcaaaggtggttcaaatgccttttccagtaattcttctccatgaatgacatcttcaggctcaggaattagtggcacttccaaatctatcccttgagtcatcttcataccactgctcggaacagagggtacaaaagaagcttcatcctcatcgacacaggagttca

SEQ ID NO: 5021 - DNA, 538 bp, Gossypium hirsutum
ctgggggcccaactctctacatcgactttctagttaagcaatgatccggattcctgctgatgaatcatatcctggcaccattataactctttcaaactcttctccaatgttttctacctacttctctcttccccccttttccctttctgtctatttttgctattagtccttatactatacattagttataaacttagttttagttatttttaatctttatacttttttgaattttaaaattttaatcataaaataaattatagtaattaaatctgttaagtcaagttctattattaatctcgtactatgcaaatgttggatttcgtcttattttctaatttaatcattgttagttcttatacttttcaattttaaaattttagtcttgactcaaacggtaaatgttaaatcaattaattaaaataataagactattctataagtattacataaaaataacaaactgatattgcattacatatactgaaattcaaaattagaaaacttataagatttttttttcgttcttcttttttca

SEQ ID NO: 5022 - DNA, 656 bp, Gossypium hirsutum
ataaatgttatgactttgacatcttcaaatctatttggatagaatatttttttttctataattacagtgccctccactaaaagacatttaggaatcctgacaataaattttcttctaacggcccttttggtatgcttgatgtaaaaagaggagtattatgttcaataccactcaagataaaagatatatcaaggtgtttggtcgatgagaatcataatatttattattattattatcttgtgtttgctatcaaataaaacaaaaactgtcaatccaagtgatatttaaataccagatttaattctgttttatttatccaaaagtcacgctagttttagctttatcaaatgggtcgtaaatatgatgggatgttattaaacttttcaaggcaaaaggataatattctataaatattttgaaattaactcattgacaggcggctgtcgatatgtccgagtggttaaggagacagactcgaaatctgatgggctatgccggcgcaggttcgaatcctgctgtcgacgatcttttatattttccttttttttctcaactcttcttttttgataattttctgaactcatgtttaaggttatgctaatgagactgtaataactaagaatcctgaacaatggataatcatgggcgtttctctt

SEQ ID NO: 5023 - DNA, 375 bp, Gossypium hirsutum
  misc_feature (367)..(367): n is a, c, g, or t
  misc_feature (370)..(370): n is a, c, g, or t
agtcccctaataatgtcaaatcacaatcatccactccttcgattcatctatcccctcaaaccccacaacttccccttcgtagatcttcacgtcggtctcttcaacctttcacttcaaaaacagtagatgaaatgctagatctaagcacgcctcgaaaagctttggaagatttggatggaattgggaagtgttctgggaataatcgaaagggatccagtgtaaggacgccgagagccccgaaatgtaagttcaatgaggaggatagggaaatcccagaaatgggtaaagtgggtgaagggaatggtgaggttgaggatgcgttttgtccggtgtcacctgaggcgttggagagtaagaagaggaaganggnattga

SEQ ID NO: 5024 - DNA, 638 bp, Gossypium hirsutum
aacaatactggacagcaatagcagaactcattcctcgcgaggtccctaatatcgaaaagaaaagagggaagaaagacaaagagaataagccctcaataactgtcatccaaggaccaaaacccggaaaaccgactgatctttcaagaatgcggcacattctcgtgaagctgaagcatactcccccgcctcacatgcttccacctcctccagcaaaggaaggtaaagaaggaaaggatggcaaaaacgaccctaaaaacggaaaagaagctgcttcaaatggaactgcatctgccgagaaaatggcgcctgaaaaagatgacacggcaaacggttctgcccccgaacacgatgctactacggctactaaggaccaatctggtgccgaagcagaaccagaagcaaaatcgacagcgtaactgcttgtgatacatttacaaaggtttattcttccccattctttttattttcctcgagagattttgattctttatgcattccatatttaccatagtatttatcttgcaagtaatttagtgacttcattcttaatagaatttcatgtgatttgtgattggatttcaaatatcattttatttttgcttatttaacttcgtggatagacttaattgtgtcatttg

SEQ ID NO: 5025 - DNA, 617 bp, Gossypium hirsutum
  misc_feature (310)..(310): n is a, c, g, or t
  misc_feature (399)..(399): n is a, c, g, or t
  misc_feature (439)..(440): n is a, c, g, or t
  misc_feature (461)..(461): n is a, c, g, or t
  misc_feature (468)..(468): n is a, c, g, or t
  misc_feature (492)..(492): n is a, c, g, or t
  misc_feature (499)..(499): n is a, c, g, or t
  misc_feature (510)..(510): n is a, c, g, or t
  misc_feature (534)..(536): n is a, c, g, or t
  misc_feature (541)..(546): n is a, c, g, or t
  misc_feature (578)..(578): n is a, c, g, or t
  misc_feature (605)..(611): n is a, c, g, or t
tgtctcactttgacctagcacaagcaatggaaacattaaatagtttgagcattgctaatgtaagactacactatagcagagtttacaagacaaacattataaagaggatgcagcatgcggaaatcagttgtatcaaagatttccccttttttctctttctgatgtaataaatctaatattattaagctaatgttgcatgcttatactagccaaactctaggagtttaggttaaaacccctcaaaatcaccccctctatggagaacaatatgaatccttttcagttccaacaaactggaaccaaactttcnccttcataaaaaaaatcaaagggcccttctcttcaacaagttttaaaaggcctaaggggtaacggacaaaaaaaaaggtcttactcaanatgtgaaaaaataaagaaaaagggtatataagatcccttnnaaaaaagagaaaaaacacccntgtttcnttttccaaaagggaaaacaaaaanggacttnagttggccaanaaggaaatcctgggaaaagttctnnnctttnnnnnnggaccaacccttaaggtggaaaaaaacctccnaccaaagcaaagaactccaaacatctnnnnnnncttggg

SEQ ID NO: 5026 - DNA, 638 bp, Gossypium hirsutum
  misc_feature (286)..(286): n is a, c, g, or t
gacagagcagtggcttaatcactcaccatttgaacatttattggattttcttcacatgactttcaggaaagctgaatttgctagctagtactatttccatgctaacaaattaaacgtacaaaattccaataagtaggtagaggtttggatttcaaagaaaatgaagcgaattcatcaaagtaaaacaatagaaacaaattcttattctaggaaacatcattttgcctcaaatgtatttgagtttaccttgcttcttgacctcataggagcttcagcaccctttgtnttatccttcctgtattaagagtaaacaagcatgtctatatggttaccaagttcataaagagatgagaatggaggaattgagaaggaatatataaataaacatctaaagaggattattggcgagttaacagttgcctaacaactccagatgtattttacaattccaatcactacaaggatgatatgtattccactccaaagagacaaatcaaagaaatgttatgtaacacatatccacaaaatatgacattgcgagagaaccaacttaaagcttacatttttgtttgatgatttggttcacgttgagtgcatgaatcactcatggaaacagacttttgctcaggctgttgata

SEQ ID NO: 5027 - DNA, 653 bp, Gossypium hirsutum
aatgatttaccagatgttcatcctgcaagatgaaagcttaatttaaccagttagaacatgcaatagcttttactcaacttgtcaaaaatatttagcatccataaaactgctaatttgcaacaagttgaaagaatttaaatatgggaaagtcatactcctagaaattgcaacttacaaatgcacaaaaagaacaaaaaaaaacaataatcatacaaacaaacataatagctcaatgcttaactgagccatctaaaacgacaatagttagaaacactagaggcaggagatgtgccaacaatcagcaaaacacaatatatgttatttatggtacccctacatgggtgcgtccattatatggatgtcataaaggtgtcaaataaacccctatcagcctctatgtccaattcgagcaagatgtcaaataattatcagacataacttgagaaaaagtgaagagtcaaagccacatatatttactacatatcttaaaagataaatagacctttaaactaagaaactaacatcctcacatgcaactaacagtagtcaaaagtgaagtcaggcatcattcacatggtaaacagtttcacctccaatttcattcgtatcaatgctattttattattctaaagatgtcatgagtgagtgtgaac

SEQ ID NO: 5028 - DNA, 635 bp, Gossypium hirsutum
tattttagtattagttgatgggttaatatactatcttgtacctgattttggctttaaggttcaatttgatactaatatttttaccaagtaaccaattttgacttcaatgttctatttagtatccgagaatgttatggtcccaagtaagcatctataatttttttactagattagacatcaaagactcgttggaccacatgatgccatttggtttaggtaccaaattgaacattgaaatcaaactcaggtagcaaattaggatgaatgaatatttttctcaagtacccaagtttgacttcaatgttctatttagtatccgagaatgttttggtcccagttaagtatccatattctttttactagattagacatcaaatactcgttggaccacatgatgccatttggtttaggtaccaaagtgagcattgaagccaaactcaggtagcaaattaggacgaatgaaaacttaggtactgaattaaatgttgaagccaaactcaggtaccatattgtatattaaccctatttgaattgttagaattagatctcaattgcatctgatgatctcaggtgttattaccttttacaaggaatttgtggaatcattgttcaagtccctgggaggaatggcatct

SEQ ID NO: 5029 - DNA, 224 bp, Gossypium hirsutum
  misc_feature (49)..(50): n is a, c, g, or t
  misc_feature (187)..(189): n is a, c, g, or t
  misc_feature (191)..(192): n is a, c, g, or t
  misc_feature (217)..(217): n is a, c, g, or t
tctctcttacatcttgattaatgcccgattcatgcttatgctgtctagnntaatttagttactatctgctctatgggcccttgtttgatagatatgtgttagtgaatccttttatgctgttcatttagtttatgcatccttttagtttacttttataaataggatttgaagtcttggcaaaatccgnnnanntttgcttctggatatcacgctctanaatctgc

SEQ ID NO: 5030 - DNA, 626 bp, Gossypium hirsutum
attttgttttcgcaaaatgtcaaacactaggttttaagttttgggaactgccaaaaccactggcctggtgttgacggttagttccttctccccctcgacaacaatactgctttgccttcccttttgtcctttacttgttaaccttaaagttattaactttacataaaattataaaaaaagaagaagttattgtatgtagattaattactttgaattcattcccatttttgttgtcaaatgcgagggatgtttctatccgctctgcgattatctaattttagattcttttgcccaaatcaaaccaaaccatttaaggctaagctaataggtcgaaaacctgaacaaactctacctctttcttcttacttcatttctctaaggttattaaattaagggaaaactaaaagggttgtcgtcaagccaagctaagcgactttttgcgtgttaactttatattgtcactgtacatcgtttatctgttaaactgacacaacaagacgcacgcaaacaaaaagaaaacctgttgcattggtattgtccttcatcattggatactcgattgttggggatttggcatcaactgttgtttgtttgagtgggctcagcctcaactcatagctggaatc

SEQ ID NO: 5031 - DNA, 619 bp, Gossypium hirsutum
cccgcttggggtattaactccattaccagcgccggctcgacctccattgaataaaggttgagtggagttgtgggtacggagatactgcaccaataatggtaattacaaacccaaaattaaaacttttatcagtatcttagtaaaaataaagaagggatatttaccatagaatcaaactaatgagtaatggcttaaaaccatgaatttgagtggagagtttactattaatcgaaaacctaagataattaactcgaatggaagcagcttaaacatcggctttttatagcgtacagcactaagcgcaaatttgggctttaaaaaccatttgggactaaagcttaactcatccatgccaatcacattgtttaattccatacaaattatctgattttagtgcctgaaaacaggcagctttagctgatataagacaaaaatgtaaaaccttagcagattcttaaggaaattaatgaaagcttttttattttgaccaaaaaataaagggtttttcttggaagaagacaaaagttcccgctgcttaaattttaattttaatccttctagtactacttatattttaatttaataattcttactattatccacgcactcatatcaatgt

SEQ ID NO: 5032 - DNA, 523 bp, Gossypium hirsutum
acttgattttgttctgggctatacttagtcttttgactccttttcctaaattcaaaaaactgttttaattcagttggcatgcacctttcttcttttgttgcatgctttcaacttataaggtgaagctagaaaacaagaatcagatgataagtgagggcttttatgtacgcggtgatggaactgtaagtatgttgtacagcacagattatggtttttcttttttcacatgaaaaatgcatcttattgcctgattttctatgtttgttaatctcttgtctctagtgttcattttacttttctgaggacttcttgtcaaccttatttttccaagctggcttcaacactgtagatatcagcacatactgcaagcaaatcaagaatagtcataagaatataactatggataggtatgtttagtagttgattattgcttaaaacttaaaagttatccattcttgttatctataataattttctaaggcataagtatgtaattgatggcgactgttgcattcatattatt

SEQ ID NO: 5033 - DNA, 594 bp, Gossypium hirsutum
  misc_feature (9)..(9): n is a, c, g, or t
ttcgctccnattcagcattcaagataaactaatgcaaagaaaaatgcaaacacaataagctaacctgaatagaagtatattatttaaaatactaatattttgtatattaatattttttttggtaaatagattaattattttttaataatattaaaattttcaaatcataattaaaatatttgtattaattttaacatatcatataatttacctcatgtaatcattatttgaaatattaactaaaaaatattattaaaatatattaatcattttgttcatatgtagtactaatcaaagattcctattattaaagcaaaaaattgatatattgtatattcaacttttatttttattttcttaaaaaaaattgtaaataataaataattaatatatagaaaaaaatatcaaatactgattaagtcttaactcgattgatattaacattgttactagagcaagaaatcatgggtttaagtgcaataaagcacattatcctcctctttaaaaattagggtaagactataagtaattctaaacattgtataaaaaataacatataataattgtaaattaaattataattattttaatcga

SEQ ID NO: 5034 - DNA, 400 bp, Gossypium hirsutum
ttcgggtttaagtcagttgagatgaagtaatgtttttgatgcgtgttatttctttataaattagaatgtgacaaatttcatttcttcatgattaaattgtaagaactataatagttgatgtagcttgtgaatatttagttttgtagaaggaaactgtctgtataatcattgaacaaatgttgaccgtagttgcatttcaatgcgaagagataagatgttttagttgcttgcctatactagtaggcgcagttatggattattgttagcgatcctacggatagaaaaagactgagctggaaatgatacgaggtacaattagtagttatttaaaatagcgacgtcaaagttgcattttttagtttacttgctgccggacagcaacagtgatcatcaccaccct

SEQ ID NO: 5035 - DNA, 657 bp, Gossypium hirsutum
gtttgaggtaaccatctgttgattgacatagttcatttttggtacactacacattttacccttttccttacctttctgttaattatttgtcacaacatcagtatgatggtactgttctctttaaatcattagttattcttctttgatcattatactgtatgaaatcttacttctttcatgatttgtttgttgaaaaacctaagttgattttcatggttgcaggttcatgtgccaccatcatgcatgcttgatggtgttcattcgcaacatttttttggtactggcgtcattatatatcattctcgtagtatgggcttggttgctgttgacaagaacacagttgcaatttcttcttcggatgtgatgctgtcctttgctgcttatccaattgaaattcctggagaggtgtgctatttaacttaaacattattagaaaaccataacctattttgttgagtttcctatttgatgcaggagtttttaagtattttataatttataatatcttatgatttcagatttatttattacgtattagatatattgtagacggctagagttattatttatcttcagggtttaaacctagggctgggaataaaactttatttgcaagacagcctagtaactttacttgctagaaaggtacatgtggaa

SEQ ID NO: 5036 - DNA, 618 bp, Gossypium hirsutum
cacgtctttgcagagttgtgcaattgattgttggacaggtttgacattttcgtcgagtaacttgagtctggttccactcgctatattttccgatagtcaatgaaagcatcgatgttgtggatggaatctagcagtttctagaatgggattggacagaaattgagaaaggttgaggatggaattccttttcagtaaaaaaaaaatccacattacacttcagagaattaggtgagaaaagaacaattttctattgacaagaagcatattccaatcatattccttctgctcttcttatagtattcttatagccgttatgctcttgctgatgtgggctatatgacaaaatacttgaatttcagaggaagccttctttgacgtatggccgtgatagttttggatggaggttcagtttggttccttggttcggtggcctttggttcattcataacaccaattttctcttagaattcaagagtttggtcttaacatggttgtgaaatggatcttatagcagctcacgttggattacccgaccattaaagtagctagagaattctattgatcactcttcacttgtaccttttggggaatttggagggtgagaaatgtccctattcc

SEQ ID NO: 5037 - DNA, 637 bp, Gossypium hirsutum
ctggtgtcaacacgttgtccggaaatggagatgtaatcagatttgttgttcaatttgctaatgctagctcatcaaataatacattgcaataataatatgagatacaaatcaaatatcatctctacatcatccaaaccattaaactatagaggacatttcattcctaaactatgaagcacggacaagctggaaatcccctcgtaccagtgtcgacacggtgttcgacacgccggaacatgtaccggacacatcaggatagtcaaaaaagaaaaaaatcagatacggtcaaaacacgcatggatacaggattttggtggctgaaagtcgatgaaaacatcaaaatagtgatagaaaatacctgtttgaaacccagatttacactatatcgttaagatcttctcaaatctaatctgctgcatgtgattaggaggtagaaagaaataaaacaagggtattttttcaatattccgacaccattgacggcagccggaatgacagtggtgacgctggttctgagttgaggaagaaaaagagatggacagaaaaggaaataaaggtagaggagagaaataaagagactattttttaagagtctgacaaataataatgagttggttaaattctgctattagtccca

SEQ ID NO: 5038 - DNA, 619 bp, Gossypium hirsutum
gggattttcgcttggttaattgcaggaggggaagattgggtaactcacaatactcgaaggatttttgaggctctttacttattcgtcaacttcctctgcaagtattttctaatcaattaagtgaacagtttatcaattttattcaatacaatccaatctcgccacgtccctttcgctgctgatgtctcattcgccccttccttgtgttttaattcctgaagtaaggtttaaacactctcaaagttaaccccattaaaaaacctttaaaaaaacacttgtcatgtgctgattgggtaaaatttttaaacttaatagtgttaaacttagatactactttattttaactcaggtaacatttggcatattaaccctgaatgtaattatccttaatttcatctaattttttttcatatagttttttcactattttttttccaacttttctattcttagtggtttttttttaatttttttgaaaatttatcttttaaaattttgttaaaacttttaaattttaaaaagaaatacctggtacactgtcctagaaatttaaaagtttcacaagcagagttaaaatgataacaaggccatgtttggttcgctgtattggataaaaaac

SEQ ID NO: 5039 - DNA, 613 bp, Gossypium hirsutum
ctggcatttctctaaaaggtatttggtaatgatatgcatttggtttgaacattgttgcgtggaacattttaatttatttctcgaatgttctgctctagataatgatttccaagacagtttggaacaatgtgatcaaatgtttaagcctgggtggaaggatatttttcgaatgaatcaaaatgagcttgagtcagagatacggaaggtttatcgggactcaactcttgatcctaggagaaaagcatatcttgttcagaaccttttaactaggtttgttccatgatatttatctgctttgtctatactaattcctagagtcattggcattatattatgtgtttcttatcctctgtttctttttatttttggttcatcattgattctttgttattcttttgacatgagttattaatcagttagtaaattgtttattttagtcgttggatagctgctcagcagaagttaccccaagcagcatccactgaagcttctaacggcgaagatgtatggggatgttctccatcatttcgagatccagggaaacaaatatttgggtgtgagcactacaaaagaaactgcaaactccgtgctgcttgctgtgggaagttgttta

SEQ ID NO: 5040 - DNA, 615 bp, Gossypium hirsutum
ctgagaacagttgcagtttcggtgaaatgcctcaatgggtggagaagttgaagcaaatgaatggtaattttgcttgcaaggatgaagatgaaggaactgaagatttaagtgcatctttggttgtggaaattgctgaaaaaatattcctttggaagctttgcattgctagggttctatttttagtcaatttcaccctcgaatcaaatatcatctcattatcccaccgggccatgccttagtagcttttccttctatctttgctaaattttattgatgaggttggtaaaagttgcaatcagagccagaggctaatctacggtgcctggttgttgcgccgaactcttaaaatgtaaatttgttattagattgttaaattttttttagtaaagtaacattatattttgatccttaaaattataaaatttaatttaatttaatttaattttttaaaaattataaaaatatagagtataaaaaattaaaattttatatagcctctaaaaaattattctgacttcacctctagtcagaaaatatttttttatcgcttaaattataattttattattattaatttaaaattttattattttaaagacaccatgtcttttaatt

SEQ ID NO: 5041 - DNA, 606 bp, Gossypium hirsutum
atgatctccacttcatagctgcaaagtttgataagcatggactgcctgaatcttttaaagtccttgcttcaatattgaggaaccatgttccaacttgatgctggaaagcatactttataggcatagaagaaggcagatgataaaaacatgattttcgccttacctacttagagacaaaaggcagaacatacaaacaagttataagtaaaatagcagaggaaaactatgctgctctgattcttcattattcttgaagtactggtgtctgactccggtgcattagacaagtacttgtgtttgagaaaacaacccgtcgatagacataaaattaagaaagaaaggattgaatatgaactttaccattaatgcatgaacttcaatctttcccaattcaggaaaacaagcatggtgtgttctctcaagttcccctacacgttaagattttggcacatattaatagagctataataacaaagcatttcatctaaagttaaattatcagaatgtctcaccatatttttaacactttgaagaagctatcataataacaaatcattgcattgatagtaatagtgttaatgtgtgatcaagttttaagtatacaat

SEQ ID NO: 5042 - DNA, 639 bp, Gossypium hirsutum
cttaactactcatcgaagactatccatacgcaacagacggcttactgatattgtctgcgatcgagcaactagttcaagcctacgtacactactactacccagaagcaaatatcattgaatcagactcagaactcaatgcatggtaccatgaatccatcaacatagtccatgcagatattcaatgccagctggtggctgaaactctcgactccaaacaatcttatctccatcctcaccaccattatctggcttgcatcagcacaccatgcggcggtgaacttcgggatgtacccttatgatgggtatttcccagtacggccaccatttatgcgacgactagtcccaaacgaacatgaccccgactacacaactttcctcgcggatccagagggatatttcctagcatcattgccatgtttagatcaaatgttgcactatatatctgttcttcacatactatccacactttcagctgatgaagagtatttgggagatagaaaagacctttcaacgagaccctgaaattgttgaagcattctacaaattttccatggaaatgaagaagatagggaaagagattgaaaaaagaaatggtgacccaaatcttaggaatagatgtggggctgggatttcaccata

SEQ ID NO: 5043 - DNA, 646 bp, Gossypium hirsutum
cttcttcttcttcttcttcttcttcactgtgttgttttcatgcaattatagtgccattccatgaaacatattcctttcaattattattctctaaagtaactaaattgacactttactagtcgttcctcaatggatgacaacaattgcggctgttgggctgtcttgaaacgcggcgtttgcaagtcctctgcatttcgtgactctgctaacaccattcctcgtactagtctcgtttatgacactggtattttcttactttccgctttctcttcagcttttggccttttgtttttctttttctcttgtgtgcttgctatctcttctttcttttcttttgttttatgttttctatttcttcttttcttccttctactgtttcttttgctgatgagttctaataaaaagtaaaaccccaatattgcttttcccatttttgttctgttctttttttacttaatattttcaaaattttgagtcaataagcactatcagtctgggaaacatttggagctacgagtttcaagatttttttttgatgatttatgtggccaatgaatgtggaactgttatttattttttaaatccattgtcagcttatatatatcattttcactgggtcactaaaaatcacggcactctctctttg

SEQ ID NO: 5044 - DNA, 629 bp, Gossypium hirsutum
  misc_feature (621)..(623): n is a, c, g, or t
tctttgacactttcctgaaattgcagcaacaatatttccaagcctgatggtttcattgataacctgatgaaaagccattgatttatatattaaacctcttcgtgaagaaacagtagtgaaatctatatattatagtgttaaacaaactcaccatatgtgtgaaagtcattgatttatattctttccaagtgattccggaatcctttgtttatctttcccttaaaattgtttcatgttcttgctggtcgaagagacatgcatgtcaattattcaaagaaagtaaacaaatataagaatagcaatcaagacttactgtcagttcaactagggccagagggttgctttgaagatactgaagagctcatacaacagcagaagatgcagattcaaaagcagcaaaaggaagtgcaaacaacaaatctaatgctgtctgttctgataggatggttccagctttgttcatctcttccaataccacatccagaaaatctttgtcttgtttctttgtctgttcattgttttgttacgaccctgcaaacatttctgttgaagttagttcccatgcaacacatgcagcaacaaaggtgggcatgcagctcatgcagattcatgcacgtaagnnntctgca

SEQ ID NO: 5045 - DNA, 609 bp, Gossypium hirsutum
ttcctcaatcttctcgaacgccaaaaacttcttggccactctggggtgatcatcaaagtgtaacttacgaaaattcaatgatttgccggatttgtgaggttgaaatacctgttgtacatgtggaagagcactctcgaatttgtaccatagctgatagatgtgacctgaaaggtttaaccgtgaatgagcgtattgaaagagttgcagaaacccttgacaaaattctcgattcatggacaccaaaaagcacacccaaaagtatagacactccacgtgaaagttttgaggctacaagagtttatacatcaagtatacatgaagatactgatgacttttcaccaaagcatagcaatcattcacgtcaatgctctgatgatatgcttgattgtgttcctgatgttgataatgcatttcttatggagcacatgaatgctctgcatgatgtgtcatgtgaaacacatttaaatttaagcacacttgatctatgcacaaaagcttcatcaggaggaagcttgacaccgcgatcaccattgttaactccacgaactagccagattgaattgttattgagtggacggagaagaatagcagagcttgagaatcaccaac

SEQ ID NO: 5046 - DNA, 634 bp, Gossypium hirsutum
gctgattttgcattactcttatacagtttaatagggaaagcgatggctctctaaaacctcttccagcaaagcatgttgacactgggttggggtttgagagattgacttcagtacttcagaacaaaatgagcaattatgatactgatgtgttcttgccgatttttgatgttatccaacaggttagatgatgacgccaatgtattttttagtttatattttatatgtgtttcttttttaattgatatcatgattaatcatatgtttaagtttctgaatgtgtatatacaaatgtgcccgttgacgctagttcatgtgccgtgtgttagagatggtgtgaccttgatacaattctttcctttccctaagttttatatttttcttgaaactgtaattcttgtaaatgttccatagaaaggaaaaataatgattcttctctttatcttcaccagcgctttaatggcttatatacctctgttttccatctatgctagagaatatattccttagttactagtctgataaactattttaacacttgatgatttcttaactttttatcgagttattatgttaaatacagaatttgcaaactctaaagctattgagaattatttttttccagtttatctgactt

SEQ ID NO: 5047 - DNA, 577 bp, Gossypium hirsutum
ttatatgctattcaggcctcttactttttatccttttcgcattaatccctgtatgagtgttggccatttttctctctagttggtctatctttttgacaaatcttcatacatgatacaactacatatttacttgtcatataaactgatacaaattccatggtaatatgttttgaatagcgtgcaacagaatttaatcatttttctgtttctttccgtgcttgttatatttgtttcgattggaatttctttctaacgcgggctggtgttttcatcttgaagttattctaatgagaaatcagaagcacgtataactgagccaacgatggatgcagactcgaattcatcaaacaatccccctgaggtagagctagaagaatgttttgcatcctttggcatatattttgaatgataaatgaagtttacatagtataattgatttatggtactgaagttcatctctaggcattcacttccttttcatgttgtactaatgcatttctatcttcaattatatttgtcaggaataataaacgaatcgatatctcagttgtaaagagagatgagaaacatcatttag

SEQ ID NO: 5048 - DNA, 622 bp, Gossypium hirsutum
taacttagccgctgttctttagaacacatgacgttcctggatcccagctgttataaaaagcattggtgtcagtggtcatctttcttccatggccagttttgcatctgcaaaatggttctggatatctttgaataaaaatggattatcactatctttgattctaccacaaatagcattttatccattttgtttaaggtcttcaatctgcgctttgctgatccagtgggatgtctcatatcctttgttttaagttttaaccaacttcttgaaactatggtttttgattcaccctactagaaattgattaacctctaaggttataaatttttttatatgcttcacaatgttcatttggtagaatgcatcctgtactaattttaagtcaatatatttagttcttatttcttgcttcttgaagtgaaaaaaaatggaaaattattattctctaaatttatatttacctttctcctctctctcttttactgttcttcacttcggtaatttatatgagcaattttttgaattggcattactcgggttctaggataagtcttggcgtgttcgttacatggtcgcaaatcaattatacgagctgtgtgaagctgtcggacctgagcctact

SEQ ID NO: 5049 - DNA, 653 bp, Gossypium hirsutum
cgagctgcttctgtgaagaacattcctattcctggggttcgcttgatagaggaatatgatgaaaacgcagtggaagtggcgtttgttcgcagttcttccaagtacttgcgtcaggttgaaactgatgtcgagatggctttggatccatcccgtgttttatatgacatggatagtgatgatgaacagtggatttcaataattcagaaatcttctggaagtgattttggcaattctttggaattgtctgatgaaatgtttgagaagattatggacatgtttgagaaggctgcatatactcaacagtgcaatgagtttacttctgaagaaatacaggagctcatggctggagttgggtccatgaaagtaatcacagcaatctatgggcattggaagcagaagaggcagagagttggaatgcctttgattcgtcatctccaggtatctttcaaaatgcttatttttcatgcatttgtttctttgacttttatgcctataatgtcaatcctttttagtctacgagcagattggaatttatggatttattttgtacactaaaaatgcaggtctattgattcttagttaatttctggattcatcctcaaaattcacataacaatcaaatcgaaatagacttttttaattcatcttcccaa

SEQ ID NO: 5050 - DNA, 605 bp, Gossypium hirsutum
agctgttatgccagcagtctccaaattattacgtggatatactccggatatgaaggcattgaacaatgctgtaggtatgttgtccatcttaaacagcaagcactctaatatggtcagtgccatacaagagtacccttggatgatgactgggtctggaaggccaccaccagtttatgatgttcggagaccatctgaaattatttcgttggaaggatggggtgcattatggagaggccttcgtccaggagtagctcgagactctgtatttggtggcatttttttctctacttgggaacttttgcaccaagttatgcttaattggaaggcagctgggatggatcccccacccaggtgcttttttgagctttttccttgctatttggtgcatagagtttccctgttgggtatctttggttgattaaatgcatgcaatttcttatttagtttattataaacctgcaacatcgttctaacctatgttacttagaatcgggtttgagttccagatattgatgtgtccagtaggaatatgttaaattttttttttaatgtttttccatgtatttggagggttatatcctcatacccatgtccaaatgtgttgg

SEQ ID NO: 5051 - DNA, 637 bp, Gossypium hirsutum
gctcgtccagcagtatattgttcgtcttcaaccggttattataaactccgggaataaccccagtatgtagaaaatgtacagccttggctacatcgattagaatcgctaatctatctgaccacttaagaaccttctctggacaagtttctgcaccatttttccatattatgttactcagaatccagcatatataatattcaacgttcaaacacaacatttacctgacaaatgcatacgatagttcccgttaggcacatagtcatatacgaggaagactttgcttgcgccggaatcatcttgtacgccaccagcaatgcagtgacctaaaaggcctactaaatgtggatgatgaagctttgacaagaaatcaagcctaactttaagattttgaattgaatatttcttctgtaaagtcaatgatcgaatggcaacataggttccattctccaatcttcctttgtagagctgaaaaatagaaacaaatgaagttagataggccattgatgataccatatgcaaatatcagaaccaagtacataatttcccaccctgttttattgaggatacctttccagtaaacccttcacccatgaacattgatgaatcaaagttatttgtagcttcttccaactcttcc

SEQ ID NO: 5052 - DNA, 582 bp, Gossypium hirsutum
agagcttttggtttttttctcttttttgtgtcattaatagacaaatatctggatttcaacccccccctttttttttctcatctggttgtttggatgtctagaaaatttcttcctttttcttcttggcttttctttgttgtttctggttgagttttagctttttctttttattggtattctttatggtcacagtgctttgttgtgaggtttgcatttttgcattttttaaatttattttttatttatttttaatttggttttccaaaatgattaaaaaattagaacaaatattgggagcttgaaaatgccagacaattttaggtgtattttgtatttaacttttgaggatgaaaagtttgtacagctgagtgtaagaactaagaactagttcattttgccttttgttttggataataaaagtgtgatcttctatttttcttcttctctttaatttaaagagaaaaaaattttgatctttattagtatttacattatttcccatctttaaacttttagtaggaaagatttttttaacatatattatgttaaaaggaactatggatgagcgatgagtgtttactt

SEQ ID NO: 5053 - DNA, 558 bp, Gossypium hirsutum
caaaatgaagagaagggaggtgggttttttgatcaaatcatttcaaacttggtcagtcctttaagtcccaaagctggaagcatcagtgctcaaggaaaagctgaagcttttggtgaatctggtttgagaccggaggcagaaaagggtggtggaggaggaggagggggtatgaacaaagaggagcaaacagaggatggaggaggtatcattgataacattgtctcgcagttgcccacatctcttccaggttacactcttttaccatcataaatcacttttaatattttttcatttctggggtgttgctttggcttcaagtttttggatattgattgtgagtgtctataattatgaataagcagatgatgcagcacccaccagtgatgaagctactattctgattcacatcgttcaagattaaacaactgttgatgattgaggaatgatttgtcttcttgtgttaaaatacatatttatttaagtattttgtttattgtttaatgtttaatgtcaaaatcctttgagacaatttattacaagtgttggagattgattgag

SEQ ID NO: 5054 - DNA, 606 bp, Gossypium hirsutum
atggtgattctatcaccaattctaagttaattatgaacaacaaattttctccatccatgggagaaaacaggtttcttgtacccttgtttacggacagtacagacaattggccagacccgtgttgtacctgagaggtattgtgacggcatgacttccattaaaacttggcaaggaagacaggttttgatggtcactaaattaactataaatatgactaaggcaagcgaacctgttgaacaataatatacttatggtgagtagggaatatcgtatccacagggactaaaaatactaataattaccgtttttctattatttaaccgacaaattggagtgattgtttttaatctaaaattactaaactaatctaactaagaaaatcaatacagaatgaaataagaaaataatcgaagataaccaatgagacagacaataccaaagaaacttcacctattattatgaatctgaattaaacgatttattcacttatgttttaatccgtataaatccctaaagtatgttaatatctctttcgagagtaagaacaactgactctaggttgattaattgaaatatctttctaattaaaacccctattgtcgcata

SEQ ID NO: 5055 - DNA, 641 bp, Gossypium hirsutum
tgaatgcttattgactatgaagcacggcaggtgagttcactagctgaggttcctttgcaagccaacatagtgtatcgttctcaatgagagagtctcgacaactcaagacagactagagcctatgctcattcattttcgggttctaaagaatgacaaaggggacaaggttgaggttggtctcgtggaagggctcgtaatagtgggaggatttggtcacgttttagaccacaatgtcaactctgtggtaagataggtcatatggttcagacttactatcatagattcattgagaatttttctgaagtaggagctggtcattcggtgcaagctaactatcatgatcttcatggtcaatgattttattcttcttctacatgttcttttatgcctcactgttgtggaacgttttctcctaattctgctgtttcaggtcaatttacttctcagaggtctattttcaattcgtttgatcaggcttagtaccttgattcaggggcaacgaatcatattactcccaatctgtccaacctcacagctgcttctccctatacaggtacgaccagcatttctatgggtaatggtgaactggttcctatacgtagtgtaggttcttttaccctcttggctggctctaggctctt

SEQ ID NO: 5056 - DNA, 609 bp, Gossypium hirsutum
tttatctttcagaaaacgattaccattgacatgggaactagtgccacctatcgattcagcatgcacctgattggagccccgctttgctcctctttgaatgacagaaacggcacaagaaacatctttcacttgaattccagattctccatctgtttttggataattttgcaattattcaccttcccaggaatagtgtaaagagaaacaagagttatgaaaatatcattttcatacctggagcatatctatctaaagcattttctgaattgttaacaacaatttgggacttcaggaatcgctcagtggcttgcctcagtgacagatttggcaacaaatcttccactttgcattttgtagaaaagcatttgggacaccttgccttctcaaccagcacatgaagaatgcctgcaaccgaccaaataccataattaaaaaactgacaggtggaaacgtaagcaaccttatagcactggaatttcacacaagaaacaagcactctggagctagagagcattttgcatccaatttttctttcactatcaacaaatcttaagaaccatacacttagaatgcataaaaaaaggaatataaaaaggtgccacaactaaa

SEQ ID NO: 5057 - DNA, 603 bp, Gossypium hirsutum
tttttgtttatgttcgtttgatgaggatatttgttcagccgaaaggccattctgtgtgtgtcggatgttatgttgttgtcgccgagaacgccaacgctctgctgcatcttcctgcttggacttttagcctgtgtgattcggctagtctatagattccatgtacaggggtgcatgacttgaattaatatgcatcccattgagtttagaagattgagttattttgaatttcttgttgatcattgtacgttaatgttgaacttttaataattaataggattatatatgccaggaagtatctgttttcttttttttttttaaataacaaaatttaatttttataatttaacttttaagatatgaatacttgcatccttccatccaatattaacgtggcaattattaaaaagattaaaacaaatcttttagttatcaatatttacaatttagcccctacgtaaaagtcagaaaaaaaatagaaaactaacaaaattcaaattttgaacaaatccaactaaaaataaacaaattaaattatttgctttattccatcttgtaattgtaatattattgatatgcatgattaatgaattaattcatcatgaa

SEQ ID NO: 5058 - DNA, 633 bp, Gossypium hirsutum
agatactgatgtagtattgactgcatttcaggcctgtgcttgttctcagggatgtatgaataatcttacctttggggacaatactttcggttattatgaaacaatcggaggtgggagtggggctggtccaacctgggatggaacaagtggagttcagtgtcatatgacaaacactcgaatgaccgatcctgaaattttcgagcagaggtatccagtattcttgcacaaatttggactgagagaaaatagtggaggagcaggacatcgcaaagggggtaatggactcgtgagggaaattgagttcaggcgcccagttgtggttagcattctttctgagaggcgagtacatgcacctagagggctaaaaggaggagcaaatggagctcgtggagccaactatcttataacaaaagataaaagacgaatctaccttggaggcaaaaacacagtggaggtgcaggctggggaaatacttcagattttaacacccggtggtggcggctggggctctttgtcttcttcccttggatcatttactgtctttaaaaactgttttcctggtaactttgatcaccaagtttgaattctctgtggtgttttgccatgagaagaacactataatatatatgttgt

SEQ ID NO: 5059 - DNA, 608 bp, Gossypium hirsutum
gagcttgcagatgctgtagtggccccagcaaaggatgaaaaggaagaggaaatggaacattttttataattttgtatgtatatttataaagccttatgtatttttttttatttttgaattgggattaagttgacaaaatatataaaattgagaattaaattggttaaaatttttagattacgatgatttgataaattcaataaaataataaaaaaatcagttccattagcatcagtaataactaaattaaaaaaaattaaactttaaaaaccaaaataaaatatatgaaaacttctaaacctaaaccatccaaaaataaagcactaatagttggatcactcgtataaaaaaaaaacctaattgacaaaagtcacattaattaaaaaatatataataaaaaattaattattattttattatagtcttgtagagttttttactcaactgactgctgacgaaaataatccataataacatctctactggataggttccaaaaagttcctttttatttgctacaattcaattgaaagaaagactgatctcaaatttacgtccagaaccagcatccaatttggaaactgaaattatttcaaagccattaccct

SEQ ID NO: 5060 - DNA, 620 bp, Gossypium hirsutum
atttcacagtaaaattgcttaaaaattatggtctgtaaggtttaggtgtatgtttattcttgctcttttagcaataaatgaaattggacatgaaaaatttgtttccaacttgtttgggaaatgttggtattacggattgtttcattgaggtgactcgaccaatatattatatcatgatcccatggccttgcacaattcctatgctctaaatatctttaccagtgcttcttctataaacgctttactccttatttgcagttagctatattgcttggttagaagatggtactgtatttgagagaaaaggagttgatggagagcagccattggaatttataacagatgaaggttggtgtacccttatattgcaagtttgctagatgatcagtaaaaaactttagaccatatctaactatttaccgatttgacaaatagaacaagtgattccgggtttggaccgagcagcagcaacgatgaagaagggggaacaagcattgttgacagttagtcctgagtatggttttggtagtgttgtagcggagcgtgatcttgctgtagtcccaccttcttcaaacctagtctatgaagttgaaatgttggattttgttaaggtgacaact

SEQ ID NO: 5061 - DNA, 662 bp, Gossypium hirsutum
acctcttccatgctcctatattaatattcaataatcattatatttcccatctgttatttttaatacagaagcggacaattctcttatatataatggccttggaatctattcaaatcattcagtttccaagtacctcaaaaaacaaaaaacactaccagcttcgaacttattttctcttttaataaactctgaaagctaccttaaaccttctcttccctcaattccttctttctcttattaatcaattatgccttcctttgaatttgataatgttaaggcagagaagcaagatgctttgtggagatacaagatggagaggaagttgaggatgggtcttagcttcatcgggtttctcttggttttgtttttgctgtcgtggcccttgttcccaactttgattcctgacaccgtcgaggttgccggagattttctccgatatttagtttccacttttaataagccgctcttcacttttgtcctcctaaacatcatcatcctcgctgtttttgttttgtctacccaaaaccagacccagaaactaaccaccactcccgacatctacgacgagtacgttagctctcgccggtgtatgcaaacatcggcagtctccacctccgctcctgtcacggaagagaccacggtggacaagcaaatcattctgg

SEQ ID NO: 5062 - DNA, 621 bp, Gossypium hirsutum
  misc_feature (45)..(47): n is a, c, g, or t
  misc_feature (317)..(317): n is a, c, g, or t
  misc_feature (320)..(320): n is a, c, g, or t
  misc_feature (323)..(323): n is a, c, g, or t
  misc_feature (325)..(325): n is a, c, g, or t
  misc_feature (356)..(356): n is a, c, g, or t
  misc_feature (359)..(360): n is a, c, g, or t
  misc_feature (406)..(406): n is a, c, g, or t
  misc_feature (444)..(446): n is a, c, g, or t
  misc_feature (497)..(498): n is a, c, g, or t
  misc_feature (588)..(590): n is a, c, g, or t
catgaacttatcagcttcaagttgattttcctgagcattaccctnnnggaggcaccccaggtatcatcctttctctttgctttccctttttgttttgtcgagtaaagtgtgaaattggaaagataaagtgacactgacaattgaatttgaacggaatcatttatttgacttcacgattgctgttgtgttttatgatgattatgatattcttttgttgattgatcaggtgattttcatccctccggctcctctacatcctcacatttatagcaatggacatatttgtttaggtatgtttataccactctcgatttacncangantngtgttgtatccctggtggctcacctatcgcnaannttaaacaactattctttctaatcttgctccttgctgcttgacatgntgatgaagttaccaatgaagtggccatgatattgttgnnnaagttgcttgtaaccttgcttgcaatgcttcctgacatgttgctttaagtnncgtgtcgacgtccgtgtccccctcaggatccctcctttgagatcctcttaaagatcttagtataaattttatctgactctggatatatannnaaaaatgtggtatattgtatgagtgaaaggc

SEQ ID NO: 5063 - DNA, 645 bp, Gossypium hirsutum
catgaccagcctgtgcagcaggagagaagggaacctgttggccgtaaagagagaggttgtacaaagaattaacctgcaagttggttaaatctttgccccagtgcaggcatccagagagccgaaccttcattctgcaaaaaaaaagagggaaagaaaagaagaggacaacccaaagcattgtgttaaaattgctaacaggaagttgccaaaagacaaagtataaaaggaaaaggaaaacaaacccaaccagtgatccagttgtgtatatatgattttccttcaattgcgatgctgcaagatcctccttactagcagagcttccagaggtaactgatggaacagataaattgaaaccaacaggtggagaagtcaattgaccatatcctgatggaattgtaaggagagcaggatttcctgcattgcttccaggctttaactgtgaaagagggaatttgaccccaggtggcatgtacatgttcccagttgaaggttgctgagggaccccactcgagtttaaaaactgatgcggtggataatgcatataaaatggtggaaaatagtgcagataagggaagtaattaggtggaaatggttgtcggtaaaggtgaactgctgggggggcagcagtaactgtgctctgaacag

SEQ ID NO: 5064 - DNA, 621 bp, Gossypium hirsutum
gatgatgggaagaagaggaaaagttccaaccattgtgtttgtatggtcaggcttgctctccatcattgtttcgttgctttgggtatacatcaatcctccatctggaagtaaggattacatgaagttcaaattcccttgatgtatttttttctgtaataggggcagctcaattgtgcagtgacatgaagtttctcaacttcattctgtgtatctctatatgttctcattgaatgtaattttgttttgacatttgttactattcatttgaaatggaaactatttaccataaaagtttaggggggaccaaagaattttgttgatggtccccttcttcacccccacacattaacctcaatagctgtttctagctgtaaaagagggttgtgcagaccttcaacagtcatttttaagcccgccattttcttcttttgacgaacatgcccatgcttttaaatctctccatgttgggagaaaacaacagaaggtttccaacagccgaaatacatcttgtgtttgtttgtatgtatgagtagcaacactcaagatttttttttttattttatctacaagcatgaccccaaatgcttaaaaaaactactatcaaacagctatgaaaatcat

SEQ ID NO: 5065 - DNA, 601 bp, Gossypium hirsutum
gtctaatatgatttttcaggggaaagtgagtatcgctgcaaaacccggggtgaagttggagattcccgatggagctgtaattgagaacaaggtaaaaactttcgcatgcatgcactaatgcaacctaatttccttattacaaattgttaaaatcagaaaattaggaaaatttatatttacaaaaaagccaaggatgaattccaaaacatttaataaaataattgtttttgttaaaaatccagttttattggttctcggttctctgttttttagggttctggctggttttttaaaaatatgtcgccattgggtggaggcggacaatgtggtgtggtctagttttgacttgtaatccaattttttggttttgtgaactaatcagtaatcttattgggtgcataggaaattaatggccccgaagacatctgagagaggcccgtctgccagccgaagtttccctgattttggtgtgttgcagtagataacgaacgcatcttttatatagataggaagtaaaataaaataaaaatacttggaacagaagtagtattgcgtttcatatcacatatatatgttgtatgtcttgcgggagtttcccttg

SEQ ID NO: 5066 - DNA, 651 bp, Gossypium hirsutum
gaagaaagaggtatattacattagtttccaatatgcccaatcaaccattataagcataacctgcaaaggcttgcttatatcatacagcagaatatgactaaggatattgaaaatctcttaaaaggatgggctttatttaattatagttgtctaatgcactagcacatatttgaaagataaatattttgatattcctttattttcaaagtagaaaggctagctctgaagcaccaaatggcatgtaaattaatttcccgtaacagcctttgcacttttcatttataacaaatattcaacacagagttttctttcttctcctccataccttaaagagttaaacctaatgacacacaacagaagtcgaaaggcaaattcagtgtcttgtacaataatacaagaagaatgcatgtcgaactatctccaaaaatcaaggtgccttctataagaaaatgaaaatacatgaagcaatcggcctactagatcattatgcttatatcatatcaaaaactgaaaccatgtagatattgcatgagttttcgacatttttataatgacaccttagcctatccttatttccactaccaaccatcctttattcaattcacatcaaaatcacttggtacaacagaaactcgcaagctcttgatttac

SEQ ID NO: 5067 - DNA, 593 bp, Gossypium hirsutum
atttgtagtttcagacacatgcaagaaaagaactattagcaaacgagtggctgtttattttgttttttgtataagagtgaagtgggattgtggatgtatgtgcaacatcacaggaactaaagtgaaggtcataaaattatgaaaagtacattactcaccgggattcgtataatgtcctcccttttccatcccaaaggattgtatacaacaaccacctgagaaaagagcacaacaatagagaataatataggtggagttagattcatcttttcataatcaatggaaaattatagtaagatgaaattgtgaaactctagtctcttttaccagattttttccgcttgacagatcaacctctgacgaaggacaataacttatattcagaagcaggcactgaaaagggtaaattcaaaatcaatataggaacttccaggaaaatacatataatcagttatagaattctactataatagcattgaaatatgcttcatgaacctctgaatagattaactattcttagacatttgaaaccaaagatcagagtttagtcatgctattgcctgctgaaacttggtcactttgttcccactgtc

SEQ ID NO: 5068 - DNA, 608 bp, Gossypium hirsutum
tgttctacgtgtcgatgcgcttggtagagaaattgatgaacatggtaacattataaatgcgaccaaaccaagtaatcttagcactctcaaggtttgtcaattttctggtcttggtgcaatgtttcttatgttcttacttccagtgcaattttgtgctaccttcagggcccgcctttaaccgatccatttgatttttccaggtcaatattaacaagcaaaagaaagattcattccagatccttaaacctgagctagaggtggatgcaaatcaaacccacattttgatgtgaggatgggaatcaataaagataagcttcttaggccaaaaaggatgacgtttcagtttgtagaggaagggaaatggtcgaaagatgctgagatcatcaaattgaaggtattgtgttctctctctctgattcttccatcagttttttgtctggttttgagattattatctattcattacagagtcaatttggtgaagcaaaagcaaaagagctaaaggcaaagcaagcacagttggcaaaggcaaaggctgatataaatacaaatttgattgaggtgtcagaaagaataacaaaggagaaattgaaagacccaattcctga

SEQ ID NO: 5069 - DNA, 712 bp, Gossypium hirsutum
  misc_feature (615)..(618): n is a, c, g, or t
  misc_feature (623)..(627): n is a, c, g, or t
  misc_feature (629)..(638): n is a, c, g, or t
  misc_feature (640)..(644): n is a, c, g, or t
  misc_feature (649)..(652): n is a, c, g, or t
  misc_feature (660)..(660): n is a, c, g, or t
  misc_feature (662)..(662): n is a, c, g, or t
  misc_feature (670)..(671): n is a, c, g, or t
  misc_feature (673)..(673): n is a, c, g, or t
  misc_feature (675)..(680): n is a, c, g, or t
  misc_feature (684)..(691): n is a, c, g, or t
  misc_feature (703)..(705): n is a, c, g, or t
tacctgttgcaggttattgatgggaatgtcatcgttaaggatcatagaggaaatgaaatcgaatcgcagcttgtacctctgctaaatgcttctttggccataagaaattactattccatggcatatttgggtaaattcccaagtgttaccccaaagtattggcttgcattttcagcttctgcacctcctctcgggttaaatacttacttcatctcaagcggaaaacaaaaaggttcgatatatcattgctattctccgaaaataataatacacaagacaatgagatttcgtattaactttcttttgacataaaatgtatatttggttggccttgtttcacaaaacagccacagcagctccttcaaagaaccaagtagtgtacagttctaaagaaaaacaaaaagatgtaatcgaagtagggccaggcgacctgaaacttgtgttctctgctaagcaacgaaaactcattggctacattaatagcagaactaaggtacgatatatggttcttggtttccatttatgcatttcgctaaatctatttacttaatatggatttcttacatttaatttcctattgtatgaaattgaaggtgaaagaaactgtaaggcaannnnaaaannnnncnnnnnnnnnntnnnnnccttnnnnctcccccncntctttccnntncnnnnnntttnnnnnnnnccccttcccccnnnccccctc

SEQ ID NO: 5070 - DNA, 575 bp, Gossypium hirsutum
tgattgtagtggctggttgaaagttgatatgtataaaatgacaaataagagaacgacacattttattgttaaatatttatttgtttataatactttagtttttattgggtaaaattattgaaataaaacactattaacaaataattaaaacattaattatgaaaattaattagtgagtattttttaaaatttaaataaataaattttttagttccttatttgcaaatattaaccttgtggaaattgataactttgtggaaattgataaatattaatagtgtatcaatataattgaggactatattcttagtgataaatatgtcatgttcttagtatgtaaattagtgacaattatgtcacactctgaataaatttgtcaagtaacatattttaattaataaaaagttgcatgagaaattattttacacaagtaaattaaaaataaattaagaatatataaatattcaagaaatagatacatatctcattctacatatctcattaggtttgagagcatgtggcaaaggggataatcattgagcaatcatagtcaaatatgacattccacatatctc

SEQ ID NO: 5071 - DNA, 565 bp, Gossypium hirsutum
gatctgtgctggatttttgcattcattatatggatactcgaaagtaaccatctctaacatacacattccaaaagagtatacatctatcagttcattatattcctcttcatagagctctggagccataaattcaggggtacctaggtgaacaaagaagggaaaacaagatatcattaacctagttaaatctaatgcaacattttgacaaaaaaccattcctttaccaataacactccgagcagttggctgctgcatgacgatcgccaacccgaggtcgccaattttgatttctccattgttcccattaataaaaatgttgtcacactttaaatcccgatgaataataggggggacatgactgtgaagatacactaggccccgaagaatctgcctcgcccaattctttatcgcctttgtatcaacgtgtttatgcttcttccgatatctgacagcaaaaaaaaacttaatttacttcatacataacaggaattaaccagaaagaattggagctaaaaggatgcagctaaaaggatgcatacatcctgagactcccggatgtgaatag

SEQ ID NO: 5072 - DNA, 630 bp, Gossypium hirsutum
tacgctaaagacctttagctcttggacatgtccacgttaacgtaaaaaatgaacgaggaggaaggtcataatccaacaaagctagagccgtggagaagaaaagagagggaaatagcaagagcgaagaagagagaatggagtaaaacgataaggcaagaagctttcgggagaggagaggaatggagtcgcgatggtcagcttggctctacataaagtatgttcctgtgtttgtacatcacaaaataataggatgaaattgtaattattaagggagcaattattcccagaattttaattttttagatgtatttgattaataaagtgtaattaggttataatttattgtatgatatttgatagtataaattataattaaataattacataattttaaaaattaaaatatattaattattataaaaagtatcactgataattgaaaaaaattttcaaaacaagtaacaaaacctaaaatcagatcaatgtatgtattatgttagtcaaaaaaaagtatttgacaacacaattacaaataaaatcaacaagaaaaatggattgaagaagaagaagatgaataatagtgaggtaataaaaaagtaataaaatgattacatgaggtgcatggtcagt

SEQ ID NO: 5073 - DNA, 555 bp, Gossypium hirsutum
  misc_feature (506)..(506): n is a, c, g, or t
  misc_feature (543)..(547): n is a, c, g, or t
cagtttttgctaccccggatgagaaaatgagcaaaacctctcatcttcaggtgagttttatttttgcaacccctgatatagtaattgcatattggatgtttaatcacataattttatgttgatatgaataaatagatttataattgttattgttgcacttttctctttatttacgagtaatgagatgagaatgttttatgctgtcttctatattttatttgcttgaacttgtacaccatgttcactgctgccttttaatatagttattctactacaattttgttaagttaatgaaattcaagatggatgaagaaccacaaactcttctagtaaataatacttgtggaccttaagataagctgtcctacttattttgtttaaaaattttttctaaatgatgacatttattttacagaatgctgaaactgtcaactttgatgactttggagcagaaatatgccctgtaactgaggggaacttatcttgcaatattgaggtcagattangtattgatgatgaggacactcatttcaaattaaaaannnnntcagtctt

SEQ ID NO: 5074 - DNA, 652 bp, Gossypium hirsutum
cacaaaaatgtttgaatcaccacattcaacagatgagtattcatactaactaaaccttaatataatttcatcttgtgtggcatctttttgatatgctaccatgagtgatatagttcatttataaaacatccttaaaaaggttgtccatacaattttaattttctagcaagtgtaacacatttcagaggctttgtttgctgtattcaaattgatccatgtttcaagatcattactacccacttctctgtttgagtttatggatggtccgacattattgatttatcttcttaaatgctctttttcagagtattctttgaccaattacaatcactgatgaatccttctgaatttgaagaaaaccgagttcaggtaaaccttccttatcttataaatgattaatatactgttcctatcttcgatccctctgttgttggtatttttcttcgttgttatactttgaatgttttgaaactatctgcttcttttaaaagatatagaaaagtacatttgaggagtcaagttttcaaaatcaatttgccagaacaataagtgaatgttggaagttcatttgttttacagttaaattacatttaagaaccttattttggtaaagcaaatttaaataataagtgtcagtggttcaaacttcaag

SEQ ID NO: 5075 - DNA, 460 bp, Gossypium hirsutum
  misc_feature (21)..(23): n is a, c, g, or t
taggggcctaaaagagatttnnngagggatttatcttatatctttctgtatattttcagctatcattttgtgtgtaattatttgaagggaccaagctgctccacggcgggcattgtttagtattagattattttcttatcataatcgtccccttctttttaatcttaatcaaaattcatgccatgattcgaattatgtttcatgatataaagaagagaatatcagatgaaaacaagttattggatgcattagcatcaacaactcatactacatataaagatacgtaacaacgtaaacttacaaaacatatacatttcacattaatgcaaaccacttaacaaacaagtccctactaaaaatgaaaccacctagttatactcagtttcaggacatccatatggcatggcagtgcgggaattcaagactatttcccagcttaatagttagtaaaaaaaaaaaa

SEQ ID NO: 5076 - DNA, 604 bp, Gossypium hirsutum
  misc_feature (41)..(41): n is a, c, g, or t
tggatcatattgcaacacaaaatagaagtacaaaaaatggngacatacatgttagggtatcttctaaagatatctttgataactataatagcctcttgaacaacatagtttactttaatcttgatcaactcaagcagaacactgatgcatcgttcagctgctctgtccaacttgatagcacagcgacctatggcacgaactgccctcctgacgaaatctacatctacttctgtggcatattctttaaattccaataaaacctacaaaggtatccaccaagagaacatctcaactatatgacttcacatcaatattagcatgtcctaaatgcaggagcaaaaactattaagaagcccatcataccaaaactttgatacctggtctatatttcggtcagaagcaagcttgatcatgatttctaacttttccatcttcacataaattggatcattgtacttgcagaagaacacctagcacgaacaagcatttgataagcatagattcaaggctactacattgatactgagcacaaatatcaaactgtaatgcagaagtctgtaggaaagcttgcatttgtttattccatatcaatccaccttgatct

SEQ ID NO: 5077 - DNA, 624 bp, Gossypium hirsutum
attatcatatcaaaccagcactatcagtagtgaaaaggatatctaatttaaagaagggtaaactacaaccaatataagtaaattattattaagtttaagttttagtcattcaacttaaaaaaattacaaaataattactaaactattcaaaagtttttatttaaataactgagcttttaagtttttctagtccaactaatgagctcctagcgacgatttgacgattagtacggtggattagtatgatcaattgatgagtagaaaaatatttcttcgatccaagtcgatctgacgttcaatgttgaagattagaaaagaaagttatttggattttgttatgtagatttatgctgagtttttttatttagcagtgtaggaacttaaataaaaatttttgaattattcattaatattttataactttttgaaattgagtctgattaatgaaatataggaatgaaagctgaaggaaaaaagaattaaggctttaatttattcttttccccgtgagaagatttgatacccccagattaaagattagtgctttaattatgttcaacttgaaagctcaaaagggttacaatcctcagcagaacaccccaactccagtatttcgctatcatc

SEQ ID NO: 5078 - DNA, 621 bp, Gossypium hirsutum
tatgttctaactatttatttccttgatctctcttaatataagtcgattggcttcacatttgtttttgtagatttctgaggaaagcactggcagtcctccaatggatgaagagagcataatagaagagagcaactggatgcataaacagcttacaagtggtgcagtaccgttatttggtaaagaaaggacggatctttctataaacaaggatgacatcatgaggtttttggacctaacacatgtccagaaattagatgtacgacttactgatttgattgatacatgactactgttgcactggtttcgtttttcttagtattctttctttcagattccctttattgcgatgtatcgcaaggagctgtgcctaagtctgctgcaagatcctgagcaacatgaggttgatgatgttgatcaggaaaaatctgataaaaaacctacaataaagtggcacaaggtaactaatcaaaatttttttcattgtgtatctaatcaacttcagaagtttattcctgttaataatggatactatgcttcattttaggtactttgggcaattcgggatctggaccggaaatggctgcttcttcaaaagaggaagagtggccttcagtcacatta

SEQ ID NO: 5079 - DNA, 615 bp, Gossypium hirsutum
aattgatccatcaaattaaatcatccattttgtttcagattactataagcctataaagctagtaattgtatatacaattttaccgataattaaagtaaagacgaatccaaaaatttcttttagggatcaaaattaaattgtaatttttacgatagtaaaaacgtaatttcactacttgaatagcttatatttttataaattttaaaagattgaattaattttttatcattttagagggaccaaagtataattttacctttattaatttaaacttttaaaaattttaaagaacttaaatataaaatttcccattttagggagtctgggccctgccagccccctaaatgcacccctgaattaaagtgggcgtttgagaatcggagatttaatacttaaattaaaataaattaaaagagaaattacatataatttacgcatattacgacttgaattttaaaagctcaggtttcttaagtttcaataacaaatcgatttggtcgattgagtcttaactcgattagtatgtgtattgttgttaatgcaggaggatgtgaattcgagtgcgttgaagcacattatcctcctaattatggattggagaggagctattggtag

SEQ ID NO: 5080 - DNA, 650 bp, Gossypium hirsutum
tacaggtatgatgccttgatctctagtctcgcttattcgtgaatatttgacaacaataaatctaacaaggtagagaagaagtacagaacttttatatggtctctagtaagctctttaagcaccaagaagtagacttatttgcttagttattctagatttgtttaagggctaggttacttgtggaagctctaaagctcattcaaaattaggaaagcttggataaaaatattaagtttgaatccaccttggactgtttgataatttttaatatattattcaattttatatatatgtaatttatatcataaaattaagtttataataatatataatcaattaaataatatgttaacttgtttatgtttacatttttaatagaagaaaaaaatgattaaatcttaaattaaacaataacgtatttttttaaaaatatataaaaaaaatgagttggcttaaaatggagacgagttaatcatatataaatatgggtgggcttaggtcaaatttaaagatttatattttagatcaggtcaaatttaaataaatataaaatatactaataccataaatataagcctggctccagaacacatttaggttatttctttccatcaaatccatcatattggtcaagagtacacgaacattga

SEQ ID NO: 5081 - DNA, 619 bp, Gossypium hirsutum
atccaaataacaatgcctatgaaaatgttaatgacacaaaaacctaatctgaaaggtctttcaagaaatgtaaatacctttcttaaacattttattcttagatgatccagatgagggcatggtatcagcttctgtctttggcagagattcagggtcacaagtagcatcaggcacagcacttgaagtgtctgcttcaacagctggagccaaactattcgccaattcaatgggcccagaattctgtttggtgcaggtgcaggatttttcggcattgacgccatccttcagaagctcagcttcctttgaagacaaaccctataacatatttagatcaataatttaccaagttatgtacctttagtatctttgacttatgaagcaataatatgctaacaaagaaattggatgatgacagccataataacgtagtaataatgtcaaaaatcaaataacccataaaagtgatgtcttacacccaaaaaagaatggctatcaaaaatgagcaatttggccccaaagtaattagcaagcgccttcgtcagcatctcctgatatatctcagaccctgcatttacatttgaagtaaaagctcggttttgcagcttaatgcgactaatac

SEQ ID NO: 5082 - DNA, 660 bp, Gossypium hirsutum
  misc_feature (655)..(657): n is a, c, g, or t
ggggcttccctataaccctactctgcctgctaggccttagtgctttagaccattcggtattgatactactaatattagtgctcttaactaacgttattctcgggattgctggtattgggaaaacccttagagacaagaaagaccgaccccctcctccctaggaactattggctggaccgtattcacctatcgccatagaaggccttttttctgaaactgccttaaagagaactgcaattgggggctcgctcaaaagcagaaagattggcagggtgaaggaaaagaactccaacaggttggcttgaaagaaagcgagctggcctttattcttcaattggattaagcgaactaccaatggctggaatcgatgctttggaagaggggaactctcaagagaaagactgaaactgtcagggcttgcgcaattggaggtgaagactttagcactctttctcgctcgaaagcaggcgaaagcaggagaactaaaggctaaaaataaatctgcaacaggcgcagaaagattagatttaggaatgcaacctttaagactcccactagatcgaatggagaagggctggagtgaaagctcaatccaagacatgaaagcggaatcacaactaacaactgtcgaagtaagtaggtcaatgccatggannnaag

SEQ ID NO: 5083 - DNA, 649 bp, Gossypium hirsutum
aacagttccaccagcaaccaagaagtagagctcattaaacagagtgaatttatacctgcaaataaaagacaaagattagctaactgacatgatataggaagatatatctataactaaacagacatttttttttctggtggcatataagcatcagataacaatatcagaccaaaaatacactgatgttatgtttggttggagtattatttgtaccacatgttttagtcattagttagctataaactaatacaattagtaatttttagccactcacatgaattttttgaagaggtcttattttgtacaagagtttttactaatctttctaatttgcatgtttaaatttgtacttgttattctttattttatgtctaactattgtagaacatacgtgttaaataagcttttcctcatgttattacaccactaagcaaacggagcatgaatgctgtgttctctgagacagaatttgcagaacaaagattatgcagcttctaaggcataaatcaaattgattaaggagtagtaaaaacccctagagagagtcaaagatgcatggtattctatgtcccaccttgaccttgaccttgaccttgaccttgaccttgaccttgaccttgaccttgaccttgacctccatctccatctc

SEQ ID NO: 5084 - DNA, 841 bp, Gossypium hirsutum
  misc_feature (649)..(655): n is a, c, g, or t
  misc_feature (657)..(663): n is a, c, g, or t
  misc_feature (666)..(703): n is a, c, g, or t
  misc_feature (705)..(716): n is a, c, g, or t
  misc_feature (718)..(758): n is a, c, g, or t
  misc_feature (760)..(791): n is a, c, g, or t
  misc_feature (793)..(815): n is a, c, g, or t
  misc_feature (823)..(825): n is a, c, g, or t
  misc_feature (833)..(834): n is a, c, g, or t
agctggtaatcatttctcttgtgactttataatttgtggtaataaacctcccttaatttcaaactgaagaatgttgtaactattttattttactaggtaaaacttctgctgatcttcaatcactaaatgagtcactacaggatttgctcgatggaattcaagtatgtaagctattgcagtcttttgcagatagattttctgtcattcgttatagtttctgactttctggaaccagaatgtcttcccaaatttcggtgctttttgtgcatgctcattattgtagagtttgcatgttcttttcattcattgtactttgttctccttgtttatatcattatgcctttataatgttgcttggtaggcactctcttgtttgcaatcccaatttctgttttttttctggattacaggaagacttttatgctgtagttgattgggcatacaagattgaccctctgcgttgcatatccatgcatggtataacagagcgctatctatctggccagaaagctgatgcggcaggatttgtgcgtctcctgcttggtgctcttgaatcaaaaatttctatgcagttcagccgggtatgtttgtatggaaactgaaatttttatgaccttttgcatttagtatgaatctaactgggtttagnnnnnnncnnnnnnnggnnnnnnnnnnnnnnnnnnnnnnnnnnnnnnnnnnnnnngnnnnnnnnnnnntnnnnnnnnnnnnnnnnnnnnnnnnnnnnnnnnnnnnnnnnnannnnnnnnnnnnnnnnnnnnnnnnnnnnnnnntnnnnnnnnnnnnnnnnnnnnnnnaaaaaaannnccgaaagnnaaaaaaa

SEQ ID NO: 5085 - DNA, 608 bp, Gossypium hirsutum
ttcggattcttcttcaataacttaattttcatacttcaacactttgaaactcaaaactcacattaaaaagtggtttcttcccttaggaaataataattcattaattcatgcttgaatacatctgcttctgtatttgagacttttcgaatttttcagttggaaaactatatattttaatcatatccattatacttgcaatattaattctcacaactaactttttaacttacagacacatagcttcgtgtgtttcctatcttcaatttcttttaggctctttttgggtgcaggcgaccaagttatgtccaaaaaccagggttcccgcatctaagctgcttcatcttagagagttgaacggcaatgcttttagttatgatcgaggaaggcatagctttgtggaggaattccataagttacatgcttctaaacttgtggtaatttataagttgccttttcattttccatttatccataatttacaaattattcatgttagtccactagtttatctaaatctaactaaaatggactgcaagatttttttttatcccattaagagctacctttagtttatctcgctaatggatcaaaccttcatctttttcctt

SEQ ID NO: 5086 - DNA, 632 bp, Gossypium hirsutum
tatcctgattcttgcttcaagcctccatatgtctcttcgtcagtgccaaatgaggtcccccttttgtgccccacaaagaacacctctaaaacatctacatctaatgctaatggagtctgcttttccccaaatacacagctgcctgatgctcaaaatatttccagtcctggaagaagatgtgaacattctgatgtgcagttgtactctttctgggtgccttctttaagcagcccagtgttatccattctagatgttgctccattcaatttagttggaagatacatggatgatgtatattctggtatgcctgattccttttttgcttgctagttgctatgcatgtccttgggatttgacaatttacaattatttgacagctgtccaggagcatcgacaacgtcacttggagagtagtactacacaatatgaaaaggcacccctgttccctcttccttgttctctatctatgatggaagctaataatgaagcatcaagaagcagttcttcaccagttggctgtttagggccaccatcagtctgtcagtcaccagctaagaagacattggctgctacacttgttgagaaaacaaaaaagcagtcagttgccttagtccctaaggaaatttgcgaag

SEQ ID NO: 5087 - DNA, 642 bp, Gossypium hirsutum
ggccttgcattaaaattgaaccttcctcttgttcttcctgtaaagaatggtgttcttggtcgatattgatagcgcacaccagtgtacagcaattgaggaccgctgttgaccaccattatcaatttaagttggaatctgatgcaccatattcgcactaaattgtgtagacatgtgagatgaaaattttctattttccatatccagcaaaatcgaagacatggcctcagcatcatatgattgtctgcttgtggtgattatagctacaacagattgatattctggtgacaaaccatttaaaatggatgaaatgtgctcagtttctgtaatcttttctccacaaacatcaagattatcacaaatgatcttgatattcctgagataatcacgcatacattgttctctttttctttgagcatggagcggacatctgagattgatgatttttgtggtggattttgatgaaaacagttgaagaattgtagaccagatatcagcagatgtttcacaagctgctagagtatatcagaacttactacagatggaagcaatgaagcaagattgctatcttgctgattgtaggtgactcgatctcattcttgacacgctcactggatgcactgactgtgaactctggaggaatag

SEQ ID NO: 5088 - DNA, 535 bp, Gossypium hirsutum
ttattttaaaatgaaaaattttacaatcacaaaattaaaaagaaaaaaattattattcattatattttagatgaaataattcataaacacaaaaaaaaatacagaaataatagcatagtcaaataaagattaatataataattttaaattaaataattcaaagaaaatagttccacaaaaaatataaagttaattatttgacataggtagctaatatgaccggtaccaagcgacaattggtaccaagcgacgaaaatgcataagaatacaaaataaggggcaaaagattcttatctatcaagaacctataaaaggaagggggaattatttggtacactctcaatagagtttttaaacttcacaagtagatcaaatgattaacaagtgtcctatagaaatatagtaaaatattaaaaaataaacatttaaaaaaaaatacacattatttttaaggccggttgtgaaataaaaaaaatgtacaccgtgaatatataaaatattagccttaaaaaaacacctatggctttgaatggaa

SEQ ID NO: 5089 - DNA, 645 bp, Gossypium hirsutum
gtaaggagtcagattgcattttaccacctctactgaaaaaatgggacaaattagtccttgggtcattctattaaaaattccctttattttttattattctgtcagccatgtcagttttaaaagtataaatggatgacatttttaacagaaaagaccaatttactctttgaactaacatacaaggactaatttaacttttttttagaaaggctaaaatgcaatttgactcttagtacaggagcctccatgttacttttaccaacttcttttaatcatttttttagttatctttattgatcttctccatcatgcagaacggaagagcgagcctcggtgattcgatctataaaggcattacggtggaccactttgatccatcacaattcctttcgactatggacttgtcgacggaacacaaagttcttgaccttaagaataggattgaggcttccattgtcatttggaagaggaagatgcaccaaaaagacggtaggtcttcttggggttcaggtgttagcttggaaaaaagggaactcttcgaagaaagggcggaaactattttaatcttgttaaagcaacgttatcccggacttccacaatcttcactcgatatatctaagttacaagataatagggtacatacac

SEQ ID NO: 5090 - DNA, 642 bp, Gossypium hirsutum
attgtttaggtggcaacatcgttgaactcgactgagtgtttcctcctgcaatctggatcttcagcaattttcacttggtatggaactcaaagcactcacgaacagcagcacttggctcccaaagttgctgaatttttgaaggtatacactatagaaagttgtttacattggggtttttcttgtgacacaagataaaagaacacagatttattgggaagactggtaagacttgatatagttgcattcttatagtctatactccaagttccaacaggttgagttgaccaattaagcattggtagtgggacgatattaaatctgtttctggcttaaagcttgtgatttgctcctcatagataaggataacactaccattgtttagttcttccaagatttcctttccccatgtcaatcaatcatctaataatctttcacattcagcctggagtcactcggaaacattgtaaagaaggaacggagacctctgccttctggtctgcacttggtgggaaacaagattatacctcaaccgaaaaagaatctaatgagattgtcagggatccccacttgtacactttctatcttaataaaggtgtatttcttaaccaaaaatgtgatttgctttgccctcagttactaacg

SEQ ID NO: 5091 - DNA, 637 bp, Gossypium hirsutum
aaaatattttcaaaccacagtgaaaggacgtttgatgttgagcattagtaatagtgtggcatgcacttacccattgtgccagaggcatcatcgccaccatagaaagtggcatgtgcattttgccagctgccgtatgctccagcaaatccatgcaagtttaagctaaagcagagaataatgagaagcatggcagaggaaatcatttgaagtagcaatgcttatggtacagagaaagaggaatctgagcctgagatgttgtggggtaatgaagactgatgatttgcgaagctttgggtgggtgtgagtaatgtacaagggccttgaagagaagagggtttgcaatttgcaatgcatttataggctgagcctaagcaggccagcagcaaaccgggagagcacatgcactgacatcacatgaatgcatctgtatgtttgcagctttacaaaattattgcactgcttttttcggggttgacaatatatattaattggttgtgcgagtgagtgcagatttcgaagctgctgagttggagttggtagacttgcatgcattcgtgcaagctgatatgtacaaattctgttggaagttggtcacctcacctgtcattcacatgccccatgggatgggagccagcat

SEQ ID NO: 5092 - DNA, 594 bp, Gossypium hirsutum
  misc_feature (458)..(469): n is a, c, g, or t
  misc_feature (536)..(536): n is a, c, g, or t
  misc_feature (538)..(538): n is a, c, g, or t
  misc_feature (588)..(588): n is a, c, g, or t
gggcatattttagtaagttttatatttatacaaatatgttttaaattattataatatttcgatttagtggtaagaatatcgtcttgttgtgatatataaaagtttggatttaatatttagcaacaacaccctttatatttaacgaatcttattatttatttattttattcattctttaataaatgaataaataaaactcaaagtcattaaactattagtaagttcatattttggtcactcaatttaaaaaaaattatcaaatgatgaccgaactattcgaaagtttctatttaactggactgttaaaatcgttgttatatgaccttttctattcgtaccgactacattaattaaaagctctcattctcattctccttctcttctataatttaatttatttcatgaaacaattttaatatcacaaatttgagaacgaaaatctaaatagtttttttttnnnnnnnnnnnntgatattgaccgtcaaatccacttagattgataagaactcggttcggtgttgattcgagtcatttanantaaccgatcgtgaaattaagtaagttgttaaacttatagcaaaataggcnggaaaa

SEQ ID NO: 5093 - DNA, 561 bp, Gossypium hirsutum
  misc_feature (512)..(513): n is a, c, g, or t
  misc_feature (515)..(517): n is a, c, g, or t
  misc_feature (523)..(523): n is a, c, g, or t
  misc_feature (531)..(535): n is a, c, g, or t
  misc_feature (555)..(556): n is a, c, g, or t
ttgtatgatgtatttatgaacaaaaataaaaaatgctgttacatacatattgtaatgtcgataacagcgcacgtaaatttccttgcttcccacttgaccaccttttgacttcagcatccagagtttctgctaacctctgcaatataaattacgatccaaaattgttagacaagaacagaaaccggcctcattgcgaaaagatttatcgtttcatttgaatgtataagttacatttctttcagcttgttctttctgagcaagaagatcacgctcgttcttctctgcaagtgctttggcctggaaacaaaagaaagtgagattctcaatactagtcgcaaaatccgtaccggataagcgacaaagatagtagaaggcataccgctcgttctgctgtcctttgatgcctttccaacctagctttacatctttgagctgattcaccaacagctccatctgactcctcagaatattttgaagcttcatgaaagcaataaagatgattcagaatttanngnnnttcttncttttgcnnnnncagtaatttaatcatcacannaaaaa

SEQ ID NO: 5094 - DNA, 662 bp, Gossypium hirsutum
ttcctgcttcttgttgctcagccattttatatatttaattacttttatgtatatcggttttcatttgctctcggtaacatttggcattgcatacagttaattctgaatcttgctttgaaaccatcttcaatttcttttcattggctgagattttacttttatctttaacacacattttgtcttgattttattctacctattgtggctatttttcaataattgtttctaattttcagcctttgtttcttcaaagatgtttgcgatacaaaattcaggcaaaacacaaaatgaggtaatatttcaatccgataattaaatgtactatacattcctaaattttatggttttaagtgctttttgtagcattacccttttctttcccattatagtgaactgatggtagggcataaagggaatacagaacctgattagtgctttttggtagaagaagtatagggattttagagatgaatattgatggttattagggtaagcaaatatgtaatatgtttgcttatgtttgacaatatatattatgcttgtggaattagcattagttagggagcaatgaaaagtttcttcacaataggatttttttggggggatgattgggaatgggtttattaagtaaaaatattgaagcacattggtatggggatggg

SEQ ID NO: 5095 - DNA, 619 bp, Gossypium hirsutum
catggtcttgaatattttcaacttttcaagctgctcagactttggctgtgctggattagaatcatgctggaaaatggaacacagaattgtttttaaatgacccaaacaaaattacaaggcactatttcaccatattaagcataagtgagaccactggacactgcctagaagagggatttaggtagaaacacaaaagcaggatgggataaaaaattttaaagaagagcactgaagtcctctctaaactttatccgtagatccagcatctgagtatggtgcaaaagggttctactactctttggatgctaggaatgaatatatcagattatgcaacaaataaacctacctgctgcaacttggtagcaattttctggtacatctcatttaattcaggtaagtatgcctccttcaaggtcaggatctgcaatgtaaaatcaggcacagactggttaactaacaattaaaccactcaatgcatccatgtttcatggtttatacgaaatgtaaaggtttttccctttctctgaatagctggcactgattttagtaacgtaagaaacaaaggagtcaataaagataattaatttgaagtcaagcatgcagggtatccttggcctta

SEQ ID NO: 5096 - DNA, 624 bp, Gossypium hirsutum
cttctttatcaagtatatcttttacaagctctgtttgaacatgaaacacttcggggcttcaacctttgtgcagtaaagaacatatacacatatataaagggggcgcaaattctacaaggacaatttagtaaaatacgttcttagctaatttggcattccgtcaatcaaattgcaaaatctcacattccaaccaaattagccaaacaatgtaatataacatacctggtaatgtgctaaggtaatcttacattccaatgataggattaccaaaataattttacattctctgaactaaatgccccctcaaagagcttcaaattgggtcgtgcaaacaacacgttggcaacgctggcactcttgtccaacagcaagttcacaaccacaatatcaactctgtggctaattgccactttcatacaaaagcatcatattatccatgatcccatgcctaagattaaccaaatattcgtcatacacctttaaatggatgagagatgcttagttaaaagaaagaaagaaagaaaaaaaaggatagatgatattgcctttaacacgttcaaggatagtgtacctttttgccactggaaaaggcagaaataaattgcagcactctcaggttgaggg

SEQ ID NO: 5097 - DNA, 573 bp, Gossypium hirsutum
tggatcagcagtgcactgttacacgtccaggacttgcacctattgcttctgcactggcagtggagcttttagtgggcattttgcatcaccctaatgggtaaatccttcgaaccatatgaaaaaaatctctcattgtagtttctttgaagattttcagcaagcttttagttctaatcatcatgaattaatcagaagtctagattgtttcattaaccacccaattatatatgcaggatatttgctgaagctgagattgccaactccagtagcggtggaaactttgagcttccactgggtattttaccccatcagatacgaggctccctcccccactttcaacagatgacccttttgggccactcctctaacagttgcacagcatgttgtagcactgtaagttcagtgcttctattagttttggataattgtgattttattatccaagtaagcagaattctgctactgaaaacaaatatttgcacatcttaacatatgttcatttgactgtacaactttacaataaaaccatacagaagtaattctcctatcaattcataactgttgctcctgctc

SEQ ID NO: 5098 - DNA, 599 bp, Gossypium hirsutum
tttgatagggaattcaaagccttacccaaatttatttttcacttttatatatttggaatgatttaagtgaaggttagatgaccaatttgagataattgactcacagtcttcacgaggagtaaaatagaaaagacctaacgaacctccccgatttcaagcctttaattggtagagattctgaaagacaacaagtagtggtgcttcatttcagcgagaacagtttatgaaatacacaattgcgacccaccacgagaaaccaaacaatttcccgggggcttatcccatattcctctagtaggtggtagaagaatgggtgaaaaggaaggtgaaaaccagcctccaacacatgtaaatgaagtaaaaaaccctctttgatgtcacttaacctccttgcaccctccgcaattgaaaactcgtaagcgaaattgggcagttgaatgcctcacacagctaggtgtcaactcatctcgtcattcttagtgatgcaaggataggttttcgcctccaccggagtgttaatcacacgatcctccaaataccttagaaaatcacagtcgggcctaccgtgaccactgccgctactacgatcacctcctctg

SEQ ID NO: 5099 - DNA, 627 bp, Gossypium hirsutum
ttattagttgaagtttggcagataaaagattactttaatctgactaaaggttttgggaaatgatgattattactaaatgttcttagaaaatactacttataattcatatgagataagttactttcagatttcgagtttacttttcacgtcattttattttcatatatggcgatataaattactataagagaaaaaaaatcttcataaaagctggttaagagcttaataaatggtaactttgaagagcaaagaagacagtcaacaatagcagtcagacaatggtggaataatgctgaaagatgctcccacgtggcatcttgcaatttgaggtgtaaatgcagtggctgattttgattccactccattgtatggttcgcctacgtctcatcctagtatctcacccttacccgaaccatgagcaattgagtatgagcctctcaaaagcctatttagtacttccaaaatgttcacagatctttataacatgatttgtcgtgggctactcttctctgcaaccaaacttctcagaataaacgttttaactcatatctcaccgttggatcaacttataatccaaaactaacggtcaccggtcccttaaaagttattgatatcgtggggttgcag

SEQ ID NO: 5100 - DNA, 623 bp, Gossypium hirsutum
  misc_feature (618)..(620): n is a, c, g, or t
caaaaatgcaatctcagattgatcctcttgagatatagcatggaagttcgcattacggagcaaaatgttatcagtaacacctaagacatgaaaaaagaaaaaaaatacatcatcttcctcatcaaaagagtaatttaatagtataggaacatcatcgaatactttttgaccataaaagaaaagaaacttcatcatatcatatcatatggttctggaactaaagcatcttgttccatgatttgactttcagttaacaccaatttctcgagcaagcactcagaagcaggattcaaaccaccatccatataaaattgactaaaggactagtgaatccgaggtcaggttgaccgaggcaatgcatcagaatgcacaaaacccgaaacaacgtgcttcaaaaatctgaaaataataggcttacatctccagtcctcagacctgaaaaacaagagaaaaaaaaataaaaaaggaagaaaaagaagccttgttaatcaccattattaaatgaaaggttaaccatgcatgtaagaaaatcagcctttatcagctagtacttttgcgaaagttcctcccataatgaagatgagagctagtaatggatataatctctgcgacaagaannngaa

SEQ ID NO: 5101 - DNA, 624 bp, Gossypium hirsutum
tttatctgtatcaggtactttttactgaccctgatgctgttgtccctgatctccttgaagtcatggaaagtgaaaatgggaatgagatggaaagtgctgcaccggaggaattttttgaggtggaagagatcttcagcaatacagtgaatgcgctcgaaggaaaggtgaatgacaagagtctcatagttcttgacaacaaggtagagcaaaaagaagtctggagggagaacgtggatccttttaaatttcaagattgtgcgtcaaatgatgggaattacaagtaggatgtcgaggttgactttagtatggatgcagttaaggacattgctgttgatgatgtgaattataacttagataagaggatggtttctgacattaatgcagtgaaagacattgctgttgatgatggagacatcaaagttgaaccagtggcatttactgttgatgtgctgagggtgagagaaaccactgaagtcacagaaggtgtgcttggaaaattggaagaaatggaggataagggcaatagaaaagactgtgtccaactaaagaattcagaatctaagatgttgcaccaaaggttgaaaagtgatgtttccaaacctaaacctgagagaacactgcctg

SEQ ID NO: 5102 - DNA, 620 bp, Gossypium hirsutum
agatggggtcccgaagacaaagaaaaggattctcgaactgagaagaggacagaagctgagaaggaagaagcccttactgacaaacaagcttttgtaagtgggggacgcatagcttctgaccgtgagaatgattctcatgataagtggagaccacgacatcgtttggaaattcatgcaggtggggctgcttctcatcacagtgctccaggttttggtttagagaggggacgagtggagggatcaactgtgcggtttgcagcaggacgaggtagatcaaatgctaatgtaagcctacaaattgggaggccaaaatctgcttctgtcattggatctcgtcctctggacaaaaacaaatcatttaacacatattgctaccctagaggaaaactgcttgatatttaccgcaagcaaaagactgctccaaattttctcactgtacctgatgagatggatcatttatcaccactaactcagaaagaaactgttgagcctgtagcttttgttcctcctgatgcagaggaagaggtatcaagcttataatctgatttatggaataaaagtctactcatctttatccttctatgtggtttcatttaattttcttgcttgattcttgcagg

SEQ ID NO: 5103 - DNA, 616 bp, Gossypium hirsutum
actagagaagatcatgccttaattgtacctcgaatgctttaagagactgacacaggctatataaccaggaagattatattatatcaatacctgtaattttgggcgcaatgcttcaagtggtcctttaggcttttgtgatccttgctgttcaacatgtgaccaaacatataaccttagtttaaactactattgccattcaatatcaaaacctgaaacaactcagacttatgccatagtttctatactttacctttcctagtgcccaatcagccgaatcgaaaaatgcacggtcatggttctagcagacaattcaaatgtttcagtcagcaaacgaggacgaattatgttattttaactcttcatttctctttacgtatatataaacataggtatagaaagataactcggatacatatacgtattagcattcaagaaatattgtataaataagagtcaaagcatagaaaccttggatattaaggttggctttttaggtaatagtcctccgtactttttttttattgcttcttcctgtaaaagtcaaaacaaaagaattaaaagttcactattgaaatagatacatctatacatatataacccatgaagaattcagaac

SEQ ID NO: 5104 - DNA, 648 bp, Gossypium hirsutum
atctgggcctatttccagagaatattcaacttctattcaactagcgatgactgtacaaaagctgaagcaaatctatgttactgaggtgtgagtgtacaatataggcatgtgcgcggcacaggcatgttcaaattttctaagattttccatatatttgaagggtccttcaaggttcatataaccatactcgtgtctgaaaatgtaccaacattgctacttcaagaaaatagaatagttggaggcttggagcatagagaaaatgaaacccagcagtcacacaaggagttgtctataaatttgattattatcactataatttcaccattaggaaaacaaaaatgacaacagacaaacacaatcagggaggaaaacataacccctaatacataattcaatcagttacttatccaacagaatatctctcagaagggataattccacaaataaacttacgttcagtatgaaaatcagatttcctagagctaatctctatatgttaaaattattccaatttccaagagaaaaatacaatgaagagaatggaaacgataagattcattagttaaggaataagcagttgcaagactaagaatgatggcttacaaggtccgatctatgcatgctgtgcctagaccagctagtgtgatg

SEQ ID NO: 5105 - DNA, 572 bp, Gossypium hirsutum
  misc_feature (396)..(396): n is a, c, g, or t
  misc_feature (411)..(411): n is a, c, g, or t
  misc_feature (488)..(488): n is a, c, g, or t
  misc_feature (509)..(509): n is a, c, g, or t
  misc_feature (540)..(541): n is a, c, g, or t
  misc_feature (556)..(559): n is a, c, g, or t
  misc_feature (563)..(563): n is a, c, g, or t
  misc_feature (565)..(569): n is a, c, g, or t
ggaaaaaaacacccaccttcttctacccttaacctaactctatgctaccacatcactgctctacttatttaaggatttcttttttcttacatgcttttgcatgtacatctctcttaacacttcccattcaccatttcttctttgtttttctctccttttgtttccattcactaagaaacactgaagttatgcttcatacccatatcgtaaattgatacacttttgtttttatcccaactttcctagaacgaaattcatctttctttcaggtttgttagtattcttgtgttgtttacagaattgggtattggttttctttttcttttctttttttttaagcaagaagggaaattctcgttttcctttttttggattgattttgtttggtttgtcaantttgataaaaaaaanaagttgtcttttttctaggccggttgggtttgtaattttgttgcttgaggtttcattttggtaaggttggtaaacanataattttttaacttttgganagtttttaatgatgagctgttttgctttctnnagttatgcttttgtnnnnatgnannnnntta

SEQ ID NO: 5106 - DNA, 540 bp, Gossypium hirsutum
  misc_feature (501)..(503): n is a, c, g, or t
ggattttttttgacccggccatcgtgaagaagctcttgctaaggctgagaagtccattttgattcaaaggtcgtttgaagcctttttcctgaaagcttacacattgtcagattcaaatctggatcctgagtcttcttcttatgtcattgaacttttggaggaagcaattagatgcccttcggatggtcttcggaaaggacaggtgagtgttggaacatttttcaaatatttatagtgttccaataactataaatggatgggtgtaattaatcaaaagattatattatttgattatttgaaaaaaaattataactatttaaataatattatttgaatagttataatattaaatgaataattatgtgtttattttactgacattattatttagaaagacatctttcataaagacataaagagatgtctttatgaagagaaataaaaattcctataaatagaaatgagattttatttgaaaaagacactaacaaattctaatannnaatattgttagattattctataaagtattacggcaga

SEQ ID NO: 5107 - DNA, 473 bp, Gossypium hirsutum
tatgacagcaccatctctgctgcaaatcctcaagatggcaatgaaaagaaaaaacctaaggtctccccgaatgcaattgatttcagtgacccacttgcatatgctaaaatgcttgaaacttttaataccggtggtaaatatggaagtgttacaaaagatttagaagcccttatttctaggaatacacaattggtaagcaaggtacttgctttgcatcctcgtctttcaaatatgtcggcagatgtggaaaagaccccgaggaaagaggcttcaaaggtcccaagtcgacaactttcccatttgtcacgaaacaattttatcgacttggaggatgactctattggaaatgacatcacatcgtcggtgtcaccagtagtgattctggattcagatgatgaagacaatagaaatcctagatctctacatccggtccaggaaattgtattgaggaagccatctgggaatttaatcta

SEQ ID NO: 5108 - DNA, 682 bp, Gossypium hirsutum
  misc_feature (49)..(52): n is a, c, g, or t
  misc_feature (604)..(604): n is a, c, g, or t
  misc_feature (606)..(606): n is a, c, g, or t
  misc_feature (610)..(626): n is a, c, g, or t
  misc_feature (629)..(631): n is a, c, g, or t
  misc_feature (633)..(641): n is a, c, g, or t
  misc_feature (647)..(647): n is a, c, g, or t
  misc_feature (649)..(654): n is a, c, g, or t
  misc_feature (660)..(660): n is a, c, g, or t
  misc_feature (664)..(664): n is a, c, g, or t
  misc_feature (666)..(669): n is a, c, g, or t
ggtgtttagcctgaagagagcagatgttattctagctttgaagttatannnnaaaaagagtacagctaggtaaccttaagtattaggagaagactcaaatcggtgagaaatcacttaaaataataggaaaagaaggcctgtttttctttcaattttttcttttcttcattgactaatgtcttgattccatacagttgttgtgcgtgatttattttgcaatcaacctgttcggaagaaacaaatgcaatcaaggtttgtctttttaatctccaatttcttgtttcccttatagttaagcatagtttatgaaactagctcttggttgcaccttgtgaaatctctaccattacactgaatcgacgcacctgtgatttgtaatgctgaatttgaagcccgaagaaggtgttgcagtctgttaaaaagtgtgtattcagaattgctcttgttcacccaatggtttacttcaatcttattgatattgagaggtatgttcttgtcaaatttcattgttggaactgtgtcattcatgttccttttccatttctttttttttttttaatttttttggtgggggaaaaaaggggggaaaaatttccccctgggnancccnnnnnnnnnnnnnnnnngtnnnannnnnnnnnaaaagngnnnnnnaaaaanaggngnnnnggggggggggggg

SEQ ID NO: 5109 - DNA, 702 bp, Gossypium hirsutum
ttttattgggaaacagcagcaatatttcccaaagctaggacagcctgaatttcgaaacaaaaaagaatgatataagattacaaaacattcatacaagcttttgccaagtaaaattaaatgatattagaataatttcatttcatatgcatacctgctcacggacataatcacttggggaaccaagtaactcaacaaagcgaggaaccacaccagcttaaatcacttcctcaataggtggtctacattctgtaataaattgcaaaggagaccaagggttctttttttctagttcaaggattaatttgatgctttggttttgattattttaggaaaacaaactaccattttcctttaattaatttagaaatttcaattaattaaatttatttaattaaaaaaacaattaatttacttagctagacatccatgttgatatttaaaactcattttaactgtcacgttggaccgccgtttgggaggtaatagatcttaaagacagaatgaccatttggtaacaaaatgacaacgtaagtgactacttatttcaaacataagtgactaaatataacccgaggcaaacaaaaatgattatttttatagtttactcataattttttaattcgttttataaaaaaaaacttttactacaaatttacttcttttttttccttctttatttggaaacatggctgtatgtatgct

SEQ ID NO: 5110 - DNA, 652 bp, Gossypium hirsutum
  misc_feature (645)..(646): n is a, c, g, or t
ttcctcgtactgatgctttgaccacttttcctccgtgtcgtgtatcttgctccctgacttgttcaatagttcttttgcctgttcttacttgccattcatgatctttctcattccattttctctctttcactcattttcttattcatcggacatataagactaaccccatattttcttcttagaaagcctaatgagctaaattcccatgcacggttcggtatgaggacttcacctttgagatgttaggcacgtgtaatatttgtccagtctgttgattattgtgtgatatattgcccatgagtgtaaaatcgcaatcatggtgtgtttctctttccttctgtctgttcctcttgaactcaaaattcttgctcagaatcaaattttttcctccaacagctgtgtccttggtaaaatatctccctgctactttttttttaattattgttaaaatataacatttctttatgccctagttattaattttttgtttttaattttcttttgtttgcataatgtagttattaggcgttgctcattagcctcgatatctcttgcaggaagtgtatgaacaacaaaaggagctaattttaattggggagagggttgtgcttgccactttggggtttgacctcaacgttcaccatnnatataa

SEQ ID NO: 5111 - DNA, 612 bp, Gossypium hirsutum
aaggcagatgacagctatttatcttctctaaatagaaaatatgagcagctttctaaagaaacagaggtcgtttacctacttattgtttaaagcatatgataaaggagagtgtaaactatcgctaagttttcatttctttttaacatgttagggttttggtacagcagttgaggaactaaatgagggatatttatcgaaggatggaaaattaattctcggtttcctccaagccattcatgctgccgaaaaatggcaagctgagctggatgcacatgcttttgctcaagaaaaagaagtattgaaggtctgaagtttgaactatcttggttcctacatcttaatttctgcaactttatcttggccatgccttactatttattcatacttttgtttcccttccctctttaggagaaatatgaaaaggaattaaggaattcaagagccagggaactaatgcgtacagaagaggcagccatattggataaggttatagctgtttttcatattttcattgtttttatttatgttactcgaacttgggtgtgtgctgggtatgtgttacaagatgggtatgttcaattttttcctcatttttccctggctttgaagggt

SEQ ID NO: 5112 - DNA, 657 bp, Gossypium hirsutum
taaatgaaagtcttgtgctggacctctcatttttgcttaaattaaggtggatgctacactgacagcttaattgaaaaacattttcatgctaatgcctactatatacatttagaactttaattagtggcttctgcattttggtttatgagtacttcatatgtgttacattacattcttcacttagagattgtaatttatttgctatagatacaaactcctaattttgcatttactgtcctgttctatagactgaaagagtctgacttactaaactttgttggcagatctcatcccatttatacaaatattgctggcatatttggcagagtgatttacaaacaatatcacacggtttttctataatcacacagagctataattcaaatgacaaggaggagcgtcatgatgatctttatctaacatgtgagagatggttgttttgtctaaagataatatgtcaattagtgatttcagggtttcaaagtgatgcgaaatgtatacaggtacttctttctctttccatttccatttagaatattttgaggattttagagtcaatcaccatttcattatattttcttgttttcttctatagcagtttggaatgagagcatattatttgaatgtttcatattgcaggagataagaccagtcaaa

SEQ ID NO: 5113 - DNA, 627 bp, Gossypium hirsutum
  misc_feature (613)..(613): n is a, c, g, or t
cagacacaaagagaaagattaaaagatacgacaaggaagatgaaagaaattcctaccattagtaattattacacccatgagcctatgcaaggaattaaggcgcaaaaagtcagcaatgatgacgcaaacttacttttcaaggtaaaagacattatgtagaagtgttatgaaaccatagaaataaaatattttaatctattttaagtaatagatgtatgttctacaaaatatataaacatcatagttaagcactaatacaagcataatttgagaacaatacttctaaaaactgaatacactaataggacatgacacaacagtcaacttaaagattctcaaaattgtagttaaaggctcttactggtaatatcaaccagatattgaagtaaaatgaagagattaagtgacgttcttcattcatgccccagttacatatcttgaagaaaaaacaaatgaagctagattgcgacatgaaacgaaaacgtcatgcaactcgattaccactcgtaaccctctaccctcgcctctacccctccccttcccacaccccctccacttcaacaaactcactaggactgaatgattcttaagatggaatgaatcatatgatggnattcattaactgtg

SEQ ID NO: 5114 - DNA, 598 bp, Gossypium hirsutum
  misc_feature (245)..(245): n is a, c, g, or t
ctcgcatgctcttcttgccttcaaggttacatcaatgaaaatatgtataatcaggcaaacttcagaaacatataaagggcatcactcaagcaaaatcttccactcttctatcaagtaaaaagctttttatgtaattatgctaatgactatggatgcaagcagcagaaacaaataaaagcccctgaaaagggaaggaaccaggtgcccatgaataaagggcgttcacaaaggcgcctagtaagtancaacccaaggttcaaaaaacaaggtagaaggaccacaatgaatcatttattaaactaattaattaacacgaaattttaaaaatctggcgccatggcaaatgtagaaaccaagtactagcaacatgaaaattttaaatggtcactggcgccatgaagataataggtaagtcgtagaagtatacaattgttaataaatttcccaaaatattcaaatttctgatgtaatatgaaatgggaaaaggacttcacactagccgccctaccaccccagacccctagtacaagcattcccaataatgctctgaccatggataaagggttttgtattccacttctggtaccccaactaatac

SEQ ID NO: 5115 - DNA, 622 bp, Gossypium hirsutum
ggtggtgatgcaggtggggttaatggtgggtcaaatgtttcaccccacatgaccagtgagagagaagcaatcctaagcagcgaggccccttatcgtaatgggttttgtgcacaagcacaaccgccaccttttgatttcttccctggtgtgtgattctcctcttaagcttcttttatgatacgttttggtgtgttttggtttctgtgctgtttgtcattgttttcatttttggaaacctacctcgaatttcttaccacaattcttctgtgattcacttttctttcaacagctgaaccaaatgtgtcatgatttttgtgttcatttgttcttttgctttatagacattgactgatgtaactgttttcatctacctttttgctgctttaaatccaatacaatctattcattacgtttggtctttgttaatatgctggtttctcaacatctgtagatcttagcaatgacatgatgggcatgttcagccagaccagattttgggataggcccatcgatgaaacccaagtccgtggctactatccccagcgtcaacatcagcagctgcacccttcacacatgatgacaatgcaacagtcagagttcctcagctcccaaagtaacacag

SEQ ID NO: 5116 - DNA, 626 bp, Gossypium hirsutum
taatctattacgccaaattcccacaaaaatccattctattaatttcacctccttttggccccaggctggcaacaaaaccaagggaacaaaagaaccaggatattttttttttcaaaacaagctaaaccaaagcccaaaaaaaaagggaaaactggtcattcctttctttttcccaatacggatcattttcccaaaaaatttccttaaggaaataggttaaacaaaaaaaaaagagtaatttccagctttccccttaacatttataaaaagaaaataggcaagggataaaccggaagttaaaaaggcagggaaaaaacagtttacctaaagggaaaaaatggggccatgaaaaaaaggaagcattcaatccgcaaacaaaaaaaaaaaaaaaaaggcttggttttttattcaacaaggaccagaacccctaccccccccactttctgaacttaaggggacttggggttgttcttggaggggctgaaacaaaagctgggattgaaatggaaaaattccatgaaaatgaagaaggggaagaacttgcccttggggctgaatctgaaaaaggttatcaaagcaccctaaagccaaaaaaggggacatggcggccaccggagtaaacccag

SEQ ID NO: 5117 - DNA, 519 bp, Gossypium hirsutum
  misc_feature (395)..(402): n is a, c, g, or t
  misc_feature (429)..(433): n is a, c, g, or t
  misc_feature (435)..(436): n is a, c, g, or t
  misc_feature (443)..(443): n is a, c, g, or t
  misc_feature (459)..(461): n is a, c, g, or t
  misc_feature (467)..(472): n is a, c, g, or t
  misc_feature (474)..(474): n is a, c, g, or t
  misc_feature (485)..(486): n is a, c, g, or t
  misc_feature (488)..(490): n is a, c, g, or t
  misc_feature (501)..(504): n is a, c, g, or t
  misc_feature (509)..(510): n is a, c, g, or t
gatatttaagccttttaggtgttgcagtcagaaattcaagcaatgaaagcagtacatatgtgcagccaggttgtcagcttggtgaaaacgatgagattagtgtctgttccacgtcctgcatttatgtcaaaattgaccattagttttttctttttctttgacaacatttcttgctctctttaggactcactggagctgcttgtatcacttaaggatgttgaaccaactcaaaagcaagaccatgttgatgtccccgatagtggaataagacctaatatctcctgcaactcttcaaagaaggagaagccaaaaaggtacgtttggtggatttcatatcacagtagctcatgaattttttttaatcaccctcatctccttggtataaattacacacnnnnnnnngatttgtctaaatcctccctcctagcnnnnnanntcatcanctgtgatgcagatgannntgacannnnnnangtcaattgatnnannncgtgatctatnnnnttgannttcatcgag

SEQ ID NO: 5118 - DNA, 625 bp, Gossypium hirsutum
cagcattaataatagataagtaaaaagtgataataatgaatgtatttaacgcaattttattttataattttgttcgatgtttcaatcgaaatacaaacaggatattataaaaaagaaaaaagaaaaatccaaataacaatgatagaattaggaaggggacaagcatctaaatgccacattcaagtaaagccaatcctggtagaccagacagatgagcctaaattatagaagaaaaaagagcagcagacataataaaatgagtgtagactgtggagtatagagtgagtgtacatgttcatgccaaaacaatccctttatcacctgtagactctacattggtcgggttcttaatcatgtaattttttatagaaaatactagtgtttagttaaggcaagtgaggtgagaatgggataaagatgccaccattcctttttggaaaatgagaaatatgatagatgtgtaggcatagcaattaaagctaagttatataacaaaatgggggataataattccaaaatgagtgattaggaaaagattaggaaacaacaaaagaatgaggccctaccaactaattatgaagtatgaaaatttgagctgaggtaaccccaacaattgtagaggcgg

SEQ ID NO: 5119 - DNA, 617 bp, Gossypium hirsutum
  misc_feature (612)..(614): n is a, c, g, or t
acatctaatgagttgttattcattgcatctactaggaggcctcctgcttcagcagctcggcggaggatgtcgcaatgctgtgtgtgtactaaaagtatcaggttattgtgttcaatgcacgatggtatgaagttcgataaaaacccaaataaaaccagaaattatgccatttatacgtatccgctgcattgattgttttcgttaaccccatctctgctctgttaaatacatgtcatgcactagttcatctataatacaaatttacctgtgaaacgagtacctccattttcggaattaaataaagaagatttgtgagaaactggagagaaaggcaaacctttgcagcctcagcaacaatatcaggaagctccatagcagttacatcattcagtgcaggaagagaatttgcaaccaaaacaacctgcggaaacaactcatttaagttattatgcaatgtaattgtaatttggtatttcagttccaaagttacggaactcagtgaagcagtaacatcatcttccagacaaacttacttctgttccacgtcgaaggagttctcttgctagcggaagcatgccaaggacaatgtcagcacccgagttgtcaacaaannntaa

SEQ ID NO: 5120 - DNA, 621 bp, Gossypium hirsutum
  misc_feature (552)..(552): n is a, c, g, or t
agttctaattttgcttgaagcttatgtgtcttaagcagtcatgactttattaatttgcagaacttgagtccttttgtcagtaactactaatttccgtatcttataacactataaagttcaatcaaactaatttcaaactataactgctgaatcgggattactagggacttgttgatgagtttcgcatacctgaaagagaaaatccaaagttgctagagtttcaaccttcatggagatttgcaaatggaatgtttgctttggttttgtcctttggccttctgtttactgcattaagaagccgaaaagcacgatcttggagatatggatctggtgagtttctgttagtctctttacatgcttttagtccactactccaagatcatttatccaacataaatattacacaagtccttaaaaccttttttttcacttaatctccaaattgtgtttttcatttctatcctcgggaccctggcattatccaatagcttgcatgtcgattaagtgtcagctgactgaaatttactctaatatttttttccttcccaggantcttggcaaggttccaaacaaaataagggggggccttaatggatccgggatggaagggtggttcttaaa

SEQ ID NO: 5121 - DNA, 629 bp, Gossypium hirsutum
gtactctttgcaatctaccttcaacattaagcagtctacattgtgtgcaactgttcatggtttcagggacattttttctttctttttttatttttataaaaagagaaaaagacccataagttggacagaaaatttgcaactgtcattgtaattatataatgcttaactgtataccattcctgatgatgaggctcatggtttgagtgagaaaggttttgttgggaaaagcttaggaaaatactgtagtagttctttttattatcagcaagtgaaaaagtactgcaatagtttggaaaaaagaaaagctttcaaagaatgggaacgtaagctgatatggtgtttgtcaaaatgactgaaataggtttgtttgttacctatttaaatgggtaactaaaggttaagtaggagaaatacatatcaaaattatataatttaaagatatcactttagtcaaggaaatatgaaatatgttatttaaggtatattttgataattttacatgaaatcagaggggtttttctttttctttttcttaaaatatgggctaatttgggtttttacaacaaccttttaattgtctcgatcagttccctttttggtcttttacttgaagtgtgcggctgtacaaa

SEQ ID NO: 5122 - DNA, 645 bp, Gossypium hirsutum
aaacatattaatcttctaatgttaaaaaatgtagtgggaaggtattcccagaaattttgatagtgtatgccaacttgcatctgctgctttatacggtctctaggcgtaaaaataaaagaagtagcaacgcttacactgccaccagacatgcaatgggctaaagaatgatacttttgcaagaaacatattataaatttttaatttgtagatttaggttcaactttttacagaaatcgtaaacattgacttattaatactatctagtacatatgcagttaccttagggaaaagaggaagcaaagtccttttgactgattcatatgagaaagtataaagagcagatattggagctgaagatacaatattgctgccaatgccacgatataatccagttaaacctgcaagtatcaaataattaaaacggagaaagcaagcaggtcgagactgtaatttcaccaatcaaaaatgaggacagtcggtgtcagtcacatctattaagaacaagtccggcattttctctggtcggagttttatctacaaaatcctgatcaaagacaatacttaatcctggtatagaaagaatagacttccaaaatgaaacattgacttgtggtccgcaagacgggactgaatgagtgtcttaaa

SEQ ID NO: 5123 - DNA, 622 bp, Gossypium hirsutum
  misc_feature (493)..(493): n is a, c, g, or t
  misc_feature (538)..(538): n is a, c, g, or t
gttcttctcctcatgtatgcaaaagtcttatctatcaaacaattaaaagttcagttggttctcaaaataacaaaaaattctgtgacttctcgaacttttctccgacagaagtgctggttgtctggaatcagcttcatcaatttctcctcctgtgaaacccaaacatccttttagtgttttgggatttttttaaccatcctctaatccttgtatgtaaagttgattttttacttgcaagtgcaggtctgtatttggtcaagctcaatctgaggcggcttcagcatctgacaaaaagagaaagactcctgagacataaagttaattaaggaggttacagaagttttataatctactaaatttgggcaagtctttcttgcttaacaatttttgtttcttgagagaacaaaaactttctccttgcgcaaccatttgatatgcggaatttgtacatcataaattattaaatgtgaaggggagaccccatttttaaaanttttctcctctcacacactcgtgtcaaaaaaatttctgggtgcgnataagaaagaaaaggagaaaaatgtgagattgcgcgccagatattctgtctctcagaccgtatattcctccaaaaacctttaaa

SEQ ID NO: 5124 - DNA, 574 bp, Gossypium hirsutum
  misc_feature (8)..(8): n is a, c, g, or t
ctggttgnattttctcgttctctctcctactctttgggtggtttctgttgggtacttactgtgtcaaaaccttgttggaaagctagagtttcttcttttttttcattgaagttgaatttttgttagttgaaagatgcatgcatggttggtacaggttggtttgttctttcaaaatcctaggttgtcaataccggacagacatcggctgaagattctacccggaaccggctgattgtcgaaagatataaatttgtccctccctcatgaaactgaattgtagatttgcttcattaaagggaaatagaactttctattacaatcccaagatttctttatctggtgataagttcatgaagtaattagattgcttcattaaacgttagctaccgtgatttacatagctgtatcagccgccatgagttcttgctttgttatttctttcccttcaagttgtatagatgtatgcattccatgccacatacataatgatgcataatgatggttattatcatattaactaaattgtatagatgcatgcattacatgccaaacacataattaaataaatctaatt

SEQ ID NO: 5125 - DNA, 655 bp, Gossypium hirsutum
ctattgacggcggtatatttccgttgtagtcaagagaagattctccactgatctgctgacgctcagcaagggcagctactgcacaagcaaaaccaccagaaggagatgatgatgatgacgatgatgatgaaccggccactgtggccatagctggtgagacatagcgatctactgaaacatgtaccgaagaagcagcatctccattgttagactttctgtgtctgctgttctccttaatcaatcaaagaatcaacagtcagatagaccaaaattaaagaaaaacaaaatcaaacaaagcctatatgtaatatattacgtaaagtggagactttatataaacaacaagatgacaataaagaaaagcattagaaggattgaacattttaatatgtgaaattactcttagttcttcaataagttgctctgacttttaatttttatttaaggatccatgttgaaacatggatatgggaatatgacctccaaggatcatccaaaatacatgaaaaaactttttaaaaagaatctaaccataaacgtgttggacacattcctatatctgacacccacaccgagtccaagtaacaagctttaactagaaaaggaaaccttcaaagaaagaatggcaattttgataagcacacttggttgaact

SEQ ID NO: 5126 - DNA, 615 bp, Gossypium hirsutum
ttcctaaatttataatatatgatctttcttgtttcctggttgtatttgtttatgaagtaatctatctaatctctttgcaggaaaaacttttcagcatgcttaaggctgtagcaaaaagtaagcctaatgtggatgttgtgaagcttcagaagtctggcggtgttgtatcaagaaatgcaaaatatcgtcagaagtctaggggttacaggataagggtaaatgcaacatttccaatctgtggatagattctttcattattttcttgtagtttcctttcgtgcttgtttcaccagaaatccattattgtgagttgtgacataccttttctagtgagaaaataatagtaagcatgaagaatgataaatgacaattgttgacatcacaaggtaatggataatcgtttttgtttcaagggtcttcttgcgtttaggggaccaaatttatacttcattttgattgcatcgtgatagtccaattcattgatgccttgaaaagctagtttctttctattttctataacttgctcctttatttagaaggcatttctcttgatttcgtaaactttgcattttattttcatccttctgacaaagcacatacatgctgccaattcta

SEQ ID NO: 5127 - DNA, 566 bp, Gossypium hirsutum
  misc_feature (443)..(444): n is a, c, g, or t
  misc_feature (549)..(561): n is a, c, g, or t
atgaaaaggttcttccctgagcagcgacatttggatgtctttgagcagctttaagtgaagatgtacttattctgactgtgcaatgctctcaatctataaccattttcgtgaaaacctgttttcttgggttattggtttatagatgaaaaagaaaaagggaaaaaagtgaattttatatacaagggtccaacagaaggggaaaaaacccgaaatagaatcgataaattacagtttgacaggctaaacatacatgatgtgggcagatgatgtagggaaaatctagctttcctgtgaaaacagaatattggacttataaggtacacatcttcctgtgtgttgatttcttaaagggtaatcttcataattaatttgcgaggttctgaataatagttcatggttaccatatataattatatggaacgttttacatatggcactacgtnnacgtatttaatggaaacagattttgagtttttttccccctcaggatgaacttttacgcatgcaacgtaggcattttcactttagcaaaacattggcatgtgcttnnnnnnnnnnnnnccccc

SEQ ID NO: 5128 - DNA, 610 bp, Gossypium hirsutum
aaagttaatacgaaattgaaccactacataaaatgagatgaagataactccactatttatattgagagaaaaatgattaagcgtagggacattccaaacaaagatgaattcacctcagaatgttctttgcccgtacttcaagaaattcacatttcaagtcaactttatcacccagggatgcctcacttgttctaagtggcaaattcccttttacaaacagctttccccttctgcttaccctgctctccagcattgcaatgcatagcttatttgattccacatttacagtgccaccaatgtttgtaagtggttttctaagtactggtgaatatatagatgccctgtggaatgatgcagatccatcaaccacaggttgttcaactgtgcctctaacctgggtattaaaagacataaaaatttgaaagttagtgctaaacaactcttgcctatttaagcagattctttaccgtaagtatttagataataagtaaccttcttcagccaacccacctgaagcgtgatatcagcattgccgttaatccagtttgcgtaaggagataatgctgtcaacagcatcatgcccccatcctttatatcagcatcaattcta

SEQ ID NO: 5129 - DNA, 627 bp, Gossypium hirsutum
ttttccaggtaaagatgggaaagcacatcataggctcagaagtgtaagctactttaaaaaattgcaggtatactttggagtttcaacgttgcttgatgctgcttcaagtgataatcaaaaagcagaagatgaacaaaaggaggttaattcaccatttctttatatgatgtcttaaaatacatatgtatgtacatatagagagttcttaaatcagtttcacaacttgtggtatcaaacaggcagaattagcagtttcagaattttcaggaaatggagctggaatcttagctgctgccaacactgttattagcactttcttcttggttttcgttgctgagtggggtgataaatcattcttttccacaattggtcagttcaaggattctatacatttatatcatatcttcaattaatcagggatcactagtctcttgttatacatgcttaacaattaacaacaacagaacatgtgtatgttataagtatcttaggaaggctgagttcatgatttgttaatccagaatgaattgtttagatcaaaagaaagtaggtgggcttagtggatctgttttagtgccgaaattaatttctgtgcttctactttacatcatatatctaaaggtggat

SEQ ID NO: 5130 - DNA, 513 bp, Gossypium hirsutum
acacattttccaacatagttacgagtgctattgcatattatctcactaatattacttattcctgaccaggcaaagaagagaagaacatccagtttgagatcaaaactcatgggtcaaggactgaggctggtcccattagcttaattgtcaatgcttgtgtaaacagggatctccaagaaagtgttgtgggggtatgttttgtagcacaagatgtaacagttcagaagattgtcatggacaaattcaccaagatcgaaggggattacaaagcaatagtacacaatccaaacccactgatccctccaatatttggcatggatgaatttgggtggtgttctgagtggaatccggcaatgacaaagttaacctgttggaaccgagatgaagtggtggataaaatgctgttgggggaggttttcggaaccaacaccgcatgctgtcgtctgaagaaccaagaatcctttgtcaaccttagtgttgttcttaacaatgcagtgactggtaatgaacctg

SEQ ID NO: 5131 - DNA, 601 bp, Gossypium hirsutum
tatagactctttgatcaactggagggtgacaaaaccttacgtgttacgggtttctatggacatgtttatccgagctgtagaagcagttcatgggagatgttacggagggtgggggattcggctcaggaggaatgggtggtcggaggagattttaacgcaattttgaatgattctgagaaagaaggcggacgcaggggagtgagagcccagatgtatgaattcaaagacgtcatggatgaattggccctggtggacattaaacccgatagcggatggtttacttgggtaaacaatagggacgagggaagcttgataaaggagagacttgatagatttcttacctcggtttcagtggttgaaaattatccgtttatagccaccaaaggggtgagacaaacccagtccgatcatgatgcaatcattttagatctatggggtagaaaaccgaaggattatctgaatgataatagattgagcttcaagttcgatgtctgttgggccaaggacgaggatgcaaaaagggttatagaaagagcctggaacagagacggtactgactatggggataagattgaaagggtcaggtcggcccttggtcctt

SEQ ID NO: 5132 - DNA, 617 bp, Gossypium hirsutum
tttatactgatacggcttgactcaaatttagttggccgaagtttttggtgttctcttgttcaagatctttgtgagaaaagagttcatagaatatgctcgggagaagaactaaaataccaatcatgggagtgatgccaacagattttcagttgtcaagtggagtaggtgtatatgtatgtaggttttctgtcacacatatgatacgactctgcattttctttcatgtatcatttctgacagtatatcctatgcatttttctttcattgcatatgtttctttaattgtttttcatatctgataatctgtagttcattatttctggttcttctataccaagtttacacataatcatctcaactggctttaattcaccaagcattttcctgatattccttcaggtttggcagtagctgcagatccaagttttaagacatttgaggcagcttatccttttgttgtccgcaaacttctaactgaaaattcagctgaaacaaggaaaattttacattcggtggtggtttaaccctgtagtttatctatgaatattgagcatcattatgaaagtctctatcagtggaccttttttctttgtagctctgtcaataggcctgaactg

SEQ ID NO: 5133 - DNA, 378 bp, Gossypium hirsutum
  misc_feature (369)..(370): n is a, c, g, or t
aaaagccccaaaaagaaccattgcatcaatgatgcacaaaaagccaagttttaaatagcctatcctcctctcattatttctaatctatcagtactactataatctattatgataaagcctttcgagaacaatttctaataaatttggtggcacaattatattgataaatatcatatatatacaccaaaaatgactaaaaattatatatattttttaaaagaagtagacgggataaaataaaaactatgaaaaatatagacaaaataaaattataaaactagtgacaaaactgcataatgtagactaaaattagatacaaaataaaattataaagaaaagaaaatattgtagaaaccgcgaccaataatnngtaatcaa

SEQ ID NO: 5134 - DNA, 648 bp, Gossypium hirsutum
gagattaaaagaccaaaatcaccaaatgtatcaatacaattaaatgtcagttcaagtgaagagaatccgatgatgccttgatcattgatataactatgcgtttcattcatccgattagcgttggaatctgagaaacaaatccgattctaatgaacattttcaaatgcaatgtttatagtcatcggaattgcaaatgacacgcacggtcggagcgtgcgtttcggtgaaataagtccgacgaaatgcagtgtttaagtcaccttcattttccgtgcgatcaaattcaagaactcggcgaagtcgatggtgccgttttgatcagcatcgacctcattgatcataccctgcagttcagcttcagttggattttgtccaagagatctcatcaccgttcccagctcttttgtagtgatgcagcctgcgcacacacaccccagacaaaaacagaataaaaacctaggtaccgagcaaagctttaatctagaacataaccacattaggtcgaagtcatagttcggaatcaacaatatggtcacacaaacatcgacatacatacatacatacatacatacatatcccttaaataagaagcaaaactggttctaaaaaaaggcatgtaaacattagctttcaaggcatagcaaatac

SEQ ID NO: 5135 - DNA, 620 bp, Gossypium hirsutum
tttggttgttgtcatacgttgtttttaattggattagattagattcatgttgtagtttatttccttttcagttaaatgggcacaaacttcacccaacatttcaaaaccaaattgctactagtattccgaatttaatctataattataaagtaactttaattttttttatggaaaatccagtttcatcattttgatgatcttaattagcatatatataaataaaaatatatatcggacataatatacaaagtaaaagaaatccaaaaatatatctccaaattttatcacaaaggcaacggcttttagttttaccaaaggctattaatataaaaaggagcggatttatggaccccgatgagaattattcacaaacatatagaaaaaaaattataggcttctccgccacatcggagtttcagtcagccaatcaccgccacccttatattacaaaattataaatgtttttttaatcattttctttaaatatagcagtaaaaaagtattaattaaaaaagactaggcgtccgctttccgcctctttctttttttcaaagaacctccaaaccaaaccaaaccaaaactcagttttggaaatacccaggagagaagaacaaagaatt

SEQ ID NO: 5136 - DNA, 616 bp, Gossypium hirsutum
  misc_feature (63)..(64): n is a, c, g, or t
  misc_feature (266)..(266): n is a, c, g, or t
  misc_feature (401)..(401): n is a, c, g, or t
  misc_feature (485)..(485): n is a, c, g, or t
  misc_feature (549)..(549): n is a, c, g, or t
acacagaactagtaggcatatttgcacaaatttatgtttaagcagtactgtaaaatatcacanntgtcaagtgaacgatgacagggcaaaagccatgtttcctatttcttcctcaaattctgtttgagattatatagggtagagggtttatggcttaggtgcatcatatcaactcttctcttcatcttaccaaccacagtttttagaaacaaaaaaaaaaaaaaaaaacagggattggtgaaaccccggtttaaacgggttttttnccacttaatccaaaaaaaaaatatgtttttaaattggaaactggaattccaatggggcagaaaactggggcggggggttccaactggaaacaaaagaatttggaagaaaatttggaataattttttttttcctgnaaaagttcaaaagggttttaaaaaaaaaaaaaagaaaaaaaaactaatttttttagggaccttcaacttttggaaatttttgtntggaaaaggaattggaaaaaaaaacttcaccgccccaaaaaaaaaaaatttttttctccgcctnaaaaaaaaaagggtttaagggggaaaagaaaaccccaaaccccaaccccctggaaaaaggggaaaaa

SEQ ID NO: 5137 - DNA, 617 bp, Gossypium hirsutum
cgagttgtttatgtttatagtgagggtaacaagattgccaatgtgttggcgccaatgggtttttcaaaagcaattggtgtttacagatttattcaactcccgaatcaagttaatgattgtgctttaattatcgttgattcctttatatatatatatatatatatatttcaaaaattattccaaaaacattttttgataaataataataaacaaaacgtaagtgaaagttaaaagagcatttggagcaagaaagtttgattatttagattacttaatatataagtagatatgttaagtttatttgtttttttttttggaattgataaatggaatggatggttacatcaaaccatattttcctaaatgatttgaattataaataaaatgaattatgcacaatgttaaatttcttaaacaaataagtaattagctcacttataataattaaggtaatataatcaataaaaatgtaatataattgacgaatgttaagtttttattgattttattaaaatagaagaaagtcaatgagaaaattgtcataaatctcagcttactaagaaataaatggtatttatcctttacattaacctttaaatcaactgataatatatatt

SEQ ID NO: 5138 - DNA, 633 bp, Gossypium hirsutum
catctccacgaacatcaccagttctagaaggtttattgccaccaaggaacacagaaacacaagcagaatagatctggaacataaagagcaattacaaaacagtagtcaaagattaattaaacagttaaagcgtaaattttaggagaagtgcatacctgcccatgcttgaaacgaagaacctgcactatttttgtttcaataagtttgctcaggaaaccgacacagtgaatctcttctacctggcattttggtttccaatagcaaggtgcattaaaaagaaagaaaacgtcagtcaatattctcaattattccttttccagatttacaagggcctataacaaaaaaagaaaagcacacaccattgttccattcttcaacaccacaggaaagcatagctggactgaacattgagcttctaccatggggctgcgtaccacatcactgcaatcacaacaaatgcatcagaaaaattattgaatgccaaatagaaattatatactagcctacatcaaaagccagccaatatgccatacatgaatgcaaaattgtatgcgtacaactacatgttacaaagagtgctaaaattttaactcaaggataatccattaacagcggaactgactccacctaaat

SEQ ID NO: 5139 - DNA, 638 bp, Gossypium hirsutum
caattatcaaagcaaagcaaagcaaatattagcctttttccctagggtggaaataaagaatgagttatgcgtgtggtatggtacctgagatccttctcgttgaaagaaacggagagtgctttgtttttgagagctcttttcgttatgtggcggcctcggggcttcgattgtagcaccggtgcttcctcttcgtattcttcttctcctcctcccatggctgcaaacagagcagcttcgtctctccctagattgcaatgtgaggtttaacgagccggggttttggagacaggctttaggtctgggctcaacttggcatgttttgggttattaacccggtccagtattttatctttcaactcaaacaagctcgacggtggagggatcggaaatcataaatggcgcaatcattacccgccacgctcctttccatttttttatggtaaatttccttaaatctttattatttatcttttaatcacttttaaaatgaattttttttttcttgaatactatccatttcaaatttcatttcatttttttcaactatgaaatggtaccttcaaaacttactttacgtgattgattcatttgtctacaatctattcaatattatttctcgaacggggttcaacgtgatg

SEQ ID NO: 5140 - DNA, 600 bp, Gossypium hirsutum
gttgcgtcaatagaaaattttccatagaaaatatgagctattctctagctgttgtttgtcattgtcatgaaaccatgcagtgttcgaccaaatgaaacgcaatgttgctcgaattatcttttcgaccaaataaatgacaatatgttgtctttgtgatagagaatcttttagctgtgttactgaaatgaagattacgaatgtgtgaggtttcttttcatatttttggatatattgagttagatcaaatacaactgctccgtttgctgtatgtgaccggtgaagtcctataattcttggtttattgcgaattttggtctgaaaatagttgccttttttgttttccctgcttgaaccaggaaatcgaagagaccagagaagaaatagctgccgatttgctttcgggtctagatggtcagaaagttgctggaccagtaactaaatctcacttaaacatgcgatatgctagcaaagattttagattgagaacatcatggaaccaaaaattcccgttgcatttcgagaattcagctttttacaagctaattgattctcttgattcatcaaaaataggactagaagattacgaagttggtttccgag

SEQ ID NO: 5141 - DNA, 657 bp, Gossypium hirsutum
tttaacgacataaatccccagcaatttcagatctgattactcctccaaaagttacctcgatgacatgcaataaatcttttttgttgaattctggtgaacacgcacccatcttaatccagaacggtgaaggattcagcaggatctaatttttctcggtcagtttggttaactgatcaaataaaacgaggcttttacgaaacaaccatggtcgcccttccattattgtttccaagtcatcttttaaatcaaacacaattagaattagaaagagattttgccctactagctggatttcaaacttcctcttcgtcttccatatactcttcattcgtgctttaaagctttccgggttgtaggccttctttgtccatattgaacatatcagagtaggtttctcattcgataccaccaatgaacatttgacagataattgaatgagttcatctgccagtaacgagatctcatcgtttttctctctaacggcgtcaccactgtcctccatcccaagctgcagcagttactgctttctctaagactctttgacaacgcactcttggctttcagagagaactattaattattttcttcctttatacgtgaattttaaaattgaactaatactagaaattattatttagctacgctcggggtctaaaa

SEQ ID NO: 5142 - DNA, 631 bp, Gossypium hirsutum
atttctctatccatttgggtggcaggtaaactttgtgcatttaattacctctattctatggtactcagattcgagagtgagtattataaacagttgtgtctccgatttagagtaacatagtaatttaccgattcaatttaatgaaaattagaattgacagtaactagtctcacttgcaagtgtgtaggaagtagttattgaaggtcaagacaaggtgttcaaagatgttattgagccattagaaagcgttagtgtgaatatgatactaaccagcaaacaagatattcgagatttcggatctccacaagaggtttgccatggattgtctatattatatatcatcacattgagaacataaaaaaaaagagtgagatcttagttctcacgataaattctcacaggttgctgaaacactaatcaagaaagttttggctcctccaactcagaaaacaaagctaattcaggcaggagaggtttgtttcctgcatttttgcttgattcaaagatggatttgttaccctttcttttattgtactgcctttattatttttgactatattgctctgattcttcattctttaaagtattcgtgttcaacacttggttctgacgatgcatataaaaaaaaaaa

SEQ ID NO: 5143 - DNA, 606 bp, Gossypium hirsutum
acaattattggtttaacttgtcgtgttggtcgggcaatatcaggcagtgctgatttattgagagatttagttcaagatggggcttctttactgctcattggtcctccgggggtgggaaaaacaacaatcattaggttagttgtttctatctctgatctgttgatttgtttggcaaggttgcatgactaggattgctttccccattctcattcttaatattttacaaagttgagtgcaagtatttcaaaattcaaacactaaaatttaactggttaccaagttaatgtctctttactcaatagaattctctaaattttttaaaagcaagatggtcatgtttggttatcctgctgaagtacaataccaagaggaatcaagtggaaccgttcatgtcctttagcatatttgctatcagcggctgttcttaagatttgagcttgttagcccagaattattattagattacaaatggctttcaaattttttacttgttgaacatgattaatctcagtgtaagggaagggttttaaaatctttatagatgatatatcttaatgctgaaaaaagttttctgctatcaatcaaccagaactagcataagccaaa

SEQ ID NO: 5144 - DNA, 640 bp, Gossypium hirsutum
ccataaggaggaaagtaagagtgaccaactggagaagcacctggtagaaccccaattccttgatgaggaggtggctcctggtttcattttcttgcttacacaatgagcacacttcattatggattccccatctgtctagaattgtcatccatgagatgatagaatgcatatggagatagctcgagagtagtggaaagtgtacaaagaaactctccaagcaattctggagggaaattaactcaaaagagtacactgcttagacaacaagatgaacaagtggggttacgaagcaatgacaactggacttccaattcaaccttattagcagtcactctttttgaaatagcttcgtagtttgctttattaaactttctgagaagggacttaagcctctttaattcagtgaaaagaatggacatataggataggagagccaataacatacagctcaaaagagttcatgtgaatgttgaaactaaggaacttcaagaattaatcaacagcaaataaagagaacaaaagaataaaattctctttcgttgacttttcaaacttaatttttgtgcacagcttatgagagtatatcgtccggatcccatgggtaaaagctttaatcgacgagtaacggtacaattaacaa

SEQ ID NO: 5145 - DNA, 609 bp, Gossypium hirsutum
  misc_feature (603)..(606): n is a, c, g, or t
tttaacaagatgctgcttgctgtgaaaataaaggctttacgtctgactagtttatgcatcaatttccattaagtacttatatggttttgcttaggtcatatcagtctcatttgaaaattctatcaatatctaattttctgttggaccagtcacttctgtatataagagaatttctattgcctctattacatatactgagttgcaaataagatgttcactcgttgtgcatatattccagtagacagcagtatataaccattaccattaccatgtaacaacaatattctacataaatgctaaggttttccttatgaaggattgttgtttgttttatgaaatatgttgatgctgttgatccaagagcattatatgtatatgtccttgtcattttctgttcctcctttttgggttgtgaatggaatcacccaatagttgccttagactgcattttctgagacttctttttcattgaagtgctcatgtttgacgtatatctggacgtgggtacggggatatagctatttaaagatcctccaaatgcatgaaaaaacttggaaaaaattgaatgtatatgtcggatatgcatgtgcctgattacatagnnnntta

SEQ ID NO: 5146 - DNA, 639 bp, Gossypium hirsutum
actaagaactaactggcttaagtctgtttggtacctacctaaaaattaagctcactaaagtaaaaagacagatttcagcggcatggaacatatttctgtgtaaactatgacctaaagccatggaaaatgtttttgtctggatatattttgcaagcgatgttaacagttgataaaaatttcaagctctattcaagaagattcaaacagacctcattaagccatcgtctcaaccacaacatgctataccattagattgtaaacacctttcaggtgtgctttgatatggtttcatcttccaaacattttatcctttttacagtactcttgtccctctgaatcaaggcaggcttagttaatctgccattcatgtaaaataaatgcattgaaccagtatcctcatcaagaagtttgcaagcacaacacaagatttcaaaaccagcagagattacttatcaaactgttgcagctcaattccccaggttgatgctaactgcaatagaagttggtcaggtgccacaccttcccaatcctcaggtggatccaatgtggaagctgcctcatgcaaattcaacaaaagctctttcttcaactccatagaaatacccagtgcatcaggtccattttctaaacacacttcta

SEQ ID NO: 5147 - DNA, 657 bp, Gossypium hirsutum
tgttaaggagagctttgaagattcatcatattaacttctgtaagtactttgaatgaagttttagcttttcttttgccattgttacaagttgcagattggtatttgaaactgcaacttcaagtttccatcgtatcttctaaaccaatcttctgttttactgattctttgatgttaattcaactcttttactaaagggagagtgcagagtctagaattgttctttgcttgctcataagtcattgcttttacaaaagttttgcatacactttattagtcttatacataacatgacgatgtatcatcatatattaacccatttttataaatgagaaaagatatctttctcttttcacacttaaactagatgcccttttttgcttttcttttgccaataccttgttattaagtgcttcaagttccctagttttcaaactaaacctcaatgctccttgctataaatctttgaaaaaggttatcatgtaccttcttgctagtttccatttctcttttctaatatctaatattgcactctatggtagataattctagtcatcaattttgaaatttaaactcaaaattttcaaaaacaagtcttgttattaggaacttaatttcaagtgttttagctgtgctttaaacttatctgaagggtttagt

SEQ ID NO: 5148 - DNA, 599 bp, Gossypium hirsutum
tatttcaagtcacaaacttgatagggcctttcaaagataatgacagtggatatgtacatgactggttaagtaagaaagcaacttcaacattccacagaatggaagactggaaagcacttagatcacaagccatgaatgttgttaatggcaaattaacaacatactaaatgcaatgatttatgaaacataacatgtgaggaaatgtgcagatgaaagattaaaattttaatcatatctgaggtagttataagctaaatgaatgctttctgtgttccaaaatgattgacaagaatatcaagtggatccattcgctggctaaattgatagaattgaaattctttaaattcaactttgacatcattttaatgtttcaagtacaaagatatttattaaattatcatttattcttgtctattgcactattgtcatccaattagaaactgcacagtagctgacaaactaaggagcaccatgcagatatatattttgtagtcataacgaagaagaccttctgttttcaagttacctttgaaccactgaaatccaacaaaatagtctctgcagcccctagaagtaaagcaaggttcttccgccaaata

SEQ ID NO: 5149 - DNA, 634 bp, Gossypium hirsutum
taaatacagggaagcactatggttaaagacttgggaggcaaagaaaacaaagcacagacagagatttatatcacctttgatttccagtgagaaattgagaaactaagcatggacgcaaagacagttgaattagctggtaatctttctgaatcaacaatgactccaccatattcatcatcaaaagaatccaatattctcaaattcctcgaaaacaaacttgaatttgtgccattaatctgatataataaatttcctgctccaagtttttcttcatcaactgaactgacagcttgctttggcacataactgtagttcggagtacttgaatgagaagccttcggagatatacctgaaatcattactttccaatcaatggcatcttaagctaatcatttccctacatgaaacagaatcaaaacaggacaactaatcctcaactttatgttctgttttacatcaggaatcggacaaaaattgaattgactgaacataacctgccaggcccttctaattaaaagtataagaatttaaaattacctctgcaagaactgaagtgtggggtggatttaacttcaaccaatggcctgaaactcgaaaactggcttgaatttgtcctttcaagacgtgctatctc

SEQ ID NO: 5150 - DNA, 729 bp, Gossypium hirsutum
  misc_feature (696)..(699): n is a, c, g, or t
  misc_feature (716)..(718): n is a, c, g, or t
  misc_feature (721)..(722): n is a, c, g, or t
  misc_feature (724)..(725): n is a, c, g, or t
aagaagctaaactggtattcgaaaaaatcggtgaccacatggacaagattgtttccaagttcattaggaattcaggtagtgtaggtgggaatctgatgatggcccagaggaaacattttccttcagatattgctacaatactactttctgtggatacaattttagaaataatgacaggtgagagacttttgaagcttacactagaggagttccttggaaggcctccattggattccaaaactgttctgttaagtattaaaatcccatgctgggaatcaagtagggatgtttcttctgatgcctgcaataagttatttttcgaaacatatcgagctgcaccacgtcctcttggaaacgcactcccctatttgaatgctgctttcttggctcaggtgtctctctgtaagaatcctacaggatttatgctaaaaaactgtcggttcgcttttggcgcttacggaaccaagcgctctattagggtgaaggaggttgaggagtttctatatggaaaattgctaagttttggtgtgctgtatgaggctattaaattgcttgaaactttggtaatacctgaagatggcacttctagtccagcatatcgatcaagcaatttaatagcctcatacagcacacgaaaacttagtaattttccatatagaaactcctcaacctccttcaccctaatagagtgcttgnnnncgtaagcgcaaaaagcnnnccnntnntttt

SEQ ID NO: 5151 - DNA, 603 bp, Gossypium hirsutum
  misc_feature (540)..(540): n is a, c, g, or t
aggggaaaaaaccataattaacaatgctatgagcagaaagtaatgacaatgacttaaatgaaattaaacaaaagaagacagaaagcaatttgtatatcctagcaatcaacactataaacacctgataatattattaaatggaacacacaattaacaataaaaaagatgactgaaaaacatacacaaaaattgattcaagatgactgataaacctctgcttaacaagcgttaaagttgtcgacaaattagtttatagaagcgacaattgaaataaaatagttttactgcctaataatcttaccacttctgtcatgctttaccatggcgtaagcctcttgattcgacttgttttggctctcgttgaccactgtattttccagatcaactttttctgcctgcaaaataagagtacaaactagcaatttcttagcagaagattgcaaaaaagaagtaaaaacctttgtttcatttacctctaactgacgcaaggtttcaatgaggagatactgtttctgtctaagcaacagcatctgcttctgnattgttaagaattccgtcctcataatctgctggctatcttggatagccaattcgcttacccct

SEQ ID NO: 5152 - DNA, 611 bp, Gossypium hirsutum
gttcagcaggtctacaatctgcttagcttcaacattcatcaattgcatcatatcatttccgacttaatctttgtgtagtcattatatattaacaagcagtgaatgaaaatttgatgaatcaggattttgaaagttctcacatagcgaccaagtttatagcatgatttgtttgtgtgacaatttaatagcagcatacagcctttatggttggagcctacttccgccattcttaagcttgcgatgagacgagattttatgaaatgttggaccttcatctctgcgagataggactctgtaaatacagttcaacatgatagcttaaactgtttcatggaggttcacagttggagaagcagatgatttcttggaggtttcctcacagctgttatgggtctagcacactgattcaatgtcggtgaatagcattgaaccggttagactaggaaccggtatggatgggttgaattggaattttttttaataatttttaatcaaattagctggaccattgatttaattggcttaatcatcaattggacttttaaaatattgatattttatattttaaattatattattagtatacaattgaaaattcctagatccggaag

SEQ ID NO: 5153 - DNA, 609 bp, Gossypium hirsutum
cggtggccgggttcttttccttattgcgacttttcctcgttcttttttatgcatccgcatgaaagtgggtttttctttatttctcaacgtacaaagtgcatgtttcatgcttgcagggttctacgtattttgtgtcatgtttagtgatctttattaagctgatcgctttcttttttccaatggtgttttctttattgctcttgctgggttgtcgccttttccgtggctgtcttttgcttgttcagatgtcgagatatcgcatggtttctgtatgctgagggttatcctgttgattcgtttattttggttggtttctttcgggtttttcgcaaagcttggtttctctgtttttttcctttgtacaggtttgtttcttggggagtgcctctcgtcttttcctttgggagctgggcttccactggtgggtgccatctctgcatgatttatgttccttgggctgtgttgttcggttttcttgctcgagcgctgattccctgggtcggcgggttggctttcctgcgagcccaccttctttctttctggttggtcttggtttcttggttgttctttgacggaagatcgaagatcttctagttcatgctttacggg

SEQ ID NO: 5154 - DNA, 648 bp, Gossypium hirsutum
ttttcattatatatgtatatatatatgcacttcagatggtcagaatgtactggtaaggtccatcaagctttcattcagcacattaacacatgaatatgtgcttgttttatatggtatatgtttattgcctctgctcttatgatagcctgtatttgactcgagttggataaatttatagggtgggttccatatgatttgcagtagtagagacaagattgaaactccagaacaggttagtttccacatcactttggttggttctgcatttaatcgagttttgtacattaaaggatctgctgcaaagtaaaattctttaaaccgtaatttatacgaattaatgctagcagataattgtgtagattttgttattaagtctagtatagcgaaattcagttaggctatcccctcaagttttcgatcttatgtaactgattagcattgccaattccttccagcttaagcaagctgaagaaacagtgaagaagcttgatttggatgggcttgttatcattggaggggatgactcgaatacaaatgcttgccttcttgctgagtactttaggtacaacaatatctgtgcaaaataataggccaattccacagccatttgctcaattatataatggcatcttgttcctgtttgatgct

SEQ ID NO: 5155 - DNA, 618 bp, Gossypium hirsutum
attctagggtagatacataaatatttgtgctcaactaacagggccatgtttcattgccatttaaatcctcctaccaattctttttctctgcacttcacttcctgcatgttaggacatccacggcagtgaaagaatcaccaggctatgtgaaaattgcctgctactgtccatccgactataggagatctcagctcaacttacatactgcttgcagttactgtatcacatcagggcttatggatcttgaagccaaaaactcttgggatgtagttttgggttggcttttgtggcattaggtgtccatatgtcattagaaaaagatgtggaaatgttgttccaaaatatgctccatcaatatcttgttaatgtcaaagaaaattaagctgtaaaacaaaagtaataacatccatgataaggttaaaagcaaataggaataactaacaagtcataccaattgcttggttccaccaacccagagatattgttaaagtgcatttcacaagcacgggtacctagcatctcataacttcataatgtccattcatccaagaaattccttgaaactttacgattctacaaaatcctagcggtttcataatttttgggatggagcagcgg

SEQ ID NO: 5156 - DNA, 551 bp, Gossypium hirsutum
  misc_feature (380)..(380): n is a, c, g, or t
  misc_feature (424)..(424): n is a, c, g, or t
caaataaacataaaatgatccaacaaccactctcaaattccagatgctaaacaacatatgctgctagatggaaactagcacggtaataatgataccaatagatttacccaaatcattacttcaaaaacctattctccaactggttccttacgtcatttacatggctttatattttaaaataactagcaagttcaagagaacaagaatagtgaaacaacaacttaataaaatcatttttacaccttaatgattcaggcatacatacatactggcctcccaatcatagaaaaaataatattaacctatggaagtgcaagtttaatctgtttcttttacacttttacaacagaaaaaaaaattaataactaaagttaacacancaaccccctccaaaattaaaattttatttaaccaaagaactaantaacctttaaaaatcctactaaccaacaatatggtcctaaaaaaaataaaaaaaacaaatgggttttcttatgggttgaaaataacgaggcccaaagaaattattaatcaaaaccttcaaaaattgg

SEQ ID NO: 5157 - DNA, 611 bp, Gossypium hirsutum
caaaataaaaccctaaccctatcccaaaaaagttgaaacccaaaaaagaagtgaagaagatgaagcaaagcttataaaaacaaaaacccaaagctaaagtaaagaaaagaatggtaacattgaagaccattggtgtgtgttgaagagaattaaaggggggtatatatagagagtggaagagggggaaatgaatggaattttaaggttgggttgctggctttgtgtgtgagagagagttagaacatgtaaattaaaaaataatccttagccaatccgaaatttgaggataaaattgaaaaataataaaatgaacacaaattttataccagatatggtgatggctggattgtatagatgttgcgtattctacaagtatatttcttttgatggattaggaagtggcttggaattgacaagggcctgagcttggaccctagccaaaattatatcatattcatatatggtttggctaaccatattagctagggatatctgcaaaggttctttcctttttgatttggacacttacattgcccattttttattctttattttgcagagttttatttgttttataccctttaatggcatttttaggtcttcagtttcca

SEQ ID NO: 5158 - DNA, 635 bp, Gossypium hirsutum
gcttttcgggcccatgcctaccatagaaacctgcatgtcttgcgtatgtactctgagaattcaatacttaaaaggagtcatacaaagtattccaagattcagaacttatgaatgcaacgtgacaacatcccatgttagaaacgagcaagatatatgaggtttaacgaagaaaacagcaacaatcaagagaattaggtttgtaaaactagttagaaaaaagtcgggacagcatatatatacatacatatataaaagactttcttgcaagcgaagttactagactttcctgcaaataaaattttatttttaaccctaaaccctgaagaaaactaataatctttgctgtctaaaatgaatctgtaggtaactcaatcacataagaattagagcttactaaatttgtagggaactcaatcacacaagtcagaaacattaaaaactggactgatatgcaaatctgttggcaactcaatcacataagcattagagtttattttctttaacatcgtacatgacctaaacttctttggcttcaatttgtgatgatttccctaaaactgaacttaatttatatttagcctcatgatgtaaatacaagcactaatgcacagagtctatattataaaatgatacct

SEQ ID NO: 5159 - DNA, 535 bp, Gossypium hirsutum
ttctactgagagccagttggtaaagctagaggctccagtattaacgcaaagagatctacattttgtgggaagaagcaatgtgagttaccgttttatgatgcattatgtaattgcaaggatctctcaattacatgcactagacatgtcacgtttattcaagcactttctgaattgattctaatatggttgattaacgtaggtaagatctatgtcttcataaactttcctacgaaggagatgagaaaaaattttctttgaagcagtcttaagaaaaacgctttattgttcttgtatcattgctttgtgctccattgctgcattctaggattttccatcacacaagtcatggtttagtttctttcattttcttttatcgttttttataaaccctgcttacagaggttaacaaacaaacatgcacctacaacttcaaggccataagtattccatcattcaatagataaagctccaaactatccagacattgcatttattgtctcagaatgtgtgggtcatttagcttcaacacataatg

SEQ ID NO: 5160 - DNA, 600 bp, Gossypium hirsutum
acttgcaacgatataaaagaaatttaggggctccctgcttcttccaacaagcgcctaagctaactcgttattgacccctaatggccacgcctctttagcgaactatactatcctaggactcacaccaagataaagatcagttgtccgccaactatttgggcttcttccctctaaatagtagcagaagatattttggacggtgatgagttttttcaattccagagtgcgtcccggactcaacctttcaacttgcttcacagcaatccagagaaaccgaacccgttagggagcttactcctcaccaagatgaatttgttgcggtttaggcaaaggttggaagccaaattactgagcatggattcgcagcctttgcgaacattgaaataaatcatcccagctgagggcctctaagtttggaccttcaaacgatagaagcgttggaataagccaatcatgggtggctcattccagatgttgcagcttaggaagtacggcactagtgtccaccaggataaactggtcagctgccctggcccagttctgtattcttcaatgactgtgtaaaagaaagggtgtaatggaagggggaagtcagcctct

SEQ ID NO: 5161 - DNA, 649 bp, Gossypium hirsutum
aatatttaaataatcaaaaccaaatctggaagcacaaggtttcagatgctgccgaaattgtttaagctctaaaagcatagaaaataaacagatttcttccaagtattttgccagaatttaatttgttttaaattattatacttaaaaggggaaaaaaaagggtgattgaatttgagaaaaattaacctacttgtactgttgtcggttgtagaaacaacttacttttaattgaacataaaaatatttaattattttgaaaagaaaaataatttaatatttgtaaaagtatcatcattcacccatgcacctaccatccactcaattaaagcttgtcaccatcgtcatccacaccaacaaaaatttgctgtaacaatatacgtcagtgtattataattcaatataatttatttagcataattaaccctcaataatttatattttatcccaataaaaaaaatgttgatttcatgcaaaagcagtagatttgattaggtgaccaccgttgggggttggtggatcagagagagagattgaagtggaaaacccaagcaataccctacttgctattaaggcaaagcccaattccacctcactttgtattttatttttttatttattttgtcggcagacattgaggattggtagctaa

SEQ ID NO: 5162 - DNA, 590 bp, Gossypium hirsutum
  misc_feature (557)..(561): n is a, c, g, or t
  misc_feature (572)..(574): n is a, c, g, or t
  misc_feature (576)..(584): n is a, c, g, or t
acagggaagctcagatggctcgcacgacgacagttccgagagttttgcttttgccttagttaatggtgcacttggagtctttgaggttcatggccggaggatccgagacttcaggtataatttttattcatactcatggttatggagccagcttatgtctacatgttattgtaaggatgtaactcttgcattaacaaggatcatttgcttgtctgcagaccaaaatggccttcttcttcatttgtttcatctgatggattgattacagccatggcataccgcttgcctcatgttgtacgtcttgtatcttaaatgaccccatccaattggtagtttatattttcttgtttctttgaagatatatctgtagccactaacatcattaatttctcaggttatgggggacaggtcaggagtcgtcaggtggtgggatgtaactactggacattcttcctcatttaatactcatagagaaggaatccgaagaatcaaattctcacccgctgttgctggggaccatagtcgagggcgcattgccgtactattttatgacaatnnnnntttctgtattnnncnnnnnnnnnaaaagg

SEQ ID NO: 5163 - DNA, 672 bp, Gossypium hirsutum
tgggagcaacctataatgagtaaatcccctcaaattaatgctcattgttgttcggcagtatgccgtgcaaaaagtgagttcatgaaaaatcaaatcttatgattagaggtagaagatgagataacacgatttaaatccgtgtcaactaagtgtttggtaaaaattttaattatagttctattcaactcaagttaatgcttatgaatatgttaaagtttatataatataaactattatatataaaataactcatctctcattagaaagtacatataattaaaaaaaatactcaatacgattgtaatataagatataataccaacatgatattgatacgtaaatcttatgcactaattttggattattttcaattctaaaatttaattaaaaattatattttatactctatttgaaaaagtattaaaaaattatttatttatataaagctgaaatgaatataatatatataggatgtagatattgacaaatgacaagtttttcaaagcagcgagcccattggaccgctctctacagtttggagttgggtcttcgactaatcctagatccttcttacaaccttgcccgactcatctcatctctctctctcttaatcaattggacacggcgtcacccaaccgctttccgccactgcaccgtctccgcctgccgccg

SEQ ID NO: 5164 - DNA, 660 bp, Gossypium hirsutum
ggggtcaatcactataagaaaggttggcagaaaaatatccgctgtgtctacaggcaagcctggatcaagtggcaagggctctgagaagaaaaaggtctgtgttaatagctttattatttatttcattgctggatacttgagcatatggttcttttgctacatgaatgtaaacctttcagtacttccgaaaattagtatatttgcatttttgtggatttctcttataaagtcgttctactggtgaatcaggggccttttatttgtacaagagcatagcttttgcttatctggatcatctgctttataattgtgactctgttcttagtttatatttattcttgctttctccttgcttgtaaagattattaggaagcaacttattgaggcacttgcggttgaataagatgtcaaaattggctggtttctaaaatttcaaggactttattggctggtttctaaaatttgaagcaccttgaaagtccttcggaaatgcttgtaggatggaatccttaggtgaatgcttgtaggatgcttttaatattttacaaatcattggagcaaattttgcatgaagttttgatatcctaaaatattgtattcatcgactctctttcatatgaagttattctaaatgatcctttccaatgatcatgtgttact

SEQ ID NO: 5165 - DNA, 603 bp, Gossypium hirsutum
atccctcaagaccttaaagccttaaacttgtagagaagtagtgttgaatttagagctcctgccccaagcagaacttcccgtccaacatcattctcagatgcaagtgttggttgcttggttaccaataaacccaaacttgcttgttgttgaccctactactcaatgaccatatagtctccacaattctcctagctcctgttatatcagcatctctctgcatctgttttgggaaaatgacatgctgaaaaggttttaaagcttttcacataattaattgacttatttttatctcatcagtttttcactggtttggggtgcagttgcatacatgcaaatatttacttgtattagctgaaaatttagccatttattccattgtttttgcttctaatatttgttcattttataggtagttgttcctggaatgaatggataacgaatatgtttattatatcttttatatagatattaacaacttattcctttatattggcttctaaaatatcattatatttttatattttataggtagttgttacccaaatgaatggtgtagatcaaccatcagaatctattcatgtactacatgtgggaaagatgagg

SEQ ID NO: 5166 - DNA, 617 bp, Gossypium hirsutum
ctagcagaggagaaatgaatagactcaagagtgtgacagtgaagaaatttaatgagatgacaaatatactgatttatagtagaattatagttttgtccctacatcattctcaaattttagatttagttttatattttaaaatgatatgaaaaataattttattttatttttattaaaaaccaactttttaaatattaattatttagactaaattgtaatataaggttaaaatgtgcttgtaacttttcaaaaattgagaatttagtccttgtacttgtctttgtatttgtaagaatttagtttctctattttcagatttcaaaatttagatttaattattaatattgttattttttttgttaaattggttgaagatgttgtaattaacttgaatttaacaaaaaaaataatattaactattaggcctaaatcttaaaatctgaaaaataaaaagattacattcttaaaaatacaaatataaagactaaattttttattttcaaaaagtacagaaattataaacatattttaacttattatataattaaaaaaattaaattatatcaaatcaatatatatgaattaagtattaaatttgaacataacactgtctcatg

SEQ ID NO: 5167 - DNA, 607 bp, Gossypium hirsutum
gatcattgtgtttgcaacggtacccctcactgaaaattgttacttcagaaattgatgttgcactaaatgaggaatttcgtgtcataccaggcatgggtgagtttggtgatcgttacttcggcaccgatgactgattcaccatggtaaattgcaaccagttatcagacaaacaggttgcttgaacaagtaatattctaaaacatatacatgagagattagcttaccctttatatacaagctaccgactaggaccatcagacttcatcaagaggcgattctgagatcttttattttgttttcatgttacccgaattgctccatttttgagcttacggatggaagaatacttgaacaaagtcaagtcaccaggagtttgtttaaaaactgtaaaaccacataagtacatgtcatatgcagcaactttaagacaattaattcctgcaaattgttgttattttgagtgttaaatttgatggggtcagtagttttcagatctccttcatgtttctaccataaaaaaatggtctcgacccgaaatattttaaattagttcgagttttttttttgttataagcaagcaattatattaaaaggagagaggtttaca

SEQ ID NO: 5168 - DNA, 620 bp, Gossypium hirsutum
  misc_feature (7)..(7): n is a, c, g, or t
gaagaantcgtaaaggaacagagagaagctataacagtagcaggaaaagggattttcaggaacacagtggcagctctattgagcatgcaagaaattagaagaggcagttctacttacggccatttttctctgcctcctatggatttgccagactctgatctcatacactccttccaactcaactccccgatccccattgtctgatcacacaacttaaatgaaatttacgtgtagtttcagtatcattgtgtttattacggttgtgaacacccaaaaaaatcgtaacatcctgttatgattgctattgaaatcctaaagttagcatgggtttttagaacatagtaatcctcataccattattgttctaagcttttttttttttttaaaaaaaaatttcggcttttgggggggggcaaaaaaaaaaaattttttttttgggggggaaaaaaaaaatggattcctttttttttttttttaaaaataaaaattttttttttttttttaaaaactggtcccccttaaaaaaaaaaaaggggggggggaatttaaaaaaggttttgttttcaaaaaaaaaggttggcagtttaaaagggtaaaaaaattttcccgaaaaataccct

SEQ ID NO: 5169 - DNA, 641 bp, Gossypium hirsutum
atttaatgatatataattgcaaccttagtcccatttatttatttcaatctataatttaacttttaactctttcacgatttagtccccgtactttaataactcctaatttcatgaaaattacttatctaaaatttaattcacctctaatataacttcgtaaatatttatgggtccggtttacgaaaacagagtcccgaagctacacttaccgtcacccttaattatcgggttgttacatcggaggcattgccaaattatgcatgatttcctccaaaacacgatcatccacttatttataatgataaaaaatatattttaaaatattttaaaattaatttaacttaattaaaaataacgaaaattaaaattttatcttacttattacttgagcagttgaaatgtacttctcatcaaaacaaattagagaggttgtcattcgtgaaaatttaattcgaatgaataaaatgcagagtcattagaaaattgatttaaacgagaatatcaaaaagtttagaacaagagcttgagaaaattgagagagttgagagaatagaaatacttgagagaataggatgtgagtcaaaaaaaaagtaaaattggggggaatttatagggaaaatttttggacggttggacattta

SEQ ID NO: 5170 - DNA, 615 bp, Gossypium hirsutum
tactggagcaggcattgagcccactttatggaaaaatttaatctgcattccattaaattcaaattagcagtgtaaagactggatgatctttgtatctaagtaaaataaataaagaatgtatttgtgcacggtggtgcacaatatggtaatgcaaaatagcaaatgttaaataccaagcagcgatgtgaatccggattctcagcatccaaccttagcagttgctttacagccttcaggagaaagaaaataaaaataacaaaaacacattaatatgagatcatgaactaatagaagtacaactaaggaaaaccattgttcttcaactcataaattacataaactgtttaatctcaatacaacagagcaaaaccattgttctacaactaaaagatttgtcacacaaactatctaattcacacaaaattcattgacactgtttgggaagatgaaggagagtgcaattgtatttagtttactaaacaaatcataacaaatgaacacgcattcaaattactgaattagctaaaattcaagttaaaaagatgaacttaaaatttgcgtaccttggtatttctaattaaccattaaataggtatccaacaatccataacttcg

SEQ ID NO: 5171 - DNA, 398 bp, Gossypium hirsutum
ttgatgtagaaaaatgttgatgatggagtcaagagtagagtttttagattgtacaatgaaaattaaggacttcataagtgtcttataaaatataataaaagagtgagtatttagtacattgaaggtgaacatttttattccacgagttaaaaagattaacgtgtgtatctttattttaatattttactatatcctatgatacacttgtcaatcccttaaacctacttgagacacatggcaaaattttcaaaattatttatggaataagaaaattatactattaatgtaccaaatactaaccaaaaaaatgattacttattttttattttctctcatactctatcctacatcatacatcaatccatccttattaacttctctcgcatcactcctcttta

SEQ ID NO: 5172 - DNA, 648 bp, Gossypium hirsutum
ttgcggtgtgcttcttgcccttataattttctgcttgcatttgttgtctttgtttctcaaatttaatgaagcatgttagagaaactctttctccgacttccctcacagtattttcttcgtgccattttccatccaatgttaaaagtaaaagatgctgtgcttagtatgatgagaaaggagaataacataacatagaacttgaggatggaagttctaaggattgcttttttgtccatgtatgtatgaattataattgagccacattggatgaactggtaacacaaaaacatgtggaaaatgtcggaggagttccaccactacaaaattgcctccttcctgcttgccaggcatgcaagaagtggcatccgtctttccttcttgaaagaataggtgactgcggattatgcttttctgtaggtgactatttggttaaccaaggggatggatataaccataaatgctgctggaagttggtcaaattcataccgacaacttagaaattatatctagtggaacagtttcatatgttcaatgaatagtgtgtttgcatcttgattggtatattatttaggaccattattcaataagattcatattctagactgaagggtttttactataacttgtttgatgggatcattatgctgt

SEQ ID NO: 5173 - DNA, 600 bp, Gossypium hirsutum
tttgactgttacatattttcccgcccactcggacatgttactgattgctactggctggtttaactgataattgaacctagtaatcttcaaattttttattttagtcttttccttaatcatttcagtataaaaatcgtctccattttcaatcagatttaattgactgcatgattgtgatagccaattggttcaatgaacaatcatgaagaagaggtttcttggtctaaattcataggttcaatttgtgggtaaattttaaaatgttagatttatttatttttaagtttatttgtgtttatttcatatcaatttagaattttaaaaatgtgtttcggtttttaaatttaaaataattaagtttattcgtttaaattaaataagttttttatgaatattgttgagggggtcaattttttcgacagaaagttcatgtgctattatagttgcatatccatcaattgagacactcttggttctgtgaatcaataccacagacatgtactcgcggcatgccgtctcttggtggagtacgagagataaaacccataccaaagataagacttttagttgttgtggattggttgactgttcgactaacaa

SEQ ID NO: 5174 - DNA, 617 bp, Gossypium hirsutum
tagtgaagaccactccccattcagtattgcagattcaaattcagatgaacggctgacaagactttcttcagtaactaagttatgcacgaaaacctgaaaaataatatacaagaccataagataacagaagaatgtgggtggcatttaaataaaacagaacaaaacaaacctcaccaacatacttacctctgatgatgcagaactacttaaaccagataaacaagggcgaaaagagacaacttttcctccaaaaccaaaagatgctccaacaggacgtttataccattttggagctctcaaagacgctgcataaagaaaacatcaaaactagttagagaaactaaagtaccaataaatatatattgtctcagaaacaatgaatttataggagataaacagtgaagattatttaaacagatctggcccatatctgcttatcttccccaacttttgacagtcatcattatgtttcttcttgactgccaaagcttaatactaataaggtcaaattataataggagggggaaaagaacgggaaaagctaaagctcaacctaagcctatccaacccagtctacaatgattcatatttgatcactgctaaaccaactgacacag

SEQ ID NO: 5175 - DNA, 628 bp, Gossypium hirsutum
gaaaaagaaacaagtgcaaaataattatctatgttgaccatatgttttgctgaaaacatgtttttgtatgttgatctttacattgctacagtcaccaatccaataaaaatcatcagtttttcagtattcaactgttccattgttatcctcttctttttgctttacttaatcaagaaatggcattagattcatgactgattgctttgagacttgaatcagacatattagtcatccatttctaaggaccatttgtttcccctgctgctatactgtatgcataacatggccactggatattgatctcgttctcgttctcgtacgagcttgtaatcccgagtctcatcatcttttgtgttctctcaagaactataaggcttgaaaaagtcgaaaaattgttgctgaccaatatatcagccttcgagcatacctcgtaaccaattgcagactgaatcagacacggatgtttcttgtaaattccatcaacccctaagttcttcttttcacactcaatattgaagaatcattaaggaggttatcagcaacagcaagatcaacaacaatgggagcttcaaagttgatgattttcccccttctttccataatttcttgcttgctgctacttatttgg

SEQ ID NO: 5176 - DNA, 614 bp, Gossypium hirsutum
cctagagaagctgttgcagcaacgacacttgaacttgcaaactttgaaagtactctatggtatgtgagaccctatactagcattatcattcacaacatagcacattcccaagcagtcatatcatcaataaatgaaaaagtttacaaggtgaatcacaactgaagaatcaatttaaaaaatgcaaataaaacagcttaacatcaataccctattacaatgactaacttcaagtaacatccctattgaaactgatatttcttaacttcttggagttttaaaaagaaattgttcctgaacaaataaaatgattataaatgaaacaaacagaagaggaaaatagcataaagaaaagcaaagatatttggcaggccaccacccacataactgtagctagagctagagaaagctgccaagaaatggccaaaccatttggtttaagtataagttaggctatagacaaacacatttctacaaacgtcttttgccacacagattaaactgtttgctatattttttttcacctattattagcagcttactaagactggttttgagccgtcgactgtttcggtaatgagggaaccccggggagtctggtaaacgacgtatggaag

SEQ ID NO: 5177 - DNA, 653 bp, Gossypium hirsutum
  misc_feature (646)..(648): n is a, c, g, or t
ataaatcagaaactgtgtaagttgaaaaaacttaaagtagtaagaaagaatatagtttacccttcttcaagacattcaaactcaagtgtcgctttatctgtctctatttcacacagtatatcaccaggttcaatctgttagataagcatcaatgatgaggaaataaatcataatgaaagaattaaatcaattaaatctctgcaacctatcacaagattttctttttcttttttaacaatcatctttagtttatatctagttcagatgtaaagaccccatacaacctacagtttccagtaattacttatataactgaccttatctccttctttcttcttccattttgtaatgttaccttggctctgcacaggagcaacaagtatcacaagcttgaccattggaataacaggaggaagtctatatcctagcaaatttatgaggtttagctttccaaaatatattaccattgttggagacaaagcaggcatccccagcactgtatgctccggaaggtctgtaatagcataacttagtgataagcaaggttacaaatctttggcagatatcacaacaaaaggacacatgcaaaacctaattgcaaaagaagaggaaacttttaccattttaataagtaggcatgaacccnnnaccta

SEQ ID NO: 5178 - DNA, 653 bp, Gossypium hirsutum
aatattatatcaccaaattctgtaccactttttttacttccctacctgtcgaacgcgctccatcttggaggcatcatatattgctaactgagtttcatgaactaccaacatgcgaatttgatcggagtgaaattgtactcttgtgtcacctgtaggtgccattccagctggaatttggagtgcaactgatttccttttctcccacgtatcaatgctccacaaacacagctgcagaaagtagcaagatgttaataagtaaataataacatatttgaagtccttcgctgtttgaaggaagcattgacattaaaatagaaaaggaaaaaataaaagtgaacataaatatgacaagcctgctacttacattagcatcggcacctgatgaaaccaagatattgaggctggttgaaaaagccaaaccagttattcgtttttggtgacctttcaattttgatttcacctaaaaaggttaaaaacagaacgttggaaccactcacgagagcaagatgatacaaggggagaagataaataagaacacaacaaaaagagttgggaagtgtcacctcatctactcgaacattgtatatatggatagttgaatcctccattccgattgctatgatattattatcctgaggatggaatgctaagag

SEQ ID NO: 5179 - DNA, 237 bp, Gossypium hirsutum
catacaatgaatccatttacgaagagttatgatgagtttcaaagtgtccaaacaaattttgttactcaaattgtacttaaagttggcataaaggttaatagtgttaaaattatgttaaaatattaattaatttaagtaaatataatttagaaacttccgaaatttgtatgaaattttaaatacagattaaaattttagaaaataataaaaattcagaaagtatatttatattgttaa

SEQ ID NO: 5180 - DNA, 637 bp, Gossypium hirsutum
  misc_feature (631)..(632): n is a, c, g, or t
gatttttttctatatgtattcctcttacattattttcaggttccattctgtccaatggttggatctgaagtatactcttcagaagtaaagaaaactgaagttttgatggaaaatttccgacgggctattggtctacgcatcaaggaaaataaagaggtctatgaaggagaggtaagttacacctaatggcagttctttgtccctgattttatttgattgttttctctttggactgctgggatagaccctgaatcctggctgttcttgtttcaggttactgaactctctcctgaagaaacagagagcgtaacaggtggttatggtaaaagcattagccacgtaattattggattgaaaactgtcaaaggaacaaagcaactgaagttggaccctacaatttatgatgccttgattaaagaaaaggtaagcctttaagtttctctgcattattatgtggaaaagattgttcaagtttttattttctggctttttctaaactgtatgaggcactatagcgtattaaaatatttgtctctttccttagggaccttttcgacgtttatgtttcttatctgcctaagagttttggcttcgatttgaaatcttgtgaggtttttaatttgactggcanntagct

SEQ ID NO: 5181 - DNA, 645 bp, Gossypium hirsutum
tatgtatgcagagaatgaaggcacaaggaagaaattgtcatttggcaattcatgaaaacttgagtatgaagaaaacagtactttgaattggtttcataaaataggggtaatgaagaaattaggcacaacaaataaggataaactacttgattgggtaatctactaagggagaaatgaaaaactatatagcaaaaactgcatttgagttgagacttaagcatattttccaaataaaccataaacaaaaaattatggcatgacaccctaagatctagggctggctctagtatgtctttcgagggtttggatcacagtattttttaaaccaactataccataaaaaaagctatgatctgataaggatttcttttaagagataaagatcatgtttgcaaatcagatattaagtatagacaccaagtgatcaaactaagaacaaatttatatgatagaatatgtaaggcataaaagaagagcattacattattaatcaagttttaacatgaagagttctttgaaaatctatacaacatggtttagtctaggtattcagtgagcattatcatcccaaatacttttaatgggataaaaataaatgtgtaatgtatggtagaagatatattagtgtagcagttgcattgtcca

SEQ ID NO: 5182 - DNA, 639 bp, Gossypium hirsutum
gacagcccaccctttctcataatcccaaccaacgctttcctgcatcaacagattttaagctttcttgagagacaaaacatttttcccgtgtatttggaggatccttggaagtgatatccatgtgtccgaatcaaataaacgtaaacatattaatcttctgatgttaaaaattgtagtgggaaggtattcccagcaattttgatagtgtatgccaacttgacctgctgctttatacgctctctaggcgtaaaaataatagaaatagcgacgcttacactgccaccagacatgcaatgggctaaagaatgatacttttgcaagaaacatattataaatttttaatctgtagatttaggttcagctttttacagaaatcgtaaacattgacttattaatactatcaagtacatatgcagttaccttagggaaaagaggaagcaaagtccctttgactgattcatatgagaaagtataaagagcagatattggagctgaagatacaatatcgctgccaatgccacgatataatccagttaaacctgcaagtatcaaataatcataacggagaaagcaagcaagtcgagaccgtaatttcaccaataaaaaatcaggacagtcggtgtcagtcacgtctattaa

SEQ ID NO: 5183 - DNA, 590 bp, Gossypium hirsutum
gcataagattagagcttagattttgagaactgagtggcatttttgaaggggaaacaaagggcactgttatttatggtacattttgttttctttttttatttttatttttcacacatataaacaacaggttttgcaggatttctcgtgaaaaagctcacaagccaataaagctaaccacgccaccttcattcaacattcatcacacgtttcacgaatcttgattccaaaaaaaaaaaaaaaaaacctcctttgaatccaattctacaaattttcaccttggtttgttgtttttctcctttgatctttacatgtatagtattttttatgttcaaaaatggttcttttgcctttgggtcattgagaattttgcatcattggggtgttttgcggtctgggttctctaataaatcttaaattccttgatttatgcctgtcttagttttggggttactttgattttaatattttgtattaatatattctctgtactgtatgtacctttgagtatctgacagtctgacacaactgtcattcctttatttttgtttgttgtatctttatgtgatctacacttaacttggtactagata

SEQ ID NO: 5184 - DNA, 615 bp, Gossypium hirsutum
tagttggcatatactgataacaaggacaagctccaataatagtaaataaaaaaggcagaatgaatgaaacagcaaaataacaaaaatatagttttattaagttagccacaagtattgagaatgactacatccgtagtcaattaaacttgcattgaaaagttattcatcacataatttttttacctcatcacattatctaattttgatgaaattcgtgttatttcccttttataaaccgggtagcagccatcttattcatagcattgaaatacatgttatttcccatttcattggttatatatgcttcaaatatccacaaaaaagctaactaaatccaattttctatttaagaattaaaaaggtaaagacctatagaaatatagttgctaaaatactcccttcgtaaaatggagtcaggaaaaaactttaaataggaaagaaacattctatgggccaaatgcctacaaaatacatttttattctatgttagtcagaaaaacttccaacacaactcttgcatgcataatgtaactaggaaggatgcatttgtttctagactaaccacataaattctcaaattgccatgtaattatcacattagaacaaggaggcaac

SEQ ID NO: 5185 - DNA, 530 bp, Gossypium hirsutum
  misc_feature (388)..(390): n is a, c, g, or t
  misc_feature (459)..(461): n is a, c, g, or t
  misc_feature (493)..(495): n is a, c, g, or t
  misc_feature (502)..(507): n is a, c, g, or t
ccatgcagactttctctttctctattcaggtacaccctctctctcgatcctctttttttgagttatcaaagccggcgcttgttttaggcgttttttaattataaaaaaaaacattttcctgatttttctgctagctgtctagtgaattcgttactttttaaagtcttgtaatgatgaagtttctgttctatggcggttatgttttttttggcgctttttaagcataaatttgttgcaaaaccctagtggtctgtttgattggcgagggaaaaaaacagctaaataattaggcaagtacaaatttaattgttgttctatgtttttatcaattgcttattttctgcttacgttaaattccttatgaagtggcaatttacgggttcagttnnnataacatgatttatgcgtcattggattatgttttatcacagttataatataaatagatcattttagctnnntggcaaatgtttacttgatctcattggattannnatttgtnnnnnngcttaaaatgctgagttaaatct

SEQ ID NO: 5186 - DNA, 644 bp, Gossypium hirsutum
atgaatactttgattctaaatcatgaaaggtatgtccttgcactggcctgtatattctttagttttggtacattttacattttggctctttggtagtctgaatacgtaatacagatataacacgacatgaaaacagaaatatcgaagtttccaaaaagttaggatattaaatttcttatataataatataatataaaaaagttatttatacttatcaattgaacatccattagaacaaagttactcattgttgattctgaatttagaagtagaaggaaaaaaaaatctcttgatgggctcttatgtgtcaattttcatacatgaggatatgtattttgttaggttttgatatatctaaggatcaaatactttatctatatttgagtatttgtcgaacacagatatttaaggatacacttattttgtcatatcagagccgtgtctgacactttgacactctccttatacaagtatttgtgtctcatatatgttaaatatgaatatgtgtcaatttttatatacaaatatatgtattttgttaattttttatataataaaggatcatatactttactgatatctaagtatttgtcgaatataaatattgcatacatagttctttttgaaaacaacctgtattctca

SEQ ID NO: 5187 - DNA, 828 bp, Gossypium hirsutum
  misc_feature (59)..(59): n is a, c, g, or t
  misc_feature (98)..(98): n is a, c, g, or t
  misc_feature (107)..(107): n is a, c, g, or t
  misc_feature (135)..(135): n is a, c, g, or t
  misc_feature (161)..(161): n is a, c, g, or t
  misc_feature (185)..(185): n is a, c, g, or t
  misc_feature (191)..(191): n is a, c, g, or t
  misc_feature (222)..(222): n is a, c, g, or t
  misc_feature (239)..(239): n is a, c, g, or t
  misc_feature (299)..(300): n is a, c, g, or t
  misc_feature (319)..(319): n is a, c, g, or t
  misc_feature (333)..(333): n is a, c, g, or t
  misc_feature (335)..(335): n is a, c, g, or t
  misc_feature (367)..(367): n is a, c, g, or t
  misc_feature (373)..(373): n is a, c, g, or t
  misc_feature (389)..(389): n is a, c, g, or t
  misc_feature (393)..(393): n is a, c, g, or t
  misc_feature (395)..(395): n is a, c, g, or t
  misc_feature (412)..(414): n is a, c, g, or t
  misc_feature (421)..(423): n is a, c, g, or t
  misc_feature (429)..(429): n is a, c, g, or t
  misc_feature (446)..(446): n is a, c, g, or t
  misc_feature (453)..(453): n is a, c, g, or t
  misc_feature (457)..(457): n is a, c, g, or t
  misc_feature (527)..(528): n is a, c, g, or t
  misc_feature (539)..(539): n is a, c, g, or t
  misc_feature (556)..(556): n is a, c, g, or t
  misc_feature (559)..(559): n is a, c, g, or t
  misc_feature (563)..(563): n is a, c, g, or t
  misc_feature (567)..(567): n is a, c, g, or t
  misc_feature (578)..(578): n is a, c, g, or t
  misc_feature (623)..(626): n is a, c, g, or t
  misc_feature (630)..(630): n is a, c, g, or t
  misc_feature (639)..(639): n is a, c, g, or t
  misc_feature (670)..(670): n is a, c, g, or t
gcctatgatttactcaagggtgacctcaaagccttcttccaagatatatgaatactttnattctaaatcatgaaaggtatgtccttgcactggcctgnatattcttnagttttggtacattttacattttggctntttggtagtctgaatacgtaatacanatataacacgacatgaaaacaganatatcnaagtttccaaaaagttaggatattaaatttnttatataataatataanataaaaaagttatttatacttatcaattgaacatccattagaacaaagttactcattgtnnattctgaatttagaagtanaaggaaaaaaaaancncttgatgggctcttatgtgtcaattttcatanatgagnatatgtattttgttangttntnatatatctaaggatcannnactttannnatattngagtatttgtcgaacanagatatntaangatacacgtattttgtcatgtcagaactgtgtccgacactttgacactctctttatacaagtatttgtgnntcatatatgtnaaatatgaatatgtgtnaantttnatanacaaatatatntattttgttaattttttatataataaaggatcatatactttactnnnntctnagtatttgncgaatataaatattgcatacatagttctttntgaaaacaacctgtattctcagaccaataaagaaaacaatgaacaccttaagcaattttagttgataggttatttcattttcatcacattgtatttttatttttatttttacttcaaataacacagcattctgttcaacacaatttcattggataaga

SEQ ID NO: 5188 - DNA, 526 bp, Gossypium hirsutum
  misc_feature (9)..(11): n is a, c, g, or t
  misc_feature (13)..(13): n is a, c, g, or t
cgtctctgnnngncgaattaaagtatgagccaactattatttactgcaaagttcaaactgatagttctgatggcaataacgaataatttacgcttacccgattttgtttgccgagcttcttgtacattaactctatgcatattgatagattcaatccatggagtgatttcttaaagagactaaaattgattagcagttcacagttttcagaatgacatatatttcaggatctgtaacttgcctcaatcaaaatattgagaagttttaactacttgaaccaatgtctattggatagagtaataaggacttttgtttaaggtttcagtttgaagttttttgatatttttcatgtctgggttcaggttttagttattcctcctaacaatgttgtgttgtttccaaatttataaatattagattatggtacactcattatgtgggtgaaaatagaattatataagaagtatgtttatagaaaaattgatatgattaataaataaggctctggttgaatgataaaaactta

SEQ ID NO: 5189 - DNA, 610 bp, Gossypium hirsutum
gggatataaccaaaaccttggaatcgattatttctttcaaacggttaagttcttcaagagcaatatcccagttttgcatcagtatctcggcagcaagcttcccccacaatgcactcaagctcctttcgctgttagtacacaaagcccgatactgatacaaatagtcagcagcaccagagtagttgccacactcaaattggaattttgcatactgatacaatgcctctatttgatctggaccaatctgttaaaaaaataattttatccaccattaaattaaaaaaaaacttcaattaattcaaacccaggcaaaatcaaaactgtaacaacaaagagcatgctagaattttagcacaagaaagcatatgcatctatttggttattctttatattttccttaaaaatcacataatgttatgactaatacaatttcacacttgaatgggttattcactaaaaatcaagaaggggttaaaataacataaaaataaccttaaattcatgaaaaaggggggaacagacctggtagcggtcattaagcatctggagattatactgtttatcagcacgcaattcctgaacagcgttagggttttgcaagaaagtgacg

SEQ ID NO: 5190 - DNA, 630 bp, Gossypium hirsutum
aatttgctctcaaggatatgggagaactcaactttttcttgggcattgaagtgcagcgcactacacagggactactactcagtcaaaagaagtatgtttctgaactacttcaaaaagctggaatggtcggggcaactcctactccaacacccatggtaagcacccccaagttggtaacctcagatggcagtcctcagttggttgatgctcacttatacagaagcgttgtcggaatgctacaatatgtatgcatcacacgacctgagttgtcattcagtgttaataaactaaaccagttcatgaactctccgagtgaaacacattggaaggccatcaagcgtgtcttgagatatttaattggcacaatggattatggactgtttctttcaacaggtcaacttgagctagtttgttattctgatgctgactgggcctcgtcagtggaagatcgatgatcaacttcagggtatgtggtgttcctaggtcccaatccaattgcttggagttcaaagaagcagccagttgtatcaaggtcatcggctgaagcagaatatcgcagcctagcaaattgtgttgctgaacttttgtggcttcaacagctgttaaaagaagtgggcatctcatcatcta

SEQ ID NO: 5191 - DNA, 596 bp, Gossypium hirsutum
agctacacttccaaattgcaatgcatcatatgtggaaacaaagcttttggaacactaaactactaatgctaaaagctaatcagatacatggaagagtcaagacaagtgtgggaaaaaaattagctagttctgcaaatataaacccattgcaagagtaattacgatcactaagagagaccttaatgaagatggaaacaaagaaaaacaactccacagcaacaactaaagaatccaaattaatagtaaacatttatcatgaagtactacaaaatcgagattcaatggcttttaatcatgtctcggctaatgaattagattccgaaagtgactacttctcctccccagaagttaaaggaatcacaacaccttgactagtttgtccaacataagtgttgaaacagttgaggctttcaaagatagtttgaaactaagttgaaaagcgaaccgaataataatcagattcagaaccttcggagagacgaagaaacagatagattggaatcgaactcttattaacaaactaaggaacatgatgttgatggaattgattcgactactttcagatcggggattcaagtaaggaataaggattgtaa

SEQ ID NO: 5192 - DNA, 636 bp, Gossypium hirsutum
tattgaaattgaatatattctataggtgggttttaatcaaacatggaaacttcttgagttttagcccaattctcagcttctcaagtttgacggcattgtataatatttaacacgtatttttatattaagcaagtaaaatttataacgtttatgaaattccaaattaaatggcaagaaatcaaaattatagcactaaaaagagttatattacatttgacaaataaatttatttaaacacacgtcgctggaattgtgggttcttcatgcactacaaaagtggcaggttttaccagtttgcaacataattaacgatttttatagcatacaattaaattgctaatggtatctcattccctttatattgattatttatttaatcccacatgacaaaatcaactataaatgccattcttcaatctatcagaaactgtgttcccatctaaatttatgtttctcattttcagtaatgcatactgcaataacataattattttatttaccatattttcaataatgtgaaaattacaaatattaatttaaattgtatttgttcaaaaggagacatgttgtggagtttccttcatattttggataaaatagggttgatgtcggaacgaagaagagccaaatcaagag

SEQ ID NO: 5193 - DNA, 722 bp, Gossypium hirsutum
  misc_feature (580)..(582): n is a, c, g, or t
  misc_feature (628)..(631): n is a, c, g, or t
  misc_feature (651)..(653): n is a, c, g, or t
  misc_feature (657)..(665): n is a, c, g, or t
  misc_feature (667)..(673): n is a, c, g, or t
  misc_feature (679)..(696): n is a, c, g, or t
  misc_feature (706)..(708): n is a, c, g, or t
  misc_feature (710)..(716): n is a, c, g, or t
tttattaaatcaaattaccacaccaaactatcattgaaaatttaaattcaaaatagaatattatattaattaaatcagtctattggcctaactattaatttaggagttaaatgttaatttaaatatgatataaaccatatagatcaaataataaatagacgcttacaaattgcataaatatatttgatgaaataaaaaaataatgatgattttttaaaacgttatattcaaaatgcccatgcaatttaaatatatttgatgtgataaaataataataaatttttatgacataatgacttatttaactctccaactttatcgatttttcgcctattttagcttttaaacttatattgtttgtcaaatcacctcaaaatagatggaaaagttaatgtttgttaactttgttgatgtaacattcatatgtatccatgttagcaattaattttttttaaaaaaattaaaattttttaattaagtttaaataatttaataattttaataaattttgaattttttaacatttaaaaattaattaattgctgatgtagcaatccacatgtatgcatatgaatgttannncaacaaagttaacaaacattaacttttccatctattttgaggtgannnnacaaacaatataagtttaannnctannnnnnnnnannnnnnnaaaatnnnnnnnnnnnnnnnnnntaaataagtnnntnnnnnnnaaaaat

SEQ ID NO: 5194 - DNA, 615 bp, Gossypium hirsutum
tggcttgcacctagacaagttgctgtctggttccaaaaccgccgtgccaggtggaagaccaagcaattggaaagggattatggcctgcttaaaaccagttatgaaactcttaagctcaactttgataccctccaacatggcaatgaagctcttctcaaagaggtaatattataactgcttggttaacgtgccaataacttcactttctttagctttttattctaaaaatagcctaatgattgctgccagataagagagctgaaagcgaagctgaacggagaaagcgtagggagcaacctttcagtgaaagaggaggcgattctgcctgaaactgacgaaaaaacaatggaacaaagtgaaccacttccagcttcttctttggccacttcatccgagccagtagaactgaactacgagtgcttcaacagcagcaacaatagagtggctgacgccatccttttcccagaactgaaagatgggtcatcagatagtgactcaagtgctatcttgaatgaagacgaccacaccaacaccaacaatggtgttgtttcgtcatctggggtcctacaaagccaacatcttttgatgtcaccaacgacacctctcatcatccgt

SEQ ID NO: 5195 - DNA, 651 bp, Gossypium hirsutum
tgatgcagagatagctctgcaaaaagctgaaaagtctctttctaatatgattgttgagactgttgagcagcaggtttcggctgaagagactgttattgaggaggagatcagtcccgggggtcctaatgatgtttttgttgaaagagaaagggatgctttgattaatggtggcatggtggttgctgagcctacagcagacatcatatctggtaaagctagaaaaagttctgaagatatcaaacaatttgatgatctaagtgatcatgagaacggaatcctgggtttagattctccaacagaagctgaaattgaagcagaaaagtcaaaaagtgttcaatcgaagaagtcggaatctcagaaggagctgacaagggagacttcaccccctaattcctcaaagtcgttgttgaagaaatcttcacgtttcttccctgcatcatttttttccttcgccgatgatgggacagagttcacaccattgtcagtcgcccagagtcttttggagtctgcaaggaaacaaattcctaaactggtagtaggagtactgctcttgggagctgggtatgtttttgaatattactaccgtattatattaactaaattagttataactcctctcaaattcctgtatatgtctttggtgagcgttaa

SEQ ID NO: 5196 - DNA, 607 bp, Gossypium hirsutum
ttccggaatctcgttttccgttgtcggttcatttttgttcaaacttaattaagccgtctttgatttgtttcgggtaaattcgatttatatggacttcacttgattatggactgggtccggttgatgtaaaatttaggccagtttttaagtttggttaagcccagcttgaaaaataggcttaaaattttatctaagtttgactcagattaaaaatgttaaacttgagtttgactcggcctgtctgtattaaatttttatattattattttatataaaaataaattttaaaaatataatacatcaaatagtagcaacatgatagtgaaatgacagcaaaacaataacggaaaaaaagttgtaggttgatttgggttgggataggctcgtgtcaaaaaatcttaccctaggcttgacctgtttaggaaatgagccttatttttatccaatcccatttttcgggtctatatttttgtccaaaccctctctctttttggacagacctttaggcctatgcgagtgactcgactcatgatcaggtctaatatggaccatgttttggtcaatttagccatggattgggtttggagatgggatcaaatactttggg

SEQ ID NO: 5197 - DNA, 614 bp, Gossypium hirsutum
atacatttcctcttttttctgcaatttctggtagatgtgaaggacgtgttgtgctagcacagcaggtaaactcataagcttaatgccttcccccacaacccaacccaattttttttctttacttgtcccgttaaatgcaaagataatcatattttgaattttatcttttatatgtcctttttggagaaaaaaaaggaaggtggaacgttgccgatcttactctgattgaaattattttctttgaaaattaggcaacatgttttcagccccaaatttcccatgatgtcttcattgggagatggagaaaggtccgcatgcttcgttcggctagtggtacaactccaccgatgaaaacatactctgatttgcccatacattttaaaaaagcagaagtgtcgtttggggtgggatatgaaccagtttttgctgacataagctatgctttcaccgttgcacttcgtagggccaatttaagtaaaaggagtcctggtcttccgcaggttccaaaaaaggagcggagcttaccgtggtgggatgaaatgagaaattacatccatggaaatatcaccttattcttttctgaaagtaaatggaacattcttgcgactactgat

SEQ ID NO: 5198 - DNA, 637 bp, Gossypium hirsutum
  misc_feature (50)..(51): n is a, c, g, or t
cggttagttcagagaaattacaaaggctggggtggagttatcggccattnnaagaaactcttgtggattccattgagagctataagaaggctggaatcttggattaatatataaaacagccttttggttgtgattttaatttctgttcactatgtgctctagtttcctcctggtcgcatgagattgcccacttgttgtgttcaacattttcaaaataataatgtcatacaacttgcatttctttcatgctaaacattgtgactatctaaataaacagagagatagtacatgtttatggatataactatttttatttttgaaaggttgaagaaaacagtagaagttgggttggataatgtttagtgaatgaacaaaaaccataaaaccttcacattctatcaactgtggtttagaccagtgtgcagcgtttggtttgataacgtattcttggaatcgaattggtgttttgcttactgaagtgaggaaaatattgaacatttcttagttgccagggatattgaaacacttataacactaacttatcaaattttcatgcctcatcatctaaattgtctacccgtttcgtttgatatgcgaataaccaatatattacgtcgtaaggaccaaggatctgctg

SEQ ID NO: 5199 - DNA, 635 bp, Gossypium hirsutum
gttactagctgtttagctaatggattgcttgaagccgttgtgaagaaaaggtaactgaggaggctcaaagagcaatggttatggctttttcttccccctgcattggacttagtactatgcatatgctttaagcatgagtttagaaaaggtgaatatccaacttgatatttaatgaatctgctacttttggaatcaatgaaatagatttgtcttatttttgaaatcaaatagttggtattatatttttttttgttgaaatataaaacaaaaaattacataaacttattcataaacagaatgcctctagtactgtctccttgtagagcttctttaattgcctctagaaattcttcgaacatatgcaaatagtcgtcatcatctgttcgagctactgccttattaaattctctagggacatatttcaagaactactttttttcatttgataaaatctattaaattcgtctaaccagagtggaatttaatctttcaattttactgtcttcaataatttttacaacctcaaaattatttttttggataacgaactcatcataatcttgtttattaatcaattaaaccatccaaaatgtcccaaaattcctcaaggaatacaggacacttcccaaaaaaaa

SEQ ID NO: 5200 - DNA, 677 bp, Gossypium hirsutum
ggaagaaaaagtttgattgaatccattctaaagaaaaacataaataacatccatttttgggttagcggctcatttaaagtttaaacgatagtacaggcaacaagcatttgttacagaggtaccatgtagataaaatatatacaaacaatagaaatttaaaatatattatattatgtgtcatgaagttttaaagtttgagctttaaaaacatccatgaactacagaaaaggaagtacctatcaaatggttcatcctcgcaagaatttccggatgatgaaatacagtccaggtcgacaaagttagagtaattgaagccatccccacgttcagagaagaaaatttgaccggtttcaagacagcggtctctttgcatgtccccgaagagctgccttcgaggcattgagggagtatacctacacaaaaaattggaaaatagccttatcaattataagacttactgagactactacaatatgctgcggaaaatccattaatttggtaaactatgaaacatgtgattccaccggctgattcacgaagcaatgtataaacaaaaattaaatatgatactgttgatacaaaacaatggtttggccaaacatgcagattatagacattatatgatccatgcaaatgaagatgcaaattccatctcatcggacaacacgatagcccta

SEQ ID NO: 5201 - DNA, 654 bp, Gossypium hirsutum
aaggcagccagccagcccccacaagttttcaggtgggttttgtgcaagagaagggaagtcaccctccttcgcagcttgttttggatctttatttctttgactacgttgatactttttgagtgttttggaggaatatggtagatttaaatgtcgttgggaacccatctccccatgttactcaaattgatgatgccatttgatgtgattgcccaacgagatttctttcttttctttttctcttaataaagtgctggttgaaaattggataagtgtttcttcttcaaataaattatactttatggcaaaataataataatagtaataaaaaccaagaatttttttaaggtatttcaacaaaaaagacgagtatcttttgaagcgaaaggagcgccacatttctatcatgtaaatttagtagttcattcctagattgttaggtttagacgttacccttcgtattcatgcactatcagaggagtccagaataactcctcagaatactgttccttttttagattatgttttgttggatcttgatcattcaacgttagtatatctaaaaatgaaataattttagaatagaaaaaaaaagagagagatgtaaattagatagaattctagagacaagttggggcagaacatgtccatatgtat

SEQ ID NO: 5202 - DNA, 648 bp, Gossypium hirsutum
  misc_feature (642)..(642): n is a, c, g, or t
tgtattagtgctgaagtagaagtaaagcttttgaaaaaacaactgaaatttcaaaagaaaagagtaaagcatgcaatagatgtggctaggttggaaaaaggccgtagcaatctcttgcagcaagaactaggttgcatgaagcttgagttaattcaatttttgaaccgcttggatgcgctagataaatgtttctcaaccccttctgaaggtatagatgagatgggaaaggttagtttctcattcatatgcatatatctgtcttctttttctgttgcagtttctatattttcttgccctgaaatttcattgttttcctgattgattatcatagtgatgtaattcgcttttgaaaagtagcatacaggttttggcgtttgatactatactttgctactggttgatttttctcagacagaaggttacctgatggctctttagtgttattgaactggtgggtagagaacaagttcgctttcagtgctactttaatttctgggctgtttgaatgcatttgcacaccagatttgtgattctctgtaactcccataagtgcttggtaatctaatttccccagtctgggataaactgaagagaaggcaaaatagaacattctcaaaggaagggtgggaaagagagcagaanaagtaa

SEQ ID NO: 5203 - DNA, 1441 bp, Gossypium hirsutum
  misc_feature (607)..(609): n is a, c, g, or t
  misc_feature (611)..(617): n is a, c, g, or t
  misc_feature (623)..(625): n is a, c, g, or t
  misc_feature (627)..(629): n is a, c, g, or t
  misc_feature (634)..(638): n is a, c, g, or t
  misc_feature (648)..(650): n is a, c, g, or t
  misc_feature (652)..(660): n is a, c, g, or t
  misc_feature (662)..(666): n is a, c, g, or t
  misc_feature (668)..(670): n is a, c, g, or t
  misc_feature (680)..(683): n is a, c, g, or t
  misc_feature (694)..(704): n is a, c, g, or t
  misc_feature (709)..(719): n is a, c, g, or t
  misc_feature (721)..(724): n is a, c, g, or t
  misc_feature (726)..(742): n is a, c, g, or t
  misc_feature (745)..(746): n is a, c, g, or t
  misc_feature (749)..(754): n is a, c, g, or t
  misc_feature (757)..(761): n is a, c, g, or t
  misc_feature (765)..(767): n is a, c, g, or t
  misc_feature (771)..(784): n is a, c, g, or t
  misc_feature (789)..(797): n is a, c, g, or t
  misc_feature (811)..(823): n is a, c, g, or t
  misc_feature (828)..(836): n is a, c, g, or t
  misc_feature (840)..(843): n is a, c, g, or t
  misc_feature (846)..(850): n is a, c, g, or t
  misc_feature (853)..(854): n is a, c, g, or t
  misc_feature (865)..(866): n is a, c, g, or t
  misc_feature (868)..(868): n is a, c, g, or t
  misc_feature (876)..(877): n is a, c, g, or t
  misc_feature (880)..(896): n is a, c, g, or t
  misc_feature (898)..(898): n is a, c, g, or t
  misc_feature (900)..(906): n is a, c, g, or t
  misc_feature (912)..(920): n is a, c, g, or t
  misc_feature (924)..(933): n is a, c, g, or t
  misc_feature (937)..(938): n is a, c, g, or t
  misc_feature (942)..(952): n is a, c, g, or t
  misc_feature (966)..(975): n is a, c, g, or t
  misc_feature (977)..(979): n is a, c, g, or t
  misc_feature (983)..(994): n is a, c, g, or t
  misc_feature (996)..(998): n is a, c, g, or t
  misc_feature (1004)..(1019): n is a, c, g, or t
  misc_feature (1024)..(1060): n is a, c, g, or t
  misc_feature (1063)..(1067): n is a, c, g, or t
  misc_feature (1069)..(1075): n is a, c, g, or t
  misc_feature (1077)..(1078): n is a, c, g, or t
  misc_feature (1082)..(1084): n is a, c, g, or t
  misc_feature (1086)..(1090): n is a, c, g, or t
  misc_feature (1092)..(1102): n is a, c, g, or t
  misc_feature (1106)..(1108): n is a, c, g, or t
  misc_feature (1110)..(1119): n is a, c, g, or t
  misc_feature (1124)..(1138): n is a, c, g, or t
  misc_feature (1142)..(1144): n is a, c, g, or t
  misc_feature (1146)..(1159): n is a, c, g, or t
  misc_feature (1162)..(1162): n is a, c, g, or t
  misc_feature (1164)..(1164): n is a, c, g, or t
  misc_feature (1166)..(1168): n is a, c, g, or t
  misc_feature (1173)..(1177): n is a, c, g, or t
  misc_feature (1180)..(1182): n is a, c, g, or t
  misc_feature (1184)..(1192): n is a, c, g, or t
  misc_feature (1194)..(1200): n is a, c, g, or t
  misc_feature (1205)..(1213): n is a, c, g, or t
  misc_feature (1216)..(1221): n is a, c, g, or t
  misc_feature (1229)..(1237): n is a, c, g, or t
  misc_feature (1239)..(1263): n is a, c, g, or t
  misc_feature (1269)..(1273): n is a, c, g, or t
  misc_feature (1276)..(1282): n is a, c, g, or t
  misc_feature (1286)..(1302): n is a, c, g, or t
  misc_feature (1305)..(1314): n is a, c, g, or t
  misc_feature (1317)..(1321): n is a, c, g, or t
  misc_feature (1323)..(1325): n is a, c, g, or t
  misc_feature (1330)..(1332): n is a, c, g, or t
  misc_feature (1337)..(1350): n is a, c, g, or t
  misc_feature (1355)..(1356): n is a, c, g, or t
  misc_feature (1359)..(1368): n is a, c, g, or t
  misc_feature (1370)..(1372): n is a, c, g, or t
  misc_feature (1375)..(1375): n is a, c, g, or t
  misc_feature (1378)..(1382): n is a, c, g, or t
  misc_feature (1384)..(1387): n is a, c, g, or t
  misc_feature (1393)..(1394): n is a, c, g, or t
  misc_feature (1397)..(1415): n is a, c, g, or t
  misc_feature (1417)..(1417): n is a, c, g, or t
  misc_feature (1419)..(1429): n is a, c, g, or t
  misc_feature (1434)..(1436): n is a, c, g, or t
ggaaagataggggctgaaaaagtgacatgttcaaatgggaatttcttcctttctttttcaatatattctcaacaaatctcaaaattctcgcttactataaacattctactctcttttttttcaatattacttgcatcaaaatgatgattactttattacacatttgaattattcgattaatatttaaaactttaattgagatagaaataatgggataaaaggaggcaaagtgttttttagtatcatgttatattagtgcagaagcatttactacactttttttttttaaactcaaaagcaatattttcaacataagtcgaatcattatatgccgaattccttgttctacaacaggggggagggattgctttgccccaacaaataaaaaagaaaatatggagttgtcaattgaaaattcaacatttttgtcccccttgggtaaaaaattgattgattccattatggtgggacccccaataaacgaaaaacaatcgagcactaggtcaaggcccaaatacaagcttaaggagttgcaccccgtatcttaaggaaagcctttgcttttttgaaagggcagctttagcgggcaagggaaaaaaaaaaaaannntnnnnnnnaatttnnncnnnccttnnnnntcccccacannntnnnnnnnnnannnnncnnnaatttcttcnnnntacccccttcnnnnnnnnnnnatttnnnnnnnnnnntnnnntnnnnnnnnnnnnnnnnntcnnttnnnnnnccnnnnnccannnattnnnnnnnnnnnnnnccaannnnnnnnntcccctttttctcnnnnnnnnnnnnnccccnnnnnnnnnttcnnnnttnnnnnttnnttttctctttnntntttttttnnctnnnnnnnnnnnnnnnnncntnnnnnnntttttnnnnnnnnncccnnnnnnnnnntctnntatnnnnnnnnnnnccctattttctttnnnnnnnnnncnnnaacnnnnnnnnnnnncnnnacactnnnnnnnnnnnnnnnnttttnnnnnnnnnnnnnnnnnnnnnnnnnnnnnnnnnnnnnctnnnnntnnnnnnncnnctcnnnannnnncnnnnnnnnnnnattnnntnnnnnnnnnntttcnnnnnnnnnnnnnnntttnnntnnnnnnnnnnnnnnacntncnnnacccnnnnnccnnncnnnnnnnnntnnnnnnncccannnnnnnnntannnnnnactctccnnnnnnnnntnnnnnnnnnnnnnnnnnnnnnnnnnccacannnnnttnnnnnnnaccnnnnnnnnnnnnnnnnntannnnnnnnnntcnnnnntnnnttttnnnttccnnnnnnnnnnnnnnccttnnttnnnnnnnnnntnnncgnccnnnnncnnnncctccnnacnnnnnnnnnnnnnnnnnnncncnnnnnnnnnnncacannnccccc

SEQ ID NO: 5204 - DNA, 651 bp, Gossypium hirsutum
ttaaagtattgttctccgagttctactaaaccgcagtgacggcaagctgatagaagtgcaacaaaggtaacaacatcgggtttgattccttgatgcagcatttcctcaaacagcaggaaaactttactttcatgcccatggtgagcatagccagtcatcattacattataaatgactgaatccttaaccttaaccattcgaaacatcttttctgcatatgcaatattcccgcatttcgagtacatatcaatcatagcactaaatagcttctcatccatttcaattcccactctcagcataaaaccatgagtctgctttcctgggtccagagcagcttgtatggcacaagcaccaaggacactcataagtatcaaaccatcaggaacagttgcttctttgtcccaatattcactcaagagttgaaacactgcatcacaattccgtgatttgagataaccagaaaataatgctgtccacaccacggaattcttctcagccaatgaatcgaaaagccgccgtgcttctaccatattaccttgagatgaatatcccacaatcattgaagtgactgaaaaggagttgtttctcccactacacaaatgcattaactctgcatacttcattttaccacacttgcaatagagatcaaca

SEQ ID NO: 5205 - DNA, 621 bp, Gossypium hirsutum
gatgccctcttaagctcaagaaaacttagtttgaggaatgctacaatcactaagagactgttttcgtcttcaagactttagaagctctaagattccaaaagaattactacactacgtagaatgtgctgagcaaggaccggctcactttttcaatttttcatctctaattaaaattcctgcaaccatgccacatttactctatgcaatttcaattatgtttaatcttgcacgatggatttcaccattgaaatttgaacttttcaggtctgaaattttctgtttgatttctgtttctaacatgcatgcatgactaatattactatcatgtttcttttgatggttgcaattgcagttctcggacggttatttggacttgattatcgtaaaggacatcccgaaattatccttgctgtcattactatcaaaaatgaatgatgggagtcatgtccattgtccacacgttatgtaccttaaggtgagttaactaatcgataaccatttaaccttgggattggtttttgtaacttttcttctatataaaattcgaagaaccatggtcctatctttagcaataaaaccatccatgttctttgtgattaactacaggtgaaggcatttgtg

SEQ ID NO: 5206 - DNA, 634 bp, Gossypium hirsutum
cgatgttttatcaatcggatcctttcgttattaaaatttttaattaaattattaaatgacatgtcaaatcttacacggataaatttaaagataaaaatgagcgataaatctttaaaatatttattttgcttaaaatttttattttaaattaagtcacataagatccgacatgttatttaacagttaaattaacaattttaataacgtaatgacgtaattaatataacttcaacagtttaaaaatataattagaatgatttaaagtttaataaccaatttagaataagtttcataatcgattaacaatcagtgaaggagaattttatatgttggataattgattgccaatttgccacataatctcaatttataaaagtaaaaaatttaagttgttatatttcacctaactatgtagcagttgcaaagacatggtgtagctcagctttatggtctggtcaagagagtagcatgttttgcttctacgggtgagtttggatgagcagtgtatttacctgcggttagtgtaaaaacaactgtggcagtgagattagatactgtagcgatactgtagcgtcagacaaaaagtaactaaacgcaccgcaccgcaccgcacccaatcgcctatccaaatcca

SEQ ID NO: 5207 - DNA, 659 bp, Gossypium hirsutum
ctgtgaaccacttgcaaatttaacactaaccttcactttttgttagtgacttggtaaaagaaaagcataaagcttcattctaataatgtaagccagtgtgaataatcaaatcaaataacaaacatcttctctttgactaagtcacatttcaaagagatgagaccctagtctattgtttcaacctttgtaacaatgtaatttcatttgattatgaaaaattttaagaacttaaacctattgtttttaagaccaaacgtttgaatatttcttccacatttagcctgttactcttgaactctgatagatgttgcaatttaccaattaggtgaccatagaggaagattccatcatttacgacaatcaaagatgaagtcctgacaggtcaatgacactgcaaacaatcttttcaacttccagctcaatctttttgcaaggcagagaaacagaatggtaatggggatatgaaaagagctgagtttaaaagatgtttacctataggactaacatatcagaggcattttttattgttcttccactcaaaatcagattcaaagcatctctatttttcttcctctcaaattagtgcaatcatttcttgcctactgccatgttgtttgacctccaagattttgtacaaaagatttccctgtgctgattga

SEQ ID NO: 5208 - DNA, 624 bp, Gossypium hirsutum
gctctcttaagctgaaccttcagtttcttacctcctaattggcatccattcatcatgtttatggcattttgagcagctgccggagagtcgtaacttacaaatcctgcaaagacagggttcttgagagagaaaactccttaatgttcatatcagatcaagaaataaaaagaaaatgcactcaccgaaacatttgctagcctccgttgctttgtcaacgaaaacctttgcacttaaaaccctaccatatccttgaaaagcgtttgccaattcttgatctccaaattcttgaggtatgtgataaataaataggtttgcaccaggtggacctaggtcagagcatagactaattaattaataacatgccgccaccaagaatctagttttagaaagacaataaaatcaagatgactatagatagcaaaccttcaatctgacttcccgagcttgtaccgacactggaagctgatgaagagttactgcttgtatttgcttgtggtagtgaaccaggtgaactggtcaacggatggtggctaataattcccccaggatatgccatggggtactgaacaccttgcacggctgggtaagctgagccaacataacttccatgaggcacagcataaa

SEQ ID NO: 5209 - DNA, 576 bp, Gossypium hirsutum
  misc_feature (440)..(440): n is a, c, g, or t
  misc_feature (542)..(542): n is a, c, g, or t
  misc_feature (544)..(550): n is a, c, g, or t
  misc_feature (564)..(564): n is a, c, g, or t
  misc_feature (567)..(568): n is a, c, g, or t
atgttttgatttttcatttatgtttaccttttccttaactgtagtttcatgcttctgaaatctgttattttaaacccttggttgaaagaaaaagctcattagccaaaacaaaaaaatatgaaatccttagtatttcatgtgtttcctttgttttctgatttggaattgttagcttatagatatgcaacacttctacaagaatttactgcaaaattatgctcaaaagagaaatgttagccgacctgtatattcttgtgaggttgagggtccacctcatgcaagtcgctttaggtgcaaggtcactattgatgagaaaacctatgagggtttggagttttttccaacaataaaggaagctgaacatgcagctgcaagagttgcattatcatgtttggcaccagatgctattgaaaaagtccaggttactgattaatggagtngttttccctttgttgttttatgcatttatgatattttttaaaatgatcaggtgtgaatctctagagcttgagttttttccctttgcatattttttttcttcntnnnnnnnactctagcttattncannaccttttg

SEQ ID NO: 5210 - DNA, 650 bp, Gossypium hirsutum
tttataattattgctcagtattagtcttgttttaatgctctacatttgttcatgtaaattgtcatatctctttttgagaaatcctataaatcccattttcataaaaatggaaagaagcacttagcaagactaaaagtaaaatttaatgtaactgagtggcaactttcctcattctaatgggggaaggtttgggtttgggatcatttatcatttgcaaatttaaggttaaaaagaaagaaaacatacaacaattatacttttgtcgagttcaaatatgaagtattaagtattatataagaatattcatgataacttttttgataccaggcaattggggatttgttgcttcgataccataaagttaattgttgccttgtctatcgttcaattttggacgaatatggatattgagaattttttttggaagttgatgctttttaataattctgatgactttctctttgtttgtggttttgtgggatgtttgataatattctgattggttgttttggaagcaggagaaaggaagagtatcaattcagaattatggcatgcttgtgctggaccacttgtttctttgcctccagttggaagtttggttgtttactttcctcaaggtcacagcgagcaggtgagttactttccacatt

SEQ ID NO: 5211 - DNA, 623 bp, Gossypium hirsutum
gcttgggagccatttgttctccactataggaaggtaccttcaaccgttggtagaggacaagaatctggtgcctagcctagtgtctctcattgaacagggaactgaaaccctacggggcaaagcacttctttcagtggctcttctttgtaagaatggtaagagatggttactgcaattcttttgcaatgcaaggttactccacacagtggacagattggcaaaagagaaggataactatctacagcaatgtctagattcatttcttcgtgaagtggcatctacagttcccggcttactggatagtataaccggagatatccagcaaatgatgggaggacgacgacatgggcagaactctgcccttaccagtcgtgctgctgcaaagaataatgttaatttgttccctgtagttcttcatcttcttgagagttcatcatttaaaagcagattggtgactcatcagatcttgcggcagttggcaaatcttatccaagttgttgagacaccatttcaagtaagtagttttatctgagccatcctttgatctcatcactgattataaatttttcagagcattttctttattttagtgcacataatataattatatggacttggtgtga

SEQ ID NO: 5212 - DNA, 642 bp, Gossypium hirsutum
  misc_feature (59)..(59): n is a, c, g, or t
  misc_feature (62)..(62): n is a, c, g, or t
gacgagtaggagaaggttgtggaacatccgccagctgaaaatagaaatcttgtccacanttncaagacaattatgttgtctacccatcatagccagtttttattagtgaaaacaaccctgtaaagccgatttcatcgagaagaattcatgtggttatcataaatgttctgtcctccttccatgatcatgatgccagtccatattttctgatacatatttataattatcgtttcgaactgattcgacccttttgttatttctactcaatataaaccattcaaccattctatactgatattttgtttaagttaaaagtaagaactgaatcctaccaaacttataccgatttgttgcccattttgttttacatttgcagcaagataaagcaaggtcgaaggaagctcaaaagagaaccaatgcctagaattcatggtaagttgaaactgcaacaactgcaagattttttgttgcttcagaaatccagaactggtgagcaaccattggccatggattaatagtgaaacgaccacgtatacctcttttttccctatttttcttttggcattgatataatataatgttattatattttttcttagggaacgtaagatgggaaaagctgttgcttgagatattgaccat

SEQ ID NO: 5213 - DNA, 557 bp, Gossypium hirsutum
tagtcaactttcttgcaaaagattcccaattcgctggttaacatccagagaatcagacatctgcaatgtccttactggatcacttaaggtatgagatctttctgaaggttccgtggtagccacttccctttcgacttggagttcaccatttccagttgagctttcagaaggctttacccctgattcaaacaaaggagcttatgtcagtaactccaacatgtgcataactgctcagatcataaatatcattaagatgaaattattcaaaaaaaaatctgatggtcgaattatgaacctccttgtttatcaatgttctgcttcaacaattcatgtgcctgaaacattaatgataaaaatcattttgatcaatgttcaaacaaaatttacaaaataaaacataaaattacaagagaaatataataccctgtctatccacgttgcatatgcttctcgacactcttcaagagtagactgcactattttccctgtcccatgtgcatggcatcagatgaaggaaaatgaacaagtataatcattattcatttatataaaagcaa

SEQ ID NO: 5214 - DNA, 598 bp, Gossypium hirsutum
gattgagatcatactcccgctcagcctgctggatctccacatttaccctgtcaatctgtataattaaaacagttagcaaattacgtccttttgtcttgaattgatataaaataaaggtcacccctgtctggcttctaaattaccgttagtagggggaaagtcagggaacaatcaaagatgcagtcttcacttgcagatgtaaaatgaaaaaatgtgatggcagaaaataaagtttctagagtaattttaagataatactagcatacttcttccttgattgactgaatgcgtgccatgacagtcttctcatgctcccattgctcagtcaacgcagcctgtctcttctttaagagggataactcagactcaaggcggctcagtctatctctcgaagctttgtcagtatcatttgtgagagagagtctctccatctccagcttcaatacagaacgattaatctcatcgagggcagtgggttttgaagtgatttccattttcaatttagcagctgcttcatcaactaggtcaatagctgcaattagaaaccacatagtagtcagcacacatttaagatgattaagaaaccagggcatccaat

SEQ ID NO: 5215 - DNA, 645 bp, Gossypium hirsutum
gttgtctctgaaaagaactaaaatatttgacatgttcttgcattgaatggataccacgagcaaacagaaacacattagtttgccttactgcattttcctccatttttctcaattacaaaatagaaactggcaaaaagtatttgagcattttgctacaaaaagcaaataatagttttgaataaccaaaaacttaaaaagttttaacttctttagataacaaatttactttcatgcaatgctctactttagctattagctacattttaaataatttgcttttcaccttttacatttaatggcaaaaatcaatcaacaaaagcaacagccacaaatcaaaccttagtacttttttgccaactgtttaagctttatacacataaatacaagtcatttgacctgagcttttctttatatcatggtgcccatatcatcttatgcttgcatcagtgcttcctaggcagaaaactaagaaagcaatttacctttctagcagccaaagcagcagcaacacctgttgccaacaccttgagatcctctctttcatcatttttaattttagcaacctgcaaccaaaaggttaaataaaggaccatataaatagatctaaacaataaatccaattagccattgaaagttctacacgtt

SEQ ID NO: 5216 - DNA, 523 bp, Gossypium hirsutum
tcttttctagtgacaggttttttctgaggaaatcagagtcagtaggtacagtgtttctttctctgggcatatatttccgtggggattatttctatcacaagatagaaggctgttgtgtgtgtatatataataaagttaaaaggagaagaaggccatttgtgggtgcatttagattgagtcagttgtttgtgtgtgtgtgtgtgtatatgtataataaagttaaaaggagaagaaggccatttgtgggtgcatttagattgagtcagttgttggtacgtttaccaaacatttatagctatgagcgaggaaaatacaggtgataaaagggtcatttatgcaattctaggaaacttaaattgcattaatattaaggatggtcagctacccttttcttttatatttaacctcatcaggtgacttccacattaatgttatgcattagatttacaattacatgctaggtcatgtatataaaaacagtttttcttttttcatgaaagaatacatccatgcttaactgagg

SEQ ID NO: 5217 - DNA, 610 bp, Gossypium hirsutum
aagctgaatcagtgagttcaggtttcgtcgttttattggtgatatatccctgcaactcacaatccttgacaaacaacaaacaggaccttgaccaagtaaggtaattatttctatcaagcttcacaggactaatttgcagcgagggattatcggttggcatcacgagcttctcatccttatgcataatgttgggaaaaaataactaatatccccaaaaaatctgcttgaaaaattagggaatagaacacccaaaaaaagaacacaaaatacttagccaaaaaacaccactaccgagaggagaatgaccggaagggagcagagagcacagcgatggcgtcggaaaaaacattggatcaaaaaactgataccatgatgaaattagagatgaatactctaatatattgaggaaaaactcactcaaaagtatgtatttcttagaaatatgtacaactatatatacatgaagattgaatcaacttaaggaaaaacatctcttaattaaaatctctaaaaatcagttataatctctaaagatactaattaatgctatcaaataatcaaaagattctcaacactctctgatccttttctttaactgtatttgtgctgt

SEQ ID NO: 5218 - DNA, 617 bp, Gossypium hirsutum
atgcccccgcacagttgaggagaccatggccaccgttggcacttccagcggttatttcatatatccttgcatgagctccttgtactcccaccaatgctttctcgatagcctctattgctgacattagttgcaactctgacggattcttaatgaacacactgaatgacctcctcaacctagctttgaattcatctaggcaatgtgagccatgagaaagaaatgactcggataaaccagtatcatcatggagtatcttagagcttgattctcgctcatgagattccaaagtagctctttttccttgtaaagatatgcattttcctatgccccttaaatgcaattctattagcttgccataaacattttcgttcaaggcagaatcagtgaacggaaagtgactcccgacttcttccaaatacttaactgcaccatctaaccaaacaaaagtgaatggtggcgggctttcaactgagtttgccaactccaacaacaagaattgtgacatgtcaattatgagaggtgccatgcctgatgacaagagaggaccaccaacacgcaaatttagccttaaaatagcagaataagtaattaatagctgcctaagtaaaactgctcta

SEQ ID NO: 5219 - DNA, 609 bp, Gossypium hirsutum
  misc_feature (486)..(487): n is a, c, g, or t
  misc_feature (539)..(539): n is a, c, g, or t
  misc_feature (551)..(553): n is a, c, g, or t
  misc_feature (586)..(587): n is a, c, g, or t
caagcagtatcaaaacctcacttaaagaaagacaaaatgaattctgaacttctgataaaccatcaacataggacacacaataactaaaatttaagatagaataaaaaatcttaaacacttccagcccctcctccaaagcaatagttaaattaaaaaattgcccccttaactaaagaaagaaccaaaagacaaccaaatcaaccactctgtataaccccacagatataagagtagagtatatatcttatcgcaatacacacagaaacgaaaactataatgcatcgtgccaagccaagctaaacttacaaataactacagtaacgttctttactgaatagataaaaaaatggggtggagatgagagaatcgaaacttgatatggttgtggtgttggaattaagaatgggttgggaagagagaagtgaaattaataatatgaatagttcattccaatatgcgatgctaaatgacttgtattttattctnntgctttgagaggaaaacttgatataatatagtatacatcattgccatggcantgcaatggagannnatcacatcacaaaacaaaacctttactttatgnngtgacgcaacataacgtgatgc

SEQ ID NO: 5220 - DNA, 630 bp, Gossypium hirsutum
atgttcctcagtcgatttcaggtcttccaaagttgatcaatctgtaagtttgaatgagtcagtccatgctttcctagtttgtaaagtttgaacataaatgcatgatgaattatttctttttatactttttttaatttactgatgaaatggttgaattgtttttgcagttttcttgattcgaatgatcttagtggtgaagttccagatcttttgtttaacattccaatttataagtatgattattttttattagtttgtttagtttcctatttgtattgaaataacactttttatatgattaaattatttttggtatctgtgtttttactacatcctttacacaccagacacatattcatcagctgggaacttaatcgcttaactttgtttattcagttttgcaggaaacaggttaaattgtggtgaaaattttcctcacccatgtgtgtcaaatggaaatgattcaggtgatttcagtaactattttgactaaataacatttttttttaagaagttcaaagcagcgttgccaaggaatgtgcctagatcttgtgccttcagggcggacaacaaaagcaccttaaatcctttcagataaggtgcatttgatcaaagcacatgctaggtgtg

SEQ ID NO: 5221 - DNA, 610 bp, Gossypium hirsutum
atttctttttcataatatttcattccacctagagcttttgaattccataaatttgtcttgtttattgtttggttataatttcttgtttcctgtaagtgttggaaactccacttttaacttgctttcccgggaggtagctcctttttggccaaaaggatacaacatgaattgttatccaacaacaaattctaggctcaaagttttcatcttctgaatctgtacttgtttgtttggcaacttaatagcatactattgaattttatattctttttagaaaagcaggctatatttttttttcctttttcttttgaaaggttaaaaattttcttttggaaattgaagtgatacgatctgttgaggaatccaacacgggtaattaaaaacaggatgtgtcaactgctcagttcattatggcagttttctaaagaaacacttcaaagttgtttgtcggagtggttaacatatattataggctttgtccaatctaattttcacattatcatatcgtactagatattgaggttatcatatcattgtttaatacattataaattcattaaaattttatgaatcttgtttttgataaactaactacttataggatattggc

SEQ ID NO: 5222 - DNA, 595 bp, Gossypium hirsutum
gtgagtttctacccaacatgctcatcttagtctttcttttctgatgggatcttaataattgaggttcctttatctttgttgaagtggaagcctttaaagaaagaggtagctcccaacatgcctgatttttatattaaacaaactttacacctactatgattaattaaaatatgttgtattaatgttgctcaagttgtaaaatagaataagaaattgcatatggtatccactgcacacaaaatataccttacaatggacccattgtgtcaaaaccaaataaagtgggataaaagacagttgtgtgcaatacaagtcttcccaccaagtcaatgattttacacactttactgtaattatcatcatattcactatttttttttggtatcaaaatgcatgtgaacttccaagagtttgtctttgtttttctcccctttgcagtctaaactttcataaaactctataagcatctttgatttattccttgcttctatttccagaaattgttgaactcactcttctataatcaaaaccaagaatggaaaatatcttctcaatctcactttccctccaccccatcattacccgtttgctggga

SEQ ID NO: 5223 - DNA, 619 bp, Gossypium hirsutum
ttttttctttctctgcctccataaccaaagcttccaccaagcagtcactataagttcggcaatggccatcattcgagaaagagtaaatgtcattcagacttaaacctgtaagaaaatacaaagaaagtgcagtgaggataggctgttaacagtaagcatgcaatgttcaagagaccaaaagggtttttcatacactgtcctttgaggagaatggataaggaaaggttaccaagcataaacaatcacaaaatattgtttttagattctgttctgtacagtaagcaagtcagctttccttagggcgttaaggcaaaagtttgattctgttataaagcagaaggtagcatccttgagaatgcactagagtatgataaatgacaatacatggataatttaaccaaccagagggaaaagaggttcactatgcctgcaatatacatattaaagaagagaggacaatgatatatgtattacgtgtcgttaaaaacaaatttctacatatcaaagtagcaacataccttgttaaagttgtggctcaaaagtgttattgcagaagaattgataataaccttgggaacaaacaccattgaagggtatacaggagacataccttcttgct

SEQ ID NO: 5224 - DNA, 370 bp, Gossypium hirsutum
ttcttatcagaagttaatgttagtgaatatggtttcaattcaaagtcaaaagtttttcatacatctctactacgcttctcattaagtaaagtcatcccattcgattccactttatattcctagatgggactgacatttatccaaactggtaactaaattgctccttatgcaaacaccagtctgcccatgaacctagacagttttacttgggagacctttttaattaacatgacatggagagagggccccatgtacttcctcagagaattcggtcctaagtcctaacaccattttgcatctcagccatttgagattcatcaactcttgttgccaccatattgggacagacaggaggggttgtcttacggca

SEQ ID NO: 5225 - DNA, 632 bp, Gossypium hirsutum
cttctctgtttttatgggcttatctgtgccacagtacttcaatgagtataccgcaattaatggctatggtcctgttcacacaggcgcaagatgggtacgtatatccatgctaaatctgttttcaacggttttattcttagacaacttttttgtgtagtgattttagagtgaagtgaatgtgagtgacaaggatatctactcatttgttaacagttcaatgacattgtaaatgtgccattctcatcggaagcgttcgtagcgggatgcttggcatatttcctcgataacacattgcaccgcaaggacagtgggattaggaaggacaggggtaagcactggtgggacaagttccgatccttcaagggtgattcgaggagtgaagaattttattccctccccttcaacctaaacaaatatttcccatctgtgtgagatataatggaggtattgtcattttaagttgtaaaatctcaattgccctttgtggacgacatcattactatttaattccatgttaattgtattacacgctatagcagttggtgtttccctttataagaacacttaaatgactaattccaatggagacgtgggtttgaagtaagcaatgcaatgtaatgcctctgttgaag

SEQ ID NO: 5226 - DNA, 618 bp, Gossypium hirsutum
cactcacatgccctccctagattttactccatcgttttggctttgcctactcagtttcaaggttcaatcacaaatagaggctgttaaaggataacaaacaaaatgtcagagcaacagggtgaaatagaatcaaattgcttcaaatttacaatatatattacttggaatccaggaagtccagaatactcaccatatcaacgctgactgctttgccatcttctgcaaggatctcaactatggttcccgactgatcagcctaaagcaataagcatttttcagttaagagacagtttgacaatttcatagatggtgaatataacaaaacattctcttgattatgggccatataacacattacagtctgccactacaacagctgcaattatgggctgtaatcaccaaagagaatcaaaatgcagctttctggttagctgttgagagtgctccgatacaaaaaactaatagtacccatgccttccactggctgaatctcaatttgcctatatttggctacatcagctttaattaaccaagtagttaagccaatagctactcacaaatttttcccaatatatgatacaacagagaacacaaaaatgcatgcaatgaacctcaacc

SEQ ID NO: 5227 - DNA, 319 bp, Gossypium hirsutum
cagtttacggttcctactgaatcaaagaaatccatggcgtcaacttcttctgccaccgcttcttcagacccagaactctacttaatcaagcaggttatttttttgcctctcaattttctctgtctcatgattctatattcatgggattatttatttatttcagattagaacccatgaagttgccatagcagagctgggcagtctttcttcttggcgggtactttttttcaaaattttctattttgttcttcttgcttatatttcttcttgtctaattaataaggattacaagtttatcccctgcaaagttttttttttt

SEQ ID NO: 5228 - DNA, 648 bp, Gossypium hirsutum
tatattttggatacaaaattatattctatacatatttcaacacgtacttctttgaaataactctaaaaaaaatatatttggtgtttgaaattttattaaataaatatctctaaattagaatattagtttttctattaaataaatattatttgttttctactaattcaatcaagattctcccgtctctccctatagatagatgacactggtagagctataaacacaacagttcatgtaagttttcaagtttattagtccgccaaaaaatagtgagaatttattttctaagtataaattctattttctgagaataacaattccgtcggcttctattaagagagaattactatcctactgaatgtaataaatcgtttctggtaaaaaatctcagtctcgcactgcaactgtttgattacactctcattgaattcattcttcaaatcattaatgaatgattcccttccataatcttaatgtaaaaaatcagagaaaaatatgatgtataacaaatgatgtgaaatacgattaaaagatataaagtaaaactaagaaaaaaatttaaaataggaaaaaacaggttaaaaaaccttaaacttccaattatttgatttataattctttgtgttgtttcagcattaatgctattta

SEQ ID NO: 5229 - DNA, 680 bp, Gossypium hirsutum
aaactcaggtgcccttggctccacagtcagagcagccttccctttgtaaatggaatgacctacataaaacctagccggcaaccctgctgtcaaataaaacactttcaacacttgaaaagaaaacactgataaaaaagggtacaaacacaaggctttagctttacctaaggatgatggcgaagtagaagaagaagagtcattaaacctttgtttctgatcgaagtattcagattggcggcatttgagagaaaacttggagggtttagagaggggattaaatttaaaggaacgggtttgggaggagttgagtgaagagaaagatgggaaaagcttggggttggagatggagttgaggtttaaggtttggggagtgagtggaggagaagataagagttgaagttgcagcattcttttcggttgggtattttctttccttggttctctctcttcccacctatatttgatttaatattttctttttaaggttgaagataagagttgaagttttcttttgagtattttatcaaaagaatccttttcaaatgctaaaaaatttgatttgttttgaggttttaaatttaagttttgtgagaatttaggtttaaatcttaaaagataaatatatgggaaattctaaaacttacttgaaaataacttaattgagatgtcctaggaaggga

SEQ ID NO: 5230 - DNA, 638 bp, Gossypium hirsutum
ttcaaacttaaactgcacaggaaatcatcatcataccgcacatttcaccatccacagctttggatctcttactgaaggcaaaagtgcttgctgctccacatcagttgtctcctcatcatattctgtgtgacttgatcttgcatacctagcctgaatgcttctctcaagagcttcaacatcttcttgttcatcctcccggagtggtaatgggcgacggtgcatccttctaccaacgtcttcatcaggtagatcagctccagtctcaactatgaaatctgcatttccagacatcaatatatcagcaacattaagaaaatcaaggatgaaaacccaggcacaaatagaaggttcaacagaaatcaccatactaagatatgccacttattcattacactcttatcagtgaaatagctttctatgacaattccataagggtttaccaaatcaaatcattgtgctgattatgcatgcctcatcagtcaatctgaactgcatttatctttttcaatcagagcaacatgtacgataattgaaagctaatattgtttggggcaaaacattgaaaatgtgaacaaatgataccagccatgctattcacatgaatgcttctacacatcatttctatccaagttactgct

SEQ ID NO: 5231 - DNA, 564 bp, Gossypium hirsutum
  misc_feature (497)..(497): n is a, c, g, or t
  misc_feature (556)..(556): n is a, c, g, or t
aaacaataattgatgctattttggggctcaactttgatgacatcccaagcaaccttgctgctgtggcccttttttacgtgtttactaatgatgtacgtttttcagcacttgaagttgcacttattgtctatttataaatctatacataatttctgctcaatagttgaggattttatgcacacatggggttcttgtgagaaggtgttgatccaggactaaagtcaaagttgacaatgacaaaaccaatactttttagttcaattagttctgcacatagagtctttgtaaatgactaaatgtgtgtctcctactgcagtcttgcatgtgctgctacagtataactagttacaattaaaggtgaatgttaatctgttctgcccatgtttggtttcaccttttatcttcagttgatttttattctttattttagaaattcagatgtcaagagatccatgcttatatgcctagcttttatgctttttggtccccaataccantatttgcatatagttgaatcaaatgttttgaacatgttaattgcgatattcaccaaggntctctata

SEQ ID NO: 5232 - DNA, 644 bp, Gossypium hirsutum
acatataagccagactcggtcaagaaacagttgctttgagtactgctcgctttcattaatccattacaataatgcatagttctctttccaactatctgttaacgtctcatcaagaaacagaagacaactccataaaacaaagggaattaaccttcatttgtatgaatatgtaggaaacaaggttttttctcataactcaaatgagaaaatgaccattccaagtaatcaaacatgaccacgttaccttgttagtgggactcattttcatgtcccatgttcagctgtaaaaaataaaaattttaactaaatacctaattgatgaatttcaattggtaggcggtgaaacttttaataaatttaatttcctttaataggagaattgcaaaagaattacatacttcagaaaagatgttgatggtcatgactctgctttatggtcatctgaaacaatgacaaggctatctggatctgatctaactgttggaggcaggcctacaagcatacttggaggagcaaaatacatatgtagagacatcatgcaaataatgattcccaagaaaagctgaaaaaatgccaagaagagcaaaataagcaatccaatgttcaacaattgccaaacaaaactagcagcataaccgtcagag

SEQ ID NO: 5233 - DNA, 655 bp, Gossypium hirsutum
ggtgatcgcttattgtatgctttggcccatggttaccgtaatcttacaaaacttaacatcagtggctacacatcattcagtgatgaaggtgttgaatatttgactaaattttgtcgaaaactaaaaatattaaatctctgtggatgcgttaaagctgcaactgactgtgctttgcaggtatgaacaatactattatttacttgctgattagaaaattgacttacttgagtcagaaatattggtataggctattggtgatctaggagttatgagtctagcatatggatgccctgatctcagatgccttgacttgtgtggctgtgtccgaataataggtattgctttcatcgggttcatattcggtatttgcagtgtagtataacttactgctttgacattgaaattcaacatattgtttcaatttcaaattccaacactctagcctaattcatccccctttgaaatttgacatggcattttgcttccacgtatatctagtgaagtgtggcagcacctagtgctaatggttgtcggtagacacaatttaaaattatgcattcgtattctcaaatgtggataccatctatttattgactttaaattggcttccctataatccagtttaaaacatatgtgaagtttgcatgagagtgga

SEQ ID NO: 5234 - DNA, 669 bp, Gossypium hirsutum
ggtgagaaaccactcttagaagcataaacactagatgaaactgaaatcacataaactaggcattgaagtaaaaactggctcaaaatataaatcagttactaggatgttttctaataaaataggagcattatcactttgttgcatgcatttcttccattgctctgaccatcttaataggactaaatagcacctatatactttcactactttagttataatatgttaactatgaaccaatgatgaaatgattttcaaagatatattaccggaagtgcatagttagggaagacaacaacagtagcacgactgaaaacttttttccaatcattcacaagctcaatctgtccacttgaagtgtattctctagaacgtatggcaagtgctcgttcatggattgtccatataagtggaatagatttgaaaggttcctgaataaaactataacaagtaaactcactcacgttaattgacttgaacagaataacattctagtgaaatttctaaacatgcatcataaaagatcaaataaaacaaattaatgtcttcagcatgtatggaaaagtgtcttaaacttcagaaagcaataggtatagagttttgcctaaagaatatagaataacctacctagaaaagacactcttggcctcaagagagctaacgagtatgccg

SEQ ID NO: 5235 - DNA, 611 bp, Gossypium hirsutum
ctctcctcctttcttccctatctatgtgctgtttcaaagtgttatgaacatgcaaaatgcatatacttttatggtatgcttgtttgttttcgtataatccccctctctcagcgcatgcatgagtaatgaaggttggtggtttggtggatggcacgttagtgattttggatgtgcatgtaaattcgtctgctgctgtgcatacccgtttgattcttatgttgttttacttggcctttttattgggttcaattccgttctggacattgcaatatgtattttgccagatgagttgagaaagacgtctttatttatattagtgtcttcactcattgttttggtttttgtttccactcatatttgacttttatgttgtgtatatatttggaattggttggcccccatttcctttctatgcagaaattattctaaattcttgcttagattacctacctatggtgatccaggtataatacgcagaccagctgaggttcttgggcatgtccatgttgcaatgcggatgagacctgtggaggctctctgggctttagcatatgggggacccatgtctttacttcctctggctgtcagcaatgtgtgtaaagataacttgg

SEQ ID NO: 5236 - DNA, 614 bp, Gossypium hirsutum
ctctttttactgtatcaaatttagactttgtttcctataactgcgccgagcctcactcactccgcatttggctgtgcttgcttgttaaatctcagcaaacaagctgtagaaactgaattacttctatattttcattgtatcgaatgaatacaactttaggtatataaagagtctagctaaccaactgtaacagaaaacttaacttccttaactgttaactgcaactgttaactgctattattcctaacatgccccatacttgtcaagttctttcctacttgtaacaacacaaagtcgatcgcgaaacttagtgaaagctcctactgataggggttttgtcaatatatctgctgtttgttctgaaccaggtatatgccctacatgaagtactccggcagtaactttttctctgacaaacagcaaatccatttcaacatgtttaaattttgagtgcataactggattccccgcaactgcaactgctgctgaactgtcgcaccataccaaagccttctgtggaaatgaaacacccaattcagtcagcagtgcttgaatccacattatctccgccatgacatgagccacacttctatattctgcttctgctgtagacc

SEQ ID NO: 5237 - DNA, 611 bp, Gossypium hirsutum
  misc_feature (9)..(12): n is a, c, g, or t
tatttctannnntgagcacaaaataactttaccttgtaccgcttttcagtatttacagtaccttttttttaccttgcatcaaattcaagcctacagttgccatgccaaaaggtcattttcatgcatgaagatgtaacctagtaaaagaaaaacaacgacaattttcaaggatgaaaatgtggctcacaccttcaatcgttgagcttttatttaattagatagattaaaacgtgatgaaccatgggatttatagttttggttatctagcaccaaaatcagactgttttctcttcaatgcccccccctcccttttttttattttgtaaatatcacttgggtttttgaagttctgataaaagacccaaaccactttcacagttcaagttacccaaatttaggttagatttatataattttgactttttcaaatgttatggatagcagcagttaattcactgttcaaattggtgtctaaacttgaaagggtatttatcgactctaaccctttaatatcatacgtagttttgtcgcattcgttctcgactttctctggcgtatttactctacactgatcactttgtctaaactctgacgcaaattaaagcagagca

SEQ ID NO: 5238 - DNA, 631 bp, Gossypium hirsutum
atagctcatcagcatagctaacgagtacgctaagcggaaggctcatatgcctctcataccaagactgtgacgctgttctcgaagtccttactgtatgatttatgtaagattatggtgcacacttcaactccaatgtctcagtagatgtggctgccaagaaatgaagaactggagtttgatgatatcatttcaagccttcatagaaaaaagggtaaaagtgactgacttaactcagttaagctagagtttttcagatgaatgcatgagttagaaggttctaagccacttgtttgcatgtcaaaccctaaaatatcaaggattatgatatttagaaaaattataatgcagaattctaattatttttctacttcttattttctttttgaagtatcaatattatatagacaaaagtatgatatatgatctttcaaagatctttcgaatgcataaaacttatacccaagtcggatatagatatgtattcaatattaacatttgagtataggtaacatagctaaaaacacaaggacgacaaggggttttcttaaagcttcaaacagctggattcatcacacatctgcattattttcattgcaatgctatgttgttttgaagtctaaatattcgacat

SEQ ID NO: 5239 - DNA, 580 bp, Gossypium hirsutum
tttttttctgcataatttgtctacgcaaagtgaagtaaacaccatattatgcacatgtttacatgtgatattgggaacccttttctttttctgtatattactatatttttactgtacgtgtaaaatttacgtcgataatgtaccaaagaattgtatatatagagagaaagagctgaccaaatcttttggtggctattggtccagaggaacgctccccagattcattgatagcttgaaccatctcattcttgctaacataaccatccttgttcttatccaacaacacaaatgcatccgccaatgtttcaaacgtggcctccaagtttggtacccccattctcgatttcttacttcattgtcatggaacaccaacatttataattaaaaggagtgaatataaatgtcattgattctgctcagtaaaagtattatggaagtgtttgtactaagagttaaattatattttattttatttttccttaataaatgagtaaattagtccttatatgatagattaaagagtagattgtaaaaatttcatccatttctattgttaaaaaatgacttggttaacaagtgt

SEQ ID NO: 5240 - DNA, 607 bp, Gossypium hirsutum
  misc_feature (601)..(602): n is a, c, g, or t
attccatattaacatgtaagttaccttcacctaatcttcagaaaggattgtccatttacatattaaaagctcgctaatgacacaattaagtacaaattttgtttcaataagttacaagatttcttgtgatggtgcctccaaaacatgaaaattcagagcaaagtaattagcttacgatctgtcatttaactgctccaaactttggacaggataactgtatctcacatggctatggggtataaggaatatggcaaagcttaatttatccctttttctctgcaaaagtagagaaatgcagcagcatgcaatagatgttacctgtcattctgtaaggtagaacaactgtttagttacttggaacatgctctctgtatgtatttatttgcttcttatgctttacttcactgcttcttcttaaccaacctttttccctctttttttctctctaagatatgcatttcaaacccagtattttccaccgtgaacaatatattatcctttagcaaaagtaatttgatggatgattgctgctgtttaaattatccaaattcatacgagtattttacataaatttaattgataaaagctgtaagtttggtgnnatgca

SEQ ID NO: 5241 - DNA, 604 bp, Gossypium hirsutum
  misc_feature (597)..(599): n is a, c, g, or t
aggactctcctataagttagtgaaaatgtcccaaaattgactcaggatgttgagagtaaccgtgttaaccatttttatgtttttatagcttttcaaatgtaataacaaggaatgctttagcttttgtagtctatgaaaatattttccccaattttgaggtgattattaacaaccaaaacttgtgaaaaataaataaagcaaatccaatattcagatgctgttgatacacggtggagagaagggtggctaaggacagttcacccagtgggcagagagcagtaagagagtttatgggagctgggagctgagagaaggtttggagttaggagtgaaaggtatcatggatgttctgctgattcctagatcttgggagccttagggtgttgttggtcccttgccgaggctttacacttttagttttggattatttgggtttagtcgacctattgattttcttcctacgtaggtgtgggttgtctttgttaggggtgtgattccttgacgtgtgctcgtctttctgtgcgcctgcgaggtgcctctagatactggtcagcaggattttcccttctttatcggtcttagcccgcatggacctcnnncgagt

SEQ ID NO: 5242 - DNA, 648 bp, Gossypium hirsutum
gactgctttattgtcttcaaaattaatagatccgatctaagacaaatcacaatcagttaacagttctcagaaagacatacaataagaatttagttccatcagagaataatacaaaagaagctgatgcctcacttgttatgactgtacaagaattgtagagtcaactgtatcgaggtctccccagacaaaattcctttgactttcatcagcctctcagcataaataacttccttaggatctgcctcatgaacatttgtagtaatagcagaagacccatctgtcatctgaacatcctctgaagcagtagaattttcattttcagctggagcagggttggtggatcctggctgtactggttctgaaggtagagatttgggagcagaaaggcgatctcttacatttaacagaaaagcctggtgctcattctccacaagatcgaatgcaacttggaaagccaaaagagcatcctccttattttcagaacggagaagtttctccaatatatttgcaacaccttcaggttcatccaagaacattaggcactgagaagtgctcaaataatcaggagaaggcagtttttggtacactttaacaagaagccgaagcacctgcaagaatcaaagattaactggcattacagatctgggg

SEQ ID NO: 5243 - DNA, 625 bp, Gossypium hirsutum
catctccgctgactgcaacatatcccatccagttggaatccttactccaagtacaataagtcctctccaaccattcaggaacatcgacatgggacatggcataaatgtacttggtaaccttgtaaccatgtttagtaaggcctagttcttcaaacaatttgtgcctattgtatctacagcttccacaaaactctgataaaggatcaaagtcgaaagcatcatacgttccttggacgaattctccgtacttgacaacctctcgccttagccaagggtggagaggctcaataaggccatcccaattatgcaaaccatgaagctcacgccatcgtgtggatatattctcgatgggggacttggtgggagtcattgcatgaccgtggtcgatgaaatcggccgcggtgtagggcaattgaatgagttgtgccaatggcatcgtgggacgaattgtctttttctttttcattacatgcttaatcggcttgatgatagccatatcatgatgattaagtttaagagtcgaaagcttgctcaggtttgatgcaagatggagatgaaggcgatgcttgagagtggatttcaagaccttcttcatacgctgccaagtaacactaagcttcaaaat

SEQ ID NO: 5244 - DNA, 638 bp, Gossypium hirsutum
  misc_feature (628)..(633): n is a, c, g, or t
aagttgtcttcatatattgttcaaaggaccatctggttctgggaaaagggcactaacaatggctttcctgcgagaaatatatggcgaccctagttggaatgtatgtctagcaatttctaaatagattaccagatcgtgtttgacattttaaaactttgttcaggctgactctagtctttgcttttccctttttcttaaggtatctcatgaactaagaaaattccaagttcaggtactatataagcaacattttaggtaatttcacattttacgtatttagagttttgaaatgtttgtgatctgaatctggacaggagaaaaggccaatgcaagttattgttccacttgtttcgagtgctcatcatgtggagcttaatgtcaacttgggaaatgctaaatatgcattaatgggattggtcaaagaaataagctcctattatgcaattacccctgaaaccagcactgctagttttaagacaaaccacaaaggtttggtttttttatttttttcttccatatgcagtataagcaaacttcctcttaaacagtttaaagcaatcaacttagtaataaagttttgtttgtgtttatttcagttatagttcttcatgatgttgacaaggcaccnnnnnnttttt

SEQ ID NO: 5245 - DNA, 606 bp, Gossypium hirsutum
tgttaacctatagatcattggagtctgcgttagttacaaatgaagttaagacaccaacaattatgccaaatgccataaaaaattaagaacatggttataaagataccttttcgatgtaagaaacagcttgataagcatccaactggcaatcatcaggtgcaaaagcagctccaccatcagtcccgacataaattgcaggttccttggaatgcaattcatcagtggacaaatactcagctctcacaccagcttcagacagctgactcactctctttcttaacatgactgaatcctcaggagttctgcccactaacaagcttcctacacctcaaaacaccatatattacatgacttccgaaaaagttaactcaaaattttaacttttaaaatagttaacaaagattcgaaaagaaaccggatagcaagctgcaaaaatgacatgcaatcattttaactacgtaaacattaaactagtacctgtcttcttccaacccaatacttgaagtgggtccatgccttggtctcgtatcgtctcagccaacatcttccacagttggtgacttcttttggtaagttcccatgtctcacttgcgggattcttatgta

SEQ ID NO: 5246 - DNA, 607 bp, Gossypium hirsutum
actgattcatggcatgctggactggttggttataaatttttgaatatttttaagttgagtttgagctatcttgagttaggataggttaatgggttcttttaggaattggtcatttgttaaattcagaattatcttcggaattaggaaggatgaattcgaaataaatttgattaatcaaattgcattttgggtttggatcaaaagattaacaaacctaatgccactttacatcatattgcatgaatattcaagaacatacagaaaagcagacgaagattttatcataccgcaaatgccagatagttcctaaaagtgtagttagttatatgaggcaggcccataaaaggttatcatagccaataatggtaagaccaaatcaaatgtcagccccctggcctggcccataaggcatgcagccgaaaaccctacaagaagagttaagaaattcgatcggctatcgctctgtccctctttgttcaaacgctctttgcctctttccatctcttcctcgtctctctctatattccattcttctattgaatctataaggattctatttgcgggtgttgggtttttatttatttatttaaacttttccctatcctaa

SEQ ID NO: 5247 - DNA, 695 bp, Gossypium hirsutum
  misc_feature (690)..(690): n is a, c, g, or t
tcatgtccttctccaagaacaagtaccggtctctcctccccctttctctttctatcttttaatactcctttttttcaagtattatgctaatctctatatcatttgctaatgttggtgttgctaggaaatcgccacccagaaaattatccaggctcagagccagaggtatttggtttgggattcccattttgtttttctctgttttcatcaatcttttgattaagctaattaattttcagagaggcagcggccggacgtccctgcaaggatggtatggacgttttcttggaacggcctgatcccaatgctttgaaagtgggtaatttcatttgttttcgtgtttgctctcttttttgattatctgtataatcctttttagtcatagtatttcattgttttttgggtaatatgtatgttcatacaggagcatctactgaaaatggcttcagagcatcgtgccgaactagcttctaagcgtggcaagcctaaccctcctgaacaaggtcatatttcataataacccttttttctttatcttcaagttcatgtgattgtgtgtgaagatagaattttactgccctaccagctaaaagaggagttttttttcaccaaatgaaagaaaattattggggaaaaaaagcaaccctttgtttgtattgaagttggaaggtttaggacaatgtgatttanaaaaa

SEQ ID NO: 5248 - DNA, 631 bp, Gossypium hirsutum
tgtgaaagttagctttctgtaggatcctagcattgttgtgtatcaactttgactgatatgatgaggtccttttttccttcattacatattgttatgtattattgcacaaaaagttttaaatatgtttttccattctgacacaggaagaaggggttttgagagggcaagaattagaaaatgcactgttagatgctgagtacacaaaggcaatacaaattgctttggagcttaggaggcctcataaactttttgagctgttttctgagctttgcaggttagtattgcctaatcatatctgttttctgagtacgcagaacattttctcatagcagaatgtgatataggaagagagaagctgggtaccatatagacaaagcccttcatgcccttggcaagggagaatttcttctactttttgagtatatacgagagtggaacacaaagccaaagctgtgtaatgttgcccaatctgttcttttccgagctttcaacattcttcttccgacagagattatcgaggtattctattgtaatattcacttgatgttaatagcctcatttggctgcagggaagatgcatatggctttggataacccattatattttaccagtcccaccactaactttgaa

SEQ ID NO: 5249 - DNA, 657 bp, Gossypium hirsutum
atccattttcgatacccaacttactgacattgtcttccatccccattgaatgatgtgaaacactctcagccttcccacttggcccgagtgggctgggtctatcccttggcttcctatcccatattccagacctagcctttcgtggggatgacactggaaaaaccccatttgaccaaatgtctgcattttgattgtggttgggaacaagggatccagacacttcatgtgcatcttctctaccaggagacctctccacagtttgtatcaaagatatcacgggacccgggggtggagtcttagcctgacatgcatttttcaagattgaacgtatcaactgattatgcagtgacagattctgcctcccaataatgcagtaacacgacttatcaaactcgcatttactgaccttctggcttaaaaacctactcaaattataaaagtacctttttgacctctcagctccaatcttcttcactatctgagctttcagttcacctaagtcaattctggagccctgctgggattgcattgctcgataaacagattcctacaccattcacagaactacaaaaccactgaaacccgtttccaaacccaatttacagttttctccaacaccaaacaagtccaaatccgctttgcataccttacaatgcc

SEQ ID NO: 5250 - DNA, 630 bp, Gossypium hirsutum
aacttaagcatgcaggtagtcatggagatattgaaacagttaagtcgtgaattgaccatcaataatcagtttaattcagtggtcaatcaccagttatacaattacagtaaaagaattagagtccctaattaacaacctttggaaacaaaatatgataacataaaagcaagtggttataggtataaaacagttttgttagaaagcaagctttctaattctaccactaaaaagttgcacataccacacaccttaagagtttataaaagatttaaaattacaatttatcataaacttcgaaaataacattattaaaaaaaaacaaccatgaacatggaccataaaaaaataatatcaccatgacaaggcctacaatgggtaggcgaaaaaaaaagcagtacctaaattgaatatctttataacaaaataggtaattgcttcgacagagtggaaaatatttctcaagagaaacaagaaaatggaaaataaaatatatcccattattatgaataaatttgatttactttggattactccgaatcataataccaaactcagatttgtaaccatataaaaacaagttcaatataaaaagaaatcagtaatgattgaaattgaaattggaatttcaaa

SEQ ID NO: 5251 - DNA, 597 bp, Gossypium hirsutum
taaaactatgattttcaatgaactgtaatcatagagaagaagatactggggattttgaagatgatagtatatcggaaggtgatgattgggctgataatcaagcacgacgtaaaaaagaaacgaaaggaaaactttctttgagtaacagaaagagaaaatcaaagaaaatggaatacattggatgggcatcgaaacaacttactgaattcctaatattcgttggtaaaaacgtgaagcaagagttgtctcaatacgatgttgcaaccatagttactgaatactgcaaggagaacaagttgtttcacccagaaaaaaagaagacggttatttgtgatgaaaggttgcagtctcttttaggaaggaaatcggttaatagaaacggtatctataagctactaacggttcatttttccgagaacttggagcaatcagaagattcggtttgttttagttcgaaagaagatgataatatctctgtgccttgtaataaaaggcagagaaagtcgagtccggattggaagtttgaggaacaagaaacagctacaagtccatcagaaagctgtttggcggccattgttcgagaaacattaagctcat

SEQ ID NO: 5252 - DNA, 632 bp, Gossypium hirsutum
atctttattttcatttgctggggctgcacctccgtcagttgatgcagcaccagtcccggagctttcatctggcttattggtagtagtttcagtctggggcgtggttggaacagtaccattataatctactagcacaacctcaacctggaaaccaggggacggcaatttcctctgcatattaacaaaaggaagctcataaaatcagagaagaaattatttgggccagaaagaaagaaatgaagatccaagacaacatggaacatcacaatacatttcatggtttaccttgtcaaaccaatcaagctcactggtattcagaacttttctgttttctatcgttgttgtgtttaaccaactgataaatcaaaaggggcagaatcacaagatgattagttacaaaatagtaaaacctgaaactacttttacagggatgagggctaccaacataccagtagaaatctccttggcgatcatgaaaatgaactttgaagtccccagccaactgagttagaccaggctccccaggcaaagcaaagaccataactcctttctttggtgcgctaaaccaaaaatcttcaggctgtgaagaacatgcacgtgaacattatttcaaattggtatttctgaagctc

SEQ ID NO: 5253 - DNA, 385 bp, Gossypium hirsutum
aggagaaaggctccttgctgctcatcatatccatggaaacaaatgggcattgatagctagattatttcctggtagaaccgacaatgcagtgaagaaccactggcacgttataatggctagaaaacaaagagaacaatccaagctatgtgggaagagaagttttcaagatgcatttagcgactctaagctaagctctactggttttagtacttcaaggaaattagcaagatgtcaagaggcttttagctccagatttgggtttggagacagtaggtttttcgaccagtttcaaaaccaaggtaaagataagattttctcagtctcatccacatcgactacttcttcaccatcttggaattttgcttcatcaacaatgggtggcttc

SEQ ID NO: 5254 - DNA, 568 bp, Gossypium hirsutum
  misc_feature (24)..(26): n is a, c, g, or t
  misc_feature (550)..(552): n is a, c, g, or t
  misc_feature (556)..(558): n is a, c, g, or t
tgctcttagccctctaaattactnnnttgaaaactaaagaaaaaccaaaaccaccattgctctatttcaatgattcaactcctagtaaaccaaaaagcatatggtctgttacttctctctaaccttataatgtaagcacatataacaaaataggcagcagcataatgtcaaaaggttcatagcttaccataactgaaatctaacaagcactgaagaaaaataattgctcaatacacttcatatattaaaagatcattcaaaaacagagttggaaaattgtaccattttctagtaatagcactactctcttcaggtttaacctcttctttcttaactttatcctctctctgagcagccctttgcatgaactattaaatgcattaaataaaatagaaacaaaattcataaaagttacagttcccagtttatttttcaaattgaaaaaggaaaaagaaaaaaggaaactcaaatgaacaaaattaatatggccataatccatataaggagctcaagaaatctttttcaatataaattcaaaggaaaataaacnnnaatnnntgaataccca

SEQ ID NO: 5255 - DNA, 638 bp, Gossypium hirsutum
  misc_feature (444)..(444): n is a, c, g, or t
  misc_feature (542)..(543): n is a, c, g, or t
  misc_feature (602)..(607): n is a, c, g, or t
  misc_feature (622)..(623): n is a, c, g, or t
ataatcagatgtatgaggattgatgtactaattaattaagtggcgtgttcgttatttgttaaagggtagtaatcattgacaaagttgatagggatatacggttactcttggtttgggcccatcccatgcatgttaactggtctatagtgttcctgggctgggcccttttagatgtggtggtggtgtttttttttttgcttctctgagacacacactctcccatctcattccttgtgtctcacacaagaaagaaatttatttttttcttcacccatacacatctctctacccatttgtcccattttaagattctcctcctcctctgtgtgttttataatagtgcacatctcatagtggatatatataatatattcagtgaaatactctactctctgtgcctcatgtgaaaatataaatttctcatagtgaaaagatatgttggtntataatatttttctccgattttttattactcttttatgaagagtagaataagaaaaaaaatgcaatacttattattatggagcaagatggggagaatnncttcaataagggtgataagatgtattataaaaaaacacccgacctcatcaaagtggagnnnnnnttgaaaaaatcatanncctcattagacaaaa

SEQ ID NO: 5256 - DNA, 446 bp, Gossypium hirsutum
atgacttctactgctgataaatgagctttatatatatatatatatcttttttctgtattatgcatgtataatttatctctagcttctttctcaagcaaagagaaagggttttataatatgcatatagattagaaacataagttgtatcatctaattttagatctacaaatgccggacaaaatgctggtagctaaaagaaattgtattggatctggtttgttgaaacaattaacccttagttaaaagagggaagaagctctccgaataatagtaaaaaaatctgaaaccctgatgacctaatttaaagaagaggaatgctcactctccttacatacatattcttatagaatctaatttgcagttctgtaagtacctgctcaactttcaccatgagttgatcttgttgacttggaaatactgaaatcatatcttgcttgttcttgggc

SEQ ID NO: 5257 - DNA, 607 bp, Gossypium hirsutum
tagaaaaggagttgcttgcactcgggaaagagaaaacagctattgacttggaagaatataaggatttgctggctgctttacaagttgaaaagtcgaacttgaatgggaaccttgctttagttacagaggagagaaagaagcttaatgaggaaaaggagtattttgtccatgagaacaagagacttgcttctgagctgcttgttcttcaagagcagtttgctacaaaacatgggcaacacatacaacttgaggctgaattaaaagaagtaacagtacgactggagaagctaatagaggagaataattttctcaatgccagtctggacctgcataaggccaagatagctgaaagcgagagtagggcaacccacaatgttaaagctgggagtcaagtaaaaaacttggatgcagttagtggggtccatgaaaatgctactgaacaagaacattcctgccaaatcccttggaagcgagatcctgagttatccaccgtggtattggagaaagccttgcctgatgattttggtgggctgtcacttgcattgcatgagcaggaaatctttgatgaatcttctggttttctagtcttgaaggaactcttgaagga

SEQ ID NO: 5258 - DNA, 609 bp, Gossypium hirsutum
ctttattcgtcagtatctcccaagaacaattgagaaactgtacacatcgactttgtggtcatagtgtttctttgctccgattgggagtggatctctgctgtatatctaatttggataaaagaaacaagttagacattaccagaactaggaagataagccactactagattaatttagaaccattataagaaaagcacctcaggagccatccaccggtaagtaccggcctcacaagtcattccacccaatacttcctctctagctagtccaaagtcagccagcttgatgcacgttctatcctcggcgagaagtaaattgcctgtcatgagattaaaggatatataagaaacagactgtcttctggcataatattttcactcaattttgaggtgttcgtctgttgatgaggtcaatcacaataaaaaagtactgcaatgtctaaattcttagtatcagcttctaaagtccttaggcatgttaatgcatatcagcgaaaactttccgttccagcacaatctatactttgtttggtcacctgacattactagcacagtcagtttatcatatctgttcaggaaaacaatgaaattttgctatatcttaagtctt

SEQ ID NO: 5259 - DNA, 595 bp, Gossypium hirsutum
tcttttttggtcatcaaattataaaaagttacaaaatagttatataactattcaattatgtctttatttgtcaccagtagtcttgacagcttttaaatttgacataatagtaaatttaaccctcaacatttacacattcaataatttagtctttttcgcggttttgctcacctaaaaagcttaaaaaagaaaacaattttattagctaaattcgattgaaaatatacaagaaataaaagcatccaaaaagtccaagatagactaatttcatgcgtatatgttaagggtaaattcttttaaaaccaagactaaattgacataatttataaatattgagggttaaagttgctattatgttaattctaaaagttgcctttgttagctagctggtgactagaatagttggatgactattttgtaatttttcatagttgagtgatctaaaaaagaatttattaatagttgggtgactactaatatagtttacccaaagaaaaaaaaaaggggcacaaaattaccgccataaccaaaaaagttaaggaagggagggaaaaaggctgccaccaaaaaaagcaggtttgatagtggggcagaa

SEQ ID NO: 5260 - DNA, 650 bp, Gossypium hirsutum
tttttggacccaaaatcagggcataatattttatcctgccataataacctatactaacatcttcctatgatcccaatcaatggatatatttgattcaatgcaacacaaagcagccttgatcgcaattagtgacgaaatatggtactgatggtagaaaagaattcaatttccatttaaaaataatctttccacttgtattttgaaaaaacttcatcaccaccatcgacatttctttattaaattcgttaagtgtaatattttaaattaaaaaataacatgatgttacgatgaaactaaatttaaccaaaacaaaagtaccattaagaatcttaaaaagtaagactaattcttgaaaataaaaataaagataaggagtatgaaaagttcaagcataattcaaactaaataaaattcatgataatgggccggtacgtacaactgtacacaagttcacacagtacagcacacaccgctgataaatcattcaaagcatatttacagaaatttgattattcttctttcatctaaaaaccgcggcccttaaagaaagtgaccatttcagcccctccctttaaatttactaaagtaaattaagctgcttccttaactacctttcaatcaccccatatgtacaaatatgtcccaacatc

SEQ ID NO: 5261 - DNA, 629 bp, Gossypium hirsutum
ttgggtgccttacctaactctattactactatattttctttgtgtcttatttctgatgtggtgagatcatctcatgtttgctgctgactatgccaccgaatttccttttgaaatttaggtggaaccaattttcgagaagggggtcgaccagccaacaatggatgaagcacgggttttgttggtatgtgtttgatgtaagatttctggtagctttgcttgaattgattgatttgatgggtttttctcttgcatccttgtttttcttcaggggcgtattttggatgcttttgtcgggaaatttagtactttcaagcatacaattccccaggtaagtatgattattgaactttatagtacccagctttaatctagaaaaattgttcctgtaactgatcatttttgttttagtgcctttgctatgatgtcctaggaaacttctttacatctttgggttaactagctactgatagctgtctgactgtaaatgttcatgtgcatggttttcactttctaacagtttgtcttgtggttctgattttctcatctgggttctttaaatgtggcttgttacgtgcttaagcaatgaaagaggaggtttgtaatttgaatcttctgtgccctaaaaccaa

SEQ ID NO: 5262 - DNA, 604 bp, Gossypium hirsutum
tgtctgatctttcagttaatttgtgtacttcttgcttttcctattaaaaaagcttttttttaatgtttggttaagttgatatttctgattcttggagaatcttgcttgttgattaatttgttaagttattagtcgttatgacggtatttttacttgtaaattagaaaataagactagatgggtcatgattccggcctgtattgggacacttaggctgcaactgaaatagatcattggcatgacaatgataattatagtatacacttcattttggactgaatgcttctttgctgttgataccattggtttttgaatgagatagttcatattttacaagctgttagtcggtcatctctaaattctgtcatcttgcttattgcaggacaatacatgtccccatatgatccagacgagggtcctacaatcacaggttggagagtgcaacggtgggaatcatctcttcagtctgttgttctccataatatatttgggaacccttcttccagtttcggtgggcaggcacctaagcagactgtttgggtgtccaaagtggatacaagcataccaccaactaatgactttatgtctcaccaagcatctgctt

SEQ ID NO: 5263 - DNA, 598 bp, Gossypium hirsutum
actagatccattcgtgctaactacttcagcaaggcctccggatcccttcaggacccagtggagaagcttaagcctgcgtccttcgcttccaaagtactcttacctgaccacaggaagagcaacgccgtcgtgcttacgaggaactctaggattactgccaagagagcctcacgtgccgagcctgaacttattcccgtttcacctgaggatgtacttaaggtttggcccacttccgacctctctgaccttccgctttgattatgaatttggttgctgccatctcatgctaaaagaaaaaagatcaaaaaacgcactggatctttgttaacttttttgatttatctagaggctaagaaagcaataggcgtgatattatgtaagtggagtgataatattatcatggagcatgctgattgtttttttttataagaatggagcgtgtcaagttgaataaggtcatgtttgtattttcgaaaatgcattgtcctattagtgaaacttacacaatccataaatggaaatggtgattttttttctctaaaatgaggaaacttcctggtcactttggactataaatgagaaatatttaggactggat

SEQ ID NO: 5264 - DNA, 600 bp, Gossypium hirsutum
gacaagagagaaattttgtccatgaagttatcaacaagaatggtttttgcagtatcaactcataagacatcatacaaggtttttagcacaaaagaataataaaaatcaaacccggaggtaacactgatcactgcaaggctttctgtcatcttcatattcagaccaatatggctgcttttcactctgtcaagcaataggtaccaaagcagataaactaatgagtcaaactcgcattacattgaatctttgaaagacaagaaatacattgcttacaggattaattagagtttgagaacagccatgaagacggcagtcaaataactgtcatgcaggtacaaaatatatcagcacagggagttaaaaaatgtccaaagactgcctatgatatctacatgcccatgcttctctttaacaaataacattaagagtgatggttagagactaagcaccaagcaacggcggcaaaagaggttatcaaaagaatctaaggcagcactgaggctcttgtccaaagatatgcccttctcagatctacaatcctcagaatctttaatgttctggtcactgtatttttctctgagcatgccatgccgttccctg

SEQ ID NO: 5265 - DNA, 647 bp, Gossypium hirsutum
tgtgtatttgttacattattaaattattttatagggagccagtacctagagctttggtaactacatttttgttttcaaaagctttaggatcaagaagttgattgctctgaaaagcccttgtagtttgaatttctttagaatgcaaatcgaattcatctattttgatgactatttgagatccgagaaataccgtgtgccacagatttctggtacagcattggttttggatgaaatcatcaaccatgtgcagtctctacaacgtcaagtggaggtaagaattgtgcatttcaagcattggatatttttttctcttagatacaagaaggtttaaagttgtaacacaatgaattcaagacacgatcttaagcaacacaagtgaactaagagggtatagggaaaaaaaaacttggccactggataggcccctatcaaatcactttcaaatgatcatagatgtcaatctgacttgagattaatcatattaaatatgtgccaagagttttaggtgtgtatcatcaatttcatggagggctctttctgtggatattttttgttttctgcaatccttaaaatgttggtttttctttatgtgcttgttgttgacatcctttgttggttgaatagaagtgtttgcattgcttcctaac

SEQ ID NO: 5266 - DNA, 651 bp, Gossypium hirsutum
gatctataatgcttcgaccctttgtttttcttttaagttctatgatgtccaacactcgtgtttaacgcatattcatacatggttatgagatttgaccctctaaatacattgaaaatcttcaaaagaaaaaattgaacatacccatgtcagagacatactcatatccaacactgaaactggagtccgagtaacaactagatttaaggacaaatccttggaaatttttttcttctaagctatgttgctctgactctttattttcttaaaatatccgtgtttaacccttgtgttccacacatgagtgtgaggatatgacctcgaaagatcttccaaatgcatggaagaacttagaaaaatctaacaataccggtgttagccacatactcgagtctgagtaacgtagtttttaagtgtatcaagcataacataaacaagcaaaatttgtttgttgcagggggaaaagggagattttatgtggaaactgcaatggagctggtttcattggtggatttatgagcacatttgatgactgaatgtaaaaaaggctcagtctttttgaatcagttgttttcatggatgtttactataataatcttttgtaacttttgttttgtttcttagatgaaccataccctttgcttgattcatcag

SEQ ID NO: 5267 - DNA, 650 bp, Gossypium hirsutum
  misc_feature (256)..(256): n is a, c, g, or t
  misc_feature (258)..(258): n is a, c, g, or t
  misc_feature (260)..(260): n is a, c, g, or t
  misc_feature (262)..(262): n is a, c, g, or t
  misc_feature (264)..(264): n is a, c, g, or t
  misc_feature (296)..(296): n is a, c, g, or t
  misc_feature (298)..(298): n is a, c, g, or t
  misc_feature (301)..(301): n is a, c, g, or t
  misc_feature (319)..(319): n is a, c, g, or t
  misc_feature (322)..(322): n is a, c, g, or t
  misc_feature (333)..(333): n is a, c, g, or t
  misc_feature (337)..(337): n is a, c, g, or t
  misc_feature (342)..(342): n is a, c, g, or t
  misc_feature (344)..(345): n is a, c, g, or t
  misc_feature (355)..(355): n is a, c, g, or t
  misc_feature (409)..(409): n is a, c, g, or t
  misc_feature (451)..(458): n is a, c, g, or t
  misc_feature (469)..(469): n is a, c, g, or t
  misc_feature (471)..(476): n is a, c, g, or t
  misc_feature (478)..(478): n is a, c, g, or t
  misc_feature (490)..(495): n is a, c, g, or t
  misc_feature (498)..(505): n is a, c, g, or t
  misc_feature (513)..(519): n is a, c, g, or t
  misc_feature (525)..(530): n is a, c, g, or t
  misc_feature (534)..(535): n is a, c, g, or t
  misc_feature (539)..(542): n is a, c, g, or t
  misc_feature (544)..(548): n is a, c, g, or t
  misc_feature (552)..(556): n is a, c, g, or t
  misc_feature (559)..(571): n is a, c, g, or t
  misc_feature (573)..(573): n is a, c, g, or t
  misc_feature (602)..(603): n is a, c, g, or t
  misc_feature (638)..(640): n is a, c, g, or t
  misc_feature (642)..(642): n is a, c, g, or t
gccgatcacagggctttcctatctatctgaacaatcagattccccacaaaacatagtccataaatcctccatcttgctcttgtattcaaacctgaatattgctcaaaaactccatatgttattatcagaactataacaatacataagatcatcaaaacatcaatcatataaaagggaaaaaaactttattccatataaaaggtaagttactttgtttgacaaaattcattctaaaaagttaaacaattcattccancngncngncccactaaaacagagagtgaaagaaaaaaaangnacngtactataacgttacaanatnaaatgatcttnagancagtnannaggattgaangaaggtctgaccgacattaaaaaatatttttttttaaaaaaaaaacccacaccnctccttataaaaaaaaccccacgaccccttataaaaaaaacnnnnnnnntatctaaaatngnnnnnnanctgttcgttaannnnnntgnnnnnnnnatcactcnnnnnnnaaatgnnnnnnagannaacnnnngnnnnngaannnnntgnnnnnnnnnnnnncnccatttttgtcttcccaatgatataaacnntaaaaacatttaaaaaaaaaagctgacgggggcannngnaacccaac

SEQ ID NO: 5268 - DNA, 875 bp, Gossypium hirsutum
  misc_feature (631)..(631): n is a, c, g, or t
  misc_feature (633)..(760): n is a, c, g, or t
  misc_feature (762)..(794): n is a, c, g, or t
  misc_feature (796)..(828): n is a, c, g, or t
  misc_feature (831)..(851): n is a, c, g, or t
  misc_feature (853)..(871): n is a, c, g, or t
tgtttgatttgttacgaaacaacaacattatctttaccatgttctaatgttagttttctcttgtttagtgggtcccacgtgattcttctgctcctataacgcatgcaacgttctcatgtgatagccaactggtatatgccagctttctcgatgcatctgtttgtgtatttactgctgcaaacctcagattacgttgtcgtataaacccttctgcttatcttccaactaacatcaggtattttgccagatctttttgactcgaggtatcaattcgtagttggaagaggattatgcattctaattgctatctctattctttttccctcttacgtcacagttccaatgttcacccacttgtaatcgctgcacatccatctgagtcaaacgaatttgcattgggactctcagatggtggcgttcatgtctttgagccccttgaatccgaaaacaaatggggtgtgcctccacccgttgaaaacggttcagccagcagtatgacagcaacaccttcagttggagctccaggatcagagcaagcccagagatgataaaatggttgacaaaagcacaaattcttttatatgattggcttgcatgcccctccctaatttaggtatgctttcccagaagncnnnnnnnnnnnnnnnnnnnnnnnnnnnnnnnnnnnnnnnnnnnnnnnnnnnnnnnnnnnnnnnnnnnnnnnnnnnnnnnnnnnnnnnnnnnnnnnnnnnnnnnnnnnnnnnnnnnnnnnnnnnnnnnngnnnnnnnnnnnnnnnnnnnnnnnnnnnnnnnnngnnnnnnnnnnnnnnnnnnnnnnnnnnnnnnnnnccnnnnnnnnnnnnnnnnnnnnngnnnnnnnnnnnnnnnnnnngggg

SEQ ID NO: 5269 - DNA, 630 bp, Gossypium hirsutum
  misc_feature (407)..(411): n is a, c, g, or t
  misc_feature (413)..(414): n is a, c, g, or t
  misc_feature (417)..(417): n is a, c, g, or t
  misc_feature (422)..(440): n is a, c, g, or t
  misc_feature (442)..(467): n is a, c, g, or t
  misc_feature (469)..(472): n is a, c, g, or t
  misc_feature (474)..(482): n is a, c, g, or t
  misc_feature (484)..(484): n is a, c, g, or t
  misc_feature (486)..(487): n is a, c, g, or t
  misc_feature (489)..(498): n is a, c, g, or t
  misc_feature (500)..(519): n is a, c, g, or t
  misc_feature (523)..(525): n is a, c, g, or t
  misc_feature (527)..(545): n is a, c, g, or t
  misc_feature (547)..(552): n is a, c, g, or t
  misc_feature (554)..(557): n is a, c, g, or t
  misc_feature (559)..(577): n is a, c, g, or t
  misc_feature (579)..(609): n is a, c, g, or t
  misc_feature (611)..(626): n is a, c, g, or t
attgaatcttattccttttacttctgttttacccttttttgtgtttcaggtgcagctatggtgaggggttgtgctgagtaatgataattttcttcactttttacttgttaggtacctaaaacatattgattctggtcttctatactatctccagtcagatcagacgcaagtaaagaagctaccttctgtcctttgcacatctctatttttcagtggcattaagcatctgttggtgttatgtgtaggggattgtagttcgaaggtctgacttggttgggttaatcatgcgtcgtaatgagcttgcacatgatattcttaaggcattaacaacacaacaactgccccccatgttacaggtttgcttgttactgaattatttgtaccatatatttataaacattctttgnnnnnannganaaggnnnnnnnnnnnnnnnnnnnannnnnnnnnnnnnnnnnnnnnnnnnnannnngnnnnnnnnncncnntnnnnnnnnnnannnnnnnnnnnnnnnnnnnntccnnngnnnnnnnnnnnnnnnnnnntnnnnnntnnnntnnnnnnnnnnnnnnnnnnntnnnnnnnnnnnnnnnnnnnnnnnnnnnnnnnannnnnnnnnnnnnnnnaaaa

SEQ ID NO: 5270 - DNA, 605 bp, Gossypium hirsutum
agctaacttttgccactatagaatgtttgttcaactaaataaaataaagattgtcctataattctagttccattcaagttaaaacttcttcaggcaagataatagtaacataatgctaaaagaaccagcacaaccaccacagcaggagccgcccatatccaatagttcgtcgacttcttacgttttagtatggcttttgggagggactcggttcttttggtttgattcctgtacctactagtattctcctttggtactttacccttcattgaaacggtagcaggaacaggtgcatcagcattaacatcgaccttctcgggttctgaatcttgtgccacagcttcaatcagttcctcgggattcacagcatttgtcgatcctgccaccttcttcttagctctcttttcacgctcctgaaaaagatcgaaagagtttcagtttcaacccacaaactaatgaccgacaaagcgaaaccagataaggaagcgaatgatttccttgagcttcttttcagcttccatttgggctcttctagctgctttggctgctgctttttcagccaacttctttttttctttccatggcttgctttgctttcgctattt

SEQ ID NO: 5271 - DNA, 610 bp, Gossypium hirsutum
attggctttcctcattaactatattgcaactagatccgagagcgtcgttcgagccgttttcataggagctgctgttttcctgattggtaagtagcttgacttcaatgggaattgggaaattttccttttcaactctaacctctcaaggcttgtatcttgttcaacaggaactgcagctacatacatgaggttctttccctatataaagaaaaactacgattatggtgttgtgatattcctcttgaccttcaatttgatcaccgtgtcaagctaccgagtcgaaaacgtattaaagattgtgcatgatcgcttctacgccatttccattggctgtgccatttgtcttttcatgagtcttctggtgtttccaatctggtcaggtgaagacctccataactccactgtaggcaagctcgaagggctagctaaatctatagaaggtaatgaaatttgagaacttatccattttttgtgtgttaataaacgctaatgttactttacctgaaaaatgatgcacagcttgtgttaatgagtactttaatgatcctgagataaaagaaaaccaagacaaatcatcagaagatcccatctataaaggttataaagcagt

SEQ ID NO: 5272 - DNA, 610 bp, Gossypium hirsutum
agcagggagagaatgatctttgaaacggaccgtcaagaagccgatctttacctacaagccgtcgatgaaatccaacgttccttatccaacgtatcaatctcaacctcttcaaacgccggcaagaacgctaacgccgtcgatgaccagtcaaaagtcaacaccacgatccagatcgccatggctcgtctcgaagacgagttccgcaacatccttatcactcattcctccgctttggaaactgattcccttttagatccgtcgtcgtcctcaatttcaacgccttctcaccacgaactcgaagaagatgataccttaagtaacgacgatagcagccaccacgatctccttcagcttcagcttcaacactgtgaatcctcggatagctcgacttaccgatctacgagcagtatccgtgaagtggatctgatgccgtccgaagcgatttgcgatttgcaagcgattgcgatgaggatgatctcgtctggctacttacgcgagtgtattcaagtgtacgggagcgtaaggaaatcggccatcgactcgagttttaggaaactcggaatcgagaaacttagcatcggagacgtccagaggcttgaatgggaagctt

SEQ ID NO: 5273 - DNA, 638 bp, Gossypium hirsutum
tgttgttcctcttttgaattccacttagaaccacgttttctgcttccactcatctcactagtaacaggaattcttacctatgcagtatgatctggaagtacgaaattaagacattaataaactgccaccctccatatgtctcatgacaaacattgatttaattcaggatccaattacatgccaatcaatctcatgtccactctgctgcgagatttaattccctagggggcaaaaacctgaatccattaaacagattccaaatttcaaagtaacaaaaatcaggacatgaacacaaaaataaagatatcccacattcagaagtcaatgtgcagttataattgcaagcactagtgtacagcattaatctactgtttgaaactagattctgctcaatttcactgtttgatttctgcaagactattttgcctagggaaactgctactcaatgatagaataagataaaatgctataccaaattgctcctaacacgagagcaaatttaattccggctcctggtaggagtctctgcatctgaagcctgaacgaaagatgtcatctacgcaatagatatatgctcaaagttacattaggtatctggatctagaaatcaagcttacagtcaaagccagggttgagtt

SEQ ID NO: 5274 - DNA, 589 bp, Gossypium hirsutum
gcactaatgaaacggctacggtctgcacaatctgttgatgaggtaggtctctaagagctttttcttcatagcagttatatatgctcaactactttgtaacatatgataaccaactatcagaattcttatgaatttgttcaggtcacatatcccgctccttctcaacaagcttcattgtcacttgatgatctacccagatctgttgcttgtaccattcaccagggatctaatgtgacaagcatggatttccatcctactcatcatacactacttactggtacaatcaatgacaacttcagaaaccatcttacccgtggcgattttatatcaatttcactcctttagatttgatgatatgggttgtgttctgttatcttactttatgcacttcctaaatagttggctgtagcaatggtgaaatttcgttatgggaagttggcatgcgagagaggttggtgacaaaaccattcaagatatgggatctgtctgcttgttcagttacatttcaggtgaatattgcatctttgacaaaaataattcatatgttattactgaggattgtaggataactgattaactctatcaattg

SEQ ID NO: 5275 - DNA, 555 bp, Gossypium hirsutum
ctaccccacagcctttccgttctgttggttggggcaacccgttcggctgaatataaagagcaatgccatcctggaccccaagtctggctaagcccagcatcttcttgttgctatatactacctattaaactggtgggtgtaaagttttgggctttatttcgaatgatccaaaagtcccctttaacagatttagttttcgatgctcacacacagaaagaaaaagaaacttagctagtaagcgatccgattgtttttgaagggtctttttcttttgggtgtagatacgatgccgttttgcagttttcgtcgagtgatctgtatcttgcgtgccttcaaattgcaacatttttctcctttcctttgtttttttcccttcccctcgttagtgtttgtatgatgttgcagtatctgaatgagcctggttaaccattgtcaaattttgtaacttttgcaatgtaatatattagttagtattgagattattttgagaaatttgtcttttcaaggagggaaaaaaaattactttgtgatattactgtggtcaatccgaattca

SEQ ID NO: 5276 - DNA, 216 bp, Gossypium hirsutum
aggacgatcttaaaatatataatttttagatactaataaaataatgcaacatcatcaatttttaaagacgtacaaatattattctgcacgatattatctctagtttaatttcactttaactaaaataattaaaattttggaggggaaatgttgaaactatatgcccgaaaaagaatataaccaaaactaaataaaatttgataatattaaaaaaaa

SEQ ID NO: 5277 - DNA, 592 bp, Gossypium hirsutum
agaaatggatggtgtttggtgtaacggttttattcaaatttcataattttattcattttatcgattaaaaaataataggtataatgtcaaatttagtcctcaatgtttataatttttgtcaatttggttttttgtttagctaattttggttttcaaagaaagagtcaaatttatttttataatgaaaatgttgactaaaacattaattttttaacaatgtcagcgtagcaactcgtgtgacaatctacatgtactttatgcagacataacaatatttgtcttatatgttatatcaatgaataatttaaagtttatggaagtaattaaaaaaataaaaataaaaaaataaagagttttttaaaaatgaagcaaacatggattgcaaagtaattattaatgttttaatccgtaactctattaaaaataataataattcaacatttttcgaaagaaatttgaatatttttagaaaatttaaatgttaaatttaactaaaaaaatataaaaatattgagaactgatattatgtaaaatcgtcttgtaggcattaaacatttcaatagtggcgtaacatttgggttggcatatttag

SEQ ID NO: 5278 - DNA, 654 bp, Gossypium hirsutum
  misc_feature (644)..(651): n is a, c, g, or t
atattatagaaagaactaaggaaaggaaaagaaaggccttataaagagcgtcaaaaaggaaaaagaaaaacagttcatgaattgaaatttaaataataatttaatttttttattgttttcaattcagtattttcttctaattcgattagttgaatttctaaatggctgttatcactcgaataaatttttgattggatgaaaattgacgatgacagagaaaaagcttaggagagaagaaaagtaattctcttttaagatgtaagatctacttttttggataattattttgggcaatttaccaataaaagctttttttttcaaaaattattgaaacgggcctattttttaattatattacttatgttttaacgatttatcggacctattccatacatatgtcaaatcaaaaaaaataatacaataattttgtaaaaaaaacttggtgtttacttcaaatatataaggaaaataatgatttgaatgtttcaaaattcaattttaaaccgaaaaatcaaaatttaggaacaaaaaatgatctttttcgacgaaaactgcggcaaaccgccttcgactgtttgtcagcgcgtagatctcgaaaagttattcgaaataaaaaaaaatcgtctcaatcggacaacccacannnnnnnnaaa

SEQ ID NO: 5279 - DNA, 623 bp, Gossypium hirsutum
acatatgcactgagcatggctcttcaactaaatttcctgaatgaggaggggtcattctttgtgcaagaagggatcctgctgttggagtatgactacttgatagagatcttgctgacctaacacataaataacaaagaaacagaaaattattaaataataatagcatgcaacattcagaagggcatagcaaaacatgtagggtttattttccctcaacctatcgatgtgacacacatcttcagatagttcaattcattatatatcctacaggtcacagtaaacttggttctcatcaccttagaatctcaagaaagaaaacaagagagaaaactcggcctaagtttatcttagtccacgaagcatgcatgcctctatcagttacattttcttcatagatgacgcaaaatttttgttgaacaacaaaagtatgacattacggtgaataactatttatggcataaatggaatttaactaatatttctatttagaactgcacagctatagtaatgtggttaaaccaattccaagtccttgaaatacttaactaaatgataatggaggagatattgatggaaattccatctcttaattgggtggagaaaccaattctaagttagtggcg

SEQ ID NO: 5280 - DNA, 650 bp, Gossypium hirsutum
  misc_feature (645)..(645): n is a, c, g, or t
tttctctatttgttcattttactttccttgatcgtttcagttctttagtgaattatgttttggcgtgtcttgatgaatggcgcttttaatttaagttgttttatgcctctataacattatcacgattatgataatgtcaataagaatgtgcagtgttttagttttattggctcgtacagcttttattaccccttccatgataaatctagcgtagagatatttttttggtcaaaggaatgtaggcaagtaatgcatacaattccaagttaactgtgccaacctcactaaatatggaattcatcctgcaacactgcaagttatttataagctatcaagtaactatttatttataattttgattttcttgtaaggcttctctctttctctttgtctctttggcatgcatgttcttcgttcacatcaatgctgacaaccatccttttctactagatttttttttatttgaaactctaatggttttgtagttgattttgagtttgaatttgttcgttttctttatggccttaatttctccaatatcattatctatgtagcctacttaagtgatttactctagactagtggattgctggagtttgagatagctgcttcagtttagccataaatatctagagagttcagaanaatgt

SEQ ID NO: 5281 - DNA, 594 bp, Gossypium hirsutum
  misc_feature (30)..(30): n is a, c, g, or t
  misc_feature (190)..(190): n is a, c, g, or t
  misc_feature (544)..(544): n is a, c, g, or t
  misc_feature (580)..(582): n is a, c, g, or t
tgttggttagtctatttaactcattagcgncctcttttcagtagatggctccatcatattaaatttaacttataaattacagtgttatattgtgaaaatcatagcataaatctttatgagagttcacattttatctgtgcatcatatttcatggttccatgcatgtacgctgaggtgcaacaacaggctnggatttgttatgactgtgtatggttgctgttgattggagttaatttctattagctcactagacggattatattaacatttcccccctaattccaggtttagcttctcaacgatgtttttctcgcacagtaagtaaatcattttactccctatgaattctgtttatattaataatatgcttctacaaaaatccgtgctagaaacttgtaaaatcctctttgattcggcttaatgcaggagaaaacacagtgagctctttgggacgaatggtgttgatcatatggctatttgtagttctgattattaactcgagctacactgctagtttgacatcgatacttactgtgcacaactnacatcagggattcaagggattgatagcttgatctcnnngtactgaaccta

SEQ ID NO: 5282 - DNA, 603 bp, Gossypium hirsutum
  misc_feature (582)..(584): n is a, c, g, or t
tgttgattgctcattcaacttgcttttgagattggggagctggattacctaatccaatagaactttctgtagcaactggtgtcggtaatacatatgagctaaactttcgtgctgataacggttgaattttctcacaagggtcagatttattctcagaaaaaagtggagctgattggctgctggtccttatttcccctctaaatgaaaaagaatggcgacggcctttttctagattttcctgtaacataaagaacagtaaattatctcccaacagagtagatatttgctgcaaacacaagtttgggggggggggtaaccatataaaatttgagactataaagttgcttcagtagaagcataacagatgtgttcagaaaaaatcaatggatataaatcagttgaccaataatactcagatattgaactcgtatagttcatcgtatatccagtgaaacaagatatgtactagaaggggtgtagggaggaggcagggccccttcccgtccatattgtttttatttttttattagatttttagtatttatatacttcaaaaattgtaaaagaaatattttgctcccnnnaaaatttataatatgatca

SEQ ID NO: 5283 - DNA, 645 bp, Gossypium hirsutum
tgctggtgctttagattttattgttttgtgtactgtaaaaatatgccttgttcttgttcctgtttgtgattttgttttattcacttatcaaacaggatagtagaaagtttgcagcaatatgaactttccctttattttctttagttatttcaggtggcttttaaaccaagagttccttttagggggggttggggggtggggtatgtcagatagcttggttgtggggcacttggccataagtttctcagggcctgaaattgccatactcctacatggtatcattttcttgtgggagagatttatgttaccacaagttatgtggccccttttggagaaagggaaaaagaaaaatgatatctttcttccccgtgttagtttttgtgccaagtttgaagattctggtcatggtgagttggattttagttgaaaaaggtaaacgacaagaacttggctttcatgcatatgttcttttgtggtatcctgttgtgttgaatgatggtatttgctaagagtttttgacatgttgttttctttggagtatgaagagctgttgagttcaagcatttttttgttcttgtttgtagttgtttagtaaagtaccagaaaatttcatttccaacttttctcaggtccttgctatgtcaa

SEQ ID NO: 5284 - DNA, 614 bp, Gossypium hirsutum
  misc_feature (608)..(608): n is a, c, g, or t
aattattgggtttttgatgtttttccatcaattaatttatggctactagctatctaaagaacacgagataagaaattgaaattgaatgaataataacgaaattaaatgatttcattatcttaattaattgattaatcaaattctaccctcatttttacatttcacatataaaaaaaattttggctcaaattttgaaaatagtaaatttagcgtgaaattaataagtgaaaaattggaattaatatctacaactacaagcccatttccttaaaaaaaaattaaaaagggggtttagctaacaaggttctaagaagaaaggttattagaaaagaaaattgaaggaaccctaaagcaacaagagaaatatatatattagtgaaaagagagagtagaagctaggaaattaaactaaaattatcctaaaagacagacaaataattgaagagaagagaaataggtcaaaagaaataatcaaattgacttaataaacagccatttcaagaactgggtgctcaataaatgcgactagagaatgtattcaagcaagtgaaaagtgatgaatcaacaaccccaattcgggatttttagttggtcaattaatgcagaantcatgg

SEQ ID NO: 5285 - DNA, 1175 bp, Gossypium hirsutum
  misc_feature (485)..(485): n is a, c, g, or t
  misc_feature (491)..(493): n is a, c, g, or t
  misc_feature (500)..(502): n is a, c, g, or t
  misc_feature (517)..(518): n is a, c, g, or t
  misc_feature (531)..(546): n is a, c, g, or t
  misc_feature (548)..(552): n is a, c, g, or t
  misc_feature (555)..(563): n is a, c, g, or t
  misc_feature (566)..(568): n is a, c, g, or t
  misc_feature (574)..(586): n is a, c, g, or t
  misc_feature (588)..(594): n is a, c, g, or t
  misc_feature (596)..(606): n is a, c, g, or t
  misc_feature (609)..(614): n is a, c, g, or t
  misc_feature (618)..(621): n is a, c, g, or t
  misc_feature (623)..(643): n is a, c, g, or t
  misc_feature (645)..(646): n is a, c, g, or t
  misc_feature (648)..(653): n is a, c, g, or t
  misc_feature (655)..(659): n is a, c, g, or t
  misc_feature (667)..(702): n is a, c, g, or t
  misc_feature (704)..(709): n is a, c, g, or t
  misc_feature (713)..(733): n is a, c, g, or t
  misc_feature (736)..(738): n is a, c, g, or t
  misc_feature (740)..(755): n is a, c, g, or t
  misc_feature (757)..(763): n is a, c, g, or t
  misc_feature (765)..(778): n is a, c, g, or t
  misc_feature (780)..(780): n is a, c, g, or t
  misc_feature (786)..(788): n is a, c, g, or t
  misc_feature (791)..(800): n is a, c, g, or t
  misc_feature (802)..(809): n is a, c, g, or t
  misc_feature (812)..(821): n is a, c, g, or t
  misc_feature (826)..(839): n is a, c, g, or t
  misc_feature (843)..(843): n is a, c, g, or t
  misc_feature (845)..(852): n is a, c, g, or t
  misc_feature (854)..(854): n is a, c, g, or t
  misc_feature (863)..(871): n is a, c, g, or t
  misc_feature (873)..(874): n is a, c, g, or t
  misc_feature (879)..(883): n is a, c, g, or t
  misc_feature (885)..(898): n is a, c, g, or t
  misc_feature (903)..(911): n is a, c, g, or t
  misc_feature (921)..(930): n is a, c, g, or t
  misc_feature (933)..(938): n is a, c, g, or t
  misc_feature (941)..(944): n is a, c, g, or t
  misc_feature (947)..(949): n is a, c, g, or t
  misc_feature (951)..(952): n is a, c, g, or t
  misc_feature (962)..(963): n is a, c, g, or t
  misc_feature (965)..(969): n is a, c, g, or t
  misc_feature (971)..(983): n is a, c, g, or t
  misc_feature (989)..(995): n is a, c, g, or t
  misc_feature (1000)..(1004): n is a, c, g, or t
  misc_feature (1006)..(1006): n is a, c, g, or t
  misc_feature (1009)..(1015): n is a, c, g, or t
  misc_feature (1019)..(1034): n is a, c, g, or t
  misc_feature (1036)..(1059): n is a, c, g, or t
  misc_feature (1063)..(1071): n is a, c, g, or t
  misc_feature (1073)..(1078): n is a, c, g, or t
  misc_feature (1085)..(1090): n is a, c, g, or t
  misc_feature (1099)..(1117): n is a, c, g, or t
  misc_feature (1125)..(1125): n is a, c, g, or t
  misc_feature (1132)..(1134): n is a, c, g, or t
  misc_feature (1137)..(1151): n is a, c, g, or t
  misc_feature (1155)..(1159): n is a, c, g, or t
  misc_feature (1166)..(1167): n is a, c, g, or t
tcttctctatttatattggtttggtctataatgagttcttctctgtgccctttgaattatttggtcgctcagcttatgcttgccgcgatctctcttgccggtatttcacttacacttctgatgataccaaatgttttagaaacctcctattatggtataagtcctttgtaacagctttttgactgctttttatccagagatgcgactactgttggtttgattaaggttcgcgacacttacccctttggagtggatcctgcatggcatggtagccgtagtgagctgccattcctgaactctctgaagatgaaaatgtcaatccttcttggggtggctcagatgaaccttggaattattttgagttacttcaatgcaatattctttcgtaatagtctgaacgtctggtaagactgatatgccaatcaagatcttagcttttccattttctagggattttgacgtgactgctaactgatagcaaaacngaaaannntctgcannntcatggaaacagcgnngactttagtttcnnnnnnnnnnnnnnnnannnnntcnnnnnnnnnaannnagagcnnnnnnnnnnnnnannnnnnntnnnnnnnnnnnacnnnnnngaannnnannnnnnnnnnnnnnnnnnnnncnncnnnnnngnnnnncgcctaannnnnnnnnnnnnnnnnnnnnnnnnnnnnnnnnnnntnnnnnnctcnnnnnnnnnnnnnnnnnnnnnctnnntnnnnnnnnnnnnnnnntnnnnnnntnnnnnnnnnnnnnnanacttannnttnnnnnnnnnntnnnnnnnnatnnnnnnnnnnttccnnnnnnnnnnnnnnagtntnnnnnnnntnttttttttnnnnnnnnncnnccccnnnnncnnnnnnnnnnnnnnttttnnnnnnnnntcccccttannnnnnnnnnttnnnnnnttnnnnatnnncnncctttttttnntnnnnntnnnnnnnnnnnnncccttnnnnnnnttatnnnnnanttnnnnnnnctannnnnnnnnnnnnnnncnnnnnnnnnnnnnnnnnnnnnnnnaccnnnnnnnnnannnnnntaaatgnnnnnnaattttcannnnnnnnnnnnnnnnnnntaagctangtttttnnntannnnnnnnnnnnnnncccnnnnnaaatctnncctattcc

SEQ ID NO: 5286 - DNA, 611 bp, Gossypium hirsutum
tcaaatttacctggattctggcaggaatatgcagcagtccaacttatctctacctggagctgtttccggatcagatcatggggttcgcatggtacccaatagaaatggtgtgggcatgacatgtgggataagtagaagcatgtctatgtcaaggccaggcttacgaggaatggcatcatcaacaatgctgaattccagctgcatgctctccagtttggtgggaatgccaaaccctgtaaatatgcactctggacctggttctggtcgtggaaacttgatgttgaggcctcatgacactatgcatatgatgcgagtaagttatttacttttcaaaaagcagtatgattaagtctatgcttcaacatattattgcagtatgtgcttcttttattccaatggttaattgttacaaaccaattatcagcattgatatttccctaaatgattattctatattattttttagttaggccatttccacagtgtggtgatctcaatcctacatgtctaaatcatatttgatattttgtgtcaattatggtagatagatgttgatcaaatgctttgtgatagtttattaatctctttggtaattgcaacttcgaatgact

SEQ ID NO: 5287 - DNA, 325 bp, Gossypium hirsutum
aaactacagatacagataattcattactctaaaaatgatactcagaaaagcataaataaatgaattccgaataaatcacagaaaaatcttcatagaacaagggaaaataaacaactaatgcagaacacagaggaaaaaacaaccagagcccatgaagttgagaatcattgattagtgaaagcaaatacatcaagagatccaagagactgcacacacactatatatgacatgcaaatataggtttagagttcagttttaactttcactatacaagcaatccttggatgaaatggcaaagttgaggccctaggatattgagtgagcg

SEQ ID NO: 5288 - DNA, 628 bp, Gossypium hirsutum
ttactcctttttcagatatcaacaaccaagtaagatagggagatgtttaaataataaaaggaggatacttggtgttcctttatttgcttgtcatgtagaaacaatcatgcaactactctccaccagcatgggagttgttttcaggcgctgattctggactccacactcacactgcattcattgttttaatgttcacctcttctttttaccacaatagtaatagcccctccattgttgttctgaattgcaggcatctattttgattaactactctgaaaacactccaatacagtcaattgaaaaatcagttgggataacagttgtatcggatcaaaactccgagctgattttatttaaataattttttattataaaattcaggcttaattaataataattaaggttttgatggatttgccatagttgagtagagatgaaggtggtggtgtcgtttaaacgcaattggtgttgtttaaccctccaaaatccaaccattaccaatcagacaaatattcccaaatcctgcaattgcgcaagttggataatcttttccctgcaatccatctcctaaaaactcttgatttcccagcccaaaaatcctcttccattaaaccttcactatactctc

SEQ ID NO: 5289 - DNA, 566 bp, Gossypium hirsutum
agggatgcttacataaataacccatttaaagaaaacacgcggatcctcccctgggtcgggtcaccgcgcaggactgggagtgaaacgacgtcgttttgggtgttttggagcttagccaaaacggcgccgtttcactggggtataaaaattagtgttttgagaaaaaaaaatcatttgaacattgaaaaaaaataacagaagaaagaaaaaaaaactctctggactaagtccagattccggccaaggccccccgcacaggcgtcacaccggcgtcgcgccggaaatttcaaaaaaagagacgattgttcgtttgttctaaatgatggtagaaatggaaggactggcccatttggtacaacttcatttggatcatctatatccatggcatcatctacaggaactatggttgatgttggcctttttttgtaggaaacacgagaaaacaaacaaacaaacaaagctataaacctagaattacttatcataaaaaatattaggataattcataaatatatacctatcaccctcgcagaaatatgcatttacagctgtattgatctgacagc

SEQ ID NO: 5290 - DNA, 265 bp, Gossypium hirsutum
gctgtctcagtaacttgagaacgctgtagctagagaggaaggagaaaatgagcactcaatactattatgcatccatgcttcaacaaactaaaacatgaaagctgcattttcctcccttttctctcatatgtatttattaagacatgatgctcaagaatttcatcgaaatgcttgtactgtaatatgaagattatatatgcatttaataagtcagctaagcttctactgacctatgaagattaatattcccagttgaagtagctta

SEQ ID NO: 5291 - DNA, 630 bp, Gossypium hirsutum
ttcttcgatgacttctttctccctttacacaaactttagtgaaacatttatagttttgctccgttgattttggaaaacatttgaatagcactgttttcgatattaaatacgaaaccttactcaagaaacttttggttgataggttagtagtcttatccgtcacataagagtgaaaatataaattcgaacttcgagagaaagaattttacttttaaatactctcgaaaccaacaaaccatacacgatatgtactacaaaaatatcatggtgttggttttattgtgtcaagctcccctttacagagtcaaacaaatatacccaaaattttattgggcaaattgagtgtatatacgtactctgttggcttaattatgacctaagattgcatggatcaagtgataataatgaccccatcaattcatgctctttttttttgtgtgtgtggggcttgagtaagtggtatgcagtatttaattagcctcaaagtttgctgatcaaatgcttttatttttctttcttggttaagctttggaggcaaaaaaattaagggaaatgaacataatttgcagttaattgtttatattatctcttaggtaggtacatcatgaagatgttataggtctcttgtga

SEQ ID NO: 5292 - DNA, 675 bp, Gossypium hirsutum
cacttgcaaatgcgaatcagtttgtttgtacagtgataaaagattcttgaaactagaatgagttttagtgtctattttcaatattgttgtgtagtaagtgagaatgttgctaagaaattaggggaaaatcaatatctgtttcaatgacaatagcatcagtttaactatcgttagaagtgtagaattcaatcaaatttagggtgtttgattaactgaaaatatttttcggaaaataatataattttttgaaaaatgtaatatatatatatttaatgttgtattatatctttcacttaattatgcactttgctttcatgttttttttttactgagggcaatgtgatcttttcacctcaactcacgatattgccttaaaaactttgtataaagagtcaccttagttttaggatagtttttgttagtttattttcattgttcttaggaaggaatattaacttacgatccgcttgtggattacaattaattttaggtttatttagttttatttatttatttctcttttgatgcttcatttgactattttattgtggttggaagtttggtaggattaaggactaaatttgcaatttaaatttttttatttgcacctctgccattaattttaggtgacagatagcttaacaaaaatttgaagggaaagtaaattgaaagcca

SEQ ID NO: 5293 - DNA, 631 bp, Gossypium hirsutum
gaccaacccgaattaaacgagcacctgttcatgcatctgcaaactggtacctcgagaatgtcttgcctgtacttcagaggttagttagcaactcgaaccatttgattcgaacagacattttagtcgctttcgacagtttccggacatatcatagttctccctcatgttctgattttttaacagcaatgggattgctgcaatttctccgttttctcaccgtttgtctttcaacaacttgccgagtgaaatccagaagctacgttgtaaagtcaactttaaagcacttgtttttgttccgcacattcgagcacttggagatgcccttgtccatcgcctaaggtatcctcctactgaaagtcaaccacttattaccgatgatctcactgggaccactgatcgaaatgtcaaacaaatgccacagaaatttgtagtggtacaccttcggtttgataaggtatatatcctgcttataccatagattacggtccttgtattttaactatgacattgtttatatatataggatttagtttgaatgatcatcgttttaatgcaggatatggcggctcattcagcctgtgatttcggtgggggtaaagctgaaaaactggctttggcaaagtacccgaca

SEQ ID NO: 5294 - DNA, 622 bp, Gossypium hirsutum
caggtactaaaattagcttttcatggcatttttccgtcaatcagtagttagtgttagcttttttacctaaaggggtttcgccgttacggtcggaaagtttaatctcgttgattcatacaatcaattttcgaaactcaaagacgagtaaatataatctaacaaataaagggttttgattttttgtgaaactgcaaaatttattgatgtgtaatttagttgcaactttaagctgctaatacatcaagaaggtgttgttgatgaatgtggggaataggatgggtgaacttaatgtggaaatcattagattggtgtcaaatttcaggctcaacttgcaaatgataagagagatgtcaagttttcagtgctaggcccataaaattagtgctccaattaatataggtggtctcagtatcaagtaaaggattttatggagtggagcccctaaatttcatgatgttttttcctgtgtttttatatcagtttcccaggttttcaacggttcttaattttaatgtggtccttcccatgatttttgcagactgcaattccagtattaataggaacaaaatttgatgactttgttagacttcccccagatttgcaatggactgttgttactcag

SEQ ID NO: 5295 - DNA, 626 bp, Gossypium hirsutum
gaaccgtcagctatgcggattcgggatttgttatgacaaggagtgtaggtgtgaaacaacgtggagtcacctgtcatgtgatcggaggcgcccgaatcgagtatccaaggagattggttattagattcaaaagcaatgttgagggcagtaccttgagtggctagagatccatgagtagtgggagtaccaagtatcttatggagagtctcaagctgtgttttggttaagtgaacatcaataacatcatcagcagtagtggaggaattaatttcaccttgagtgattccctgattgatattctgtgatgtctcagtttcagagaaattttcattgatatcacccattggaggactaaaccgaaggaatttttaggaagggaaattagaggaaaaaataggatcgaatgaatcctaaagccctgatgccacgaaaaaactctgaggaaaaattttgttctgtgttattctactgctttagttttttacagattataaagagaggaataatcattttaaagggaacaaatctgaatttcctaagaatcagtaactgagattagtttctatttacaagggattccaacagatttctatccttaattatagggattccaacactctatttct

SEQ ID NO: 5296 - DNA, 613 bp, Gossypium hirsutum
atttagtcgacgtaatatgaatttaaaaatcagttagcttgttcacaatcctaataaacgtgacatatgcgttgcaccatacatacccatcatcataataatattgcaagaaaaggtaataattaatataacttggttgacaatagagaaaagagttgttgtttccttttcctttcattttcttatactatttgtctttgtttactcacacaagcccatcaattagctataggatattgttttttccctccactttccattaacaaatcatgtcactgtagcaagctttgtttcatgcattgattcttttggggtttaacttaaactagtcatgtcaaaatgattacaaggaagaatgtcaaatcatgtcatggagtcagcattgttgtctttttcctctattaccaacactaacaacaagggaattcatgggtttgcaggtggaccggagatacaaccattactgtgagcaaatgcaaacggtggtgaactcgtttgatctagtgatgggtttcggggcagcagttccttacacagcccttgcaaagaaggcaatgtcaaggcatttcaagtgtttgaaagatgcaataacagcacaattgaggcatagctg

SEQ ID NO: 5297 - DNA, 620 bp, Gossypium hirsutum
tcaaagttccatccaacatagaagttcaagcctgaaagttccaccattaacgatttcttcttgtcaaccccatcttcaacatcctgcaaatgcatctgttccattgagctcaattctatgttggaagcaccattggctactggacttccattaatttcaagtccagacgtgtctacacttccactcaatgtctccatcccaacactgttattttctcaattttccaacctttgtctaaagcaaatttaccctcctgtttgaaaactgacgatcttcatcggttgattgggcttttgaaaaatatatctttttcttttttggtacctttcaaagtccattcaagcagcaaagcaaacaagcaacttattcacagatattggatcattacgcatgataacgggatttattagtgttcatcggattgatcatttagcccaatagactttgagcctaaacccaagatctgtcctgaattaaaagaaataaaaattggatttcaatttccaaaattaaaaaacaactgaaattataacatcaaatttgcattactgccaccaaggcaccaatcaagatttgaacccttcttcttttgacatggagaaggatgactgttgcagtta

SEQ ID NO: 5298 - DNA, 629 bp, Gossypium hirsutum
  misc_feature (6)..(6): n is a, c, g, or t
aatacntgaatgtttgctagcctgacttcattgaagcaattgtaagcaattctaatttccatatacaaatgaatattttatatatctcatgtctgaatatatcttcaaataaagttcttattatacatatcatttggaatttttaatatattttatatgatatagttatgataattttgttctctcaacagtcggattagtgacaacaactttacaggacagattcctgacttcatattccgaaattggacaaatcttgaagagatgtgagaattgtaattataagattttgatgcattttgtaaatctatattttcattagaaatatttttattttattaatcaattaaatgaattcatctttcctaatgacagatatatagaggcaagtggtttgagtgggccaattccatccattaatgctactttagaaaacttaaaatacatgtaagctccaacgaccttaaaaggtcgtgacaatattcattacataaaaataaacacaacttaatttcttaatcatgtttgtatatggttcttgatattgttttacagaataattagtgacttgaatggagctgatacaactttttcacaattgctcatcgatgccgctttgcctaaattgg

SEQ ID NO: 5299 - DNA, 662 bp, Gossypium hirsutum
  misc_feature (656)..(658): n is a, c, g, or t
atttagtttttttaaatatgagctattatattgagcatataatcactgatttatggagcatacttttttttggttgctgattatgtcttacttcttgttgagaaaaataatttaagttgaacctcagttttactcctttttaatgatatactgttttggcccagaaacgaacctgtattatcagtggctcaacaatcaagaaaacggactaaagatatggccaaatctcaaggagagaaagttgatggtcatctaccaagtaaacatgtgaaagtggaacaggggaggctaaattttgctgctaccaactctttgcttcaagaagaatcttccgttctcttgcagaacttagctgatattagtcaacatgatcagaaattgcataaaatgttgaattcttctgtaagatcttcgattaagaaacctgctaacattggaactaagtctgagcactcgtcacaaactggaatctcaaatgatgatgatgcttctatatctccacaaaattcaaaggatgctgataactataacaatgtaatcatccaccctagcaatataggaaattatacaaactctttagcaacacaccagaattatctggaaaaaaattatagtaaacaacttgagtctccgttgagcgagctgatggttgatgnnnatga

SEQ ID NO: 5300 - DNA, 646 bp, Gossypium hirsutum
tatttcaagtgaaacagtaggaacttcagatgcagtagctgctccagaacctagcccaacattacagatgactggctttggtttccactccttgttagaacccactgttggtgacatactgaaaattaatacttgatcacatatctttagcaacccttcaactatttttagataagaacataaagtagtccaaagatttgtaagtatcagccaaaatatgttccaccaaacattttcattgtaaatcatccaaccattggtgaataatatgagaataaaaaacccagcaaacttgagttacaaggtacagtatcttaaccattttatcccttctcacaactaaattgttatttaaggtactacttttgattacatagaacccatcacctatcctaccaagttctagtgatgcttttcattcaaaatttataattaacatactactgaatttagtcttgctcaaaggaaaatatagatattagagatacccagttaccaaagatagttaagcattcgaattatgataaggagcaaaataatgagtctgaacattttttcaagcaaatgtgtcttcaagtaaattttcctacaataaatgaagttacataaatgccatatccaaaaaccaatagagcccgatactgag

SEQ ID NO: 5301 - DNA, 464 bp, Gossypium hirsutum
gcattaaaaggtttcctgatacatgttccttatcttaagtaaaggaaaatgaaaagattccccctaatttcttatgattattctaaaataccttcttatggaaaggataatttgaaaaattctcctgtgccaatttcttatgagatttgagttgagtttctatatctaatcgttttgaataatgatatgattgaaagcaacgacctagaactgtgagaatttgttataaatttactcttttgagcaactgaaagcttgccttggaggagtggttattgtcagtatctctctaatagctaatgctgcttgacttgccggaatggcatgggtgcaggccctggatacacttggaagcaccaaatggagagtgaataacaaggtgcttgctgtggtagagagtatttgggctagtggtggcaacattgcaggcttggttgatcgtaatgatgtgagcacaacacaaa

SEQ ID NO: 5302 - DNA, 653 bp, Gossypium hirsutum
  misc_feature (648)..(648): n is a, c, g, or t
ggtatatgtgaaataatctttatggttgtggtattagatgtgttttatattatattcttgatctacttcgttggattactttgagaagtgctaaatttgtccataccattttgcttcctcatgtataattccgcgtatgatcttgggattattgttggtagttaaaatgaaaatgaaaccatttaatatggtatttgtgttatttttttggtccaatttggtatttgatcaaagttatatattttggtacttaaaggtaacaaggttaattatttagtgtttaattcaagttttagggttaatttaatggaagttaattggtaatattattaagtttgaatttttcataatttttttaataaaataaatttaatactaattgtgaatttatttaatcttgtgtttagtttatcatatataatatgattgatatgatttaattcgagttttaaggttgactataaatttttatcaactcaactctaaaacctgaattcaatactaaaagttaacactgttacctttatgaaccaaaatatttaatttttatcaaatacaatactaaattatttattaaaccaaaggaaaattgcaaaggaaaatccgtaaagaaatataatgggttcatgttttactagtttcaggtgncccaa

SEQ ID NO: 5303 - DNA, 623 bp, Gossypium hirsutum
  misc_feature (603)..(607): n is a, c, g, or t
ccaatggcagagcaattcgaggagcaatccaaacagatgccgccattaatgcaggtaatatgctagatgaatttcatttgtaagctaacattcataaatgcttatcttgcagactttcaactgcatttttacacttgatttagcttaagttgatgactcttatgcaggcaactcaggtggaccgttgattgattcctatggtcatgtcatcggcgttaataccgcaactttcactcggaaaggtgatgaaatgtctctgtttcccatatttttgtgaagagaatggtttgattcaattacaaagttctcaaaacttgcttctgggtttatactatcttgcagggacaggaatttcctctggtgttaacttcgcgataccaatcgacacagttgtccgaacagtaccttaccttattgtatatggaaccccatatagtaacaggtttcaataatgttttggcctgaagaaaattcatatatgatgtacatagccatatgtatacatacacatttcatcagatacaatttgcatcaagaaattgcaaagacctttcggtattaagttgcaatgtgtacctacatctaacaattcgaatatgatannnnnaatataagaagaaact

SEQ ID NO: 5304 - DNA, 628 bp, Gossypium hirsutum
  misc_feature (577)..(577): n is a, c, g, or t
  misc_feature (579)..(580): n is a, c, g, or t
  misc_feature (601)..(603): n is a, c, g, or t
  misc_feature (612)..(612): n is a, c, g, or t
tatctgctataaggatatatttgatcatatggaaaagaatgatggaaaggcttcactaatgtcaagacctaaggctgtaaatgcagaaggcaggaaaaaccaggtaaagaaagcaagggatgaagggaaacggaaaaggtcaaaagcaaaacaagctgtgagagacaaaatagtggatctgctgaaagcagcaggttggacaattgattacaggcctaggaataagagagagtacaatgatgcagtgtatgttaatcctcaaggaaggacgcattggtcagttaccttggcatacaaggtgcttaaaaggtattatgagaatggtggttgtgactctaaggtttgtcccaatggtttcatatttactccaattcctgaagaagaacttagcatcctaaaaagagtagttcaaaagaaaagggttggaaaaaagaagccaaaaggggaagatgatgatagcgatgatgatggacaagttaaaaagaaaatgaataaacaaaaaaggaaaatgaaggagaatgagaaaaagaagaaaaaacaaaagctgctcaaagagaagcttttgctttatgaagangnnaattctgatggtgcattacannngggaactcntgtgtcaagcaggaac

SEQ ID NO: 5305 - DNA, 665 bp, Gossypium hirsutum
ccggctttgtctttatgttcttgtttcagttgtcgacaatgtttaaggttgttgcagggagtcaggctttaaggtttagtttgaagaacaacagagtgggacaacaatctgctaagtaagagccatacaagaattgtaaagattaaaaagcggttggggatcaacgaactacaagataaaacaataaaaacctgctttctacttttgtcttatctgatttgattcgattgtcattactattattttatttgttattaaaaatgtgtgagaaattatagttacatccttgtgtttggcaagaatttgatgataggtcaaggttgttgtttcacaaacagcataagttccatcatttgagggatgacagtttatgtgatgaagcatctattggaattaaaaattttaataatttattaaattaggaaccaaaagaatcaaataagttctaaaaaactaaaaaaagaaatcaaaatcttggaataagaatccatacaaaaaccaaaatgatacaatattagtagtaccatatcgattattattatcttttctttttccaaattgttacattcgatatcgaaaatcctggtttttggttgtgttattccaaaatagagaactgtaaaagataaaaatttagaagtgatatgtcttctcagttgctgttg

SEQ ID NO: 5306 - DNA, 662 bp, Gossypium hirsutum
taatcaaaataaaaaaaccaaattaccaattaaataacaaaaccattagaatgctgatcatggttacctacacagtatactcacatctctaactctattttctttttcatcttttagaattcataacgagccagcaatacgtaaaccaccgcaacatcatagctatattctcctgaattgtttaaaaagatccatacaacgaaactgacagaacaagcagttttgcgtacacaagcctacctcaagaaagagatccccaaaagagattttgtcaccagcttcaacaaaaacatcagccttggaaccactggcctttgaaataacggatttgacaccaggcaccttgccctaaaaggaacaatcacattcatatacgtcaatctaagagccaataacattccctgaatgattagaacctgaattatccagttcaacagtctcaagtcttaagtaacaaaattgactgatagtagactttatttctctaataaccccaaaaatatagagaacagagtacagtaaaagtgagaaagggaaaaccttgatgaggccagttccagtaacatgatcagcatgtacatgagtgttcatagcataaataagcttcagccccaattctttaaccaaatttaaatctctatcaacagtcctgtctacagggc

SEQ ID NO: 5307 - DNA, 615 bp, Gossypium hirsutum
ttctccgcaagaagaagtgagtatgcagattgcttgtctgctctagatggatctgaaaagcaaatagttagccgaaggataagttttaccaaaagaaacatcgtctactaattatcattacctccaagaagccattctctatcggaaatcacaacaatggaaaaaggaatacgattcggtttcacgacattattttgtacgttcattatagtttcctctaatgtatcatagttcatggagtttccgatctgcaacgtgtgaagacaaaataacaatattagaacgaaaccttaaaaaggcttatcaatgcagtcattccacaccacacgagcaactaaataagaaagtaccttatggataacctgaacattttttagttttgcttgacctgagacggagcttgctctcttcctttcttctaatggaacatcagacaatatttcctgtaatacagaagttttccatcaagtgatacaatctgacgcttacagttgaaaatcgagactataagaatcccaaaagaaaataaaagcataccaatacgcttccagggccgagataattatcatattcttcaatcatttgaataacacccgggcgccatccaaggataag

SEQ ID NO: 5308 - DNA, 643 bp, Gossypium hirsutum
aatgtatcttaggtaccataaaaggtgacgctctatttggaaaaaaaggaaattaagtgaattgttttcaaaagattaaaaactatgagtagtaaattaaaaagtaattatggaataagaaattagagatgcgaaaagaagaagttgagaaatggttaagtagtataataaaggctagtgtagcaaagaaaaatacaaatcatatataataaagatgttaacaacacatgattacatcaacacatttattgcaaaagctacatggctccacaaaagggtattatatctcctcccttcacagattcaaactccattaatgaaactcatgggtttctcttgagcttccaactccattaaaggaatagcgacggtacgccatttccttgcttgtttaagctccctgcaaactccaaaaacaagtatggaaataacaatcgtcgtccctaaagaaacacttaaaaatttgtaccaaaaaacaagaaattagctaacgttttaattactagctactatgtggtactgctgctgaaggtttaatttcccatcatttgtccaataaagggaattaaagaaaaagtggaaaagggcagctgctgtgcgtaaatcccatgcacgaaaggcgtaacaagaattgcagagaaag

SEQ ID NO: 5309 - DNA, 662 bp, Gossypium hirsutum
atgataaacacaaccagagagacatccaccaatgatactgaatacaactggaggaatgtaagcaacactaagctaaaatctcctaaaagtagcattgatatgactaggccaacaagatcctgcaattgtaaacaaggtgttagtgaaagatttgttaataaaaattaatgtaaactaaaatttgtgtgagctacctggtgaccagcaggtttagtattatgaactaaaaacgagagaaggtaaaagatatatctcttatcctcaagctttcgtaagctgttagcatctataagctctccataactcttcttctttgcaaaaccttcattgcctagggttaaaagtgcatcttctcttggataatcagattgattttgcatgtatgtggtgttcaagctgaaggacataggaaggtaaccaggttaaatgtcatataattgcagcaaatgattccatcatatgcgtgctcgtgcacacagacatttgaaaagaatctgaatttctttccatcagacactaaaacaataactactcttaaactaagttccttgtgcttctgtctgggactccctacagctcatcctattccagtgctgaggtatatcaaaatatgccaatatgactttggtaccaacaacatgaaattgaacgtccaagttcag

SEQ ID NO: 5310 - DNA, 633 bp, Gossypium hirsutum
atttatttatgatagatttgtctaagttttattttttttagtttagtcaaaagcgatagaaaaaaaaataggtcaaaaatattattttggaaaaaaattagctctttttatttaaataaaataaaaattatatttttttactcttataatatatttttatcaaaataaattgaattttataatattttatttttttaacacctaaatcatcaaataaaatgataattttaaaatttcaatcatcaaattgtcttaaatggagatttcaaaaaaagtaatattagtttatttttgtgatgaaagattatgtcaatgttggggggataaaatgggaggtgtccgaaaaggaatggataaaggtgaatactgacgcaactatgggagttggctcatttgttgttgtggtgggaggagtggccagggataatggaggacgttggctttgtaggttctcccgtaagttaggggtttgttcaatgctgaaagttgagttatgagggacagttgagggaattaaactagcatgggagaaaggagttaaaaatttgtcttaaaaatggattgtataaagataattaatttgttagttggtcagactcgagattaaaacttgttaggaggaagagtgaggga

SEQ ID NO: 5311 - DNA, 593 bp, Gossypium hirsutum
tgcatctctgtggacttccatccctttggtgagttttttgcatctggttctcttgatacaaatctcaaggtgtgggatatcagaaagaaaggatgtatccacacgtacaagggccataatcgaggagtcaatgcaatcaggtttacaccagatggccgatgggttgtatctggcggcgaggacaacattgtgaaggtcagaatttgctgtgtagtttagttcatgatgctagtcattttgtactaatctacatgtttcttcttttttcttttgggggcatggtagggtgaataaacatagaaagaagggttttcaatacttttagtggcagcctgtttcatgacaatgctcttatttcctggggactggaattgagactttggaatgaggctatgcaaagctgaggtgttggatgaacttacatgcctcttttatttcatattgtttttaattctctgattcagccaacttcgaaactttggctgttctgttatatagctatgaatggatccataggtgcagttctttggctttctcccatttgtattttaatatctgcatgctatttcattgtttatacgtcataatgtcag

SEQ ID NO: 5312 - DNA, 608 bp, Gossypium hirsutum
atgaaaccatggccttcgctgtgaaaaagctaaatagaggacctccagatagagacacaggatttgagagagaattggaagtaatgggggatatcaagcaccgcaacatagtaaaccttcttggatactgcaccaccccttactacaatcttcttatatatgagctaatgcctaatggaagcttagatgcttttcttcatggtatgcaccacattgtttcttcaagttttcagcattcatatctaaattaacttcgctccagctattttcaagggttatttgatgatagattaaactgtgatgtaggaaaagcaagggaaagcaagattttggattggccaacaagatataaaatagcagtaggtgctgcaagaggagtggcataccttcaccatgattgtatccctcatataatccatagagatatcaagtcgagcaatatattactcgaccagaacatggagccacgagtctcagatttcgggctcgcaacattgatggaaccagacaagactcatgtttcaacacttgttgcagggaccttcggatatttggccccaggtataatgaacaaaattgcagtcattcttctcctcttctgtgaaaca

SEQ ID NO: 5313 - DNA, 636 bp, Gossypium hirsutum
cctttccttatgctttttatgcttattctggagctttatttagaagggtcttctaaagtcagcaaattgaatgcattgcctctcgaatttcttctttcacttataggcatattcagaaaatctaagtagttgaacagagagaatttgtggattgtatgtgatggaatggcaatactatccctttctttgttgtatctagcaagctgcccgtggttctggttaatgtttgagaagtgttcacattataagtggtgaggctgtgattctgtgaagcatcattggactgttaaccctcccttctgtttaatgaatatagaaatctactataaactactgccattgcgcttctttcctcctttttttttcttctctcttacaggaaaccatagtaaatttgaactagtttctggagaagtaattggctagtttttaccttaaataaagagtatttactagaaaatgctcaaatgcagcatatgacatctttgaggttagtttgtaagtgcagaagaatatgcaaatgggaaatagttgagtggaatgcaatttgtagtttatatgtgctggaacttaatatctaccttagcatcctcaatttggaggttgaaatgggaaacttgatgatatgatgaaagg

SEQ ID NO: 5314 - DNA, 634 bp, Gossypium hirsutum
cgtacatatgttgagggaatcattcgtggcaagaagagaaagattgatgaaagtggagagaatcatggtgaagacctcttgtcgaggttgatatcagcaggcaatgataaggaagtgacaagagatatggtcataagcttcatcatggcaggaagggatacaacttcagcagcaatgacatggctcttctggttgctttcctgccatccagttatagagaaagagcttgtgaaagagataaacaatagggagaaaatcttgttagattatgaatcattgaataaggaacttaaattgttaaaagcatctctttgtgaatccatgaggctttatccaccagtgccctgggactccaagcatgccatggcggatgacttgttgcctgatggcactccggtccaggcaggagatagggtgacctattttccctacggaatggggaggatggaagcattgtggggggaagactggtatgaattcagaccaagccgatggtttgtcgaaccagcaagctaccatgaaggatcactaaagaaggtttgtccatacaagttcccagtttttcaggccggtccaagagtttgtcttgggaaggaaatggctttcattcagatgaactatgtggcagcttcat

SEQ ID NO: 5315 - DNA, 661 bp, Gossypium hirsutum
aaataataactagattacatcatatctacaattagggcgaaaaatatatgaaataatttttaaaaaaatttattaatatataatgaaatataattttgattaaaatgataatgtcaaaatatttaaaaattataatgttttaggtttaaatccctattttcacaatatctaaaaagcatcaaatagattgctttaattaagtttaaaaagattcttccttgttagaaacatgttttaaataatttaaccctgttaaaaagttaatttctcattagaaacatattttagatagttaaaaaaaataagaaacaaataaactttaaatttataaataaaaaaattttgaagcaaatttttgaaaaaaatggcatcaataagatctgtgattatgaactttacttttacatttttttacagaattataaaatttattctataataatttataataaattcttatttattggcaaataaaaaatttcaataaattcttattttcaaaggaaaaaacttataaatcctcccgagtctaactccatagatgttgtcgatcatgtacatacggaatcgaggcggtaaactatttagtcaacaaacaaattcatgatgaaactgtttttcagacaagacaagagtatggaattgaagtacttcactagct

SEQ ID NO: 5316 - DNA, 610 bp, Gossypium hirsutum
agactcatctttccctgcaacattcatctttgtcaaaggaagtttatcaggattagcaattctcataggagaagaagaaactgattctactggtgagcctttggtttcatggaagccaggttttgatttatgtgagccagaaactttagatgagcttgaggtagctgctaaagaaggttcagcagatccaaaatctctttttaatgagtccataccatctaacctctgttgggacagagagctacctagatcttgcccactttggcgattctttgtgtgtctaccctttttctccaatgtaccactgcttttacttgcagaggaatccttccctccagacttggatgccctggccttcttttccctcctgtagtcattctcgcagaactcttccttcacaaatactctgttttcctggaggtgattacccatactctggaaggagtctgtatacaattgactattaatacaatcatcaacttccctctttcttgaaactgccccaccatcacaatttgccagatccagtgatccatcagttaagggaaccccaactttggtctttggtcttttaccagagacctgttgcctgtccttatctgactttgag

SEQ ID NO: 5317 - DNA, 614 bp, Gossypium hirsutum
tggtggaaaagtacttggtttcttctattgagaccaagtttctgagattttcatttttgatttctcttaatgttggaattggcacttcttgtcaattagtgtctatgcaaatctaattttgtatatttggggattatactttttatgttttggttatgatgtttgagattccgaactgttgctttgctatatgcaattggctacgcagcaccagaattagtacaccagaggcagaggtgtgtctttcgctgtctacttgtactaggaaaaggtcctcctaatgctcatgtacggcttttttgggtgaactaccaaccttggaatatactacagcctcatttggtcaagactcgacatgctgagatccacttttacgacttaactttgccatcagttattggaagcaatagatgttgaaatcattcatttgaaaatgtacacataaccttttacatctattacttcccaataactgaagttgttgatgaaatggaagaatgtggatgattgactcattccatgcttgcgatagtcatgggaaatcttttgattacgcgtatatttttattttctaatgatattctcccataatgacaattggttgaaacttagga

SEQ ID NO: 5318 - DNA, 654 bp, Gossypium hirsutum
  misc_feature (635)..(639): n is a, c, g, or t
  misc_feature (641)..(644): n is a, c, g, or t
tgaatatcagagaagcctttgcaaagtatgctgctgctatttgtagtccagatatggtaattataggggttgatttttaactaatatttctgtgatctttagcagacgattgaacaaacaaaagaaaatgtagtaaagaagcaagcgttgacatatgaggaaatggaacaagaacgggaggaggtaagttaatctcttatggcatggtaattcaagtgtttctaatactagaacaaaatttcattgcttatattgtgatggtatgattatagttcactaatctctgccctcaacaccctgtaaggatggctgtaggtagagttttaaatgtgggggcctgtatgaaccaactcactaggtatcagccttgtttcaggtcttcagctcagttttgggtgtaactcggctattttttttctgagttttttacttaaatctgaagggcacattttaaacgggaggaattaggaattttagtattttacacaattcctatatatatcaggcaaaacaaatataggggatgaaatatctttgattgaatttactgattaatagaggagaaacaaccattgacttctattgttcactgaatgagtgttgtattgattggacgttttttttttcatcctaannnnnannnnaaaagggggg

SEQ ID NO: 5319 - DNA, 651 bp, Gossypium hirsutum
ttcaacccttttttcatgcagccaccggtggcgggttgtggaaagcaattcgcccatcagcactttcttcatctttttccattggtctccaaagggcaccagagctgttgttaagtagcctttagtggtgacatcagtggacatgctaactggcctcgatgcaaaaacagcgtcctggtttttcaggaattgacaactgatttcaggacaagtgatgacaattacatgcacatttccaaagcggatgcatgcaatgcccgtagtaatacccttcatcagttcatgtatccacctaaatgtgggcttgtttataagcatctcagggagatttcccacaataggccaaggtttcaggaggaggggtgggagaggggcttgctttgttttcccgttacctccagacaggaacttgaagaggaaatagaaagcgaatgccatgacagcaaaggtggagcagatgctcagaaaagtggcgaaagaaattgaggacacagtgatgaaacgactcaaggaagaggtgaagaatgcactagctgcgttatccatggctaacttaagaagggaatttctctattgtttttcttgtggtgaattgagatggtgagtgtcgatatttatagggaaatattggcataaaaggaatcaagagtt

SEQ ID NO: 5320 - DNA, 472 bp, Gossypium hirsutum
tgattgggttcaatccactttatcctgcaagaggggggatttatacaagaaatatcctggcccagaactaatagaagctaaatgctggaactgaaggtttaaagcaatacagtaactaataagtcttatgaacatattgaccaaagaggcacgagcatattaagcatctttatgctattaaatacaaaattaaatctaaggcttccaattcataccaccagataggggaaaatatcaacaagagggaggaagtaaaacattcctctttccgaagggagaaagaacaaaatttagtaatgtgcaccattaaacagatggacaaatgaagacactaaagttaatatgattgcaatggttgcaacagaaactctcagttgaaatgatgaaattttttatggtcgatacttgaattttaaactgacaatatgaaacaaaatatgaaagtatgatcaaggagcgagaaactaagttg

SEQ ID NO: 5321 - DNA, 677 bp, Gossypium hirsutum
gtccaagttgagtgctttaagttcatgttagattaattgcttaatgaattatctcgcttgataatacctataaaattgcaaagatttataaaatatgtagcccttttatctagtataactattttggtggttgttttgttgtacattcaatttaatttgtgttaggaattgaattttcatcactgaattttatggaattgaattttgtgtttagtgtgcatatcacaggtagctttttgtgccttttaatagtcataggtatctaagttcttatgttgtttatttgcatcttcgtacctaagtttttgatccaatccttactccttaattttccttttggagtaattggttgctatgttacagtatgttctcatggattgaacttctttaatttattgaagcttcctaggattgaggttgatggtgggagcactgacatgtgacaacttcttgtgggaaacagatgagaaacgaggttttatttttatctagcttaagtcaaccaataaatatactagttactcgcatgggaatgttttaaggtgctgactattgattatttgtgaaaagaaaaaaactatagattaggcattgtgaatttgccattgtgctcctacaggaaacattcgggtatttatacatattattacttttcatgatatgaccttacggttcat

SEQ ID NO: 5322 - DNA, 587 bp, Gossypium hirsutum
  misc_feature (60)..(60): n is a, c, g, or t
  misc_feature (488)..(491): n is a, c, g, or t
  misc_feature (524)..(535): n is a, c, g, or t
  misc_feature (559)..(559): n is a, c, g, or t
  misc_feature (567)..(568): n is a, c, g, or t
ctttcgcatcggtttgtggagattcatgttgatgaaataccagaagatgaattgagcacnattttgaagcaaaggtgtcagatacccgaaagctatgccaagaaaatggttgaggttatgaaggagttgcagctgcatcgccaaagcagcaaagtatttgctggaaaacatggatttataactccaagggacttgttccgttgggctgatcgcttcagaatttctgggatatcttatgaagatttggccagggatggatatcaccttttgggtgagaggctacgggttgaggatgagaaacgcgtagtccaagaagttttggagaaacatctacgtgtcaaacttgtcaaagatgacttatacaaatcggtatctagtcttcttgatctagatcatttgcataaagtttgatattattttatttatttatttgttttacattgctgtttgcatgctcttttcatggatttaccatttatggactacannnnagtttgggatttcatgttgatgcataatgggtnnnnnnnnnnnnttacattatatgtgtgacctatcnagcatttnngggagatttattgtttgtt

SEQ ID NO: 5323 - DNA, 572 bp, Gossypium hirsutum
agttttcccccatacatgccaggatatttccagaaaatcgattttcaccgaggtctaatagcttcaaactcctgcaatttgtcaaagatggaggtagttcactggaaaaactgttgttactcaatcgtaacgtttgaagtttgtgcagtgagccaaaagagcttggtattacgccggataaattattgctttccaagttgagaacgaccagttgtttgaaattcatccaacaatcaggaaggttgcctgatagctgattgtctgaaagatagacatgattgagattgtcattaataaatgagcaaaaggttgacagggttcctgaaaacatgttctttgaaagattcagtactgttgtgttgaaaagaaatcttgggatagagccatgaaacttgttcgagcttaaagacaccgaaggaaaggaattgaatcttacatgaagatctggaaatttcccacttagattgttgaaggaaagatttaagaacagcaagttggaaggtagtctccagaaccagttgggaatgttgtctgaaatctctgaattggagatatcgaggtgggagaagtcc

SEQ ID NO: 5324 - DNA, 670 bp, Gossypium hirsutum
catgatctaactgatgcatccgccatttgcaaatatcttgaatccttttatactttgaggaaggtattgtaattcatgtcctatatgaattttttaaagtgaataaaaaggaacaaaaaatggcataaattttcacttttaactgcatgcagccaatgtcatctacgataaatacactagccaatgttttacataaggtatttagtgccccgtccgatcctgcaatggagaatctgcaacaaacattgttggggtatttgaaacttggaggggttttttcatctggagtatcagctctgctctctggtttatgccctcgtccattaagcttagtatttcatttcattgtcatggcaatgtatggtgttggccagttgttacttccatttccttctcccaaacgcttgttggatggggctaaactcctttgggtcagtatctctagcaatgatcatttctcatatatcatgatcactaacacgataaaaatatataataattttaaaatgacgttatttttttttgttttttcaggttgcatcaagtgtttttctccccattatacactctgaaggagtcagacaaatgtttttccctctaactgtgccagcatattatagaactccccctaagggaaaaaaaatctgaaaggaaactccatgcatctgta

SEQ ID NO: 5325 - DNA, 617 bp, Gossypium hirsutum
aaacagtgcgttatgccgcaatcgtatttacctgtgctacattgcaagtagagtgcttcagcactaacaagttcagatatcaaatttgaacaagaccgtcatatgcgtcccgaaactccgcctcaaacaccgagcaaataccacacttcttgagaatccttcactgtctcgtgttagtcctctggccactgccacattgtcgacaaggcgaacaactccatcaatgttaaccttgcaccatcccactggttggcactgctatgccacaagttgtcttttaggtcttcgccgattctggagaccattcattccattgcccctgctaacccaaacagctttacccctcagccttgtattccgttccaactctcctccaatatctctaaaatgttcataaaaaagaatcagcttatttcttctttgctaaggattccaaaaaattgctccaaatagcaggtctcaattctcggtctccttagttaagtgcccaaagtactcttaagttgataaatatccaatccttaatatcaattgaaaggaagtcatccaacttacatggtttaacaagtgatgcctagaatgacatagccagaacgcactgacgtaatacatgacaa

SEQ ID NO: 5326 - DNA, 698 bp, Gossypium hirsutum
ttttgggttaactccacggtaagtccttaaactatgatattgattctgatttagtttctaaacttcaaaatgttataattaagttttcaaagtatcagtgtcaacatcatatcaattaggttcttccattagcttggtcattaaatacaaactcaaatatggcataaaacatatttaagacatattaattaaattgtaaaattgtatttacttattacatgagcaatttaaatgtaacatcattacatgtttaaaaaaataaatcacgtcaaattaaccaatataactaatgggaaaaaatgacttcatcattgaaaatgcacattcggaaaagtatagtactggaaaagactaaatttaatagagagattaaatcttcaaaaaaatgcatagggatcttttacggaatttgacctttcaatacctatggaatataagagtaatgctgagccaatcttttatgccatctctatcttgccttttctgtcaaatttcttggagacagtaaacaagagccacgttatttatgagttttgtactttatagcatgcaatccctggaacatgtggtatgggtgttttgtatagcattcgtgtcctttgccactaagaaactgtctttctttgtttgcttatttagcatcattcatttacatattgcttcccatagcataaccacaaatttatataaccccgttg

SEQ ID NO: 5327 - DNA, 634 bp, Gossypium hirsutum
tcttggcaagaacagtgagaataaaaagaaagaaaaaacagtatttataatagagaagcattgacagactaacaagtaccaagctggcaaccactgttcaaaagtgcataaacaattagagcttaacgattgcaagaaaacaatgtgtgatttgctaagaatgcagacgaacaaaagacatcatcaaaccacagctcaaaagatcaaagaataggtgcttaataattgaaaggagatcatatgcatcaatgtagagccagagtaaattttccttaaatagttaccgctgcattataagcggcagcctttactccaaatttgcagagatacttcgcaatgctcagggtttcctttcttgtgggaacatatatgatggtcggtccttgttccaatggctcttgcagaagcctcagtctttcttctggtttatttggtggatctattttctctattgacccatgtgaattccattcttcgcaatgaacttgtccagaaaattcaccataggcaactgaaaaataaaagcaatcaaaatatagtagaaatacagtgatgctggaatcttttcatgtctatagcataaggcaaataatagcatgcatagaagctcaaattaaagtatcagaagatgata

SEQ ID NO: 5328 - DNA, 588 bp, Gossypium hirsutum
  misc_feature (18)..(18): n is a, c, g, or t
  misc_feature (525)..(526): n is a, c, g, or t
ttatgtgttaggaacacnagttctaagaaaagttgcacaaaaacaaacgactagcaacaggcaaaagcagtggtaaaggaaatcattctaattgaaaggggaaagtgattttgacatcattgtgctatattcaagtcaaatggttctgggaaataccataggtcaaaaacatgattagcaaacagaatggaaatatgcggtacatttaacgcctaaagttgaagagtaattcaatgcaaatgcttactggcttcaaaatcacacgagcaatccaatgaaccggttcaatttcaatgtttaaagtccaaaaccatattactaatcaaacatcaaatgaacttcacagatgatataacccaaaacgatctagaaatcagcgttgaactatccacgacaaacattcacacacacacacacacacacacacaaaaatcagaccatcttcaatgaaaaacaccccattatgcccaagttttagagatgtaaacgatcggaacataaaagggtaattaacaacaagaaacnnaatgctgtcgcgttatcaatcaaattcaccacatcataaagaaacaaataatgataccaagt

SEQ ID NO: 5329 - DNA, 596 bp, Gossypium hirsutum
caattctattttgctgtcaagatgctgacatatttctggactttctattgcctaaacaggggaactgtttcttgtttgagaagctttgtttgtgcaaaatgtaagtagatatttatatagatctcaacaatgttaagttgttttcagatatgttaatgaatatgttttcattgataatgctcttagcctatcttacctggactcacctagtaccagatatcggcatatgttctactcaagttttctcatatacttataggattgtacccctataccccatgactaaatatgcttcatcttagacgttgctatatcatacccttgaacttactatttttcagtagattttcatctgttgtttcttatgtttcagcctggtactctctccacataaactgtgggggaagagaagtagatgttgctggaaatgccacatatgaagatgatacagatggagctggggcttcaagattttaccaaagcagaactaattgggcatttagcaccagccggtcacttcttggatgacgaccgtccaacggactcttatatttggacaaattcatcgaatctctctatgaatgattccagacttt

SEQ ID NO: 5330 - DNA, 535 bp, Gossypium hirsutum
  misc_feature (516)..(516): n is a, c, g, or t
  misc_feature (520)..(525): n is a, c, g, or t
ggttctggagagatgaagcctgcaatccttaaccccaagaaaagcagtccaagagccaagagttcttcgagggagtcatctctttttgcaggttcggatttgtgtatttcaaactctttttagttctattttttaattgaaaaaattttcctgaaatggtgacctttggacaccccaaactaattcccaataatgggttcctcccctggactttatgggttaaaaaaatttgaaggttcccaccttaaaaggttccccaaagggggggataccttataaccagggtcaaaaaaccaaatggtactgaagtggtttggctttgaatttttaccggggaaagtgatattaccaaaaaacccataaaacccaataaaggttactccaaaaaagaattgaataaggaaattgaaaaaatttcctccactcctggggccgaaaaaaaatgggccggaccccttggtggcctggcaaagggtgaaaggcctggttttggaaggttttattcctaatcccctncctnnnnnnaacctggtct

SEQ ID NO: 5331 - DNA, 206 bp, Gossypium hirsutum
  misc_feature (59)..(59): n is a, c, g, or t
attccccacctttccaaaatcaaccatcaccgagatttaaccttttgtttttaaaaganaagaaaaaacccagaaaggaaatctcccaatatcaacggaaccctatcaaattaaaagacaaaaaagaaattacacaaacaatcccatttgaatcaatcaattaaacaaaatttgttaattaatatttcttttattttctttttttt

SEQ ID NO: 5332 - DNA, 554 bp, Gossypium hirsutum
tgtcggtagagaaataaaggagaaagtggagagactgatgttgatgttcttcccaagaagcctgctaaacagtttcatgagcaggaaaatgggaacattgagaaaaatggaaagcattctgagcaaaagagctcaaagaagcagcaaaatggttcagttcaggtaagtttatgaatatcttctttacttgttgaacatttttagtaaattatgtgtggaagtaaaattccgacctcagtctgcttgttttctttctttgatttaatatgatttatgtccaattgactcccctttgtcatgtagaattctggttttacatattttgcatgtgcaatcaatatggaatgcaatgttttaaagaaaacatccatttaactgtatattaagtccccatttctgaagccaaattggtaatttcagagatagtaattaaatcttgcaggtgttcttcaccctctactataccttgcgtattgtgtttgttactaagtaagtctcacaggcttattgacttattctgtagtgaaactgtgaggttcataaatgaaggtgga

SEQ ID NO: 5333 - DNA, 618 bp, Gossypium hirsutum
cgagctcttgctattcggttaggatcaatgttggcaaaaactcaacaatggcggaacattatccttgaatccgataaccaaactgttatcaattgtttaaaaggaaaatgccaacctttgtgggaatttgttgctattcgagatgatatctctcattagctaacaggacgttgtaatgtcattttctcttacgctagtcgtttttgttacgaggtcccgattgggtagcaaagaatactaagaggagcatgtgccctctaagcaggttcttgcaattccctcatgagctcatttctcttctgtaacatgattttttctagcattaaagttcttattaccaaaaagataaagaaaagaaaaaccatagaacttaaatacataatatcaagtgcaatcatataactttaaatttgatttgatataattatatactatataattatatttacaaatcaccaactccaacattgatatatttagatttgttcataagaatgagtcattcacccaaatctaaaagcctaatcaaaatttgaaaaactttgagaaaatatactaaacaaaaaatttagacccacttaaaatataaactgggtacaagcttacacattcaaagcc

SEQ ID NO: 5334 - DNA, 1549 bp, Gossypium hirsutum
  misc_feature (506)..(516): n is a, c, g, or t
  misc_feature (523)..(525): n is a, c, g, or t
  misc_feature (537)..(537): n is a, c, g, or t
  misc_feature (539)..(541): n is a, c, g, or t
  misc_feature (543)..(550): n is a, c, g, or t
  misc_feature (557)..(560): n is a, c, g, or t
  misc_feature (564)..(577): n is a, c, g, or t
  misc_feature (589)..(620): n is a, c, g, or t
  misc_feature (632)..(634): n is a, c, g, or t
  misc_feature (640)..(642): n is a, c, g, or t
  misc_feature (644)..(646): n is a, c, g, or t
  misc_feature (654)..(663): n is a, c, g, or t
  misc_feature (667)..(672): n is a, c, g, or t
  misc_feature (684)..(686): n is a, c, g, or t
  misc_feature (689)..(693): n is a, c, g, or t
  misc_feature (698)..(710): n is a, c, g, or t
  misc_feature (712)..(712): n is a, c, g, or t
  misc_feature (715)..(732): n is a, c, g, or t
  misc_feature (740)..(748): n is a, c, g, or t
  misc_feature (751)..(753): n is a, c, g, or t
  misc_feature (760)..(775): n is a, c, g, or t
  misc_feature (777)..(777): n is a, c, g, or t
  misc_feature (779)..(784): n is a, c, g, or t
  misc_feature (787)..(789): n is a, c, g, or t
  misc_feature (794)..(802): n is a, c, g, or t
  misc_feature (807)..(811): n is a, c, g, or t
  misc_feature (813)..(817): n is a, c, g, or t
  misc_feature (821)..(824): n is a, c, g, or t
  misc_feature (832)..(842): n is a, c, g, or t
  misc_feature (846)..(847): n is a, c, g, or t
  misc_feature (851)..(852): n is a, c, g, or t
  misc_feature (858)..(863): n is a, c, g, or t
  misc_feature (871)..(878): n is a, c, g, or t
  misc_feature (881)..(881): n is a, c, g, or t
  misc_feature (883)..(883): n is a, c, g, or t
  misc_feature (885)..(886): n is a, c, g, or t
  misc_feature (892)..(903): n is a, c, g, or t
  misc_feature (909)..(910): n is a, c, g, or t
  misc_feature (912)..(924): n is a, c, g, or t
  misc_feature (926)..(935): n is a, c, g, or t
  misc_feature (939)..(940): n is a, c, g, or t
  misc_feature (942)..(943): n is a, c, g, or t
  misc_feature (945)..(948): n is a, c, g, or t
  misc_feature (950)..(953): n is a, c, g, or t
  misc_feature (960)..(964): n is a, c, g, or t
  misc_feature (967)..(971): n is a, c, g, or t
  misc_feature (976)..(977): n is a, c, g, or t
  misc_feature (979)..(980): n is a, c, g, or t
  misc_feature (989)..(995): n is a, c, g, or t
  misc_feature (997)..(1008): n is a, c, g, or t
  misc_feature (1010)..(1013): n is a, c, g, or t
  misc_feature (1018)..(1024): n is a, c, g, or t
  misc_feature (1026)..(1031): n is a, c, g, or t
  misc_feature (1035)..(1060): n is a, c, g, or t
  misc_feature (1062)..(1063): n is a, c, g, or t
  misc_feature (1072)..(1076): n is a, c, g, or t
  misc_feature (1079)..(1086): n is a, c, g, or t
  misc_feature (1088)..(1090): n is a, c, g, or t
  misc_feature (1092)..(1099): n is a, c, g, or t
  misc_feature (1105)..(1119): n is a, c, g, or t
  misc_feature (1121)..(1124): n is a, c, g, or t
  misc_feature (1128)..(1128): n is a, c, g, or t
  misc_feature (1137)..(1142): n is a, c, g, or t
  misc_feature (1144)..(1165): n is a, c, g, or t
  misc_feature (1167)..(1180): n is a, c, g, or t
  misc_feature (1183)..(1185): n is a, c, g, or t
  misc_feature (1189)..(1192): n is a, c, g, or t
  misc_feature (1194)..(1196): n is a, c, g, or t
  misc_feature (1198)..(1198): n is a, c, g, or t
  misc_feature (1200)..(1205): n is a, c, g, or t
  misc_feature (1210)..(1210): n is a, c, g, or t
  misc_feature (1212)..(1216): n is a, c, g, or t
  misc_feature (1218)..(1222): n is a, c, g, or t
  misc_feature (1225)..(1246): n is a, c, g, or t
  misc_feature (1249)..(1254): n is a, c, g, or t
  misc_feature (1256)..(1279): n is a, c, g, or t
  misc_feature (1281)..(1289): n is a, c, g, or t
  misc_feature (1292)..(1293): n is a, c, g, or t
  misc_feature (1296)..(1310): n is a, c, g, or t
  misc_feature (1312)..(1315): n is a, c, g, or t
  misc_feature (1317)..(1345): n is a, c, g, or t
  misc_feature (1347)..(1375): n is a, c, g, or t
  misc_feature (1377)..(1382): n is a, c, g, or t
  misc_feature (1388)..(1400): n is a, c, g, or t
  misc_feature (1403)..(1406): n is a, c, g, or t
  misc_feature (1408)..(1409): n is a, c, g, or t
  misc_feature (1412)..(1415): n is a, c, g, or t
  misc_feature (1419)..(1425): n is a, c, g, or t
  misc_feature (1430)..(1430): n is a, c, g, or t
  misc_feature (1433)..(1440): n is a, c, g, or t
  misc_feature (1443)..(1447): n is a, c, g, or t
  misc_feature (1450)..(1474): n is a, c, g, or t
  misc_feature (1483)..(1490): n is a, c, g, or t
  misc_feature (1492)..(1492): n is a, c, g, or t
  misc_feature (1494)..(1500): n is a, c, g, or t
  misc_feature (1507)..(1509): n is a, c, g, or t
  misc_feature (1516)..(1517): n is a, c, g, or t
  misc_feature (1520)..(1531): n is a, c, g, or t
  misc_feature (1533)..(1534): n is a, c, g, or t
  misc_feature (1536)..(1536): n is a, c, g, or t
  misc_feature (1538)..(1543): n is a, c, g, or t
  misc_feature (1546)..(1546): n is a, c, g, or t
aagttgttctattgtcttgttctacttcaaaatatatggaaatctgtttgcttatatatatactggtaccttctaagagctgttagtgctgaaaaaccggaccatccaatggaaccattttaacctggaactggaggcatgtccaatcccatgtgtatattgaaatcaaatattcaccagatacagtcttcttaaagttgtactaaaatcctttttgcttatatatgcttatactttataagagctaaaaaccggaccgtacagttggactgtttcaaatactggtgctttgttctaacagctacatatccagaaattgttagcaaaggaaacaatgctgcaagtgtactgtaccaggaggaggaatgaattttcttcaactcaacagcaaaagcttttggtttctcatgaatttaagatccaactggaagattcaccgttttttgtgccatttagaggttttttttttttttttggggggggggggggtgggaaaaaaaaaaaannnnnnnnnnnaaatttnnnttttgggggaanannntnnnnnnnnaaaaaannnntttnnnnnnnnnnnnnnaaaaaaaaaaannnnnnnnnnnnnnnnnnnnnnnnnnnnnnnnttttgtgggggnnnaaagcnnncnnntatacccnnnnnnnnnnaaannnnnncccccccccccnnnccnnnnnaaaannnnnnnnnnnnncnccnnnnnnnnnnnnnnnnnnctcccatnnnnnnnnntannnttaccannnnnnnnnnnnnnnnancnnnnnntannnccacnnnnnnnnnacccnnnnncnnnnnctcnnnnaaataacnnnnnnnnnnnactnntttnncctctnnnnnncccccatnnnnnnnnttntntnntctttnnnnnnnnnnnncccctnncnnnnnnnnnnnnnannnnnnnnnntttnnanncnnnncnnnncttcccnnnnnccnnnnntttannannatatttacnnnnnnnannnnnnnnnnnnannnncaatnnnnnnncnnnnnnccannnnnnnnnnnnnnnnnnnnnnnnnncnngccactctnnnnnccnnnnnnnnannncnnnnnnnnacccgnnnnnnnnnnnnnnnannnncacncattaacannnnnnannnnnnnnnnnnnnnnnnnnnnannnnnnnnnnnnnncannnttgnnnnannnantnnnnnnatacntnnnnnannnnncannnnnnnnnnnnnnnnnnnnnnttnnnnnncnnnnnnnnnnnnnnnnnnnnnnnntnnnnnnnnnaannaannnnnnnnnnnnnnntnnnncnnnnnnnnnnnnnnnnnnnnnnnnnnnnnannnnnnnnnnnnnnnnnnnnnnnnnnnnnannnnnnataacnnnnnnnnnnnnnaannnnannaannnncccnnnnnnntcctntcnnnnnnnnccnnnnncannnnnnnnnnnnnnnnnnnnnnnnncctccccannnnnnnncntnnnnnnnccccatnnntcacccnnaannnnnnnnnnnnanntncnnnnnnctntca

SEQ ID NO: 5335 - DNA, 660 bp, Gossypium hirsutum
ggggacctaacttaacctctaccaattgtttcaatgggatagaggtcatacgaggtcccaaaagtgattgttaaaccattcgtctactttgtcagctgatctaattttgcttgcagttggttttcatgaatggcacaatgaaatgatgtaagaaattaattccttgatttttctagtgtttttattgttgaacggtgggactacaagttgaaccctcttttgaagtgtatagtatgaagaggagggcatcctaggggtttttttaataaaaattattaattacgaaaatgataattggatctagattatttatgaaaatggggtgttttttttacagtaactttaggtgccgcttgacacattggtggcattggtgtttttttgaaaaaaaggtctgataggaaaaaaaagctgaaaaagtaaagaaaaaatgttttttaattggtgccgccaatgtttcaggcggcacctgcttgcttaaataaaaaaaagttggtttcctctctttttcttttcaactcgtctggtttggtaaatgaaaatgcagagaaaaggcacttaaaacctgagagtagaaatggttttcggtaaagtgaggtgagtgttattttaaaaacgttgagttgccatctcgctgttgtctggtgttggaaacaataa

SEQ ID NO: 5336 - DNA, 624 bp, Gossypium hirsutum
aattttatttatttatttttctgtttggcatcaaacttcttgaaccaacatgaaaattttccatgattgataaatttaatactttttatttaggaaataggagaaggctgaaagtaaatggcaatttgcttggagtggtataaaatgctagctttatactcatttgaccaataaataattcaagggtctcatgtgtgatcaaggttgcattcggagataacattttaagatgacaaatagaaatattgtggtgaggggggcaactctatgtgttgggataattcacttgatttctacaacgcacattttataaaaaaatttgttcgcatatacagaacatcagttaaaaaaaatgaagtgttgtgagctaacaaacttaaagcccaatcacacccataggcattgctgttcaactaaaatctctaagttttaactataatttactcaaactaggtgattccttgaatgtagaacctaaatgtctagtagtaatgtctctccttttctactaacattatcccatgtccttttttcagtctgaaagttgtttttttctatttaagttcactgtagcattaggctttactgtatttgttatttttgggttgtcttcattattgtgtg

SEQ ID NO: 5337 - DNA, 631 bp, Gossypium hirsutum
catttgttgtattttattttttactataaattcttattgttgtattttatgtgtgaattgccaaagaatgtaataatggaatggagtttttatttgattaatcacaacatgcttaattctattgaggtaattttaaaatcttgagatagttgaatttacttaataaattagtgttgacgttgagttggaacagaggtttttactaatcttaaaatatcctattggcagggtttgaatcttaaaatataaatcagtgtggggaagatatattataatctatgccaatgtgacgcttccattttataaattcaattgttgtgaaaaatctattataatctaattcattaagatatacgatttttactaataaaatttaatattaaataatctcataaattctttttttttcatataaagaccggtgctttaatcaaaatttctttttgaaaattacaagtgattgctaagacttatttaaaatcgtagttaaatttcttttggtacttaaattatctttttttttatattgtaaggaataaaaataataaatttggatagtgaattaaacattatataaatcaagagtgggggaatattattatatgatcatattgattctccttccctggga

SEQ ID NO: 5338 - DNA, 638 bp, Gossypium hirsutum
aaattcttgtgagccaaattcctaattatgaagacaaccaactaaagctctctatttctctgttttcttttccctctatcttttaccgtgtgatatcaagactggtgttttgatatatatatatatatattttaaaaatatttttaactaccatatatttggctcataattatattaattatatttttaattatgttttaaaaactcacagtactctataatatctccatcaataatatcatttgggttactgcttcacatatacatagacttgatcatgaatcggcccacccggcccgacccaaaggcccgcttaaaatgtgaaagagtttcggcaaaaatataagcccgaaaaatagacttggacaaaaaaataaggtccgtttgaaaaatgggctaggcctcgggtaaggtatttttagcctgagtccgacctggcccaaattcactaaaggacaaaaaaaaatctgatcttttttgttttgtttttcaatgttattttctttttgttttcaccctattttgctacaattttactattatgttgcaactattttgttgttattgtttggatattgtataaaacttattttattgttaattttgtttttattttagaggcacttgcttgttaagtt

SEQ ID NO: 5339 - DNA, 630 bp, Gossypium hirsutum
actaatagtacccacttcattaggcaaatgaaaagattctgtactcccggctataggcacggatgatgctcttctaccttgaaggtcataaaatattataggttcaacagagttaacggatactgatgcactatcagagtatgtgttaggaactgcttgatagtaaagtggggcctggtgtacagcaatttgagatccatcggcatgtccatagaaaccaccaacaggaatttcattaactgcatgtccataatactgataactggcatcaggataagttaggccgtattgttccgcgtaagcaagaggtgtagtctctatatgagatggggcaagaggataggaatgttcaggaggctcatcaggtggtgggggaggaacttgttcattatcaggaggaggtggtggaatttgttcagtatcaggaggtggtggaggaatccactcctcactcggaagtggaggaacagctgagtaatcagaagaagggttttgttgcatgagtggcattgcgattggtggtattacatcttcaacttccatgtccacatccatatcatcatcttctccagcatggacttcagtcttagaattttctccagaaagcgtatcaccatctaccagttcaca

SEQ ID NO: 5340 - DNA, 415 bp, Gossypium hirsutum
ctttttgaattttattactgcatcacccatgttaaagaagcagttgtgtaaggtggtttttatggtgcgagggcgacggagtgaggagcgatagagataagggagcaagggatgggtagtgatgaggattggtggttcatatggtgggtgttgggtaatgatgaagattgatggtttttatgttgcaaataaataaaaaatattttagactaattataaagaggttcctaactttagtcaaaagtaaaaaaatgttccatcaacaatctattagtgaattaacaaaatttttaatagcattaactaattcgaacaattatgagtagaggtgctcatgggccgggcgggccactcggcccaatagcccgcccgaaatatgggagggtttgggtaaaaatataggtccgaaatatgg

SEQ ID NO: 5341 - DNA, 604 bp, Gossypium hirsutum
attcttaaataatctctttgtataatctttgcacaatgagttttcttagagtttacacttttccactgttcaattttcatgaatgaaaaagcaggcaatcatttgccctttattcaattatttcattgtttaattggatagtttgatgtcaattaccataattttgaattgaaaacatgcatccagaaagcaggcacaatgaaggattattcaggtggtccacgaattttacatgttcctccagttaaggtcaccgataagattcgtttagatacccaatcttttggccaattctgatggtttgtaattaaactatcctgttattattaccaaaaaagaaaaaagaatctcaaataattaaattatttatattgtgttcatgttttacttgtatgatcatattgtatataaaactatcaagtccgtgcaggaaaaagaaaaaaaaaaaccacctatccccaaaaaggaacttctaatatttaaccaagggagctaaaatattacaaggacaacaatgcaaccataacatacggccatcaattacttcaattcttcaaaaaagttatgggggctgccctaaaaataaatcaaaaatcattaggcc

SEQ ID NO: 5342 - DNA, 621 bp, Gossypium hirsutum
gagcaaaatgaagtcgcttattcttctgaacatcatctctaatgcatcgaagtaagactagcctataaaaacgctctgccttcttagcacccaaattagaagcaaatattcttgtggcttggaacattgcattcggagaccactgctcaggttcagtcaagtacaaaacatcctcccagagttgcattgaaggaatgtgtttaaaggctttgggcatttacccagctgtgtatttgttcagaaacttggcaacattgcatatttaatccacatccagagttttaaggtttctgcacatccttgatataagcaaaagaaccatacatataaaaagatacgaaaattaccctttatacaaatctatgagggcgtcatcctacttgggcaaaggtcgtgtttctgcaattaaacaaattgaacaatcaagcaccactactagtctactagtacgtaaaattcttgctaacgtcattaaattagcaaagaaaaactaattttaacatttacctgaagcaacatttccatcattctccttgatcttttgaattataatgtcagcaagtgtcctttgcggaccagcatccttcgataagaatgcctcaagcaatttctcatcttcct

SEQ ID NO: 5343 - DNA, 659 bp, Gossypium hirsutum
  misc_feature (652)..(652): n is a, c, g, or t
ttatttgcttgctagtgtggctactggagacttctctaagtcagatggggcttcaccgattgattctccacaaagaaatacccctcttgttgagcattcttccacaggcaatgaaactaaattaaaaccttcgggggatgaggttgttcaaaatcggaatcagtctgttgagggtgcagatgatgagcatctaaagcagggtgttgctgctggtaattcatggcctaaaaatgcagaaagcaagactggttcctctctagagaaattaggagagctgaatgagcatttaacttcatctttgccaaagattgcagatcaatgtcctgaaaatggtaaattaaaggaaattgtgatggctgctttagtcaatctgccctctgcatgcaccgtggagaaaactactgatattgatgattccaaagagcgcttggataaaaagtctgatgaagtggatgatgattgctgtttggatgctaaacaaaaggggaacacttctgaggtaaatgaagaggtcatcgatccaggtgtaaaagtggagaaagaagtggttgaaggttcttcatctgtaccttctattgaagttgatgcggataataacaagaaaaatgtcactgaagattcggagagaagttcacagactcatcagaagtcngcgaatg

SEQ ID NO: 5344 - DNA, 332 bp, Gossypium hirsutum
  misc_feature (49)..(50): n is a, c, g, or t
taatgataaaatttttcgtaagttgacattaaatcagaattaaaatttnntttaatccataaaaagaaaatacattttgttttgttggttcatatgggatagtaccaagataatattaatttccagcccaaattattgtggtttcatgttcctgagaaactcgcacatacatgcgtaaacccaagatttgccaaatatttcccactacttattcaccataatagagcatttggactagacaacatccatgcggtggggggatttcactgcaggtcatactcataaggtggatgacccattccatccagcaaaattatccaaaaaaaaaaaaa

SEQ ID NO: 5345 - DNA, 463 bp, Gossypium hirsutum
  misc_feature (455)..(455): n is a, c, g, or t
  misc_feature (458)..(460): n is a, c, g, or t
gcagtcacgtacactgatttttgtccaggccaccatatacatgcaagttctatgtcacaaatgtgttaagaaaatatctagcatgctacatctgcttaggtggcaacaaataatgtaaacatccagaaaaccaatgatgatgatgatgatgatgatgtctcaattgcgtataaacataccaattttgactacataaaaaaggttaccttttagtcgtttaagctcagctttattctttgcatcgatatcgctatggttctgcaatgctctcaccatagatctatgtttcaaatgaatatcacctattgctaacctcagattcttaacatctgattctagttctatagatgttttctgcctgcaagaacctagcataacaagacattaaaacggttaactggataataaccactaaaaataatttactaaaaatttgggggggggggaggaagacnagnnnaca

SEQ ID NO: 5346 - DNA, 644 bp, Gossypium hirsutum
  misc_feature (635)..(640): n is a, c, g, or t
ataattaatgaaagcaactagaggtttttagaattttgaacaagaattcgaaggcatacctgctgcattataccaggtccaaactgtgggaaacaatgtggaatacctccactatccaaataaaaaaaatacagttagtatctgggtaatttaccatttttcatctgttattaacatgtttctaaattttggaaatgaagtggtttaagatcaatttctagccaaaagatacaaccataatctacttctttaatcagctaaattctagcaagctttaccaatggcttattagaaatcacaataagtagagtgagggatggagaatcaacctgattggcttcttcttgtcaaatacagcatcaggccgtacaaatagaaggtctctcccacttggaactttccaagatgtaatgcaaccaccaaatagataaatctcagcttcactaaaacacccaaaaacaaagacagataaaatttctttcagacccgaatcaatgaaaaaaggaaaaaaattagacccatcaattaaaccagcaagggagttgaataaatttggaaaagacctagaaaagaaaatcttgcaaaaagtgcgtcattttttcaaaatttgaagatttgaacattacctgccatgnnnnnnagtg

SEQ ID NO: 5347 - DNA, 642 bp, Gossypium hirsutum
tatatctttaataatattagatctaagctaacatttaagtcaaattttgatggctagcaatagcatggcaaaataatataataccctaaagtttaaaaatcaatttaaaatataaattataattcagggatatttatgcaattaactcttgttttattttccacaaaaaatcaaaattccttttattaaaaaaagaaaagaaaaaattaataactttcttttctttctttttcacttttttattagaaaaattgttgtgaacagaaaataataaaaatcgaaacttggtcctaccaccttttttttcttttcaaagatggcccaatcagttttttttcctaataacttttaatatttttaggaataaattatactaacagtcactcaactttgatcttgatgacaaaacagtcactcaactttcaattcggtcactatacttttaaaaaataataaatcgatcactaacgtgtcatgttggacatgaggagcagaagggtcttcttcttctaaagcaggccccttctttcttttcccctcttttcttcattttttttgtttttgtattctatatatagaataatctcatttggtagaatttgattttgaagttttattttactcattaaactgtaccaccaa

SEQ ID NO: 5348 - DNA, 615 bp, Gossypium hirsutum
tatggctcgcagcaaaaggacgacaatggagatgaggtggacggatacgacgagaccctttgtccattggacttcgagtctcagggaacgatcatagatgatgaaatcaatgcaaccatcgtcaggcctctaccttgcggtgttaagcttcacgcaatcattgacgcttgccatagtggcaccgtattagatttaccatacctctgtaaaatggacaggttagtcaaatgtttccgtatgtcacattttcctggcgatactaatttcgtaacgcataactgtatattgttccattgggatataatataggaaggggagatacgtctgggaggatcaccgtcctcggagcggaatgtggaaaggaacaaatggtggggaagtcatttccttcagtggctgtgccgatgatcaaacctccgcagacacttcagtaatgtcataatcatactccggtacttcaagcttgatcatccagtccagagttctaaaatgttcagtttatgctatgtgaaaacaggccttatctaagattacttccaccggtgcaatgacttactccttcatccaagctattgaatatgggcatgcgaccacttacggtaacatgctaaacgc

SEQ ID NO: 5349 - DNA, 627 bp, Gossypium hirsutum
tttaattaaatagcggaaagggaaacatacaaagtaattttgaataagaaagaaacaacaaagttcctcagatctttttttttagttttgtttaaactgggtttttttgtcttcagcatctatagatccttttcctgcataaacttgttctattctaggtttttatctctcttttacgactttctcttttctgggtttatgggtttttagttgtttctttgatggttctttttctgggtttatgggtttttagttgtttctttgatggttctagttgcatgtaggattaagcttctttttttatggtttttttccaggtctaaaagggtgtatgcatttgttgaagcataaagccttaaacttttttttagtaattttagagtattgggtctgcatcaaaacggagtttaaggattgacttttaaagatcagattttttttagaacactttcaggaggatttttgttggaggggggttctgatggggagccccgatgagcccaacataaagggcattgatgcgtcggtcggtggcttggtttgggttcgacgcagaaacggttcgtggtggccgggtcggattatgggccttgacaaactctctgagggctatttagtttctccaaa

SEQ ID NO: 5350 - DNA, 626 bp, Gossypium hirsutum
  misc_feature (427)..(427): n is a, c, g, or t
  misc_feature (599)..(600): n is a, c, g, or t
  misc_feature (619)..(622): n is a, c, g, or t
atctcactttctagattcctcttggaatgaatgcacatctttctgtgtgtactgtgtagtctcaagatgatccactttaaacattttttcttttttgccctcgccattcttattggcagaacaactcacatatagagaataatgttttttaagttctttttttgctttgccataccatctgcctgttgtgggcaaatttggatgtttgtgatctaaatttctttgttggatttgacaaggacccaccaaccttttttgattcataatctgctaaattgtatcgtctcatctccatagtgcaccaatggccaccgcaccacaaccctttctatctattgaataataatacataaaaaagtaaccaaatatatgtcccatttatacacctctcattgcctcctaatctctttatccccccccccccacncacacaaactccatttctttctctctctctctctcacacacacacacacacaaaaaaaaaaaaacccccccagggaaaaaatatttttttttttttcaaatactgaaccaaatatcggggaggtattttatttacaatcatgaggggttaccaccaaaaaaaacccccggannaagtcaaaaaaaaaaagcnnnnaaaa

SEQ ID NO: 5351 - DNA, 375 bp, Gossypium hirsutum
ggagcaattgcagaaatgtcaactgaaaaagaaattgtaaaaggaatatagctaccattttcattaccattatctgcctcatttcacaactttgtcaatagcttttagcttctttcacatcactcctgcagaacattggtaaacttatccatggctgaagcttgttcccttttacttctgcttgtctttgttctctctggtgcacctgttgaaggccgccatgggagtaaactctctcagaattactacaaatccacttgtcccgaagtattctccattgtccaagctgaagttgaagccgctttaaacaaggaacgacgcatgggggcatctttgctccgcttgcatttccatgactgctttgttaatgagaga

SEQ ID NO: 5352 - DNA, 684 bp, Gossypium hirsutum
  misc_feature (602)..(606): n is a, c, g, or t
  misc_feature (610)..(610): n is a, c, g, or t
  misc_feature (612)..(665): n is a, c, g, or t
  misc_feature (669)..(679): n is a, c, g, or t
agtgagcttatttcctgaccctaaggattcaagagcaccctgaaaattatccaagcaaagaaaacatgatgaacactatgaacagggacataggttgcaaaatagtagctggaacgaaaagcaggatacgatactaaattaggaagtactgaagcaacatccagatagtcttcatgctttttaaaggctacttttaacttttctaatacagaggattggcttcaaaaacaagctcctattccgtgccaaaagctaattatttactgtcattcatcatttaattatttatatgttcacttataactctgaatggaggtgcagaaggctcacgaaagagtaaagtacggacttaagttgaatttgtttgacctctatatatatatataaattaaagattcatggtgatcaagtgctccatgtaagaacaaaataagattttaccataggtagaagttgaaccttgcaaagccatatctaggacaaaataatgcaaataagctgacagcaaacaaagcagctcatcattgcagtaatatgccaagtgggatggcccattatatatgagaaaactccccccggaggacaccccacgaaaggaaagnnnnnaacnannnnnnnnnnnnnnnnnnnnnnnnnnnnnnnnnnnnnnnnnnnnnnnnnnnnnntttnnnnnnnnnnnttttt

SEQ ID NO: 5353 - DNA, 620 bp, Gossypium hirsutum
aagaaacaagtatataggcacctagtatctcatcgttcagctcttttcttgtttgctataggcaatcttatgtattaattaacttattaatgataatggaaaaaaaaggttgaaaacacatgtactcttacgtataatttaggtacttacgtactaaattaaagaaaatatattaaatataattttatgatttaagcctaaaacgagagaaataaatggaaagtaagagaaaatatgatattttctttgtttggataaatatttttttatttaagagaaaatacattttgctgtatgaaaaactctatttttgggattaaaatgtgaaataaaaaattcattatagtaaattttttcttccctttactaattttaattatttaaacaaatatgtattttttttcttaacctttctttataattatttaactgaacataatggaaagttttattcagactgaatttgaattgactctaatttcttatttattattccagaaataataaatgtttttaaatattataatattttataaacaaacttaaattaaaaatattaatttctactattaaaattttaatcggaagttaacctaaggatatccaaattcagtccaggc

SEQ ID NO: 5354 - DNA, 653 bp, Gossypium hirsutum
gcagttctacttaccttacattcatggtgaatcaatctttggggtgacaaagaaggttaatcacacattgatctttaatactttcatgctttgccaggtctttaacaattttaacgcaagaaagctcgaaaagaagaacgtatttgatgatatacacaagaataagatgtttataggaatcattggggtaaccattgttcttcaagtggtgatggtggaatttcttaaacgatttacagatacggagaggttgaattggggacagtggggagcatgcatcgccattgcagctgcttcttgtcctcttggttgggctgtcaagtgcttacctgttccaaagaaacccattttcagctatctaaaatggaatggtacgtgcttcggatcaaagttcatgaccaattttatatataatttcccataaaggtaaactaattagatgagatttatttaactcatttgaattgtttcggtccgtaaaatacatgaagaaactcatttaattgaagctttgatagtttagtgaaatataccagtaaaactagagttattttagtgaatattgttaattttaagggataaaattatatagagtttatcttaactgtcgatatattttaaattatattgttagatttggaagagctccacat

SEQ ID NO: 5355 - DNA, 678 bp, Gossypium hirsutum
agaagtaatgcatgttgccaactttttacaaagttgttgaatgtcaaatgacggatcattcaaagctatatcagaaagtacagacctcgcttctactaatccatgagatatactctccaaaattggatcttcactagtcataagtgaagccataagctttgcagcagccatcctttcctgatggtgataatcaagcggccaatcagcacataggaaaaatcaaccattttccatcattagcataaaaacaaataattccaacttggagagaaaacaagaaagatgcaagtagtataaaattaagtattttttaaagttttcattttctttcccgtcatttttcaatgaaatggaaaaaaaataccgtttctttcaaattttccacctttactaccaattttttttgtctataccttcaatttttcgtctttcctattttctatctaaccaaccaaagccaaagttctaatgatgcagcgtggaaataaagaaagaaagaaagaaagaaagaaagaaaacctgtcggggtgatcggactgaaaaagaaagtgaagggtccaagaatttttgtttttcattgtccttcttattgtttagttctaattcaccatcacatttcctttttgaattaagtagaaaataattagaatgtatgaataccaccatggaaataactaa

SEQ ID NO: 5356 - DNA, 677 bp, Gossypium hirsutum
  misc_feature (673)..(673): n is a, c, g, or t
gcataccttcgtttgtgtttaagtaggagtgaataactgatgataatgtaatgttaacaggtttcagggggcattagccttttctttgctagcaataaatcttacttgagtactaatatgtgcccttgttgatggacacatcaagaataatgaaataattaaatgtcttaaagataaagtctgatgggaaagatggaaccaagagaaatggataaaaacgactggaattgatgattactagattttggatagaagcaccattctatgttgaaatttcaaaaacttaatcatgcactgcatgggaaagtggaaggtgtagaaggaaaatcattgacattgatttatgataatagatagtagtaagaacagatggcataaccagtgccaacaagagccataaattcagggccattacctgatctacaaagcctccaaagtctgtgccaactaacagtcaagcttgctttaaggtttcatatctgtattttctctgaaatgtttccattttagcagggacagcataaatccagaattactatccactcaatgcatcatgcaacataagatacaaacgagtactctgtcttcctcgtgccattcatttgcctcaggacacattgctaatctcgtgaacattagcattgtgaggcgggagggctgtttgtaaaccttngaat

SEQ ID NO: 5357 - DNA, 635 bp, Gossypium hirsutum
gaaaaagaatagagaaaataatgcaagagataccctcttttctttccatcactttcattggtgcttgaagctggtttcttttcttcagagctagaagaagtcttcctctctgaaaagttcaaaaagccaaaaaacgtgtaaaagcttgcgcattacattagaagaatattaaaaacataaattcggatattcatcagccgaatttgcttcacttttgcagataatgaatcaattaccttcttttttctctggcatatatttggcaagtcgatatttctgtagagttaaaagattatatcaatattactgctcagaacatagcttaattattcatgtgagtgttgcatattgagtatctaaaatgaatacgttaaaaaatttcataaagtttttttttttttttttttatttgtttttaaaggattttggggggggaaaagcaaagcaaacttaattctaccaaagggccagcctctttcgattttttttttcaaagcccaagctggtttggaaaggaggaccccccaatggatttcaaccccaaaattttgtcctaaagtggaattgaaattttccaactttattaaaaacaaaaaaaatatttttttaaaaaaaaaaaaaaccccctttacccc

SEQ ID NO: 5358 - DNA, 462 bp, Gossypium hirsutum
  misc_feature (258)..(259): n is a, c, g, or t
  misc_feature (263)..(264): n is a, c, g, or t
  misc_feature (273)..(274): n is a, c, g, or t
  misc_feature (276)..(277): n is a, c, g, or t
  misc_feature (294)..(295): n is a, c, g, or t
  misc_feature (298)..(302): n is a, c, g, or t
  misc_feature (307)..(310): n is a, c, g, or t
  misc_feature (341)..(344): n is a, c, g, or t
  misc_feature (347)..(347): n is a, c, g, or t
  misc_feature (353)..(354): n is a, c, g, or t
  misc_feature (361)..(368): n is a, c, g, or t
  misc_feature (376)..(378): n is a, c, g, or t
  misc_feature (381)..(385): n is a, c, g, or t
  misc_feature (387)..(390): n is a, c, g, or t
  misc_feature (393)..(399): n is a, c, g, or t
  misc_feature (401)..(408): n is a, c, g, or t
  misc_feature (410)..(412): n is a, c, g, or t
  misc_feature (414)..(418): n is a, c, g, or t
  misc_feature (420)..(423): n is a, c, g, or t
  misc_feature (425)..(428): n is a, c, g, or t
  misc_feature (430)..(447): n is a, c, g, or t
  misc_feature (449)..(453): n is a, c, g, or t
  misc_feature (456)..(458): n is a, c, g, or t
aaaaactggttgtgaaaatctccaaatacagactagtaccgcataaatgaactgtttatcagtttctaaatataccaagcttacagaaggcagcttctatctgtttaaaagagaaaggatgggtttaggggatgggagatggaaaaaaggatatttaaccttggtaaaggttcctttaatttccccaccccgcaaggtaattaccccaaacttacggaatggtttacccaattgaagaaaagtaacccttttccgggnntggnnttttgtgannannagctattatgggatggnnaannnnnaaatnnnnaaaccggaaaaaccaaaccagaagttaagtnnnnccncctaanngaaggcnnnnnnnntttaacgnnnctnnnnngnnnncannnnnnngnnnnnnnngnnncnnnnngnnnnannnnannnnnnnnnnnnnnnnnnannnnngannnttaa

SEQ ID NO: 5359 - DNA, 604 bp, Gossypium hirsutum
ctcaaataacagccccctgctccgatattaattaaccgacttattttcttttgacgccaaataatcgccgttgtaaaaacaatcccttatttatcaatttcattccttctctttacattttttcttttctaattttttttccacccaatactctattcttttctctgtctacgtctcagaattctacgcgtccgatttcgattttcttttttaattgttcctagttctggaaatcgacagatcgaaattgttgtatgtcggtggcattatgcggcgattcgttgacaacgccctcgctgttaccaaagagtgagcccttctctttttacctgtccttgtatatatacgtgtatgcgtgcgtgtattttggtacatgcatgtgatgaatcggttttctgtatttatttcgttgtgcgatcattttgcttgcctatagaattttttttttggagattatttgattgatttggggttttagagggaccgtttttaggatttttattggcatttttttttgggaaaagtagtggggagcttttattagctgaatcaagttcaaggaaaaaaagggggagggggaaatcatttatggaatctccccgag

SEQ ID NO: 5360 - DNA, 609 bp, Gossypium hirsutum
agctgcttaagcatatacagcatacatcagtatcgctagcctgcaccaaataattccacagtgaatatatcaactccattattgccaaatggaaactatgttcaaattttactagcataacagaaacctagcagtcgattgctaaagaatagggtcaatgcaaaaacggatatgctaaagtatgaagtttatgctgtaaattggtatagcctcaagactttgtattacatctcaatttcgtaatggactgaactaatatgatgccaagacgagcaccattgaaaacctagcttgaaggcattttgttgataaaaccttaacaaaaaacagatacagtctatagctagaatggtttctgtagaagaaaatacattacttattttcaactggaaaagcaaatgattaaatattctatgccctctgtttgtattggtgagaggaaaatggccttctgtctaaataccaaaatgtaatagcttaaggatttaaattcatacgtaaaacaatcaataattctagaatcggtgcgccaacagcaaagtctggccatccctaaatcagacctcgaaatagaaacactagaaatgctggaccagccaaaaaataagc

SEQ ID NO: 5361 - DNA, 422 bp, Gossypium hirsutum
  misc_feature (26)..(26): n is a, c, g, or t
  misc_feature (287)..(287): n is a, c, g, or t
  misc_feature (402)..(402): n is a, c, g, or t
  misc_feature (405)..(405): n is a, c, g, or t
gatatgtccctctggattgcattggnataacaagttctaatgcaggttttagtgttttggttggcattgatgtctttgcaaaaatgttgcatttgtcccttgaagccagcttgtgtttgcttttccaagccctgattttttgctttaatggaaattgaactttaacatttattctatattttgattacttactaagagatttgcccttgaaactgtttaccgcttgagcatctttgttttcttctttggtttgtcagttgagaactaattgttgtactaaggcctgnaatgtagttgcgcttatttttgcttcacgtagcatttatgtgtttgctagcttgaagaaaatgtgatctatatttttgcattacagtgataatgggtattcatttgtacactccnaantttcttttcagggtttc

SEQ ID NO: 5362 - DNA, 595 bp, Gossypium hirsutum
agccatttccaaaggtcggggttttcctgcaaaagagaaagaaatatggcaaacatttggatagtaatgagatgcatgatttgttagatttcttccctcaaagttatagtgttgagaaagatcatttttatggtttcatatcactttatggatagaaatacacagttcactagtatgcttaatacgatcagcaatatcatgcattggaaaacacattgtcggtgcctctactatctgctgtgaatctctagggccaacatcattgattcattaaaatgaatcaattcaaaacatttcttacatactcaaaggtaccatactggacttaaatcactaaaagtaccataaaagcccttgtactaggagtcaaattgtattttgctctttttactcaaaaaacgagcaagttaatccctcttatgttaaattactgtcgaaaacctaacccttatacatcagcatgagatacacatggcatggcatgtcacgtgaacatggaatttttaatagtaaaaccactttgctatttgatttaacgtacaaggactaatttacccatttttagagagggcaaaatgaaatctgactgctaata

SEQ ID NO: 5363 - DNA, 597 bp, Gossypium hirsutum
ataaataaggcgaaaatgaggtagatgcatgcctacaaatctagaaaattttgccggtgggtcacataattttacccctgtccttcctatcctacggcaaccaaaccctgcctatcatagcaaaatagcagtacacctaatttattgccctatatgtattgttcatttctctataaagttgtgactttaaagcaagactattcttaaaaaaaattgcaccatatgaaaataatatcataataacaaagtggtcgatttctggttttatggtttaatccatttacctatttagtaggttgaaattgatgataaagcctctcatcaaataatgacatggatcagacattcagagctacgtgcatattcaatcaatcaaaaacttaaatttgtttttttttaaaattcatctaggcaacaacaaatataaataaaaaatatgtttataaaatattaatataaattacaaatgatattttggttagaatgttaaattccaaatataggaaattataatggtatatttttcagatataaaatatataaaatgacaagattaccttcaaaacaatataatttatgtgttaactggacacgtaa

SEQ ID NO: 5364 - DNA, 680 bp, Gossypium hirsutum
ggttcaaggtgaattaacgtgttcagataacattgcagttactatgagattttagtatctgttatccttgttctcatcctgtacctgtaactgaatatttatggatgctgatccgcggtcttgttgtgaaaataatacgctataggtaaaagagaggcatagatggtttttggtttctatgcagatccttggtggttttgttgtcgaaaaatgcaccccttgtgtggtgtatttatgggccaagcaagacatgcatatgaatattcttgtcctgtgcttttggtatggtgtaaccaatcacctttacaagtgatctgtatctatgaccttagtgttgtcatgttttcttgtttatttgcagggtttctgcatgccaatcatttcttagaacgtttgggagaaccaatgaaagctgaaggagaacattgtccaaaggaacaaattgaatgtgcacccggaaaaagagacaattctgatatggcaggaatagtactcagccatgttgttctgatgataaagatctgttcttagtgtagccacttctgaacctgtaatagaagcaaaaagtatgaagatggttgaagtgaagcaatattcatcagtttcaaaataagaagcaactttgagcaagatttacaagtaacaattattatgtagtggaagattgagatcatgtcgac

SEQ ID NO: 5365 - DNA, 640 bp, Gossypium hirsutum
taatcagcagaattctggaactttacttaggaaatcaaaggcttccctggcaagattttcctttcacatcaggatcaggagttacagcagctctttcaagacattccacagctaagaaaaacttataatcagactccttgaaatagcttggacatccctcacgtaatttaccacttatatcatccactgtccccctgccatcagggccagtataatactggagcaagaaacaacatttattagtgcaatccttcagaaactctaataaacatttagaagagaaaatcttgagacttaagaaatgagctcatttagtgaacttatactttaaataagatttacctccatcaaagcagaaataagtcttgtagcaaggcggtcaccctcctcagaacaaacaagttgatggaatgtcaactgaaccaattcctggcggatgttagcatcaaatccctgaaccaagcgtgttacatgatgctgagaaacaagctgtagtaaaaacagagcttcagcagacctaagaagcaactgccggatgcattccatcgccctcacctgtagcacaagacttgtcagaaacagatatgatgcctagtacataataaatggatgcaacaaattcttccccccctccttagta

SEQ ID NO: 5366 - DNA, 594 bp, Gossypium hirsutum
  misc_feature (578)..(588): n is a, c, g, or t
actagccaatttgttgggaaccagttttccatgcagagcgcatctacgatcggactccagttggtgttgtgatgggtctagcatggactgccatgggtggttccaccttgtacatcgaaacaactcaggttgaacaaggagaggggaaaggagcccttcatctcactggtcaacttggagatgtcatgaaagaaagtgcacaaattgctcacacacttgctagagccattttgctggagaaagaaccagctaacccatactttgccaattccaagcttcatctccatgtccctgctggggccacccctaaggatggacccagtgctggttgcaccatgatcacttccatgctatcccttgccatgaagaagcctgttaggaaggatctagcaatgactggggaagtgactctgacacggaaaattcttcctattggaggggtaagctaaactgaccccccccttttttttttcccttttcaagtaatatgtgataacatcataattagttaattactatgctaaattcttctttctgtgaccttactaaagcaacattttaaatctatagggaagagnnnnnnnnnnncccccc

SEQ ID NO: 5367 - DNA, 640 bp, Gossypium hirsutum
cccaatagcatgaaatgcgagtgatctctcatcaaagcaagaaatacaggtcactaagggatgagcagaagcagcaagagcaaggggggatgacctggatcctggagctacacaaaaatactgcaatgaagaattatcaggctgatgcagcagagtatagacatgtcagatcagggataaaactcacggtcaaaccaaggcgaaaacattcttcaactataagtgaagcccaaacagcattgatattagcacgatcttgaatggtataggccatttcactggcatgatccaactgacaatcagaaagagacataaaacttcaacaagcatcatccagtttgtttatggcaacattctatacaaaggtcctattaccacatcattttctgcattgacttggaaaaacaagcagattttgggttattatctttgatacacggtaagattaaagatgatattgatacctttattcggtcaaaataataaatagccttcaagttctattacatgaattgccaaagcaactaattgcatgcatcttaattattttattcctacttctttggataaacaaaactactcgtgcaaaaatatattatgccatgtttccgttcaatccgcaaagcaccatcatttcttt

SEQ ID NO: 5368 - DNA, 511 bp, Gossypium hirsutum
  misc_feature (488)..(495): n is a, c, g, or t
cgtatcggtatcaatgttttccgttgtaatatttttggtttaccaatgtgcataatatataaaaatgcaaatagacttcaattacatgcatataaatcaaatataaattttaaaattattaattaattaaaaaatataatattttatctctaaatatacttttgaaaaacaaaaattgtctaaatatcgaatctagtatcaaccaagatatattgaccaaaagagactaaacattccaaaacaatcgaaatgcattaaaattttgatagaaaaaggactttaaattagttgataccgatttaggattaggattaaaaaaaaagcatactaaatgggtaccaaaagttacgatacacgtgctcagaaagttaaaaccatacatgtgcagttatgaacatgttgtcatgtgaaattaaaatctcaaacggaagatggtacacatcgccgacaaaaattttaaactccctacaaatgaaggcctagtcaannnnnnnnatttagaaacaactaa

SEQ ID NO: 5369 - DNA, 365 bp, Gossypium hirsutum
  misc_feature (316)..(317): n is a, c, g, or t
  misc_feature (319)..(322): n is a, c, g, or t
  misc_feature (324)..(328): n is a, c, g, or t
  misc_feature (330)..(341): n is a, c, g, or t
  misc_feature (343)..(343): n is a, c, g, or t
  misc_feature (348)..(356): n is a, c, g, or t
tgttgatagatgataatgctgatttctgtcatcttagtctgatgacgagcattttgggtttttaaaaatagaccatgggagttagctttcaagaaggtgtctcgtgaagctaatcaagctgcggattttacggcagtcctacattccagagatcacactttgtgtaacaggtttgagcagcctccgcaagggattcatgctatcctcaggtccaatgctagagctacttcccctgagagaagaagtcatgcatggtctctcctagagcttagctctcccttttccaaaaaaaaaaaaaaaaacaaaaaaaaagggnncnnnnannnnngnnnnnnnnnnnngnatttnnnnnnnnnaaaaaaaaa

SEQ ID NO: 5370 - DNA, 523 bp, Gossypium hirsutum
ttaaacatgcacgaaagattctctctgctaattatagctttttgtcatgcaggaaaacctgaaattattggttaaacatatagttgattcattttggaatcagttggtaaggtttgagcacttgccttctcttcagtcgttcaaagtcaaatacaagcaggtattccagttcaccagttttccaattttacaactatgacgcttagatctgcaactttgatatgacctgtctgtttgcagttcttggaaaattgtggacccgaaatgaatgttaatgcaccggacccaagaaaacggattgatgagcgtgctttggagaaagaagaggaagactattttaatgaggagaggtatgccttcatcagataatgagttgtcaatttttcttatgccatttcttgtatattgatagaatatgtttggatgttaatcagtgatgaagaggatacaacatctggatctcatcctgagaaagtgcaatctcagcctgttttatccaatggagttgctgtcagctgcccat

SEQ ID NO: 5371 - DNA, 278 bp, Gossypium hirsutum
ctgcttgcagttagccatggagaataaattgaacaaattgacagatggttgaggcaactggatacgccaaatcaagctaactaaactgtttaagaaaatcaagaataattcccaaaattacataaaaaaagtgatccaatataacaagcactgtagctatcacttaatcatagttattgtttctaatgttatttgggttaagctaatgaaccagtgacaagacagaaaactatgactgggagtgaggttaaaaattttgggaatagcaccaaaaaaaa

SEQ ID NO: 5372 - DNA, 636 bp, Gossypium hirsutum
tttggcgcgttaagatttggattttttttggtgtcatgttgccttgtttcagttcattactttggtctgaaacttcttgttatgtttttatagctgtatacctttcctccattgatgaagcttaagctcaacaatttgcttgacttgctgtttatttaagtcccattggtttgaagtgcaacagtgtaatgagtttcatttgcagccttattagcgtcttttatttgttctgcatctacacggtctcgaattagtgtctttgatgcaagttgaacctggagtttagctttactggttcatacagtgacctttacgagatgacgtccaatataaatcaataaaatacttttcatattgatgaatcaactatcaattgaataaaaagttacgaaatagtgtaaaattatttaagttttacattggtgcaagtggatttttctcccgtatatttattcgatgtaaaaaatagtttagtgtatttatttttttaaatttatacaattgaattaaaaataaagtttcatgtatatatatataaatcaaagtcaaagtttcattgtatataaataattgcatattggagccagttgagtcttaattcgattgatataaccattgttatcaatgcaataggct

SEQ ID NO: 5373 - DNA, 612 bp, Gossypium hirsutum
tttgctgattgctaaataaatgatatatccaaatagcaacacaaatcaatgcatggaaaagcttgtaattaaaaaccaaacaatgttttaattgggacagaagctacatgtatataggcataaatgtaataaaaacctcaaatgaaaagaaaatgattaactaaacagtatcattaatcatttccacaatgaatttcaaaagatgaaagaaaatatctatgtacatataaaacatgacataaacattttcaaacaatgatcagagtcatatatgaaatcatctgtagatcattaagacattaggtaaacaaagttgactaattttgctatcttttctctgaagaaattattggatttaaacatgaataacatccaattatatattttctaagactaatactacataaatagatttttaaaaaaaagacctacaaataaaataaccatttccatatgatacttctaagacaccccttttattttagaaaatatagtttaagaaaaaaacattgttttataccctctattatgctagctgtatggttaaaacttctttcccagcctcccacgatcaatataatttttcttatgctgctggattatgataagcag

SEQ ID NO: 5374 - DNA, 656 bp, Gossypium hirsutum
tctatatcaactaaaatatacatatatcatgcaaaatgtgtgttaaatgagtcatgtttcatacattaattcgcgacacatttaattatttaatacctacattaaacaagaaagttaatgagttacacgaaaacatacattcaaaaattacaaaatatcaggataacttctctaatagcttcacttcatcactttctctttccccttgctagaacctactttagcaagctcgttctcttcataaatcatataaaagatagggagaatatttgatgtattgttggtacataaatcttataacatgacacctcatcattaaataaaacaaaaaaagtggaggatatataaataaatactaataactttatttacacataattaattataaataaatgctaaaaccctaaatatttaaatccaaaatcataattccgagagttattaatattcatttaataattatgtttacataaaattattatttagaactaaaagtcttccatattttttatttaatttaatgatgacatgtcatattattattagagacttatatatcaaccgcatttcaaatatttttcctaaaacatataggaacacattaatacgtcatgtaacaaacattaagtagccatgttaatggctcaacgaccaaa

SEQ ID NO: 5375 - DNA, 602 bp, Gossypium hirsutum
gagattcggtgaaggaagaaatgatcaaagaattaatggttgggacaaagcgaacaaaagaatttcgagaatggctgatcaaggtgagcgagtttgaaattaatgcaagagaattactgcagtttcatgagaagacttcggataacttgaggttttccaagaagcaaccacatgctgatttgatgaatgtgcttgatgaaatcacccgtctcttggagagttctccgttgcaaagggcaactagaacaaggagttcttcaatgattgagggcaagagctttggacttgctgaaagaacttcaaatgcttacttgaggagcaaaactgaagatccccttgacaagtatctagaagatggaagatcttgtgctacggggaaggaagttgaaagggataaagagataccacttattaaatatggtaggaagttgcgattacaaagaaaagttgagggagatcagaagccaagaataaggaccagaaaaagaggatcatctcaggcggagaccaaagatggatcaactacaacagttggatcaatgattgacatggaagctcctttatctggtaattcaggttctttttggttgaaaccttcattg

SEQ ID NO: 5376 - DNA, 632 bp, Gossypium hirsutum
aaaaattaaataatgcaaattatttattcgactttttttatcggttgttaaatattaatcttatactctacaattacaattttgcctcaaaagttacaaaaataaatctgaaataaccatattaaaattgtcttgcttactctttaaaaatacataaattatttatgtacattaaatcataaaagaaaaataattagattacaattacacagttttttttattattgcaacaatcgtatttactattgacaacaataactaatcgttttactacaatgctcttcaaaagagataaacagtacatctcattctgacataaaaaccaactattgagaataaaaaattaaagaagatgttaacaaaaggatcaatgtattctttaatctaatctaaggttcattgattagttaacgttaattgatcaatttgcatgatcaaagctgatgatagtaagctatgtcctcaatcacgatgtcaaataaaactatccatggaatcgtgcaccgtgtgaaacaagaccatcacattcttaaccaactcaggttaagctccatctcggaaccttgtggggttaagtgtaaagctacccgaggttggtgcatctcattgggaaacccaatatcttccttcaa

SEQ ID NO: 5377 - DNA, 610 bp, Gossypium hirsutum
tggctgctaaaacttccgagtttaagaaacggttgaaccaaggagaggctgtttcggatattcaagctggttagtctttattaatgcttctgtttcagagggttgatttatgaaatttgtatgacaattaatgcttcttttattgattgttatatagaggcatttgctgtggttcgtgaagctgcaaaaaggaaacttggcatgcgccattttgatgtgcaggtattgatcattttacgtataaagattaaagaccaaagcatgtatgactgtgcggtcatttatctttgattacatcactgtatacaggtatcttttctttttaaaattcattttgaagtcaggtattaatctaaagatcttttactggtagattattggtggagcggtgcttcatgatgggtctattgcggagatgaagacaggggagggaaaaacattggtctccacattagctgcatatcttaatgcacttgctggtgatggtgtccatggtatgctctgcattcttcctctttttggaaaagaaattaatctaaagatgttattctttattgtttctgttgatattctaaaagtttgactatgaggctcacaggtttgtgtgtat

SEQ ID NO: 5378 - DNA, 603 bp, Gossypium hirsutum
aatcgtgctgtactaagtggattggaggagtggttggtacatgcctttgtattaaatgggagcagaacgacgagcgaagttgctaattttcttggtaagatgcatgtggaaaattactttgattgggaagctagcttggagaattatttcgagtggaaacctttggtggaggcttggaagttgtcatttgtgaaactaaaattgaaaggcactatgcttcaatggtggaaggaagttgagcaacatgcacgctaaggtatgcctaaagtcatcacgttggaacacatgaaagcgaaattgcacaggcaatttctaccaactgattatgaaatggagttgtatgagaagcttcactcattaagcaaaaaggattgtctattgaggagaataattctaattttaacaatctttccattttaggttgaatgagagtaatgaacagatgtcatcttattatctagcagggttgaaccaatatatcaagatgaaatactagtgatttggttattcaacattgaaaatgcacgaggccatgctttaatggctgagaagcatgtttggtgatagattgcaagaaagcctatgtctggaaggattgatgga

SEQ ID NO: 5379 - DNA, 650 bp, Gossypium hirsutum
tgacttaagtctgttaagtcttcttctggattttgttaaggtaaaaaaatcaatctataaagatagaagtatactatattagggatgaaaaaaagcaacaaatgtaataagtcttttgtcaccatgtgcatggtttatgctaatatcttttatctttcacgtataatttaaatctagggccttagcgtaaggtaaagtgccctattatttgagtagttttgttgctgcttctgttgtcatttgaaaatatgatttccaaaggcaagtattaatatgaccatggtcctctcttgctcttgaattgaagaaataaaagaaaaaggaaagtttcttgtgtgattgttaagcatccaacctgaaaccaattgccaataggtgaggggctcaacttggatataaggtcacaagaaacctgatatttattagatgtgatataataccaattaacactcccctttatgtgtttctcaacaagggcctatatgtggacaacctcacaaggggtctacatgtggacaacctcacaaggggtggttgaccccgtatggggtcaggcaggaagaatagatcacgccttgggtctaataccatcttaaataaggtgatgatagtcctaaaagcttaagcatataggaaatggtccaaccata

SEQ ID NO: 5380 - DNA, 646 bp, Gossypium hirsutum
  misc_feature (10)..(10): n is a, c, g, or t
  misc_feature (380)..(380): n is a, c, g, or t
  misc_feature (584)..(584): n is a, c, g, or t
  misc_feature (589)..(589): n is a, c, g, or t
  misc_feature (600)..(600): n is a, c, g, or t
  misc_feature (602)..(602): n is a, c, g, or t
  misc_feature (605)..(605): n is a, c, g, or t
  misc_feature (614)..(614): n is a, c, g, or t
  misc_feature (617)..(617): n is a, c, g, or t
  misc_feature (619)..(619): n is a, c, g, or t
gtccggtttngatttgaaaaaaaactgctgctttttttttattactattttttcattgttttgctatcatttcactattatattacttctattttgttattattgttgggatattgtataacttttgttttattattaattttgttattagtttaaaaatatttacttgctaaattacacttatcttaatattatttaactgtatatatatttttaaatataaaaaaatttaatatggacaagtcgggtcaaactcaaatttaatatttttaacctagccgggcttaagcgaaattttaagctcatttttcaagctaaggctaaaaaatgagcctaagttttttatttaacttgacccggtccatggacaactctagtcncgatatatcaggacatgaagactcttgtgtaataaaaatcctggaaattttgctcttttctctttcaaatgacaaacaaggaaactgttaggaaatgtttatttctaactcaaaaacattgatacaataggtaacaacctggttcccagaaaaaaacactaaaaatcgtaaactaattttattggacttttttttttccttttncctcnctatggaaagnanaanctaaaaaangantntgatttttctttcccttaaccatataa

SEQ ID NO: 5381 - DNA, 632 bp, Gossypium hirsutum
aatctgatatgtttgcttgtttttcatgaattcattcttcataaattgactcatctatatatttggatttcacatttcaattaacctatcatttaaaattttatatttttataactgtgaaatagttgatttgtctatttcttccagagatctcagcttcaataatttggaaggtagcgtttcagattctgaaagccttacaaaaacacagtacatgtaagtgctatgaattcttgagatgtactcacccaaacccagattaaccaatatgaagatccctatgcatagcatgctgtagaaataatactcaatctaggtagtgtttttgttcttatcattagttaatcaaaagttctaagtttattagaattttttttttcttatggtaatagagaacattttcatttgtttattttacatgaacaatgcacattttggaaaatcatggataagatcaaaataaaactagcttactgatacttttacaacttcagaatcaggaaggaaagaacaaatctgcatgcattaatatcctcatataagttctaaatttgcttgaacttacttcacttctaagttccaattaaatccttccaatatagttccagcagaagtgcttaactgtggtgtgc

SEQ ID NO: 5382 - DNA, 430 bp, Gossypium hirsutum
ggttatgttattgttaagagtttcatttgttctatctttagacttgttatcatgcttaaacatatagccagcttagtccttatgtagcaggtggcaatggtgctcttctcttcatgcattggacataatatatggtacatactgtctttgggtctgagccagtttactgatgatggcattaatttggctgtgcaggtttggcgtgtgaatggccaggaaaaagttctccttccagcttctgatcagtcaaaattttacagcggggattgctacatttttcaatattcttgccctggagaagacaaagaagagtatcttataggaacatggattggaaagcagagtgttgaggtgattaaacattctatgactctctttggtctctctgttccgaaaactattgagtgcctttgtctttaaaccataggtt

SEQ ID NO: 5383 - DNA, 620 bp, Gossypium hirsutum
tggcacaagatgagccccatggaggtcgatcgattagatgggaattatttagctcatgggaactggcccgattctaagaactgttggagaagcttgttaggttgaaacctggttggcccgataatggagatatgtcaacataggctatttttagtaagtagaggaatatatcttgtagacttgatatgatatgatctaatcttgtaaatctcaaaattaagagataggttaatctcgtctgtcgatgtaatttgatcttaactgtcgattttggaggagctcaactataaatagagagagtattcctcaaatactttgtgtgcattcctctaaaaaatcctcacttttgagagtaaatggtcacttttggaggagccccgtgacactagagtgatgataatttaattcttgttattttatgaagattaaacggtgaaaactataacgcatggtaagtgtagaccaagacaagcatggaaggcccaggaattgtatttttgggtgggccagatgagttggcaattttacccaaataaatttcctgaaaaataatattccctgcccttcagtagaaattgtgtttcgtcgagagagaataacagagggaaagctttaagcat

SEQ ID NO: 5384 - DNA, 728 bp, Gossypium hirsutum
  misc_feature (26)..(26): n is a, c, g, or t
  misc_feature (607)..(610): n is a, c, g, or t
  misc_feature (612)..(693): n is a, c, g, or t
  misc_feature (697)..(698): n is a, c, g, or t
  misc_feature (704)..(715): n is a, c, g, or t
  misc_feature (721)..(724): n is a, c, g, or t
catgcattggggacaaggatataccnggtcccataaatcaatgctttcaaagctttctgagttggtgaagctccacctggaatcacttcagcagatgcaatggattcctctgagaagtcatagactgatattgcacgaccatacaaaatgattccaattctagttgttggtggcagtgaatcaacgaatgcatgcaaggagctctgtaaatactgaaggtgttgctcatctaaacattcatctatgacaagaacaactggtgcagaagttcttgaatcagtaaccagaacaaaacttggcctcttattccctgtttgaatgaaatcaaccaaaggtgatgataactcaggaaaattacgaagctcttccttgctcaatgctatgtattcaccttcgcttccatttagattcccgcaaattacacactgccattggcctgagccaattagtatgttggagtataaattcgaataagctccacaatcatggcatcgatgaggatcacgttgtatcacttggggacctggtgaagtgtccctcccaggagaaaccagtactccaaaacctaagctaggtacgtttgcttgtttcttgtgtttcaacaccnnnnannnnnnnnnnnnnnnnnnnnnnnnnnnnnnnnnnnnnnnnnnnnnnnnnnnnnnnnnnnnnnnnnnnnnnnnnnnnnnnnnntttnntttttnnnnnnnnnnnntttttnnnntttt

SEQ ID NO: 5385 - DNA, 630 bp, Gossypium hirsutum
tgctatggtttttgcaccaaatatgactcaggtatatatatatttgggacgttgttggattaaagattgtaattaaaaactgtttttgtaaaaataaagcatttgatgtttgattgtttttctctcttggaacagatgtccgatccgttgacggctctgatgcatgctgttcaagtaatgaacttgctcaagaccttgatcatgaaaatgctacgagaacgagaagagaccgcgagttcatctcgttcattcgatcatcacacagacgaggagttcgattgtcatagtttagatgagatggatatgagctgcgaagggcctatatctgattacgataattccctttacggtaactataacggagatgacgaggaagacggagtagaggcattcggtgaaatagaggaatgcttcttgaggcaaccggatgatgagaataacaaggacgccacctatagttttctggagaaaccatctgatgaaccacatacaagtactcctccaggaagttggacgggctgcaatctcgagtccagcatttcatttaccgatagcaagaacgagaattcgggctcaactacaagtgatggcgaggacaatgatggtgtggatgtgatggacaaactagtc

SEQ ID NO: 5386 - DNA, 643 bp, Gossypium hirsutum
tcttggcgtcaatgtttcaactcttcatgctcagatgcagcagcgagctcggttgaaggtttcattcccctgactacatttcactgtcttgtacatagtctgaagatatttgggatttctacatcttttataattgcacatcgaatcctttcatacccaagttttagccatcatttttgcttgaatgtaaccctgtccggttctctttttgatgcaggccattgaccgttttcgtgcaaatgaacatggcattcttgttgccactgatgttgcagcaaggggccttgatattcccggtgttcgaaccgttgtccactatcaacttcctcattcagcagaagtatgttgaaatttgatgcccattaatgagatttcgttaatattcccctagtcttaaaatctcaatattgattatatttttccggttgtaggtttatgtccatagaagtggaagaactgctagagcctcttctgatgggtgcagcattgctcttatctctccaaatgattccgcaaagtttgcctctctttgcaaatcatttgctaaggtaccgttttgaaggaaaatttcctgattcttatctaaacctagttgttgaatcaaatttatcatctagtagttggcttacatgctttacgagtg

SEQ ID NO: 5387 - DNA, 663 bp, Gossypium hirsutum
ctaccacagacccctctcctgatttattccaactatcttttctgccattcacgcatctttggcaagaataaatctctaccatgcatacatcatgatttgaactaacaacgtgagtggtgaagtctgtatttaaaaaaaagaaaaagaaatattacccttttctactttacaaagccataaattaaatgaaaatttacttcaattttgaacttttctattttttatcaaataaaatgattttttatctttcctttataatttacttcaattttgaacttttctattttttatcaaataaaatgattttttttatctttcctttttttccttttatgggattgctgtaatttctagagatgagtatggaaacttgatccatggatcctattcatggagcagttaagcttataagttattgttatgtttgtcttaaaagcttgatattatgaacaagaaaagaagaaagtaataattgtcataattgctttcacgaattgggatgtgacctttcaccccactcagccgtcgatgactgttgcgttcatgcaatcaagctctgtttcaaacatctcatatatatattcatgaatttgtggaattggactttaatccttgtgtcatcctttgtcgtaggaaagactatacctccattggacattgcaa

SEQ ID NO: 5388 - DNA, 599 bp, Gossypium hirsutum
gcaagacagcaacatgtttttcttttaagctttgggtcgctgacatttaagaaccctattttggtgattgattagcgaaagagaaaatacaaatatatgaagattactctcatgggtatttacacaaaaaatagaaaccaaaagctttgaatgtgaagttattgcgatagcgtttgctaataaatttaaggaaaaattaatgttggttttaatttacgttaaggaattgctggtggagagagcaatatattttacatttattaatacggttaatattatcatctaagtagtcggaacgtgagttcgaatgcattaaaacatattatactcctatttataagttaagaaaggattataaatagttcttctccatcaaataatttcaaattaataatttaaaagaagtaatgttgaatgtgattgttacaatagacaaactttttatattattattatttaatagtcacaatagtcgatcttaattccaccatgatttttaatttcattaaaattataaaatgaacatttgagccaataaccgtatactacaaaactagacagtaatggttatcttggatgaataacaatgaatcgcaccc

SEQ ID NO: 5389 - DNA, 587 bp, Gossypium hirsutum
cctctgccgaggtttccttttcctgtttcatgctcttgatgtgtgaatgtttcccattttatatgggagaataacattgtttatgattgtgctgattagatgatggaggcatcgaaggaattggatgagcttcttcgcaaaggatatgaaaatggcagcgttaatgaacaggctatttcagatatatgcatccagtttaagttgaataagatcgatgttttgaagtggagagatctagtgtaatttcactcatttcttcttgttgttatccatttggaatatttcattaattgcaatttaatattcttttttgcctaatactctaatctattaatattgtattagtgtaaaaattaaaataaatttacgtaatattttgtacaattgttatatctatgaagaaaaaacattcggcaaaatatatattgataatgatggtattgaattgaaactaatacaattatacatctttcttaatagtctgtgatgataaatcattaaaaataaatttccatttcaactttaactttaactgtgtttcatagttattttaattttatacttaaaataaaataaagatttaaaaa

SEQ ID NO: 5390 - DNA, 415 bp, Gossypium hirsutum
tttgtaaaggataagaacaaatgacaatgacaaaggacagtgaaattgttatacctggtaagctggatgagctgagctgttcattcattttgtttgtttgtcattacttctaatatacattaattttaatttgatgtattcatataattaaattttaattttaggttaattttcacatttcactaacctattatttatgtgaaataatttttcgttatgtacaaaattgtatcaaaattcatgtataattttaatatttaacccaaattctaaatataaatagtatatatatatttaaaggtaattatttgatacattcgcgtatggagttttataaactctacaatcgagttgagagtgtaacaagtgacacatttatttatatatattttatttttaaactccccgagtaaat

SEQ ID NO: 5391 - DNA, 635 bp, Gossypium hirsutum
cgagtatgttaatgttttgccacacacatttttcatttatcagactcattccccatggttacacacgtttccactagcttacctttgttagggttaaaaagggaaagtcttattaagcagatattttgacatcttataaataaaataaaagtaatctcatcatcaattgcttttgcaattaaatggttattactattgctagtaaagagaaaaagaagaaaagaaagagaaagagagatctttttattcatgttgcgtttattgtctgttcataattttatctaaggtaataacttgttttatatatttttttgggcatgtttgaacattcgtgcttgtgttatagtttcgtttcatattgtgttttaattaattctcatattcaaaattgccaattcaaataactcacaatttttttttacatgctgtatgatgatcgattcaaataaccctaattgttgagaaattcttgtttgccacatggcaagcattttaaagcttccttgatttttcatatttttaaataatcatcacttgttatatttgtgttgttttttcatattataatcgtatttaaggtaatatataactttgacacattatattaaaaatttgaacaatgaagcatttgtgtg

SEQ ID NO: 5392 - DNA, 603 bp, Gossypium hirsutum
ctgtcgtttaatttcacttaactatacaaaacgtgttgtcttaatccttgtaacttttaacgtgtttcattttgtccaaacataaaatcgagtttaaatattttattttttatgtgagccaaaatataattatgcatgagaataaattggaggtactatgattggtcaaattcataatttacatattgatgaggttatttaagatcacgctttgcacctatgggctgtttattattttcaaacagaatcatttaagaataaaaataaaatagcagaaaaatacggagatttcccctaaaaatcttctcaagtgataataaggggaatcctagaccgtagaagaaatgaaaccccgtcacttcctcagtggttatatcgtaatttggtagagtcctagacccaaatgttacgcgaatcctgttgtaaacgccaaaaaaactccttcaccaatacgttgccgaatcgcggcgcttcgtccataccaaaatacagatgcggacatcagaagctctatccccactctctcacttaaggcgtgtgttcaactcgccgtcaactggaccaatccgtgatggtcgatgcgagcgtggatacacaataaca

SEQ ID NO: 5393 - DNA, 616 bp, Gossypium hirsutum
taatatatatttaattatgacatgaaattttaatatatataatatctttgtcatatttaaataataatattttataactatcgtatcaatattatgagtggcatgtcataatttatcgaaaaatcatatttccgaggtttggatggtttccgttaacaattttactaatttatttacattttaaaatgcaagatttaattgtttcttttttagtagaggtacttgtttgttcccttattgataaaacagggactttgggggttatttgaccattttatatgtttttacatcaaaaaaagttgttcaatctcagtttctctgttggacttttggaggaaaaaaagagtaactttttctttatcgcactgaaagaatcgaagtaaaaaaagaaaaaggaaatgtactaaaaagttattgatttaaaagactatttttctttttgtctttttttaaaagctcagtaggtctaaattaaatcttcgctaaaatttaaacactaacacgtgcatattgatgaaaaatattatatgctcagacgatgtattaagaaagattcgttgagtaaggataaagctagtttttcattttttatgtcttatttcggtacagcaatgac

SEQ ID NO: 5394 - DNA, 622 bp, Gossypium hirsutum
gagagctcagttaatgtgacatccacttgcattataatggagcatttggagttttctttttttcttgtcagtaaagattcgcatttggttttacacaggatttggcaaaccgaaagaggaaataataggggacaaagaataagattgcaaggtatgggttatcctgcccttcaactaaaatcgaatttggtcccgctgcctctgactatacttttgataatgtgaccatcaacaagtaaataaactactatctaaatacgtttaggccgtccaaatactgaaattttcttaaaaaaatgacaaacccccatgggccatgagacatgagccggagcaagggccatggccatgcctttaattgtgtgcttaatgcggcatcaaccttcaacccaaatctagaagctggatggcaccttgggcatgcagcaccaattgtatgaatgtaaataaaatcttattaaatcttcaagaacttgccaactactctgttttaacacaagtaaactggtttacataacttattagaagctagggtggaaaaaacgagaataagctgaaaaaacggatttactgctaaatgtaacattttttttctttaacatacacacgaggtaacgcatct

SEQ ID NO: 5395 - DNA, 610 bp, Gossypium hirsutum
ttagcagcatgttaactgaaatacttacatggtgtacggttaaaacagaaaaaattgcttcaacagctccggctgcaccaagaagatgaccgacagcaccctgtgtatgaaggtgattgtagcagtttaaatggaaggaaatggttggtaagtagatgaaagctattaacagtaaaagaaaactatatgaaattacagcaaagtagaatggtccaacactggaaaagttaacattgctttttctttttctcgctaattcgctccccctccttttcccgcacatcttttcataatagtaagaaaatttgtaggagaaatttgagtgcacatctctttagtagagatgtgaacagctttatagagaaggctctctctctctctctcttggggaaagaaaaagcaagttgagttagcagtaatcacctaagatactatatcttgaacagagttttatcccttttgaagttttcctattgtttttgtctccattgcactttagtcctctctagattgtgcatttcggttgaagaagtaaaaatgatatcaaactccaaccagactaaattcaaatcatctagtcagttctgaagattgatgcataagtaaccga

SEQ ID NO: 5396 - DNA, 654 bp, Gossypium hirsutum
aatgatcgaaaattaaaaggtagaaaattagaaggacggagaacaattttttttaaaaaaaaaccataagtgtgaatgaaaaaaataaaaagaaattacttagttagaattgaaaaatgaaagtaaagaaaataaaacatttgaaaaatacatttttttgaactagcatacaccatctctcccattccatcattcaaatttgaaatgattgatttttatatattaagatggaaaatgatcatctttcttattttcttttatcttatttttctctccaaccaaacacactcaaaatttattttctttccattttttcacccaaccaactacacccttaaaaataattgcttaagctatttaaatagcaatgtgtacaagcaagtgatatatgagcaaatgtattttcttctataaaaaaaaatgtcacaaaataaagaaagaaaagaaaatggtttataataaagatttcactaaagtatgtaaaagaataagttttggggcatttggagtcattgtgatgaaatataaatgttggagtaacaagaaaatattcattagctatggggcatcgatcccgagattgatcgtttaaggattattgatttcaaagggttttgatccttgcacaagggagattagtccaacacttcatcg

SEQ ID NO: 5397 - DNA, 584 bp, Gossypium hirsutum
ttctcacgaatgatatcggtgtagtggtggtcttcgatgaaaacggggagcctcaagggttcaacatatacgtaagattattactgtaggatcgagtggtccttgtactaggagacggatcgcattttgtccttttacttaaagaaagagcaaattagtcattgtattactgttaaaagctgatccctataagttagcatgagttacacgtggcgtaccacatgtaactgactggttattcggtcagctatctcagtttttaatggtagaagtgaatgaaatttgctctttaatctaacatacagagactaatttgttcattttttagaaaaagggggggcaaaatgtaatctgaggggcaaaatgtaatctgactcttagtacgggggcttacatggtacttttacccatctttcaccatttttattgcacctttttatacctaaaagtattggtttcttgttattgcaggttggcggtggcatgggaagaacacatagacaagagactactttcccgcgtttgggtgaaccactcggttacgtgccaaaaggtgacattttatatgctattaaagccatcgt

SEQ ID NO: 5398 - DNA, 686 bp, Gossypium hirsutum
  misc_feature (18)..(23): n is a, c, g, or t
  misc_feature (27)..(30): n is a, c, g, or t
agcataccttgcgagcannnnnntccnnnntctcttcctcatgttcttcatccaccaaaatatcctacaccatgactatttgctttggttttctatgttgtgactggttattactgggctaacaaaaaacttgtattattgcagaaaatggagcaagagagattggagaaacttgctcgcaaggtatgcttacattgttgtgttatattatcttcacctgaattttgtgggttatggattagatgcttaggagggttcttactgtttttattcccacaaaatattttacaacggctaatatacatgcacaaatacttgccactatgtcccatcgactgccttatgcttcattttgtctacttcactctgtttgctcaagttgaatgctgttggtggctttgctccatgtcatgaaatgtataatgtttacgtatgtgctgtagctgtccaattagtagtgaattctccgtggaatattgtttggacttgttcattatggtaattttttgctaggttatgctgatttacaaggtcatgtgatagtttaatgactgaggtgttttttaatcctttcccttttttgatcatgataatctgccatgtgcaaactacaaaattcaagctctctctgtaacaaatagtggttaactatttgacaaattgttgaaatattcagggacccaaac

SEQ ID NO: 5399 - DNA, 594 bp, Gossypium hirsutum
tattattttttataattatattttttatataattatatttttcatccacatcataattgtgtcacagtctagtttatattagtcctctgtttacttttagtataagagtattcaatactttttatttacacttttagaaatacaaatataatcataaaattaatttgaatcttattaattctaaacatattctacacgtgaggaattttcaaccagaataaatttagacaaaattcagtattataaaataaaattcaaagctaaacatttaaaatcccaaaaactaagcattaacggcacaaaacaatatttcatagtgttatatccttattccaatctagatctagttgtattttctattaggtcactcagagttcactgagtgacataattggataaaaatcatcactctcctataactatacaaatatatcagcgtgcattgtagatagactcctcacatttcctaaaatcctaacaagctaatctctcacccctcttttgcccgagttcctctacttttttgactgtcggccttaaaatagatgaagcgatcttcttcaatcccaaccctcacctctttctctatctcca

SEQ ID NO: 5400 - DNA, 611 bp, Gossypium hirsutum
gcttggctacggtcttctctatttccatctgtagcatttctggtgttgctgacagtgttttattgccttgtgtgatcacactatttcaatctttcattttctaatcgtttgattgttttcatgtcatgcttaaatcattcttctctctgctcttttctttttatttagtaccagaaaaatataaccagtcaaaccaacgatatccaactaaatcccatcctattatcctatcacttacctaagtgctctttttgataaacttcaaatatcttgttagtttgattatgaagaaatatcatttatgtcagataagcccttggtaataatgttaatcaaatattttttgcaggttcttgtatatgttctcatttttctgtatctatgcatctatacatcctttttcaaaggcttttataatcgatattgtgctggtaattcaaatattttcagttacgacattacgttagaattctcggaggctatttttggagctgaaaaggaatttgagctttcccatttagaaacatgtgaagtttgtcttggaactggtgcaaaagttgggtcaaaaatgaggatatgctcaacttgtggtggaaggggtcaggttatga

SEQ ID NO: 5401 - DNA, 638 bp, Gossypium hirsutum
catttggctgttactgttttagcaggatagacattctccttagattattgtttcttctttttattaatcttgttcagggatcaataaaagatggaaaacttatgaggatcctattttgttcgtaagagtagcaatttattcataagaaaatctaaagcaatttattttcctctttttatgacttaatgttagttgcatatttattaaatataaattcactaggcttaaactctaatgctttcaagcttttgtccttcagctaagctagaacatgctgcttctgaacacactaatttgtactttatacttgccttttatccaatttttaaagttgattttgcaacaattgcttcattagagtaaattgaccacttgtttgctattttttaaaaaagaagaagaagaagaagaaagatacaacagaaatcagtagatttaatgcaaataaatagctatttgttgattgcctaaaaacattatgcctgtgcatttctctctttctctctcttgtacatatcgatttcgaagtgggaaaatgaaactctgatcttttgaaggatgtatgagtgactctggctttaattgcaattcacattgcacattaagttgctttgtaggttttatgattaactctttcc

SEQ ID NO: 5402 - DNA, 638 bp, Gossypium hirsutum
cttgaatcaattccagtctttgacatgtatgattcaagcctgggttccaaattcccagatttcatacatcaaacgagatggccttacttcagttacctttctggtcagtttttgatttctcgctatgcttcttgcacacttagaatttttttctagttacaatgattgctttgaatctgggctggggcatgcattcatgtctgtcatctcctttatctttttcaatcttgttgccttttgattttcttggatttcaaatccttttttcggtgcatgggtggaaaggaatagtaattataatccttggtttaaaatggccagtaaaattttgactacttaaacttttaagaataaatatattgaaagtaaaaatgaagtagatttttataaacatgaattaggacaaaagagtacttcccataaacttggtgctacagttgtcaaagtttgctacgactctattttggaggcttcaaaattatatatatttttagtagaggattaatatattagctttgggaaaagacaaatctgaggagtagctgttttgtggttgaaaaatattaagggagatatgtaagtgtgcattaaaagtggagcgtgattggtggacgcccttactttagaccgggacatca

SEQ ID NO: 5403 - DNA, 613 bp, Gossypium hirsutum
tttggctaagggtacataaaatactctgttagggctatgaaacaaagtggctgagaaccttaaaccatattaaatcagaagaattgcacttgcaggcatgaccaaggatatacatattacatagacagacatatgatggtactcttcattgctgtccctggaaaatgagaggtcaatttcagcatgagaaaaaaaacagcaattcacaaatatttgtcgtatcaagggtagagccacccacgtcattcaaacttataaagtcaaacatttccattcactagaaatttaaatattcaataaagaaaactcaacatttcattgcttcttctaaatgatacagtaaatgtgctcaaaataaaccactcaggagaattttatgtatcacaatgcatgactaaaacaattatcacgatgacgtgttactaaaggcaggcagatcaattttttactgatagccaatattaaaagtcaaggataaaagaccagacataaatgatcaaataatatctcaattccaaaagttttcattgaagatgaaggaaaaggctatcctcacccccaaactgaatgtagacagtgcagaactgcggaaagtaaccatgccagcatattg

SEQ ID NO: 5404 - DNA, 656 bp, Gossypium hirsutum
gatgccagtgtttacacaagaatagtatcatcaaatcttgaatttgttgaacaaggaacttgcggttgaagctgcttccagtttagcagatatgattgatgttggtcacaaatgtattatagatactggagctactgaccatatattgtctgatcttcaatttttagaatctcctattgaatgtgcattgggttcaccttgtgttcaacttccaaatggttcttctgtttcagttacccatgttggcacttgtactattttacctaacctacacttaaccagagttctttatgttccaaattttcattataatcttcttttcgtttcgaaacttactaatgatctcaattgcgtggtttctttttaccctcattttttgtctcatataggatctcttaagtggaaaaatgagggggattggtaaggcacgaggtggtctttacatcctagacccgtctcaacagaccagtgtggcttcacctacttctattgcagctactgcttttgttgactcgtcatatctttggcatactagacttggtcacgcttcggtttcaagactcaataaggtctttaatctttcttgtaaagtctcatatgttgatagtatacataaatgttctgtttgtccacttgctaaacaaactaggctccca

SEQ ID NO: 5405 - DNA, 647 bp, Gossypium hirsutum
gagagggtcttggacggtgctttttcttcagggattaatattcttctgacttctgggggcgtttccatgggagataaggattttgtgaagccactgcttgaaaagaaggggaaagtgcacttcaacaaggtcattttccgtgtatatttcttcatgagaaaattacttttgtataatcaggcaaaaactgttctattctttgttcctaattgccttggagctttagatttttatatggtatccagaacatcattgattagacatctattgtaactttgtttggattgatttccttgacaggtttgcatgaaaccagggaaaccattgacatttgcagagatatgtttaaaccgggcggagaatgcatcagtgaacaaagttcttgcatttggtttaccagggaatccagttagctgtctagtttgtttccaactctttgtggtccctaccgtacgtctcctagcaggatgggaaaatccacatcttttgaggttgctgaaacttcccataaattgttctatttctgttcctgttagtctatttgttaaaattaaacatagcataaaacagatatgatttctgacactgtcctgttttccttctgtttgttatatagagtgcaagctcgacttcaacaaccattaaag

SEQ ID NO: 5406 - DNA, 641 bp, Gossypium hirsutum
gctgcctattcggtatgccttgaatattttctttatttagtcaactcatgattttgagatctgtcatctctagcttagactatgggaattatggtttttgtgcagatctatttgttcttttatgattacctaatgagctacatttgcaatttgtgacagcttactttgcggcttgtcatggataaagctaagcaggcaaccaaatcaggatcacttaataacgtgtccatggttttactgaataatttgttgtctctgcccttcgcaatcttcttgattttcgttttgaacgaatgggaatatgtaataactgcgtgcgtaaacaccttaaattacagtttgtcacagttatataagttctccatcatggaaatatcatctttcgcattctgacattggctgttttaatttcccaccaaggtaattgatttgccctggtttggggtggtgccaccacctatgggttggttggaacttgccttaacttccccttcctgggggtttttgcttcaaacggaaccacccccttccaggaatttggtttgtgaacgattaaactcgatagtggtacacagctactcctcaaaaggcctatgcctcttacttattgttagaaagagtggctcttggaaatttatgaa

SEQ ID NO: 5407 - DNA, 630 bp, Gossypium hirsutum
cttcctctcagactcatatctatggggtcaaggccgaaacctgtttttccctttttttccaaatctaatccaatctatatgtattaattaaggaaaggaggtaattaagggaaaagggaggagaaaaagcacaaaggttgatgttaatcttttctcctagagccactgcactgcaactttagctggtatttgctttataaagaaattcaacaaccatgtccatgtttttctttttttgccttcccttttaaatctctcacacgggacggaaatactcctttttgacgcctctcttttctcatttattattttctctgtgctatatacgtttccttcatactcttttttctttaaaataaaaaagaacttttttttgcaggaataaataagagaaaggaagaaagggagactactgcaatgctgctaactggtcacaactcaccagttggtaggtagagcttgtggttgatagagagaaaagatgttttacttgtaaaagaccttactctctaaacacttatctctctctctctctctctctctcaaaatcatactagaaaagagcaaaaaaggtatagagcaagtgaacgttgtttggacagtgctggggggttggtgtgtgcgctttct

SEQ ID NO: 5408 - DNA, 606 bp, Gossypium hirsutum
caagtaatccaagcagtttgtattggtaagctttgaatagagtacttaggtacttaaagaaaactattaactatgagttgtgctataatgtatatccttgagctttagaagggtattcagatactagttggattacaagtttgaaagatcatgcttctactagtaaatggatcttcattcttggggttccaagcaacaaacatatattattgattccaccatggaagtcaaaattattacattagtcaatgcatttaaagaagcagaatggttaaaatatttgctttatgatgtacctgtatggcctaaaccaatttcacctatttcaatctgttttgatagtgaggctactccaaaaaaggcatacaaccaagtatataatagaaagtctagacacactggattaagacatagttatgtctgacaattaatctctgatagagtgatcactattaattatgtaaggtcaagtgaaatttggaggatccgttgagaaaaaatcttgctaaagtgtactcaacaagacctcaaaagggatgagactcaagccattaattaaagtcacccatgatggaaactcgactcaacgcttggtataacgtcaag

SEQ ID NO: 5409 - DNA, 619 bp, Gossypium hirsutum
aacaaaggatgaggtaaggactctttcagatgttagttatttgtattttaaaatgctcatcatagttgaataagtgacaagtgacctgcatatcaattttggaaattgccagttcttttaccgagatgctttccaattttctattgtaattgtgttacatgcagagtcacttgacatttccttaactttaatcgtttgaaaggagaaaatgtctaattttgtatgttatggaaaaatatgagaagcatatgggatgcttcattatctgaaagggaactgtctcacactgcctagactgtgcttttgaaggctaagaaattctatatattttttttatttttattttttaacttggtgatgtttattttcttacttttttttaacatgcattttggctaataataatttgccacagaatatttactgtaggaattttctagccttatagtgaatatttaagcaggaagttgctttaggggcatcaaatattttcagagttcaaagctcatttaaggatcattaaaagaacacccgggtgtgagaagaaataaaagcactatataggagattggattttaagagttttgcttgtccctggagcacttatcctggttcatag

SEQ ID NO: 5410 - DNA, 493 bp, Gossypium hirsutum
attttacgaatttctatatatttcatagttttttttctgggcatgacactgcattgattgtgaccataatagggaggaacattacaaccccccagggcatctcaacaagatccccaacaaggaagcaactttactcttcagctatttcaacgaactctagaagaaaccctcgattcatttcagaaatccattcatggagatatgaggaacttgcatattgaaattttaagacaattccacatgcaggaggtattttcctatcatcctttcctttatgttgctttggcattcatgtacatattctcagctctaatttgcggaaattattggaacagatggagatgtctcgtgtgatgagctccatattacagaaccaagctgaactgatggaagaggttaagtctctcaggaaagaaaatcagcagcttcgtcaattgctttgagcgctgattaaacaacattatcgtgtcaggttagtgaatgcctcttctga

SEQ ID NO: 5411 - DNA, 643 bp, Gossypium hirsutum
  misc_feature (61)..(62): n is a, c, g, or t
  misc_feature (373)..(373): n is a, c, g, or t
  misc_feature (386)..(387): n is a, c, g, or t
  misc_feature (396)..(396): n is a, c, g, or t
  misc_feature (399)..(400): n is a, c, g, or t
  misc_feature (434)..(434): n is a, c, g, or t
  misc_feature (467)..(469): n is a, c, g, or t
  misc_feature (524)..(524): n is a, c, g, or t
  misc_feature (557)..(557): n is a, c, g, or t
  misc_feature (564)..(564): n is a, c, g, or t
  misc_feature (600)..(600): n is a, c, g, or t
  misc_feature (631)..(631): n is a, c, g, or t
tgaggcgaggcacatttgattagacacgcttttctggaaggtgataggcacaaaaaagccnncttggttgacgttctctttaatttcttctttatgttaaacttttttcattagttttgcctctagtagcaaaaaaggggtactcggcaacaatatggtacaataagaaaatcatgcatattgactagcagaagaaatagaaaattttgccagttttgtagataagctggaccattatttagagttaatatcatgtatatcttaagcttattttatgagtatacacacacacataaaaaaatacacatatatatacttgtggcgtgttgcttcggtggctagcactttttttttgcgccttatgcctcagganaaatgattgtggnnggcccccgncanntgcttgcttgcttgacaacactagtttgaacttntgtttgttcacccacgcatgaactgatgatcgnnngattgaccatcaattttcgagggaccaagtaaacattaaccaaaaaaacctaacnaatttcactaaaacaaatcactcttacttatanatacatnattgattgaaaagaaagtccaatcactcaacaaaanaataaatggcgtgttgtattgaacagagttnaggaaccctact

SEQ ID NO: 5412 - DNA, 632 bp, Gossypium hirsutum
gtttttgatgtatcctggtctttaccagagagaaaatagaggtttagtagtcttaaagaccgtcagcaatgagaatccatgcaacacgactctctaaagctgatcaggtataaattgacaatcctgatttaagagtgggatccctctattttaagaacgagcaagtatccgaattcagttgcagttgtacacagccataaccactcctccgccagtatttgatatacaagacaaaaagcataaactgactaatcaaaaagacagaaaactctttatcgtttgaggacaaattgttatatgtaaggagttttcaatcagagagtttaaatgtgttataagcaaattccggtggatcttggcttcatacctctaagagtgtgtcccttctgccaatcttcactggattcagccttcagtctttcaagggtaattgatcctcagtactaaaatttgagattgtacacttctaaacctggaagtccatgatgcagggatagattactacagacaaaggctgctcgttgcatgattttgtcatgaattctgccttgattctcctgagagatggttagtcaaagcttaataatgacctccgtctttatggaatgatattgacgattagactttcttgt

SEQ ID NO: 5413 - DNA, 610 bp, Gossypium hirsutum
ttttttgtggccttcatgcagggtagtggttctgctgctcaaggtgaaatctcatatctgtcctggaacagtaaggtccaacatatactggcctcaacttctcataatgggacaactggtgaggaaattaatggattctggacttactgtcttgtcatttaagtttagcagggtagctgatgtctttgtttataattttccagttgtttgggacttgaagaagcaaaaaccagtgataaggtaaagttcatcttttctatcaattgaaaaacttctggttgtttccacatgttatttccatcatgacccagcacatcgtttgacctaatctttttttggttttctaatggacagttttgcagattcagttagaaggcggtgttctgttttgcagtggcatcctgatgttgccacccaacttgttgttgcctcagatgaagatggttcacccatgttaagggtaataatcccgttgatgttgcttaaaatgtggattaccatttgttaggaaattgttaatttctggtatttttgcaagcagctttgggatatgcggaacataatgtcaccggtgaaggagtttgtagggcacacagtacgtaataatggt

SEQ ID NO: 5414 - DNA, 615 bp, Gossypium hirsutum
  misc_feature (596)..(598): n is a, c, g, or t
cctttgtattatatacatgaatctcaatatatataaatatctaaaattctcccaactgtttggtgttgaggaacatgaggtccaagtttccaaagttcggtgtagcaagtcagcaaccaggatgaaattttacaagattatccatcgttttctaattttattttttatttatcttaatttacagaaggtatagtaactaaaataatataacttttgactttcttgttatttttccactctatcaagaacaggataaaaagaaaattccattttattggacttctacttttcccaccaagcacttcaatgaaagaaaaagtatataaatatatatattcatctttttacttatttcctccaatttccatcttaataagttttgtttttttttcttctccacataaccaagaaaagccttaatgatcttggtgcactagagtgatttttgtatcactagtctttgaaattatagtttgaatcagctgtgaaatgtatagggttcaattatagaaaactgaatacctgcattggatatgttgtagtcgggtaagcaccataactggcaatttgtggaactgatgtgggcacttgtggannntgcataatgctaccata

SEQ ID NO: 5415 - DNA, 610 bp, Gossypium hirsutum
ccttatttgggtcttatgcttatcgcggactgtttctaacatggaacagctaatcagttaagcggaggtggacatttttgggtcttcgagcgggggttagattttgagaatactaatatgttttagttgacagtagtattgtggtgtcctttttttcacttccaattttagatttttttttgtgtgaagtttgtacaaatgttagtaaaattatgatgtgatctgtagttgggtttcttatttaagtgaccaaattggaaaaagtaaacacgaagaaggaacttttaatttccagaataggtgcaaattttggttagaatatcttctcaacaaatgggctatcccttgcatttatttaaattattttgagcccaaaagaagtagctcggggctcgttgattcaatcaatctttgtaatgttaagtgattattatataaaaaatgaaaaagaaaatagtttgaaacaaaaaacatcatatgcatttcattctcttttgagcaaaatcatatcaaagccggtttttatatttgcgtaacacgccgcggttatagtttaatagccgatgatttaggttagaaaaaacaaagggctgggtttaaacggacggct

SEQ ID NO: 5416 - DNA, 595 bp, Gossypium hirsutum
  misc_feature (586)..(589): n is a, c, g, or t
  misc_feature (591)..(591): n is a, c, g, or t
ttctgaagaatatgttggaaaaaggaagagaaaaacaaacattgctaaaactacgagtactatttcaatgcccatcctacaagccacgaaatcaggtcttccatcttgtcatgatgtgtagaaatgcatagaatgagctaccatagtaaccaaaaacaaaaattatatatacacatatacatacgtatgaaaataattgacagttgcccaggaatcgataaagaaagcaaactatagattcactgatacgtaaatatacatatacatgtatacacatattattagtgtatttattagtataaaacatatcgaacctctgtgggatccagctgctttcaagcacttgttgtaagggctcgacggcgatcatctgtatgcttttgagcagaaggcaaactgcttccttaaatgaatttgtttctttgctaattgaaaaccccactatctgaaatacaagatgagaacaattcaccacaactattattattggtttcataatatcatataataaaaaaagcatactatatatatataatcaacctgaggatccggctgctttcaggaacttgtcataagggctagatgnnnntnatct

SEQ ID NO: 5417 - DNA, 647 bp, Gossypium hirsutum
ttaggtgcctaaatgaatttcatcatgtaatagagcggagagtagttaaaagaaggtcaggtggttgtgctatagtggtgtgcttgtgaatgaatgtttttggatagagcttggttaaagctttcaatgcctgtagaatcaagaatatggcactgttatcatgaaccaataagctttttaccctcttccatgccctttttcttttatgatcaattttcaatcctaagcttagaggattgacatcatattatccatcctgacttagttatgagggggtcctaaacaaaatcatctcagtgttgtgatggtggtatggtttaagcccttgttactttgtcataaaacttggtgtgggtcctttccttctttatttgttgttgagcttgtttgctagtctatttggttttgatgatggagtttgacttgaaataaaatggtatttatgctatatatatggcttttgatgtgataggaaattaagttattttttttctccttttctatctgaaatctattaaattacaccagttggctaatattttatttgagaaaagcaacttattatttatttcacttgtttgccttgctttgcattagaaaccaaaatacaaggatggcagtcatactggtgctgttcttggtctagc

SEQ ID NO: 5418 - DNA, 600 bp, Gossypium hirsutum
aaagtaggggtttaggaaaaaatatgagtttgaaaaatgagtttgggtaaaaaagattcgtttagaaaatgagtcgagttttgtaaggcttttttctgagcccggcctgttttggcccaaatatgtaaaaaaataattgctattttttatactattttcttgttgtttactattgttttgttgatattttcttcttgtttttttttctaccattttactattatattattattattttgttgttattgtttgaatattgtataaatctagttttattgttaattttgttactattttagaggcatttgtttgttaagttacacctatcttaatattatttaagtatacatatatattttaaatttattttcaatttgttgggaattatttattttaatatttttagtagttttgatgtattatatatattttttaaaataatataaaaatattaatacgggtgagccaggccgggcctaaattttagcatttttatctgccttggacttggataaaattttaggcctattttttaggtcaggccgagcctagcaaatgaccttaatattttggttgagcccagcccggcccatggatatc

SEQ ID NO: 5419 - DNA, 560 bp, Gossypium hirsutum
tgtcttgattgaattgcttctttgttcatcacagaaaagggcttgtgaaacaatactaacagtgctcgatgaagtttgccggtgcgccgaaggccgatccgagctgctaaatcatggagcagggcttgctattgtttcaaagaagattcttagggtttctcatgttgcaaaccaaagggcagtgagaattctattgtctatttcaaagttctgtgccacttctaatgtgcttcaagagatgctgcaattagggattgtggctaaattgtgcttggtgcttcaagtggaatgtggacacaagactaaagagaaagctaaggaggtgctcaaattgcatgctagggtatggatgaattctccttgcatacctagcaatctgcgctctccatatccagcttcatcataatgagaaaagctaaacagattcgattgtttcatactttgaacgtagagtttaacttagttgatttgtgtaggtatccttgaaaggaaatactagtatgtctttaaatctcaccctttgcaaccctttttatatctttaggcgagacattttgtac

SEQ ID NO: 5420 - DNA, 621 bp, Gossypium hirsutum
  misc_feature (612)..(617): n is a, c, g, or t
acaagatgcaaaagatgggtttttctttttttattcgagaacattatttatgaagacaaacaagcaaaagatgtttcagtttgtaataaatgaagaaatcttacaacaaaaaacaactgatatttatcttgatgttcaagctttgaaaaaacaaatggtggtcaaacttaaaagtaccaacttgtcagcactttgaccatttccccaggtaataaaaaccgatattcttttctctctctccttcacatgtcttctgaaaaaaaaatcaaccaaaacaaataaacaggagagtccatcttcccccgttcggcaggttttgttcccatgttactttccagctcaattccttttcttttttcttttgtgtatttttaatggtttctttgagaagattttcctttcctcatctgggtctttttcagtttcctttactacttcatttgcctaaaagtaaaacccaaaaagaaaatgtgggtcatacttgaaaggtgaaaccctggaagaacatggaatcaatattccacaatggtcttacaacaccatttttccatcccccactacttttgcttcaccagttttggccttttgggttctttgctttgtggttatcannnnnnaaaa

SEQ ID NO: 5421 - DNA, 458 bp, Gossypium hirsutum
tgaagaaggaggtgaaggaaatggatatgatattcaactggaaagtgggcaggatgcaatcagcaagcctatcttcaaaagcaacccagcaactaatgactggattccgaccctggaagatgatcaggtattcatttagggcttaattctatcaaatagaaagaattaaaagggccatctgtttaatgatgtgcatatgatcaggtctttgtttcatccaaaccgaatcgaagtgagggttgttagatcaacacgtgatgttgaccaactttgcttatgttatagtaaatgttgtggtcctggaataacacagaaattggatatggtttgtaatggtttaaacattgtgttcactttttctaccttgttctttgcttaatgtaaaggtaaaaattaaaatccccaagcaatttcttcatgagctgacttgctttacacatggcaactttaggcatagt

SEQ ID NO: 5422 - DNA, 650 bp, Gossypium hirsutum
tggtcaggtatttgtgcttagttttattctcagatttcagggggtttacggagtgagagcgtctctactcactaaaaaaaatgtcaacatctgtttggtgggatttgaacctatgcccttatatgaaatttatgggtaagatagtaccattcaccgagggctgacggacccctcaaccgggaccgagacaccgggtcataccctagcccttttaagccaactctgcatctctcccactagggtcatggtccagctcatcaactatagggctagcaccaagctcataaggaagcgtgttgatggtatgggtcacgcaacatcatgaggtcttagtgaatatcacatatcatgtcttccattgctctcattgattttgttggacacaaattcagtctgaagaattataagaagttactaacaatgcagataagtggcaaaagaagctgaaaagaaggtctaactgaagtaagcttgaaaaagaaaaggtgaataggcagactaggtagaagggcctttagtgtaggaagcttatatgtgctaaggcttggctgtggtaaactaggagatttcatcatctcttatttataagcactaggaagagagagaatctattatatagaaaaatttcagcttcaggttgtagaatcaca

SEQ ID NO: 5423 - DNA, 594 bp, Gossypium hirsutum
  misc_feature (588)..(588): n is a, c, g, or t
  misc_feature (590)..(590): n is a, c, g, or t
cttaatgcttcaagagttgacaaaataatcgaaaagcctatgattaggatgtcacaagattaggtagaagagaatatcatacgaatcgcttaaaaaatagtagattaagggcactaatcccacatcaaatgaaaataggaaagcctttgggcatattagcaagtacattgcacatcctatcatgtctttcgagaaaagagtaatggatttatgacaagtgagccaccccttgattgtccaaggtaagcagggtagaccaatcaattgatcccacactaaatccttgggagcaataatagagaaactcgtgaggaagacatcacgagattgagtgagagagaaggttgagtcaagccttctaaacaaggggaggtgcattaatcccacattgttggccaaaaaaaatctcacatcagatgggaaaagcaatgtgaaaaacagtcacaaaattatatatcgttactgttgcatttaagaaaattccttcattacatgcaagttgatgagaaaatcttgcaacgtccaggtccatactctttaaacagcagataagataatgcaaaagcagagcaattattacacagaatncnatta

SEQ ID NO: 5424 - DNA, 628 bp, Gossypium hirsutum
tcgaccaggtacatatatgtatatactgcacacagacacagctctcattaatttatatggattactttcttatacaatccaaagtcaatggattttgtaaatccaaagtcctagatttatgtgattgatgagattattaaatacacactatctatctctggtagtaaatattttacgaagactacttaaaaaataatataatattgtaaccaaataataataatgcaatacatatgcaagatcttgtgtaatctaatcctaattaagattgatgaacattactttataattgtataatattatatttttagatattaacaaagctgagccttccagtctatgactcaccaaattattctcctcctaattaatctctttctccggaggtaattgaatattaattgattgcagttaaacttatcctgacaaaagcaactgttttggtttggtggcagcctttttcttttttgtactcctctttggggaaggttttcttggtttttggtacttcgggtatatcttttaatgttttaaactcgaagctttggttgatgactgaaatgcaggaagtagagtcgttgttgaagaaattaaatttcataccggcatccgtctttacactgatatg

SEQ ID NO: 5425 - DNA, 728 bp, Gossypium hirsutum
  misc_feature (525)..(538): n is a, c, g, or t
  misc_feature (540)..(541): n is a, c, g, or t
  misc_feature (543)..(543): n is a, c, g, or t
  misc_feature (545)..(557): n is a, c, g, or t
  misc_feature (560)..(561): n is a, c, g, or t
  misc_feature (566)..(594): n is a, c, g, or t
  misc_feature (596)..(606): n is a, c, g, or t
  misc_feature (608)..(621): n is a, c, g, or t
  misc_feature (624)..(631): n is a, c, g, or t
  misc_feature (635)..(638): n is a, c, g, or t
  misc_feature (644)..(649): n is a, c, g, or t
  misc_feature (653)..(654): n is a, c, g, or t
  misc_feature (658)..(659): n is a, c, g, or t
  misc_feature (661)..(679): n is a, c, g, or t
  misc_feature (681)..(684): n is a, c, g, or t
  misc_feature (689)..(693): n is a, c, g, or t
  misc_feature (695)..(707): n is a, c, g, or t
  misc_feature (709)..(709): n is a, c, g, or t
  misc_feature (712)..(720): n is a, c, g, or t
cagaaagagcagaggaatctgtttatctaataggtgcagttaaagcttagattaaatagcttttgaaaccttcgaaattcagactttttttagacatattcttcgaagttggttacctatagttcttatcctaattctaacattagtttcgatttttcttttataaacgtaggaacggaaaagaaaaaagacctaaaggcatcaagtgtaacagagtaggcctggtcttgtggttccactttccatggtaggtttagcattatccctaaggcatcttacagctcttattcatattgtcccctactttgattcaggaactaatgctctacggtttctcctaagattttttaagatattgtggaatcatctctctacggtttactatcctttttatcttaatttttctttttgaaaatataacttccaaaatataacacttatccatattcctaataataaaatagcatgtaaacatggaagagttttgtaagtaaaaataactaccatttatgccttctattcatnnnnnnnnnnnnnnannangnnnnnnnnnnnnntcnnttttnnnnnnnnnnnnnnnnnnnnnnnnnnnnncnnnnnnnnnnnannnnnnnnnnnnnnccnnnnnnnntttnnnnttttgnnnnnngaannaaanncnnnnnnnnnnnnnnnnnnnannnngggtnnnnngnnnnnnnnnnnnngntgnnnnnnnnncattttct

SEQ ID NO: 5426 - DNA, 695 bp, Gossypium hirsutum
  misc_feature (78)..(80): n is a, c, g, or t
  misc_feature (177)..(178): n is a, c, g, or t
  misc_feature (583)..(583): n is a, c, g, or t
  misc_feature (641)..(660): n is a, c, g, or t
  misc_feature (688)..(692): n is a, c, g, or t
tcaaaattttctaagttttctctttttgttttcagatataaatcaaacatcattatcaaatggactccagactactannntctcaaaaacaacagcctagcgccaaagataaaccccgttcacttaagagttaagacaaagagaagcagaaacttcaagactattttatgacaaccnntggaaagttcataacgcactctttacaaatccaaacagagtttagacaataaaaacaaattatatgatataaagatttataacacaaatcatactagtcatacaatgtaggaaacaaataagcaggcaaagaaaattaaacttacaccaattgtagctgttggcttgaaagctactctcatatttataatttccccattggatattccaccctgtaagtcaacattacaatcacataatttgtgtcagaactaatgaatttagccaagaactaagaagttggagaataaaaacaaatcagtttgtatttgctgcattggttatcggcataccaatagagtattgctaccaagacagacagagataacaacaaactaagtcacccgaactatggtgtgtgacacanacgagtatgtatcctaaatgaatatcttaatttttctcaatgcttttccatgtattcnnnnnnnnnnnnnnnnnnnntgtgtccaacatgaatatcttaattttnnnnnctg

SEQ ID NO: 5427 - DNA, 610 bp, Gossypium hirsutum
  misc_feature (583)..(583): n is a, c, g, or t
  misc_feature (585)..(587): n is a, c, g, or t
cagtggttttcctcaaagctccttgttttgctgttttccatgaaacgaaaacccgaagaagctctttcattttcccgtgaggaagaaacaacaataccatagtttggtgcaagagaaagacaacccatgtctggataaaccatccccatggatgaagaagaggaagaaggagtagctgaagagtgacagctgagcctattcatgttgtctggtgcatataaaacacactcttgttacccatgccttcattttcctcatctgacaaatgctgttatacaactgttacaaagtcatcttcatgcgcacataaatattaaacaaaagggaatactaaaaaggggaagggatggcttgcattgcatagactgaaaacgagaagcaagtttgacaaatagtgagagaactgggaaaagtgaagtcaagccaaaaagattaaaacatggaaacaggaaaaacagcaattaaggcatgtgtgtaagggaaacctacacggctggggttaagaaagggactaaaaaaaggagtgcttgaagtagttaaccaccctgactgacccttccccccctagtttaactagttttgntnnngtggtgcgaatccatgctctcat

SEQ ID NO: 5428 - DNA, 627 bp, Gossypium hirsutum
ctgatggagctgcagagggccaggttttattttcttgtgctgctctctcatcagatgcaccccctgagaaagcttccacatcaaatgctaaatccgaatctatcagtaaagggaaacttgctccagtttctgggaagttggctaaagttgaggaggaaatgaaaattgtatctgaagttgttgaacctcgtagatctaatcggaagattcagccaacatctagagtaagtaaaaaggttgtggacttttcttcttttgataagttgaaacaatttatgcatttaatattgcacatatataagtggctgttgtcgtgccgcttacagatcttgtttgttgtccacagctcttggaaggtatacaaagctcattgatcatctcaaaagttccagtttcacatgacaaaggtcagaaaggtcaaagcaggagtactagaggtgaagtttaaatttctcatcaattttgtattcttggagtagtaatactattcttttagaccttgtctttattgccaaatgtactgtttggtgaatgtaacataacagtctcggctatataacaggaagtaaccaaggttgagaagcgaaaaaggagctgttttagaacctgggaacccagtcctttgag

SEQ ID NO: 5429 - DNA, 599 bp, Gossypium hirsutum
  misc_feature (544)..(545): n is a, c, g, or t
  misc_feature (548)..(548): n is a, c, g, or t
atgattaggatccatagccactttcctactttgtagcttaaccattagatcaataaaacttccatcttttcttccatagttttaatccctagccattgtgtgagtcccgtatgtgatggtttattttcaaaatcaatacatcacccttttcagtttgtgtcttgtgatgatcaactgttttatgtatttaagcggttgccaacctttggagctccagctcacttaaattacactttaagctgctgatatttttctttgttcatccacttcatcttgcagatgaagaatgttgagcttaatgaattttatgacgaggtagtccatgacatggaagaaattttgcttgagtctgttgactctcctggagccatgttttctcagggtaataggattatccaaccacggttaccgcttcctctacaagatggagggtcaaatccttctacgtcagatgcagacgatgcttacctgcgctctgcacgtatactgagaatagatggtgttgaagtggtgggcgcaaagcagaagaaaggaaatgtctcanntantgaaagattggttggggtaaaggaatacactgtatataagataagagtgtg

SEQ ID NO: 5430 - DNA, 647 bp, Gossypium hirsutum
attgagatttcccactttggcactttcttttatatttggaccaattgcttaagattaaaatattgctatcctgtccatttgcatctgattatttctatttttatgcaagttttagtccacacaatcaactaattccttgaatacctttgacttttcctctggaccagagcttagtttctacattctcatgctaataggattccctagatcaatttggcaaaacatgcttggctctgggtacccaaaaatttaaacattatgataataggtgcatgcaattgaaaaccaaaacaaaaaggagaatgagcattaagaaaattaccatgtacttttcataagccatcgtgacaagtttgtcaagagcacattgttcaaattccctaaataaaaaaacgatatggttatagatgcacaaggcaccaaagatttttatgttaaaaggcaaatgaatacaaaactccatgaagagaaagggtaaaatagtacttctcctgaattgttcttgtttccaaggccgctttcaacagtttatcaagtacgcctttcttttttgaaacctatgcaattcacaacaatattacaagttgaacttctcagaacaagctttgaactttatgatggaaaatccaacactaattagcacagcc

SEQ ID NO: 5431 - DNA, 604 bp, Gossypium hirsutum
agaagcatggggctgggagaccttgatttttcagctgttttcgagactgtgaagcttcttaaacattcatcttgataccatacactacctttcatattgttaggcttatgaagccatattcagtgttggtttgaacctggatttttatatatccattttctagttcctactattttgaaaattgatactattatgttttaagaaacgatcccttcaagttctgttttcccttcgtcagcatagacatttgttgaattccgcttcaagggaatccaaatacaaaatgccagtaagataaaactatattattgaagacctttcaacaaattataagaaagagaaattggaaattaacacatcaacttcagccacatatgctgatctcattttattccttaattgcaaaactaaaaatgacatgtttacggtccacacttaagacaaggatatgcaacattccattttctacaattaagaaaggtagaaaatggtattcatatttcactaacttgggtatccattgtataaaaaacacttgattttcctgcatatgtatgaagctaactctgtacaacatctaaataggttcagattgcctgattga

SEQ ID NO: 5432 - DNA, 517 bp, Gossypium hirsutum
ctctcgaacaagtataacttctccatcaacccttggtcacctgtcaggatcccaaaatcaacaggatactgaagagaccgaagagagaagagctagttctgggcacatggcagctggaggctctctcagtggtggtaccgaggcgtctgttgctcgagatgcttttgaaggaatgatagagactctatcgaggactaaggaaagtatcggacgtgcaactcgccttgctattgattgtgccaagtatggcattgcaaatgaagtaagttaaatattatgcttatttatatgtggtgcaagatgagcttgcatatgatgttgtccttttaaagactactttttggaaggagttttagattgcataatctgtgtgcaggttgttgaacttcttattcggaagctggaaagtgagcccagttttcatcgcaaagttgacctgttctttcttgttgattcaatcacccagtgttcacataatcagaaaggttggttttccttgattaggaatgtgttcaat

SEQ ID NO: 5433 - DNA, 595 bp, Gossypium hirsutum
ggtgtttgtttcactgctattactaggatcagctacccttgctcgggcttgagctgataacctcatttcttcttcttcttcctctaaattacggtcgagccccaattttgctatccgatgacactcggatgcaacatcaacaattatggaatccaagagatctccgaaaatgtgagatgaaagctgaaaaaggcaattcaatcgaaatcaataaagcatctctctccatctttgatataataaactcttattctcgttcatctcatgtaaataaaatcgtgaaattacggattcgttcttcagtttttttcgtttcaaagaaaaacagggttacctgagtattattatcttcatttggtccagacatgagttgtaaagcagataattttagctctatacaatagccccacgattttcgttacccgaactccgcaatttggggcgcagtacccctgtcgacacgatccgatacggattccgaaacgggctacgggtaagatccggcaaaaaccagcgaacacaacggtgggtgaaaactgagatgaaaaagaaaaaaaaaaacctgatttgcaaaaatggacaatggtaggaggaa

SEQ ID NO: 5434 - DNA, 614 bp, Gossypium hirsutum
  misc_feature (593)..(596): n is a, c, g, or t
  misc_feature (598)..(598): n is a, c, g, or t
atgttatccatttctttactacagccatgttaacataatctttttttaattattttgtgtatattttaaccatttactaaatgatttattgatttatagcttttagtttataattgtagtacactttaactaaacaataatgacataaattcaaaacttaagatataattaaattaataaatcaaccaattaaatttaatttttataattaaatatttatacataactatttttacttctattaaaattaaaacaattttatcgtattaaaatttatgtaaaattaacggtaactttcttttaaataaaaaaagaaaactaatataaataaaagcaaaacattaacaaagaaggcattgcaaagttaaatttctcgaattaacggtaactttgcatcaacgtcacccatgttttcatcagattggattccagcttttcacacaatttaaaactgattaaattttagtctaagaacataagctggaatagctcagttggttagagcgtatggctgttaaccataaggtcggaggttcgagccctccttctagcgaaattattttattttttggtaaaaccaatgaactcctccnnnnanctctactctacaaccc

SEQ ID NO: 5435 - DNA, 620 bp, Gossypium hirsutum
  misc_feature (53)..(56): n is a, c, g, or t
  misc_feature (485)..(485): n is a, c, g, or t
  misc_feature (491)..(495): n is a, c, g, or t
  misc_feature (503)..(503): n is a, c, g, or t
  misc_feature (519)..(522): n is a, c, g, or t
  misc_feature (559)..(560): n is a, c, g, or t
  misc_feature (563)..(564): n is a, c, g, or t
  misc_feature (604)..(606): n is a, c, g, or t
  misc_feature (609)..(615): n is a, c, g, or t
aatcctaagtagacttgtacatgggccaggttaggctgcggcccagaattttnnnnttcctttacccaaactcaggagagacccaggccggcctaagggccctattcaccatgtagaaaataatatgataaaaattagttttatattaatacttaaaaatttataatgaaatttgaataaaaggattttaatcttaaataacaattcagatcagggcagcctgaattcattgtccaaggcccagctcgtctaagaaggtagcccagcctttggacaagtctagctacaaggtatataatcaataggaataaattatcaatccaagttttaatttaatcactcacatgcaaccacacagcatatctatatccaaaagaataaggacacagtttttaggaaacataacctgtataagtatctgtcaaaaaaaaaaacctggttaattagttttttttttaaacccctcctaatttctgggttctttnggcttnnnnncccggggngaatttaatggggatnnnnttcattcaaaaaaatggtaaaacgggcctggggcttnngtnngaaaaaaaagaatttttttaaattcccaaaatcccctgannngtnnnnnnnccccc

SEQ ID NO: 5436 - DNA, 653 bp, Gossypium hirsutum
ctgttcttgaagtgtaaattgttgacaaaaatctggaattagacatagccattttcagcttgtaaaaaaagggctcatgtaaatacatttctttggcttccatctcatggtcttaaagactactgtaaatacatatatgttactcttttttttcattttttaagaaaagaatttttaaaaatggctttaaaagcttcaaattctgtgttataattgcttttagacattgccaacatattctagaaaatgaaatgagagttgcacaatgccctttggcatatcatggtgccaactgcatgccaatcatttgtcttcattcacaaattgaggggagtaatggatatatatatatgtatatatatatatgagtaaaagtattatggaggtgtttgtattaaaagttagaatgaattttgtttattttactcaaaaataccaattcgttctttgatctaatgtataggattaatttatcttttttttaatagagtgagcaaaatacaatccaattcttaatataaaactctctttgaatatgtatgtatgtatctgtggagagagatctacttatagtgtaaaattaacatatttttacacacttcaacaattttttctatgattgatattataatagccgaaccatcatatttcat

SEQ ID NO: 5437 - DNA, 741 bp, Gossypium hirsutum
  misc_feature (617)..(617): n is a, c, g, or t
  misc_feature (626)..(637): n is a, c, g, or t
  misc_feature (639)..(666): n is a, c, g, or t
  misc_feature (676)..(681): n is a, c, g, or t
  misc_feature (683)..(687): n is a, c, g, or t
  misc_feature (689)..(689): n is a, c, g, or t
  misc_feature (692)..(696): n is a, c, g, or t
  misc_feature (699)..(704): n is a, c, g, or t
  misc_feature (707)..(709): n is a, c, g, or t
  misc_feature (712)..(725): n is a, c, g, or t
  misc_feature (728)..(730): n is a, c, g, or t
  misc_feature (733)..(733): n is a, c, g, or t
  misc_feature (736)..(737): n is a, c, g, or t
aaaagttgggaaggctgttactacatgtatgaagtatctgtctaccatccaagcacgttgcatattgaaaaatgttatgcaaatgatccatatgcaagagggtatgctggttctttcaattagccaacaatttttctggaacagttatggtgattcatctttaaagttatatggtgtgctcctacctggtcatggttatattgtgagatcaaaacaaacattgcattcattttgtgtgatgcttattctgttttgttgttgaagcaggctttcagcagatggaaagcgaactttatttgttaatcttcatgctgatgatttaaaacctgaaggatgggatgaattggcagacatgaagccggatatactttctttctctgacataagcatatatgaattacacatacgggatttcaggtaggtatggaattactttactgtttgtacaacttaatttggcttgcatttgccttgtttctttaacataattatagttttgattggctagtatgtagtattcataagttcctttcttgggtggtgttcaaatagtttgtagagttattcaatgagggagagtttcttcaaacactggcccctgaacttaaatgtgaacntgccctgtnnnnnnnnnnnntnnnnnnnnnnnnnnnnnnnnnnnnnnnnttttttcttnnnnnntnnnnntnttnnnnnttnnnnnntcnnnctnnnnnnnnnnnnnnctnnntcntcnnctcc

SEQ ID NO: 5438 - DNA, 606 bp, Gossypium hirsutum
agcatgcaaaagtaattcagtataccagtctcagaaactttggcatcaaatatgaaaataatgtagcaatacagacaggatataactgagaacccagggtagttggctgctgatatttatcagcatttcttagaacaggaggatttgaaggaacaaagggtctaacagtaggctgagtggtgccaggtgaaggagcaaaatttgcctggaatgtcaagaaactatttagtcaagcatcaaaatgatataaaaatgcaaaaaacatcatgcacataagaaactgaaaaggctggaagaactagaaagtcaaaacagagtgctcatctaggatatctaagagccttctaccaagtatctaatcttcttcacgttgttcgatcaaaccaaggtatataaaaaaatcaactccaattaaacaaatgaagctggttttgttctgattttcagttgtacagttttattatccctagtggatctcaagaaaaaaatagtcgcaacaaatttttagatagaagcaatggaaggcggtttgtgaattgaaaaacagtcaagtcaatgaagatcaatcaaagattaaaaaaaaaaccccaaggcaaaaacttccaa

SEQ ID NO: 5439 - DNA, 625 bp, Gossypium hirsutum
atatatttatcaaatgagaacggcacataaaacatagatatagtcatataatcatttttaacttcaataagcaattaataatagtaaattttagaaagcacatttcataattttaaatataataattacgcatcttccggtaatcctcattaatctgcaaatgcgataagcatcaatgacttgatttcataacagatctaatccaaaaccgatcaaacaacgctacattttacatttacaaaaaatgattcacgttcttaagtaaatgaaatgtttcgttcattttaccgaataaaagagcggccgtcggtggcggggttgtcggaggagagagaagcgtagagtccttcgctgccgccgggaagaatgtaagcattgccgacttcattgaagagttgattctggtagatgtggattgaagcgtggatcgttgttaatagagttgataatataacaaagattaaaaagtcaaaggatttattggctattcgaaacgagaaatccatgacgatgaattggggtactagtcttcagccctgaccttagggaaagtagatcgggcgattttgaggggcgaagggtaggagagtgagtgagattgaaaccaaatgactttaagcaaaga

SEQ ID NO: 5440 - DNA, 642 bp, Gossypium hirsutum
gaaatgaattttgagagcaaaatataagtagggatgaataaaatttttaagaaaatgacattcattatacggttcaaacattcattaatttcttaagtacattttattcctacacgcgaacaagaattgattgcttgtagcaatcatttgcagattttttggcagccacctggatgggtcaaggttaatataaatgccccttttattggttgacttaggtagagagatagtaaaggatgcaattcatggaccaggcgaagactggattgcaggctttgcaaagactaaaggggttgcgcctgttttgcaagtggaggtaagggcgttatacgagtggctcactctcgcttgggacaaagggtttccccaagttgaggccgaaagtgataatgctcttcttatagagtctattcgaaatggttgtgcagcggacaacaactttgtaaagctgcgattaattcaccaactctccagcatgcgcctaagacatgtaagaagatagcacaacagagcagcaaatcacatgactaggactgctctaggtgattgcagcaaactgaagattttttaggatccctcacgatcacttggggaattttagatgaggattgtatgctgtttaagaatggtctgagaggctaa

SEQ ID NO: 5441 - DNA, 965 bp, Gossypium hirsutum
  misc_feature (76)..(76): n is a, c, g, or t
  misc_feature (110)..(110): n is a, c, g, or t
  misc_feature (116)..(116): n is a, c, g, or t
  misc_feature (358)..(358): n is a, c, g, or t
  misc_feature (384)..(384): n is a, c, g, or t
  misc_feature (809)..(809): n is a, c, g, or t
  misc_feature (919)..(920): n is a, c, g, or t
atattgcctttttctatcaccgggatgttaaaaaatatggagagaaaatgaattttgagagcaaaatataagtagngatgaataaaatttttaagaaaatgacattcatnatacgnttcaaacattcattaatttcttaagtacattttattcctacacgcgaacaagaattgattgcttgtagcaatcatttgcagattttttggcagccacctggatgggtcaaggttaatataaatgccccttttattggttgacttaggtagagagatagtaaaggatgcaattcatggaccaggcgaagactggattgcaggctttgcaaagactaaaggggttgcgcctgttttgcaagtgnaggtaagggcgttatacgagtggctnactctcgcttgggacaaagggtttccccaagttgaggccgaaagtgataatgctcttcttatagagtctattcgaaatggttgggcagcggacaacaactttgtaaagctgcgattaattcaccaactctccagcatgcgcctaagacatgtaagaagatagcacaacagagcagcaaatcacatgactaggactgctctaggtgattgcagcaaactgaagattttttaggatccctcacgatcacttggggaattttagatgaggattgtatgctgtttaagaatggtctgagaggctaagagttctgttcttcttattctgtaattcttagtttttatttctaccaaaaaatatatagtaatactataatttacatattaaaagatatatgttaaaattttctttacttgaaattttaatanaagaaaaaaaacatattacactattaaatgaaattaaaaactaagatttttataaaaaaaatataaaattaatatgtgcatacttaaaacgagttaggtttagtccttannatatggataaatttaaataaatttaaactcatatttcgtatcaaa

SEQ ID NO: 5442 - DNA, 608 bp, Gossypium hirsutum
gtttcccatacattatcgccaaacctgaattttagttcagttaatagtggttatttagacgtggttatttggacatgtacttgtattttgatattttaattataattgttaacgtttaaaaaattattatttacaaatataattttacaattaatgagtctttaaaaaatgcattatattatgttttacttcgttttttaaaaaaaaattgaaacacattttaagtaaatttttttcaaaaagagatgatgtgcagcttattggtttatatattcaatgtttttcttatgaaagattaatgtgccttattttggttttcacgtgggatttaatgtacctatgcaatctgtaacagcaaattttttttttttttggggggggggggggttttttttcccccaattttaaaagaaacccccccaatttccctttgattgggtttttgggaaaataacaacgggaaaaaaaaattcccgcccaaaaaaaaaaaaaaaccccaaaaaaaacttgttccgggtaaaaagaaaaaaaaaaaaaaaagcccaaaccccccccaaacctttaattttaatccccccccctttcccccgaacaaaaaaaaaaaaaaa

SEQ ID NO: 5443 - DNA, 641 bp, Gossypium hirsutum
tgcattggaccacacccaaagaatgtcatccttttggcatgtgatgccttcggtgtccttccgcctgtgagcaagctgaacctggcacaaaccatgtaccatttcattagtggctacaccgctctggtacgtttccgtgtccgactaaaaatggtttgaagcccctgaacttgtctgatgatgatgcatgaccatataggtggctggcacagaagatggtattaaggagccgacagctacattctcagcttgctttggggcagcatttatcatgttgcatcctacaaagtatgcagccatgcttgctgagaaaatgcaaaagcatggagcaacaggatggcttgtcaacaccggctggtctggtggaaggtaaattgctttttattgaaaacccttttttgggatagcatccaacactaattcctggaactgttgattttcttttacagctatggctctggaaaccgtatcaaattagcctacaccagaagaatcatcgatgctattcactccggtagcctcttgaatgcaacttatgagaaaaccgatgtgttcgggctagagatccccactgagatcgagggagtgccttcggaaatcctgcgtccagagaacactgtaagctatatccgttcttcaac

SEQ ID NO: 5444 - DNA, 631 bp, Gossypium hirsutum
ggagtgcgtgacggaaagattgagaaagaaatattaaacgcggaattggagagtgaacgtggaaagttgaagagcatgcacggagcttgcttgttattagaggaggaaaattccaagcagctcgaagaaaacagacttttgctcgagaaattctcggacctcaaagaggatatgcgtgttcttgaagatgagaacagtgttgccctacaagaagtggtagcccttagtagtctctctctcattttagagacctttggtgccgaaaaagccgttgaaatcaagaaattggagaagacgttgaacaagaaagaagctgaaatctcagaattgagtgaaactgttgagaagttacgcaatggactaaatggtgtcaaagatttgaacgaccaattaaattatcaagtcgttatcagaagtgatttgctaaaacagaagaccatcgagctttcagaagcagatgaaaagcttcaggccacacataacttgaatgcggaactgtaccagactctcgaggaactgaagagggaatatgaagaatctaaacagattagagaaaacttagagaggcagattgttgaactatcggaagataacaaagaacagaaaatggaaatcgaacaccttcgtgagc

SEQ ID NO: 5445 - DNA, 604 bp, Gossypium hirsutum
aaagaaattatgacagcatggaaatgctcaatttgaaacactaaaacagcagctttatacatttaaattataatttaatttgtcatgctggtttgtagaacaactttgcaaatttttacagtgaaagaccctacatagcttgattcaaattcaactcattttctccaactgaagctaaagaaacatatgggtatgttatgtttcagaccgatattgttcatgcttctctaaccaaactctgcaagaaatcagcttataaattcaaccacatttagtataaatttgtcttagtattaatgaacccagtttgcatctaatgcgagggcagccattggagaacaaaagcaccacaatactaaatcctcaacagtatcccacaacatacgagcatcaaatttctactaatccttttcagattgttaccaaacccgatttgttgactgaataatgttttacaatgatgctatgattttcacatttaagacaagtacatgcatagcatgaattaatacaagcacaccaaaagctaaccctacagatcacttacccatatagcgtactctaaaaatggaagtggtttcagttacagcatatttagttacac

SEQ ID NO: 5446 - DNA, 622 bp, Gossypium hirsutum
  misc_feature (615)..(615): n is a, c, g, or t
gtctctcttctaggtttaaacccttctgccttgttcatttaaaaccaatcctttgttgggcagttttttgccgtcaaatgagggattctttactcaatttaccaacattttcacatgcatatgcctgcgtgaatccgaattaaactctgactgtacttaagaaaccatcaataggtgaaatcccaatggattgaatccgtgcttgattaccactgtcaatgtttttagttctagttcaccaagctcatcccggaagacattgttaaaacaataattgatcaatgctatgccatgcggtgagcttgaaattccaaagcaattaaacatatgggaaccaggtgactactacaaatattaaaagctttaaattatagaaaataaaatggttaatgtaatatacacatgaaattatctaatcggagatgatgctattaacttcaaataatagtcaactgagaatagttaatattagattgcaagttgaattttattttatttttaaaaaggtggttgggattttcaatctattgtttatgaagttgcagtccaatggcctataggtggagcctggagctaggaagatcgcatttgtgcaggggcagtgagtgagacccngaactat

SEQ ID NO: 5447 - DNA, 617 bp, Gossypium hirsutum
atgataatatggttttctctagggtttttactgagcataaattgattttcctttttcttactagctctagaattgttgaattgattatgaatttacttaggtatctttctcaactttatgatatttagttgtttgtgtttgaattgattttgtttatattgtttatttatttaatttctttttctagtttctactatttagctatttccatgctagtttgttattgaatagaaccttgttcaggtgctagttgatgaagagaactgaaggcagctgatttttaactgatttcttattgaatttacatgttttatttgttgttcttgtttcaccacataggttaattagattttgtctaaaaaattgtggttgatccgtgattgttggagggtttagtcctgctcttttactttcttcagttatcagaatcttgtttgggttttaattggctcaattggtctactttgattaatttatgttgaaattctggatatgggattataacaggacaattgaacagattaggggagaagttttttttttttttttgaaaacaggaaaagggaaaagggttttcccggaaggaatccttggacctgaagcccccaaattttttt

SEQ ID NO: 5448 - DNA, 611 bp, Gossypium hirsutum
ggggtgtcttttttgcactacaatgaaagtcaccagtggttgatagttcggttcaagagaagcacaggcctgtaataaattccgtatcaaaattgtaaatgttccaaatccgtttatgctgaactgatccaggaagaaaatatatggatgctcaccttccggattgcatctaactcgtacagtaaaacttgataaaactgtccttcgctcacaccatccctactcaaataattcacaagttagtataagaacaaggcctacaacatatagcatatgcatgagtagtagactgagtgttgaatttgggtatatatccaacacagaaatgcttaatctttctagaagtgtccccttgtttctgaaggatcacacttccatactcatgtctcgatatctattggtcatggatatataaaagaaaatgaactttagagcaacaaagactgcatgcatatagatgcgtcattcttatgctaacaggtcgagtttgccttgataagacacaggaaaatgttgaaatatttaccaacaaatccttgatcacaaacctgtaaaatattatcctcagcggcttttgccccgttgccttcctaaaagatatcagaagatcc

SEQ ID NO: 5449 - DNA, 650 bp, Gossypium hirsutum
ttcatgaacgcttgacttttcgtgctcgaacatatatccgtgatgaggtttgttattgcttatgtgtgctttcatgtatatgtttgtgactttattctctgtttttgaaagaacaaattattttagttgtcaatcttttgagatttaaaaataaaattgcatacagttgcacttcatgtttaccatgttgggagaaactgtattgtgctttctgaatgtgcctgtctgagttaataccacacatcccaacactgaacatattgtcttcttgaatactcagattgcaaattatatcccgattaacgaagacttgaattatcctgcaaaactggagcattctgcagacgtggtgtcagaaacagctgtaagtgttcttaacaattctttgcttctcttatagattggattatcctacaaaactggagcattctgcatttgtcattggttgtcagacaatggaaagctactttcctgcaagtcaattcagaccctcatgtaaatgctctttattaccattatttataggacctaacttgatttctacaatttgtgttgagttattctcctcctcttgtgcttataaattgtaactgttataggcttggttaacgtatttctggagaagagccaaagtgtagaaatccagtttg

SEQ ID NO: 5450 - DNA, 677 bp, Gossypium hirsutum
tgcattcggatagtgcgtaaaaacggaaagacagccttacatacagctgtgaggtatggccttatcgatatcgtaaaagctcttatcgattgcgatcaaggaattgttagcatcaaagataagaaaggccaaactgcactccatatggctgtcaagggtcaatgtccggcggtagttgatgaattattgttcgccaatcactccattctgaacgaacgtgacaaaaaggagaatacggcattgcacattgctacgaggaaatcccgcgcgcaggtatctgttacttcatgcatgtgtgtatatacagtaaacatatcatagaagcctctgtattaggagtcagattacattttgccttctctactcaaataaatgggtaaattaatccttatacattagattaaaaaacaaatttacaggggcctccatggtgtatttaccatgtatatatggcatttgtttcttcggcttttcatttttcttatggccttttcttgctttatgtgtatacagattgtgagcttgttgctaacttatagatctactgatgtcaacgccataaataatcaacacgaaaccgcgatggatttggctgataaactccagtacggtgaatccgcgtttgaaattaaagaagctctaacggaggccggtgctaaacatgctaggtacgttgg

SEQ ID NO: 5451 - DNA, 632 bp, Gossypium hirsutum
  misc_feature (620)..(622): n is a, c, g, or t
  misc_feature (626)..(627): n is a, c, g, or t
ttattgatcatgaattttttacaaccctaactttttcaccttttcacacaaaacttgttcaataaatttcctctcattgattggtcaataacttgtaactaagaattcaacttccatggttggtattcaacccaaatcaggtgaaatacaatttctctttttaaaaaagtttactagattaaagtggtaaatgtatccttttatattaaaataatttaattaaaaatatatttttatcctaataactaaacatctaagttaacatttaaaactcatttagacagtcatgcaggatcaccattaggaagatcatttcgtaacaaaacaataacataaatgattaaaacgtaatatttcagatataaatgactaaaatataatctaaaataaataaaactaactatttttatagtttaccctaataattcattaaccaagagtaactcatgttgcttactattatcatctttgacaactctttaagttgaagtatatgatatgtaacatttccaacttttattttattttatctttttcttcggaactggtaaattggtaactgcacaacatcccaaactacacctaacgccctacagttacacgttccacacaaatttgtnnncgtnncaaaa

SEQ ID NO: 5452 - DNA, 646 bp, Gossypium hirsutum
tacaatgggggaacgaggaaagccttgtgaaacgaaaggcactgattaattattactatcacgacaaacaaacccaagttcctaatgcttgcattcaaactaaaaactctgaataagagggtagaggattctaaaagcagaacaaattcaaaatcaaggttactaatttcagcaaacaaggttaactcgttttccaggaagaccacaagtcaaaccttgttttcccatagagaaattaaaggaccatttaccttttgattgatgcaaacatagattagagaatgaaaataaccttatcttgcagagcaaaagcttttttcttgctcacagtttcgttcttcaatgtgccactactgatttgattgctgccttttccccttgcctctggaacactgtctgacctcagtttctgttcaggatagacaaatattgaaggagaagatccctttgccgttaattgtaattcttccatagttacggttgctaaggcaccccttctgttatccacagcagaaaacaagcccaatgaattgaatgctaaactagcaactggatttaagacttcactacttgtgtgatacagactcgcaataatttttttcctttttcacattaaccaagcacgaacgcaagagaattatgaggt

SEQ ID NO: 5453 - DNA, 643 bp, Gossypium hirsutum
tttgtctatatatacacacacatacatccatatgagtagtacaaaactgaactacagattcgtatcttatttttcctttgatagatgtatgtggtcaatggagcactgtaggttgtagcttctgttgaattagtctggaattccataaactgactcagtagttcagcttcatgaaaatagcctgctgattacctttaggttaaaataaccagattctatttgatctaatgtatactttgttgctgacttctttaatagctcttgttttggtttggcataaatccattacacttatcatatgtttcctgtcgagttgtcaacactgtaaaggtaagatgatagttttgatagtctatcatgtaacgatggatgattggccagcagcttctatattatgtcagaaacagatgcctccattacgttggggttgtgttctattgctgttcttctggtgcttgtgaatgaatctagtcatctattgggagatgcatttattactaaacatgtttttcgttgacattattaatatacgtaccagtttggggtttggtttaggatacagggttgaaaagactgggattagtgcacaatctgatttatttatccaaaggaaaaagggccttaggaatggtttcatctattg

SEQ ID NO: 5454 - DNA, 657 bp, Gossypium hirsutum
atcgattctaattaaggaatgctagtaaaacaggaaagctctcttaaagtaatcatctaataactccaaccatgcccaaaacttcaatttttgcattaagtgtgtcatcaaaacagtttcatgctatagattatggaaaaagcactcttggcaatcatcatagaaggacaagttttctcatctcaagaaagttgcatgaatgtgctaatggtattaggtctcaaatattttaatagtgaattgatggaccatagatgaatttatttaggtaagttgtagagttggttcatcatcaaaagtagtatttggtattcaaagtcatcaatattgcaatgttgctcaaacatgataacctataaaatacaagtaatattttattaatataactaaattataatattaaaattaaaatacaaaataacattttaatttgaaaacagaactaaatctattaaaattctgaaaaataagaattatattatatataacaattttttttaaaaaagttaaaagaaagcatggaatttagttttgaatttgattcaaaaatataattctgagaaggtaagatatgatatgaaacaattaaaattttgagaggaaattttagttccgaaaaaaaattagtataattttacagctcacttcatcttggca

SEQ ID NO: 5455 - DNA, 608 bp, Gossypium hirsutum
attattaaaacatgaattatgattaacgttaggtacatgacttagaccatccttttcaaagtacgtgaagaaaagtaatattttccataaaatgtcaaaaatttaattatttttttataaaaagataaaaaatcatggattcactcaatttagaaaggacatcccattattaatatacatcaatagaatccctattgatgaagaaaaaatcatggatcaaattaaatttagaacacactaaggatccatatgtaaacattgtaaaaaggtaggaacttcatttgcaattttgcaacttttaaaaaattgtaatattaatattaaattaaaattgggcctaaaagatttgttataatatatatatatatgtaaatataaatacaaaatttaatggtccaaaccaaaaccattcaatccgaactaaattaagtcaatcaaaacaactaagaaccttaagatatcaaatcgctcaaaaatttaaccataaatatcaaatcaacccaacctcaaaagcaaatgtgaagccggcagagctgtacaaccataagataagatcaaagcattgactacctcattgacttcacctctattgtttactataacccacc

SEQ ID NO: 5456 - DNA, 619 bp, Gossypium hirsutum
taactcgagtcagagtaacataaatttactagagtatttatccaacggtagaattctgtgtgaggtgcccaaagtaagggcaataagaaaattttagctaaattggtgtagtaaaattttttagggctggagataatgttgcaaaactgaagaaatggaaaactaaagcctgatgcaccttcatgtacatgctgtggcccatctatgttttattgtttggtaaatatatgcctattcttatactttaatctttgatttaggctctgatttattaatgctttttctatttgctgtttcgtattcattttttttctttttactgtattgtcttcttgcaaaaatagaatagaaaaagtatcaaccaaacagagccttagtgagagtgagaatttaattctaaagttttgttatcaattttagattgctggcattcagatctagtaaaagtttataccttctaatgatgtacatggtagttctgtctcattacttcaaaatatctgatattgatggaatgaggctatgaatttgatcttgtttggtatacaagaaacttaaggggaggagcctattaacaattcattttttacagggtgcacttgttgctaactatccatgg

SEQ ID NO: 5457 - DNA, 658 bp, Gossypium hirsutum
atttccttttctatatgttcatagtttgatcttcctttggtaaatactagcgctttagagctcctgattggatattgaattctagtatttcctcttttatatgttgatagtttgatcttcctcttctgttgtttaagtttcactagaatgtttgatttgaatctcatttgaccacctttgattagttacaattttactcaaataccatgtttggtttctgagactttctgatttgtatagcatgagaaaccttattaaatgtaggcagccgatgaatatataaagaaagtttttactgttttcttggtttagccaatatggtcttcaagttccaggttcaagattgggaattcctaaccaatgagttgtatatgactatttactaataatgtacttactcttctcaatcttggacagctttcaaggtaatggtaagttatccaaattatgcaacttaacacaagtagataaaataaggtctggtttgagtttattttagattcccaagtagatttaaggtattacaattgctgattttattttgaaattcagaaatgggttacttgttactagtcttagttctagctctgcttaaactatcaatcaactgttgatttccccgtactttgttgtaccaggaatcacccgaatatgtgaa

SEQ ID NO: 5458 - DNA, 726 bp, Gossypium hirsutum
  misc_feature (684)..(686): n is a, c, g, or t
  misc_feature (689)..(692): n is a, c, g, or t
  misc_feature (694)..(698): n is a, c, g, or t
  misc_feature (702)..(704): n is a, c, g, or t
ggggaaaccctttttttttggccccgctttccaaataaaaagtagtttgaacccccagaaattttctaaaataaaaatcctcttttagttaaaacagaaaggagaaatgaaaaaaatgcactcaagagaaatgttgcagcttcagagaaatgcataactacaaaagcagtggggcctttctttatgacattaggaaggaagaagatggtaactagaaaagccccaaaagtattttaaccaaatcataagggtagtattccaaagtccatatcgaagttcagaacttcagataggtggagatggggcagtgacagtaaatactcaaaaaactttgttacataagaagcattttataataactaacaatttgaactggcaatatgagaaaagcagttcatttcatatcctttataatcacatcaccgtccaagggacagtttgattactgaatataccaaattaaatgcagctgctaaaaatattaagaatcacaagcatatcagcatcttagggaaattccctttagctctcccaaaatccatagcccatcaaccatttctatttctactaatcacccatccacattctacatgctctttctattttaatctcttcattcttgaagaagattagtccagaattcaaaaaaaaaaaacccgggggagacatgggaaaaaaaaaaannnagnnnncnnnnntttnnncctcccccccctcccccccccc

SEQ ID NO: 5459 - DNA, 629 bp, Gossypium hirsutum
  misc_feature (63)..(64): n is a, c, g, or t
cttttcgagcagcggtgcaagtgccttgacctcatcgagagagtgagcgtataagaaagcatnnatcttttgagggtacattgcagcccactgagttacataaccagcacttagtgccctccaccattgatcatctctaacttgaactatgtccttgaaaatcaccgttgtttccgacacataagccagcctgtgttcactatctccccatgtttctttgtcagtagggtcaactggaagaacaaatgagcctgcatttctatacttctgaagttgataactgcacaagtttacccaaaataaatataaccatcagtatcttgaaaaaaggaagaaaaagtttatccaatcaaagattaatgattatttatgtgtaatttgaaagtatgtatataatttagaacagacaaatcaatgatgcagaaatatcaatagtggaaacaggatacagagcatccatttttaactggaactagcatataaatatgtatacttttctacaaaagtgatttacactatccagaaaagctgaccaaatggtattaatatattgtagcataagcatagaagattctttcatagaattaaatagagaattagtacctcaaatgcttcctgagtcaaaaaaa

SEQ ID NO: 5460 - DNA, 617 bp, Gossypium hirsutum
cactgatacaattactcagactaaaatacactaaccacactctgaatgtaattaattatgaatattgacgttatttaacatctttcatgatcatggatatcaggcactgaatcagttttttcctagttgctttctgattaatccatctactgaaattgaatgggctttgtcttgagcatttgggatattgtttgaaagacacattctttacccctcacgatcttgttcttttttatgaactttataaaataacctgcattttctgttttctttttcagtatacggggaatacaatccagtgacctgaaagttttgaagctaaagcttgaacaggaggtaaccttgaaacttttaatatactctttgagtctatataaagcttacaggaaatattcttccataagttctgttttctgctagagtcagtatcatgtctttcccaagcccatgtcattgcaaaccaataaatgcaaaacctactgattgggaaccgttaaagaagctcaagtgttcctttctagtggcttcttgagtgttatttttagatcatatgcctcttagcattttttttatttatggaaatacaggttaattggtccatgttgtgctgattctca

SEQ ID NO: 5461 - DNA, 626 bp, Gossypium hirsutum
tgttgctccgccaaagtcatcaagcttctttgcagaattcggcatggacagtggttttcagaagaaatcaagctcaaatacctcaaaagtgcaagtacgtaatatgaccaagaaattaaatatacatattttgttgataattggggataggggttgaattctggggagttggcacttggtcaagaggttgttggcaaagaacttaaatattgtgtgtataaatggctgattagtttaatggaattgtctccttttggttttagaacatcttactcttctctatgattccccatatcactcaaggttaattgtaatacctgtactgctagaaactttcaacttcttaatgaggatgtctggttatgcttttagctagcagtactcttttccttgaaaatcaaatttcaggacatagccttcaatctacttgaatgtgtcactttgccttccaaatcatagaatttgaaaaggaaatgttcccatattggagatattcatatagtgtaatgtgtgagaatttaatggatgagaagtgttttaacttttataatatcccccctggaaggggtcaatcttagtcattatttctgcttgtatcttcttttgccattcgggtttgtttctta

SEQ ID NO: 5462 - DNA, 738 bp, Gossypium hirsutum
  misc_feature (678)..(678): n is a, c, g, or t
  misc_feature (680)..(684): n is a, c, g, or t
  misc_feature (687)..(695): n is a, c, g, or t
  misc_feature (702)..(713): n is a, c, g, or t
  misc_feature (717)..(722): n is a, c, g, or t
  misc_feature (729)..(733): n is a, c, g, or t
gttgctgtgaaatacgcgatggacatttgcagggtggacgaagggaaatatttaaagaatatgttgataagggttctcgttacttgcatggagaacctgtgaacccttcgtcttcaaaagtggggaattctcaagagtattcccccaaggaaagcaactctcaagagcggagtgctgtaacctctgggtggaaggcaaatgaaaatggcagcattccttgtccaccagaggatttggatgggtgtggtcatggccttttagagctaaggtgtatgtttagaggacatgctcttgttcagttaacacaaaaggctgaggaaattgccaaagatctcaatcttgggcatggtcctcaattttctaaccaacaatgcccttgttacaattcaatgggagaagttaacattggcaataataatttaaggaaagcagcttctcgtgaagataccactgataactatttatattgtccaaaagctaaagatattcagagtggagatttggaacatttccaaaggcactgggctaatggtgaacctgttattgtcagcaatgtacttgagaatgcaactgggttgagctgggagccaatggttatgtggcgtgcttttcgtcagattaagaatactaaacatgaactacagttggaagttaaggcacttgattgcttagattgtntnnnnntcnnnnnnnnncaagccnnnnnnnnnnnncctnnnnnncaactgnnnnncaggt

SEQ ID NO: 5463 - DNA, 626 bp, Gossypium hirsutum
ctaaccctatactttaatgtaaatttaaaatgatgttagatattattggtatataaaaattgaattaaaattttatatatacaattgtatataaaatcaaaatttatttaatgttattagaccaaaattcatttatgattttgagatttgtgtttgaatataaacagatggcatcctaataatagcagagattccgccaaagcaggacaagaaagagggactcagcacttgcgttaatattacaacagatgaagtaatatccagatcttatggcagagatttagagaggggaaacaatattttaaaagaaggatttaatttaagaaaccgcccgccatttagacttgttgaattattgaatttccctgtgagatgatccaaagcaaagggacaaagcatgggtagtgaaatcagttggtgcgtaacatctgacttaacttatagcaaattgaattataatcttgtaatataagttaataaataaagaagaagatgtctgcagccaagttgattatttagatgtgagtcaaatcttttgttaattatctcttatctcattgctttttgtctctttttgtagtttgattattttgctccatgttccccataattaccaccctaccact

SEQ ID NO: 5464 - DNA, 615 bp, Gossypium hirsutum
agcaggccgtgcatcttgtcatattgaagaaagcacttgttcatataaatctgtgagcaacataattgtttcaaatagggaaaaataccagatctctgagcaatgctgaagttgttattggttctgattatgctgatagcgcttcaaaatgtgacatcaatgcttctgaaaacttattgcttagacataattctcctctcaaattgcaagctactgataatgaggttgatgtgagtatttctttcttgtgtacagcttaatttggtctgttattgacttattgttgttgtatttggtttgattattctctgtgaaatctttggctaattctttaacttctcagactagagctccaacaataggtgtggaaaattgaaacgcaatgctataatgtaaaattggttcttaagaacctataattgttcatgtgcgttgttgtgaagcatagacagtcttaatggtcttatgcatttttgtgatgttgctataattttgaattctgttgttttgcttactctgctaatttatgctgttgtgctaattgcagggctgcatcgaattcaaaattgatgacaacaagataaatgtggcagtgagctcatttatggctggtga

SEQ ID NO: 5465 - DNA, 639 bp, Gossypium hirsutum
aatttttggcaggctttaaacttatcctcctatcctaaatcaacaatcaaataggttcaaaacaaatcatattttcacatccatgtaagccccaaaccagaatttcttgcttgctatataaccatcatttctgaaatttccagatcctactttggtaagcctcctgctgactagagactacttccaaagcaatcaccaattatcaggacacaagaatgacaacattacctcatcaagcagaccaatctgagaagtgtcaccctcaccaaaccgctctgaaagtatttaaaaagcaaaattttagattttactaaatttgctaactaaatgtagctaaaattagcattgctgagtcaaaagcatgcactaaccatccaatccaaattgtgatgtagagtaaaccacgtcgcccatggtatcttgaagtgtaatctgctctcttgagctaatgtgattatcaacatagttactgccaagaaagttgagttaattaacatacaatacttccatagataccatatgaaaatatttgatgtgtatctcatggtaccacaccagggaaggcaaccttaaaggtaaaagcatcagaatctaacccctgaaaaatctcattgtcgggcagctcaaagtcatcaagat

SEQ ID NO: 5466 - DNA, 577 bp, Gossypium hirsutum
ttaaggaatggagatggatacattggggaatgttgtcaatggttcaatttcccataaggaaactcttggctgcctttcaccagctgttgattcatcccagccaacctgcacaaataagttaaattccatgatatattagcgccatagataaaaaaatccaaaacaacaattgtgaaaattttaaaaaacaaatgatcaaggcaaccactgtaaacataccttgactgatctccaatgtgaatttggccaccgaacaggatctaagtcacttatgccagttatcgtccccatgtatctaaagaatgcccaatcagcagatacaaataacataatgttcacaagtaaacttaagagatgggacacaagcaaagaatgatagacaaaggcattagaaaagagcataaacgagacagcatatctagcataactgcaaaataatcttttgcaaggaaagccaggccagtcagacatcagttccacctttaaaaggatgataatctaagcctttaataaggtaagctattctaaatggtaagaatcaactatcaaaagcaaaagagaaaagaaacttaccgac

SEQ ID NO: 5467 - DNA, 653 bp, Gossypium hirsutum
tttatcagttaagaatcttctcatcaattattgtttcttcaagaatttgactacactgttcaaacattgattttctcaacacatcaaacaacccaacttacgtctagattttatctttcttttatgatatttggatgtagagtcaggtctcatttaagaaatattccttaatgagtgcctaaaagccaatattaaagtttaaaataattataatattataagaagatgttacaccaattctattactataacctgaactatcaagccaacacacgattatacataaaaatattcgatttcagcatttacttaggtcggtataaaatttgtactctatatgcttgtaaaatattccaatcatgaagttttaggcaaaagtttatttagaaaatgtgtaaaatatctattttttcataaataattgatattaaagagatatttttatcttttaataatttatgtaaaatctataatgaaattattttaaaatataggcataatgatatatttaatcctcatcgtttacattttcttttatcaattgggccattatttttttagctaaatttgattattaactttttaaaaagaattaaattattttttaaacaaaatactaactaaaatattattttttccaatgatgttgacgt

SEQ ID NO: 5468 - DNA, 609 bp, Gossypium hirsutum
tgtattaaggcctacatgtaaaacaaaagaaaaatcagaaatcagatacctgaggagaatgatcaaaaggggtttgtgtttgagagagagagagaacctcaaggaatggtttagacaggtggacatggtcaagtgctccagttaaaatttccctggccttctttgcatttccagaaacctacccaaaaagatatcaatgggaataagaatcaggacattagtgagaatttagcaaagataataaacacttggaagtaagaggcaatcagactaaaaatgagttcaacaaaagtttctgtagtcttagacacagacctaataacataaaaaacaaccttaagtgccataagatatgtcaggtgtgcgtttcatcttattctttagggaattttaagacgttaatctggcttctggtgtgaatcatatgatgatttacaaatgataactgaacattggttgttatgcaagccatgtgaatgaacttataaagagaacagaaatgtcaatacggtagaggtaacagagtaattctgtgatacaacatactacccatttagttttagaaagtacatatgtgaactatatgatgaattaagaacgatgattgga

SEQ ID NO: 5469 - DNA, 918 bp, Gossypium hirsutum
  misc_feature (489)..(493): n is a, c, g, or t
  misc_feature (498)..(501): n is a, c, g, or t
  misc_feature (504)..(504): n is a, c, g, or t
  misc_feature (516)..(517): n is a, c, g, or t
  misc_feature (519)..(520): n is a, c, g, or t
  misc_feature (525)..(526): n is a, c, g, or t
  misc_feature (535)..(541): n is a, c, g, or t
  misc_feature (543)..(556): n is a, c, g, or t
  misc_feature (562)..(563): n is a, c, g, or t
  misc_feature (565)..(567): n is a, c, g, or t
  misc_feature (570)..(582): n is a, c, g, or t
  misc_feature (587)..(591): n is a, c, g, or t
  misc_feature (595)..(597): n is a, c, g, or t
  misc_feature (601)..(603): n is a, c, g, or t
  misc_feature (606)..(613): n is a, c, g, or t
  misc_feature (615)..(617): n is a, c, g, or t
  misc_feature (620)..(621): n is a, c, g, or t
  misc_feature (623)..(635): n is a, c, g, or t
  misc_feature (637)..(640): n is a, c, g, or t
  misc_feature (647)..(649): n is a, c, g, or t
  misc_feature (651)..(656): n is a, c, g, or t
  misc_feature (658)..(659): n is a, c, g, or t
  misc_feature (664)..(665): n is a, c, g, or t
  misc_feature (668)..(670): n is a, c, g, or t
  misc_feature (672)..(675): n is a, c, g, or t
  misc_feature (677)..(681): n is a, c, g, or t
  misc_feature (683)..(686): n is a, c, g, or t
  misc_feature (695)..(700): n is a, c, g, or t
  misc_feature (708)..(710): n is a, c, g, or t
  misc_feature (712)..(720): n is a, c, g, or t
  misc_feature (724)..(726): n is a, c, g, or t
  misc_feature (728)..(729): n is a, c, g, or t
  misc_feature (731)..(731): n is a, c, g, or t
  misc_feature (733)..(755): n is a, c, g, or t
  misc_feature (760)..(774): n is a, c, g, or t
  misc_feature (779)..(784): n is a, c, g, or t
  misc_feature (793)..(796): n is a, c, g, or t
  misc_feature (799)..(802): n is a, c, g, or t
  misc_feature (812)..(812): n is a, c, g, or t
  misc_feature (816)..(821): n is a, c, g, or t
  misc_feature (824)..(830): n is a, c, g, or t
  misc_feature (832)..(842): n is a, c, g, or t
  misc_feature (848)..(854): n is a, c, g, or t
  misc_feature (858)..(871): n is a, c, g, or t
  misc_feature (873)..(896): n is a, c, g, or t
  misc_feature (901)..(909): n is a, c, g, or t
aagagcttaattagattggtgtctgaaaaataacatgtagcggaatcgattccatctttttcatcaaaatgtgaacttgccattgcattcttcactgtgcaaataaataattattattgctcaacttttctccggctcttcttttcttgtttttgggccctcttttttatttactcaaaaagcgttggggttgtgcattatgattcagtttcttaaatcaagggctaattcttcaactatgacttaattattaataaattttgttagtgcgaattggttttgttttttgatttatcaacttcctgattgctcctcatatttcttacattccaatttaaatattctactcaatacatattaatttatttttggataaatcgtattgataattatctaactattattaaattttttcggtcatccaattataaaaaattataaatgaattttttttattgtccgccattaaattactaccaaaaaaatagnnnnnccaannnnggnaaactctgcagnnannatcanntattgaatnnnnnnnannnnnnnnnnnnnnaacccnncnnnatnnnnnnnnnnnnncacgnnnnnaatnnntcannnaannnnnnnntnnngcnncnnnnnnnnnnnnnannnnaaccccnnncnnnnnntnntcctnncannnannnnannnnncnnnnctaattttnnnnnntcccccannnannnnnnnnntatnnnannanannnnnnnnnnnnnnnnnnnnnnncctcnnnnnnnnnnnnnnnctctnnnnnnacccaccannnncannnntactctaccnccannnnnnccnnnnnnntnnnnnnnnnnnatcccnnnnnnnaacnnnnnnnnnnnnnntnnnnnnnnnnnnnnnnnnnnnnnnacacnnnnnnnnnaaaactcaa

SEQ ID NO: 5470 - DNA, 610 bp, Gossypium hirsutum
tcggaatacttgatagagatgctcccagggtggcacgtcgaagattttcttgattcctcttcaccttcctttggtttctgtaaggtttgcattgatctattgtttccctttcttaccactaacgtcatgacacagaatgatatgttcccttttattaagttgtgtttatgaatgatgtgatttttttcttttggatctgaataattttgttttctttttggttttcagagtgatgattgtatgttgccgttccttgatgctgatcttgagagcaatatgactacttcctcaccagaaagtttggggcttttggttccccaatcaccatattccttgtatcctccccaatattcttcacaaatgggagggcaaatcgggttgaaggagacagacgaaattataggcatgaaagctaacaggagacgggtagatgattcctttacagttccttggatcagccctcaatccactagctccaagagatctaagcgtctctggtaggatcagattttcaaagtacaaaaacttcaacttctcttatacttggacaacatcattgccctttctttgcattttctcatttcttgctaatttagatttcagtgtgatg

SEQ ID NO: 5471 - DNA, 402 bp, Gossypium hirsutum
tttctaaacatcaaaacaccgaactcaaaaattaaaaacataaaaaaacctgaccagtttttacggatagttaattaatttccggaaaatgtcgtcctactgccggcaataagaaagttcggaacaaattatacttctatctaactattatccagacaaaaaaaagcaactactgaagaagctattcaggcactatatgacaggaataaagtcggagcagaataagaaagaaaattaactacagcaggccagttaaaaatctgtaccggataaaaaattctttacaactaaacagaaaaatctaaagcatgatgtccaaataacataaaagcaggttcagattacaaataatgcaacggtaacatttatggtaattaaacccttctttaatccctactacag

SEQ ID NO: 5472 - DNA, 618 bp, Gossypium hirsutum
aagatggaagcaaacaaggagtattatttaatgcatcataggatgtttcttttgcctttccacaatcaaccacaaaaaccacatcattgatggtgatgctagtctcagccatattagtagctagaactattttcctcactccatcttctggcttttcaaatattaacctctgcatgccaagaaacatgaaagaaaaaattgtaaaagaggaagtgaaggaagggaaacaaaccaaagagcagttactgaaaatcgtcattctttcaagagcaagaaaaaatattttgaccagttaaaccgtccatagctactaacaatatgcacaggatatggaaagtaaaaactgtattcacctgctcagagctaggcatggaaccatggcatgcaagcaacaacaccttgctagggtcacctaggagaggatgagcctgaagctgaccttttagagaatttatgtcatcccaaccagtcatgaaaaccaaaacagcaccaggcctctctttcctcactatgtggcaaagaacatgctcaatgagattgaagccaattgagtcaggattccaacaggacaaagattctcgtgtgcgtaaactacatcccctgaaatcagcatcttca

SEQ ID NO: 5473 - DNA, 647 bp, Gossypium hirsutum
gacaattttcgacggaaaagtgattagatcgccgaggaagagaaggatttttttgttttttgtttcgggaaaatactgtttaatattcgattggaattggttgagttgttaagagtttcatttggcaagaggaggaaaaaaattggatctctttgattgattttgaattattttgttgttgttgatgttgttttggaagttaacggatctcgaaatttgtcggaaaatagaaagaaaagaaaggaaaaggtttttgttaaattagatgcagattttctgaaaatcgacctacattgattgaatttgacaggaagaagacggtggcgtatcgggggggagatgaggagggtggaaatcggggttattgctggaaatgtgcagtattgaagggaaggggaaagggaaaatgagagggataagaatgggggcaacgaaagggggaggaggcggcggaggggagagagttgagaagttgaagagctcgagaacgaagctgtggatgatacgcgccaccacatcggtgatgctttggacttgcatcgtacaattaacggccttgggggatacttggggtccgcatctccttaaaggttggccttcctgtttttctcaccaggattcttccgtttccgttgttgaagataagg

SEQ ID NO: 5474 - DNA, 620 bp, Gossypium hirsutum
  misc_feature (616)..(616): n is a, c, g, or t
cgtctgtaaaacattgaatatataagttgatggaagattgaattcagagccattgaataagtggaaaagttaagatgttagtgattcatacaatctacttaccactgttatcgacaccactgctgtagtattctcttccttagctttttctttcttcgtctcagtcattagtgttgtgtgatccttcttgttgtcttcctcctctagaaattgtttttcagcattcgctactgtgttgtctggttccagattttcacagacctgaacaaaaatagtatcaaaagattggtgaaacatggaggttttcagctttcaacttgatcttcagactttcaaaacaaacaaaaaaaatttcttaagaactagtctctgcaaaattttagaagtaacatgactgtcacctctacttcaggtgatgcttcattttcattttcttctgtagctttcagtgagtcatcaatgatagtacattcttccttcacaatcgacattggaccttcatgaacctgcatgaagaataaggtgtacttttattaataattacaatgatagtatctgaaagagattaaaattgttttaaaaaaaaaagtttaaactgagttagtatcattcatgncccc

SEQ ID NO: 5475 - DNA, 621 bp, Gossypium hirsutum
aggtttagagttcagaccttcagttgaattaactgaatagtataggaaactccatttgtaaattgtaatctagagaggaaacagctgatagcaaaaaacataatacagcagtaaaagtaccatgaaggtccctgtaataagagttagattgcattttgcactttttactcaaaaaattttcaaactaatccttgtacattagatcaaagagcaaacttatcatttctattaaaaactaacgtgattgatggattaaccagacagttacacgtagcgtgccacatgtatctcatttgagaggtaggcacaagtttttagcaatagaaatagatgggatttcaacagaaggaccaatttgctctttgatctagtatacaatgactaatttgtccatttttataatagagggggcaaaaagcaatctgactcttagtacaaagggcctccatgttacctttacctaatacagaatgtatatatgctctgatcatatatggcaattgataatataatttatggaagctacagtatgttctagtaataacaaaccaagaacatggctcaggacagacctaagtgagtagagccatcccactttacaaccttaatatctgctccacg

SEQ ID NO: 5476 - DNA, 613 bp, Gossypium hirsutum
ctctttactgataaatgatgctctcaaagctttgaagctcttataactaaatcaaactccttgtcataagttggccattttttacgtacatcaatcaacttctcacttaagaaagttactagttttttttcctagttaaaacactataatgcctagggtgagcaaaattcgattcgactcgaaaaaatcgaaaaaaaattcgaatttcgagttaaacgaatcgagttattcgagttaatcgagttattcgaatcaactcgaatttttttttcgaatttcgagttcgaatcgagttgagttttcgaattcgaataactcgaataattcgaataattcgaatatcaaactataatattttacagttttaccctaaactcccaaacttttttacttttccctcaaaacttttactccttcccacttttcccccaaaacttttactcccctcccctcccaaccccccaatctacccaaaatctatttcccaccaaaattttactcttccattcatttttttttcaaaattttactcctcaaaaccctcaaaaccttttattttctcccaaaatttttactccctcccacttttcccctaaaacttttattctcttcc

SEQ ID NO: 5477 - DNA, 653 bp, Gossypium hirsutum
atgatactttgattctaaatcatgaaaggtatgtccttgcactggcctgtatattcttcagttttggtacattttacattttggctctttggtagtctgaatacgtaatacagatataacacgacatgaaaacagaaatatcgaagtttccaaaaagttaggatattaaatttcttatataataatataatataaaaaagttatttatacttatcaattgaacatccattagaacaaagttactcattgttgattctgaatttagaagtagaaggaaaaaaaaatctcttgatgggctcttatgtgtcaattttcatacatgaggatatgtattttgttaggttttgatatatctaaggatcaaatactttatctatatttgagtatttgtcgaacacagatatttaaggatacacttattttgtcatatcagagccgtgtctgacactttgacactctccttatacaagtatttgtgtctcatatatgttaaatatgaatatgtgtcaatttttatatacaaatatatgtattttgttaattttttatataataaaggatcatatactttactgatatctaagtatttgtcgaatataaatattgcatacatagttctttttgaaaacaacctgtattctcagaccaataca

SEQ ID NO: 5478 - DNA, 885 bp, Gossypium hirsutum
  misc_feature (171)..(171): n is a, c, g, or t
  misc_feature (185)..(185): n is a, c, g, or t
  misc_feature (204)..(204): n is a, c, g, or t
  misc_feature (239)..(239): n is a, c, g, or t
  misc_feature (332)..(332): n is a, c, g, or t
  misc_feature (474)..(474): n is a, c, g, or t
  misc_feature (556)..(556): n is a, c, g, or t
  misc_feature (670)..(670): n is a, c, g, or t
  misc_feature (836)..(836): n is a, c, g, or t
gcctatgatttacttaagggtgacctcaatgccttcttccaagatatatgaatactttgattctaaatcatgaaaggtatgtccttgcactggcctgtatattcttcagttttggtacattttacattttggctctttggtagtctgaatacgtaatacagatataacacnacatgaaaacaganatatcgaagtttccaaaangttaggatattaaatttcttatataataatataanataaaaaagttatttatacttatcaattgaacatccattagaacaaagttactcattgttgattctgaatttagaagtagaaggaaaaaaaantctcttgatgggctcttatgtgtcaattttcatacatgaggatatgtattttgttaggttttgatatatctaaggatcaaatactttacctatatttgagtatttgtcgaacacagatatttaaggatacacttattttgtnatatcagagccgtgtctgacactttgacactctccttatacaagtatttgtgtctcatatatgttaaatatgaatatgtgtnaatttttatatacaaatatatgtattttgttaattttttatataataaaggatcatatactttactgatatctaagtatttgtcgaatataaatattgcatacatagttctttntgaaaacaacctgtattctcagaccaatacatcatataaagaaaacaataaacaccttaagcaattttagttgataggttatttcattctgatcacattgtatttttaattttatttttactacaaataacacagcattctgttcaacacaatttcaatggataanatttatttgctatgccttttttttttcctattatttatgtgatacacct

SEQ ID NO: 5479 - DNA, 564 bp, Gossypium hirsutum
  misc_feature (31)..(33): n is a, c, g, or t
  misc_feature (504)..(507): n is a, c, g, or t
tctcattgaattatcttggttttgaatttgnnnaaagattcaaccctgctggttttatctggctgcttactgaaattgaatctagcatgtgtatgtcatgtttcattttatctatgacttgtgtggttgttggtttttattttctatttttttaatttctgacttcactaatgctctacctttagcaggcctaactcagtcatgaagcgaaagaaaactgctgatggtggtatgaagaaaaggtattgtatggcctattgtgctcccgctctttgcaaatcttagatctgcctgatttaaccttgaatttctttaaactgttggcagggataatgatttacacaggttactttttatgccaaatggacttccagatggagcagaattgacctacttcatcaaagggcaggtgcaatattttatgggaaataatatggtttatttgcaataatttatgcctattagtgttactaaccaaaattcttaatatgtttttcagaagtnnnnttgagggctacaagcagggaaatggtatagtatgttgctgttgtgagagagaggtga

SEQ ID NO: 5480 - DNA, 630 bp, Gossypium hirsutum
ataatggtgataagaagctgcttgaaggatctccccgtctgacattaactgcgaacaaaatcaaaattagaacaaaaaagattgttgaaaaaaagagatgataggatgttcacagagagcacagaaaagataatcctacatagtctaggaatatatactaaccaaaacagaatcaaaagctggtaggaaatcaacttgatgagtcacaagtaaaactgcctttgacgcaagtgcttccataacatattcctgcaacagtctaagtcagctttgacataagttgataacaaaaaagaattgctaggtgatggtagattttggttacattaaataaacttgtagcagtgtgagcatccacagcactgaatggatcatccaagagatatatatcagcatcctgatagagagcgcgagcaagttgaattcgttgcttctggccaccactaagattgactcctctttcaccaatttcagtttgatcaccataaggaaataattcaaggtccttcaccaaggaacacctttcaagcgtttcttcatatcgttgcttatccatggcagatccaaataatatgttatcttgtatcgttcctgtctggatccaggctgtttgagaaacataaggcaatc

SEQ ID NO: 5481 - DNA, 650 bp, Gossypium hirsutum
cattttcttttttccctcgaaattgcgttaattgctttacgccataatccatttaccatcttgtaagtaaacatgaatgtctttaatttatttggaatatttgggacctagctatgttctttaaaattaagttgccttctctcgtccgtatatgataataaaaatacataaaaaggttaaaatatgctgttggtccttctactttgacaatttgagatttcaatcctctctcttcttttttaatttaaaaattctagtgtcatatcatacaaggataatcttataaaaaatttaatttgatcaattttgataaaaagtaatttatgattttaatgattagattgagatttcaaataaaagaaagtgaattgaatatgtaacttttataatacaaatactaaatcttcaattttgtcaacatacagtgactaacagcatatattaagcataaataaaaacctatctgctaatagctactccgatcagtctcagtccgggtctttatacgcactcatgcattagactcactacccacccaccagttgcatttcaatccagaaaacagaaattgatacctttatggatgccatgttcgttgaatcagaaattgactatataagcagaaaaaagactgacagagaagcagcaag

SEQ ID NO: 5482 - DNA, 607 bp, Gossypium hirsutum
aaacttgctgctctaaccatatatagctagaaggctaggtataaaaagtataagaaagaagattttgttttaagagtgaaaggagtaataattaaagaatataggtgaggagtatgattaattaattttttaaatcacaaatgcaatcataattgtaattataaagaatatattcaaataatcataattagaatgtattattacaatacatgaccggacaaatagttaaaacatctctgaataagacctactaatattaagacttaaatcaaaatatatttagagaatatccacatatgatttatataagatataattcgaagctaagatcacaaaattctataagcctcaatcttgccattaaaccagggggagcttggatcagaggaggcttcacttccctaattttcgtctggcttgatcactttttgctaaggtcgtaattgttggtagtttcttaaccttttcttttatactctatttataggagttgtgtttatgattaacgcttctaccagttatgcttccacaaatttgatgtgaggaatttgtttgtcgacactatttctctacaattaatcattcaacgtgcttgactggttagcat

SEQ ID NO: 5483 - DNA, 581 bp, Gossypium hirsutum
tcaattatttcatagcatataaattagtaaggtagctgttgaggcattctaaaagcattttgcagcagtcctgacgaagaagagagattccatgtttttgtcagacaacggaaggaactggagcaacaattaacaaggtatcaaagtcctcgttccccactgtgaatgaatttaagcatagccttcaatgttggttgctggggagtggattccaatcacaaccaaactaagaatcacaaaaattgttcaaattgaagaggacatgagcccaactctctcttccttttatacataaatatgaatccacaatactcactcattttctgttgagtttttttttccctagtttggttccttgtcaaatcttaatgcagaaagccgcaatgaacgccagcttctggtacgcacatcaaaatactttattcaaatctttgacatgcttatccttttaataaattttgtgctgcatgtgacgaaattggaaagtaatcagagagacgaagaaaggtggaagggaagtggaggaaaaaatcctaatcgatcgagtcaaaagggaattagcgatttgatagaaatgaaga

SEQ ID NO: 5484 - DNA, 638 bp, Gossypium hirsutum
actaactttgagtttgataaagtaggatggatagaagttcttgctaccgttgctgattcaagaaatgtgtgctttacattcggcggacaccattcaggcatgtcatcatcatcatcatcgaaaatattcttttgtggtgcaaccatactagtgataacaggtgtgaagactgagctgcttttgacagtatgttttgcttgtagaactggagcaagtttagaagctttatttcctggaggcaagttgagacaactgttgaatgcaaactgaggagaaaggatatcttctgctctccttttacactgagcaggtaatgactgtgtagttggtgaagacaatggcactgacgcaacaactttctttaatccttcaaccacaacattcttgtcaaacactgctgtatcgaaaaccttgcttcttggagttctagatatgccacactcagccccaaaatcaaattctggaagatcatcatcatcaatggcaggaagttcttttataataactgatggcagagatattacaggattttgatgtcccaaaacagatttagtttcctccggtcctgaggtatctacatgaggcatttcatttagagaagactgccccttgggccttaaggaagggacagaatcaaa

SEQ ID NO: 5485 - DNA, 578 bp, Gossypium hirsutum
ttctcattataaaatgtgttttttggtaaattacaacttcggtaacttatatttgcttaaatcaggatccttgagtcactaatgacacttaacaaaccgctatcgttaatgactatataataacatttaaaagttccatgaacatcacaaatttaaaacaaaaatcatctaatacaaaaaaaattattaaaactgagtgtttaattgtataaaaagttaaatgtttaacaaaatataattatcactatacaaatatttaattaaatttattaagttattttttttatagttaaaaattaagtttgttgatgggtcaatttatttggaataatttttttaaatgttgcttgtgggatcaacaattaaaagtattatttttttatgggagttttatctcttgtgcgttattgagagttaatgtgccattaggagaagcccgatgggcttgacttacaaagctgagagcacttaaattggtggtcctacaagcccgtaaatggtgacctatatactacagctaagagtttcaaaactcaacaaaggctagtgctaacatctccttagtcagaggcaaaatc

SEQ ID NO: 5486 - DNA, 645 bp, Gossypium hirsutum
gtatttccttcttgaaaatacgtaacatgttaatagatattcattattctctagtgcttcctggaggagagccggcagttaatgcgcctaccgcctcgccagtcaactgctgaagctgatcttatggttccatttcagttggtatgagattatttctattaacttgtttgaggccaatatatatgacaaatttagttgtactcgaatgtgtacaaagataaggacttctttttcaggtttcagattgaaataactgtttgtatgaattcctcggctccttgctttgcaggcagccataaagaccattggggaggaagacaagtacttttctagagtatctttgcagtaagaatctagttgtttttcactcagttatgccgtatctggaaactataaggaatgtgatcttaattgtctttctcattaatcaggatgccttcatttgggatcacagtgaaatcctctcaaagagatttaccgaagacaaaagcatacactgatggaagttcagagacctcagttggtggttgggatggtattgcacttgaatattctgttgattggcccttacagcttttctttacccaagaagtgctctccaagtaagattcaattgctttataggtcccttgaatctttcttaat

SEQ ID NO: 5487 - DNA, 630 bp, Gossypium hirsutum
tcttcttcctttatcaacattgccaccgtggatgcaagcagctaaaacacccaagaatgtgattttatcaggctttaaccctcttttttgcaattcagtgtagtgattaaatgctttattttcgaatccgcctataccataacctgtaatcattgtattccatgttgccaaacatggttctttgatgctcttgaagattcgttcagctagctcaatggttccacacttgacatacatgtctataagagcagtaccaataaaatcttccatttctaggttattcctaaggataaaaccatgaagctttttaccaaactgtaaataacccaattgtgaacacccagatagcatagtagcaatggtgatggcatctggtacatgtccatacatcctcatttgacaaaataactccatggcatcgccagttcttccagcctgcacacaactggatattatcgagttccaactgattaatggtttttcctgcatctcagagaacaaagagaagacagcgtctatatcattgaaccttgaatacatgcttattagcccatttgcaaccaaacaatgtatgaaaagaccagtctttattccgtaaccatgaaaagcaagtccaatagcaatgttagc

SEQ ID NO: 5488 - DNA, 622 bp, Gossypium hirsutum
ttttttctctagtgtttgtttgagatgttttacggattgctaatatgacaacatgacgtgtgttgtagttgctcctatttgctatgcacatttggcagcctcacaggtgggtacattcatgaagtttgaagatacctcagagacatcctcgagccatggtggagttactgcacccggagccatttctgtccctcagctgccgaggttgaaggagaacgtctgcaattccatgttcttctgctgagcccccatgttttgtataggcttttggttgttaccaaaacgactgaaacgtttttaagttatatgaaagttgaaaaaaaaagtagggttataattgatgatgtggtggtggttgaaacatcatcccttttgggtgttttgccctactgtatgtaggatatatgaaggtatgtttgactagcacttgttaaatggctttcgcctctgtagcacctgtaatcctgtttggtgataatcaatgcatagcctcagctatcgtcaacttaaaacctgctttgtaccctgtggaatgtgggatatcccatcatgcgagttgcgatttgtcctgagttatataaaaacaattgtaaatcaaagaaagtagagcgccagataggtc

SEQ ID NO: 5489 - DNA, 388 bp, Gossypium hirsutum
ttttttcctttgagagagttaattattaccagtccatccgtgttgttgaagtagtgcctccagagtggccttagtttctcttgtccaccaacatcccaaaccgtgaacatcacattcttatattgaactttctcgacattgaaacctggacaagacaacacacaagaactcagtcgttatatcaacttgtccatccaactcaactgatatacacactgaaatagatttcacacgaccactttgttcgaatagcagctcctccgtggacaaatgaaacagaaaaccatcaaaatatgggagcctcaatcatgtaaatcaaccatatctaaaaccaacttgcctaccgatagtgggaacagttgataaagcttctccgatgtgtagctgg

SEQ ID NO: 5490 - DNA, 657 bp, Gossypium hirsutum
tcctgggatcacgcgccaatgacggtctctccattgtaccaacattgttgaaaccggaagcagaccgacggagtggtgttgttgtcatgtgggaatctggacggagggtagcgatggatactcgccttttaggctgaaaaccttgtgtcttgatcggaggtttgacagcaatggaagtacgtctcggtttcaaaaggtttttcgtgtttgttggtggtgccatcacggtttcggagttgttttctttgtcatctgatggtggtgctgttaccatggacattctagttgcctttccttttgtggccataggtgatgctgggggcatgaagttggtgattcttcgcaacggtaacctcagttttgatggaccaagtggcggctttttatccgctttggtattctcagtcgcttgtttaagagatggtctagtagaagcagcaacagcaaaagctctggattcttgctttaatcgggttttccgttcctctgctaactgattttctaggtcacgaacctgacatcaaacacgaagaggaaaaaacgtttatgatccaaaaaggcggttctactcagagataaccggttcgatttatttaatgtatgatttaccttttcttggagacttttgcatatatgttctctggcagaaagtctcaa

SEQ ID NO: 5491 - DNA, 622 bp, Gossypium hirsutum
  misc_feature (53)..(56): n is a, c, g, or t
  misc_feature (614)..(619): n is a, c, g, or t
ggaaagtatgagagccttagctagtgacatcgtctccacaactgtgtacggcnnnncattggtaaaagggtgtaaatccaggaacatgtccatctcctcatctgtcaattctatgtcttctatcttgtcaacattacctaagcccttctttgcaaagtcatctgacgagaaatgtctaaaagcatcagcacctaactgcacaggggtgcacaagaacgctttcttctttagcagtgcaataagatgagcccgaaggatcaaaccatacaaaactggggattcagaatgtggagactcatcaataactggaaacccgtgatgcattgtggttttgaggatgtgtacgatattaccgaccttctcaattccatgacacagctgaagcgggccagagacaacatcagcaacggttagctgtctcatataaggttcagcatgagtttctaggtatggaaaaccttttactttcataataaggtcataaacattgccattaaatgcatccgctacagtcttggaaacaaggagaaccaccattattaatggcaacagtaatagattattggtcaattccagaattataacacacaaggagactgtcatcctcatagatnnnnnnaaa

SEQ ID NO: 5492 - DNA, 606 bp, Gossypium hirsutum
cttttttgacacgatatcattgcatgaagacgagctacaatcatgtcaccccaaaacgtccaaatttcacattttatctctcttgatgtgaaagatttaacgatatccttttagtaagtttgacacctatacatgcattattgcttggatttcaaaattttgtcccattttaatttcatatggaattaatgatttaaattttaaatttttttatcaaaataaattattaatatctaaaattttgttctcatattagccaaagtgttacattaaaaaaatttaaatatgtaaacaaaattttatggctatctttaaaactatcgttcttagattgtgacccaatgttcccccacataaaaaccaaaccaagctaagcaaagctggcaaacaaaccatatcattatccaaaaaaacgctgttactgtttcggcccttttctttcagtcaagtaacctctagaaacgtggtgccgtttcattggcttatcaatttatcacgtagacaatgacaaccagcaaagctagcttaaccagtttaggtattcgttgtcccatatgtgatctaagttcaaatggtattaatcgcattgcctaattaaaaaaaaaa

SEQ ID NO: 5493 - DNA, 597 bp, Gossypium hirsutum
gcttgtactaactgggtaatgcaatttttgtatctctctttaatatgcttttttctttccagcgtagcatgtaactttttccctagttaagtcctaataataggtctcaataatggatgcaggacagacatcctcatactattcttgaatcaggatccaacccttctgcgctctcatgttgttcgccaggaagggattcctcttttaggacttttggtatgcattttaattttattagtgattgatgatatgatgttaatttttgtgttgaagcagtaccattggatgaacttaagaaatatcctgtcactgttttacatgtgtctatatatgtggagatagaattagaactgatatagttgtttatccacaggttaaagggatgataacagattttggggaggatatgcactgccagtttcttgaaattcttcgtagtttattggattcgttctcattgacaggagctcaggtgcctaccttgatctttatttctatgtgctggtgttatattgtattttggtagatgggaaattgtatagacttacactgaacctaaatccaacctttacttgtcttaagttgctttactgcacg

SEQ ID NO: 5494 - DNA, 633 bp, Gossypium hirsutum
tatattttaaaaactacatactgcaagcagcccagctaaaaaataaattaagaaaattcataaagctaagagcatacgttgttttacaaaataaggccaaaaatcacaatgtgaatggagatttacctcttcattttccatgtaagaagtttgggggaaagaaagaattacttcatcttcctggagaataaaccaccatatttaggaacaaaaaggagtcaacacacacaaccagatcagagtaaaagttcaaatgtataataattgtcacacaaataataagttttttttggtgaattacaaataataattatattatcccctctgttggaagtagaatgaatttaaccattaaactggacaaaaccaacagtggtttgtatggaattctagcaaagaaaaacaatcctaccaataattaaaaaatggatatttttttctttttgaaaaaaaaaggcagaaatgaaataagaaaggaccaagtccataagttttggacctaatatgaccaagcataaatgtttgagggtcaactctcacttacaaattgaccataacatctgaaatgaattaagaaatataaaatggcacaaaaatcttacctctattgatgacacagacgtaacatcaacc

SEQ ID NO: 5495 - DNA, 618 bp, Gossypium hirsutum
  misc_feature (6)..(6): n is a, c, g, or t
gggacnagtgcgagcttataaagaacgcgattagcaacggcgaatgttatggtcacggcggagctaattgcgattagcttagcgtcggtcgcctggtttggcgttttgcttgaagcgcgaactctgaggtttgggcggaagacggcggagctgttgggtggagctctggtgaagctacggctaatatggcgaggaaatgaagaagggttttgagggagtgacattaagatgggagattggagcttagctgaattggagttgaaaaggaaggaagctgcaaaatgggagggaagcgaacgaaacgacgacgtgagggggaaggacattgtaaggaagaaaggttgactggagaaagaagagaacgcaggaggcagactaatgtctcgtttggctacgggcggaaacaatggtccgtgtttttgacttgaacggaaatttttgttagaccaaagttcaatcgtttctttttctaccatgaatccatgatatagaagttcctccctaattcgtgaactaatctttgcatagtagtgatctctctgccaatcctaatttgagatagggtaattggtactcttcttttggcattcggtgatatttaccgtctactcctttcct

SEQ ID NO: 5496 - DNA, 626 bp, Gossypium hirsutum
tgtcctgttattagcataactggcatcgcagggattggcaagaccacacttgctcagctggtttacaatgatggtaaagtcaaatattttttcgacttgcgagcatggatccatgtctcagaagattttggtgtcacagagatcacaaaagccattctacaagcagtcagtcctagcatttcttgtaccaccgacttgaatttgttccagctcaagctaaaggaggagttatcagggaagaaacttttacttgtcttagatgatgtacggcttcagaactacaatcaatggagtctccttatccgtcctttcgaagtcgggaactcggggtgcaaaatcattgtcaccactcaggatcaaaacatttcacaaataacaggtcccttagtccatgatactcctttgaaagagttggcagatgatgattgtttgtcaattttagcttggcatgctttgaaaagcaaaaatttcaaacgccatccacatctgaaagaaattggccaagaaatagtgaagaaatgcaaggggctaccttcagcggtaaaagaattggcgagccacttgggcgccaagcaggtatacaaagagtgggaagctgtatccaggagcaagatttgggatcaact

SEQ ID NO: 5497 - DNA, 641 bp, Gossypium hirsutum
tgattacgaataagcattcattcctaggaggctgattacgaataacattattttggcctatgaaatctttaatgtgttttgatgaaaaagtaatgggacaaaaggtcactttgccttaacgttgaatatgaataaggcttacgatagggtggaatgggattttttgaagcaaatgatgttgaaaatggggttttccaaccgccgggtgaatcttcttcttcattgtgatcactttattacttactcagtgaccatgaatggggaggtaggccgtcagttttccctagggcggggacgtcgggagggagacccacttagtctatacctttttcttatctgctgtgaaaggttgtcctcccttatgcaataagcgctacgtgataatatggttcatggggctcaaattagtcgtggaggctcactgatttcgcacttgctattcgcaaatgattgtatactttttgaggaggccacgattgggggtgcattagtattaaaacaaattctttccatgtatgggtgatccttagggcagtgtctcaattttgacaagttcgttatttatctcaactccaatgttgaagagtttcttgcagcttctatttttacttgtttaggggtccgaatctatactgagcttg

SEQ ID NO: 5498 - DNA, 602 bp, Gossypium hirsutum
tcatgccatattgccattcctagtactcaaaccagtagccatggtgatcgaggacccccttctctgccctgccctcctctggtttgagtcttacaatgtttagtcttttttctttgttaaaactatatttagggtttattgtgttttaagactcatttattattacttacaaatatataccaactttaagttcaaccatgctgtcattggcatggtttaggtttaatataattattataatttatagacaatatttaataatattttcaggttttttttttttaaaaaaaaccctgccctatgaccttaattaaattcaaaatcaaatctttaaataatcgttttagtcttttcccgttcaaactcaaccaaccttttatcatttgtcatacacatttttctgattctgtagcaaaactaaggttgtgtcttcttattgatttaaatacctttagtactacagcctctaatgtcagctctctatatattgcttactcattacacaaagaaagcaagtttacagcttcttttgacttccctccatctcaacatcccctactttaaaaaaagcaggggccccaaatgaaaagcttttcccctgt

SEQ ID NO: 5499 - DNA, 699 bp, Gossypium hirsutum
  misc_feature (637)..(637): n is a, c, g, or t
  misc_feature (639)..(639): n is a, c, g, or t
  misc_feature (641)..(641): n is a, c, g, or t
  misc_feature (646)..(679): n is a, c, g, or t
  misc_feature (681)..(696): n is a, c, g, or t
atcatcattttgtaatccacatcatataccaacataaatccataaacaacatatatatatatatgaagagaaagagaaagggaaagtgaaatacccctaagccataacgaagaaaaactccaacaggaggaagaagaattgccagaatcacttcaatcaaagtctctgaacccatattttccaaattaaaaatttcttttccatttcttcggcttcaaatagcagggttgaaggacaggtggcaaaattatggagcatagaccttacagatggcaatctgattgacacgtatgctggttaaaagtagggtttttttggaaatatgttttaaactaagctgatccctcaaatccgtgaactcggttacattcccctttgcgtttggatttggattttagtccagtcataaattcttattcggctccatgcaaacttaatttaccattttgccatttgaatatatttttataattcacgttaagtccaacctgcaaagttatggattccattgattaactgaacaagccagttttagcaaaagaacatcattagcattcctgctctacagatcaaattcacgaggaaccaaaacaataatcaggagctgataatcccctatacgcatcgatatgattangncncaaannnnnnnnnnnnnnnnnnnnnnnnnnnnnnnnnntnnnnnnnnnnnnnnnnttt

SEQ ID NO: 5500 - DNA, 620 bp, Gossypium hirsutum
tacaaactagaatgcgatgcatcatcaactttttatagcatgtatcactaatttttattgttaatggggataacttttgttgtcctgttcccccaaaacccctttctttctcttcatagttttcagctgccatggctgttaatgagatggtaatatgagtgacatagcttcataatgcgaaagctcccaggtggagtaaagagcccaatagtagaaaagggtcggtcggctaaatatgccacgaccaccctcgtttgggtgcaatattaaaatagtttataaaaaaatattaaaggcaatagtttataaaaaaatattaaaggcaacgcaaactagagatcaacatcaatattacatattaaacaaatacaacacttgtcacatttaagggatgtgacttattattttgaaaatgaaacaacccatacattttgtttatttgtttcacaaatatggtaacaaaccggcaatcctcaaacataaattgcaaccccaatcatgtccttgcagtccaatcatccattttgttccattctcattgaaccttgcgaacaatgtaatagaaaaaaaaagtgcatctataaaatcatgaatatcgaagctaatgggcattgaaatct

SEQ ID NO: 5501 - DNA, 650 bp, Gossypium hirsutum
tttcactgttgttaacatcatttgaagaaatattttcggcacttatctttggaagcttgatcttttgttccctgtgtatttttcagaaaccacaatgctcacatcctcgattttgaaagcatcgtcatgggaatggaaaagtctccatgaatgtatcactcttcttaacagaggattgcgatggaatgtctcaaacggttcgaatatcttgatctgggaagataagcggattccatctctcacaagttacaaaccgcaacaacaattccaacgaggggttgatgtctcactggcttgtgacctcattaatcaccataatcaatggaaccatggcctacttctttctttatttccagagcatgaagtgaaagccattagagctatcctataggaccatcgtctatcgatgacaagactgtttggaactttaccaaagatggcaaatacacagttaaacctgggtataatcttttgagagagctgaagcacagaaatgaagaatgtgtatctcattcgagaagtaatagacaaagctcaaactggaactcgatatggaatattcaaggtacccgaatttcatatagagaacttgtaataatgccgttgcctcaaacgaaaatctgttccggcgttatcgagctttgccaaat

SEQ ID NO: 5502 - DNA, 644 bp, Gossypium hirsutum
ttcgtactcctcgaaatttgtcaaaagaacattcatgaagttttcttccaagtatttgatttcaataagatgataggacacctaaaatttgatatagaagtaaattttccctagtcaaggcgtttgctgaacattctttcttctttttcttttttgtctttctaaaggatttgagaagctggaaatttaaactaacaagattagcatagtttagccgcttatcgtggtgattgtatgtttagaggttactatttcaatctatggagaagttatggtttggagttgcaacaaggaaaaacagatcagatttgttgggctcgggcttttatggttctattacttttgttcattttaaagtagaggatatacaaacggatgctgaatttatatggagaaggaaaaagaatagagaaaagaaaagatgagctgatgagtggaaaaaaaatggctgatataagaaataaagccattcaggacattctcaattgctttttaatatttttatggatcaaattctaatttccggtttgtaggatattttaggattagagttggcattttgaatcttaagattataagttgtaggtataagtggtttatgttattttggtttctgttagctttggatttggaatgatgttatt

SEQ ID NO: 5503 - DNA, 578 bp, Gossypium hirsutum
taaataccaagttcacatttccttcgaaaaaacaaacgactgcaaatttgaaaattaagacgaccaaaggaaaacagaagaaaagagaaaagtatagattaatcgcgaatttcgttatgctatttgaatcgatgcgttaattgaaattcatttgatttttttttgtaattatttcattctccaaattttgatttgatttgctttggatttgattttttaaaaatctttttaaaacttttttggtgtggagttggattggggggaataattggaggtggaatgattgtagacgcgatttctggaacgtaatgatctggtgtttacggcggcgtaggatgagaggagggaggcgcgatcgtaaatgattcaaggatcggaaaggaaaacgatgaaatgggcatcattgcttaaggacatcaaggaaaaggtcggtttacctcctcaatcttctactgctgcttccattgctaccacagttgcttcttcttcttcttcgtcttcttctcctcctccttctaatcgtgacgccaatgctttctcaactcattacgacttcgcttactcctccttcttccaaa

SEQ ID NO: 5504 - DNA, 622 bp, Gossypium hirsutum
cctctgtggtccaccagccatataaggaatatttaggtgtccagaatgttggtttggtgacgcctgaggagatctgccatcggggggagggtaagaaatataagaagattttggaactaaaattggttcactagagaaatgttggtggtactgttgttgttgttgtagttgctgctgctgctcagggtacgaggatgtcctgtagagatgctttgcatccaaattggccaatggtggtgatgaccagcatttgccatcaggaatactttcagtttcaagaggctgctgatcaagccagtgaggaaattcctccccatgtgtccattcggcagcagatgaaccttcaacaacataatgataaatgtcaatattggtatgttgatctgcgtaactggtcccttcactgtgatgatgtagggtctcagaaagtagttatttatttacaacagtgaaaataatgggtaacacagttcatacagacccttcagttaaaaattatagcataggaaaccatcagttattcaatccaagaaggattggaccaaaaccacatcaatcatcagcaattgactgatagaagacagtactgagatgaaataactcactttgtccggaccaccgg

SEQ ID NO: 5505 - DNA, 642 bp, Gossypium hirsutum
  misc_feature (626)..(626): n is a, c, g, or t
tcgttttttgacggattgtcgatgccatgtccgctcgtaaaaacaaagccgctctcgattagctccctatcaacttcaccatattccccagctacatctcaaattcttttactacaattgagcctcctaattgccgataagtatatattaatgctgaatgtacccaagaggtccctctattatagagacttgatcaaattaatccttttattattaaatgaagcaaataatgtgaaattggaataaagttactatttactgtataaaaaatattatttactgcctaacagagttaatatattcaaagtgaaaaaaataatagagggactaatttgatacaatctctataatacaatacatgttaattctattacaatttgaaatataaggaccaaattgatctatttaataatagaggggttaatttgatacaatttctataatataggaattttcgaagtaatttaacatgtaactaatctggtaccaatcaattgctcacggtgagaacaaccaatgtctttaattaaacaacagaataccatctaaagaaacatcatcaattaacactaaaaccaagccttaacaaaatttcatattttcctttgtaaaaaaaaaaaaaaacnaacggaaaaaaaaaaa

SEQ ID NO: 5506 - DNA, 601 bp, Gossypium hirsutum
  misc_feature (596)..(597): n is a, c, g, or t
ttgtagtttgtatcttgggttgcacgaaatcaatttcatttgttcaggagcttatgtttattcaccattcttgttaaactccgtacttatcacttattaccacacaaattcatattcataataatatgtaggcgtattgccctttttccttctctttttgcagtgaatcctaaatctgctgtaaaaatgatcacttatggatcaaaaggtgccagactcttctttttcattgcaatatggagtactttgaactttgaaggtatgcttattatttgcttccgcttacttggagctctgatagccggtttctttgctgccttaaataattaaaggcagttcatctcttctgaaaaaaaatcacatggatttttcatctgattttgcaggtgagatttggactaatttcgctgaataaggtcaagttccaccagagttgttttagtttgattttagctgttaaaagtttttgtagtgagcttccatagagagagaaactgtacgaaccatcatatttttatcatcaatcaaaataacataatgctttatttcagcatgcgacaaggagtttaagagaatgttagagcacatgctaaaannctct

SEQ ID NO: 5507 - DNA, 625 bp, Gossypium hirsutum
attttgcatgacccggcacaccatctattcaatggccactatcctgatttatttaagaggcttatatcttttccgatattggggcaggatcttgtggtcatactcgaagcaatgaggattatagcaatcgctctatcaccggtcgcacctagcttatgtaggcagatatatgcacagcttggctactccgacgaccagttcgataacataaactgggtacagacactccccctttctctctcaatacatatgcataaatttatcgtcttattaaccacaccgaatgtgtataaccgcagagcaaaacaaagtggggtggactaaaaggtggtcaagtgatggcacaacctaagccagtgtttgcaagaattgaacaaataaaggaaaatgaaaatggggctgaaacagcgcctcaaaaggttgtgaaaaagaaagagaaaaagcaaaaagttcaaggggtgatagaagcctagggttctaatttttgaaagtatgtaatttttttttatttttgatccgtgtcggatatgaatatttgctcgacatggtatatatttagaggggttttttagggttatactgtatgtctgtgttagacatgggtgtttgatacggatacttcaaa

SEQ ID NO: 5508 - DNA, 629 bp, Gossypium hirsutum
gtatggatggcttttaggataggttcagggtagggatggaaaaacttgaatcacttgatggattccgaaccaatctgttccaaatagagcggattatttttttggaaagtggatgcagggcgggtcagggtggttatgataattgtttaccccgtttcaccctgctccactatatgaaattacattgtatccttgtatatttaactattaaaagggtaaaaatgtaataatgtttaaataatttgtaaagattcgtatttaaatatttacttaactttaaaaagattgaaaacgtttaaggtaagtagcaaaatacactgaaacgaagtgggtgaggtggggatggatgcgtctaacatccatggaggtggtattggtcttcaagattttacatccatagtggagcagggtgggcagtggagtagagcttgccaaccatggagcggtggtggatttagcaacatttgcctctgccccgttccattgccatccctagttcggggtgtagtgacaatgaagtaggagaaaatagtcattgccaaaacccttaatgtagcacttgacatctggtcctcctattaaaatatgagtgagagtgttgcaaccctccacttgtctgtgtggttaaa

SEQ ID NO: 5509 - DNA, 495 bp, Gossypium hirsutum
atgcaacttcgtgtccacacctcatgttgatcattttagaaatgacccaaaactgtatacaagtcagctcagccggtttttggaggactgtgtgcatacttgttgcaaagattcttaagtatcaccatcgaagtactgactaataacccatattcatagacaaggtggcattaggggaggaataataaacccatcaatttttatatgaaaattcattcaattcataaagtactctcctggtcaaatactacacatactcttcttcttttgccttagggaattgtttttgtaaagacaagctacttttatcatatttgaatttccgtaacatctttttatttttggtattaaatttaagtatcttgaaaatactttaatatgctaaatcataataatttaacatagaaatgaattaatacaaagatttcataagagtgagaacggataaggtaagcaacttaccctctttcatacaatattttttctcctcaaact

SEQ ID NO: 5510 - DNA, 602 bp, Gossypium hirsutum
  misc_feature (54)..(54): n is a, c, g, or t
ctaagaaggtaaattcaaatttaattaacatatttggagtttttagtattatcntttggaactgtttttttaattgttgtattcattttttttacagaacttgactggaatcaaaggtttatctgaagctaaggtcgataagatctgtgaagcagcagagaagatagtgcttagttgaattcatctcattggtttggtccttttttcctttcgtcaaatttctgatttctttttctttttcttgttcatgttttatttactcagaactttggttatatcactggaagcgatgctctactaaaagtaagttcaaatttcatgttttaattttattttctcatttcacatttttagtttatgtttatgttaaaactgaacgctttttgggcattcttgtttttggttttgtagagaaaatctgtgattcgcatcacaactggaagccaagcccttgatgaactgttgggtggtaagtgcttttatttttacgggagacaagttatatattaatacatgtacatttattttgattaaagttctctgaaaatgattttaataactaacttttaaaggagggatagaaacttcggctattacagaag

SEQ ID NO: 5511 - DNA, 777 bp, Gossypium hirsutum
  misc_feature (112)..(112): n is a, c, g, or t
  misc_feature (122)..(122): n is a, c, g, or t
  misc_feature (147)..(147): n is a, c, g, or t
  misc_feature (151)..(152): n is a, c, g, or t
  misc_feature (228)..(228): n is a, c, g, or t
  misc_feature (250)..(250): n is a, c, g, or t
  misc_feature (276)..(276): n is a, c, g, or t
  misc_feature (288)..(292): n is a, c, g, or t
  misc_feature (298)..(299): n is a, c, g, or t
  misc_feature (405)..(405): n is a, c, g, or t
  misc_feature (415)..(415): n is a, c, g, or t
  misc_feature (433)..(433): n is a, c, g, or t
  misc_feature (523)..(523): n is a, c, g, or t
  misc_feature (526)..(526): n is a, c, g, or t
  misc_feature (529)..(529): n is a, c, g, or t
  misc_feature (543)..(543): n is a, c, g, or t
  misc_feature (601)..(602): n is a, c, g, or t
gacgtgaaaaagcttcaagatgcagggatatacacttgtaacggattgatgatgcatactaagaaggtaaattcaaatttaattaacatatttggagtttttagtattatcntttggaactntttttttaattgttgtattcatttntttnncagaacttgactggaatcaaaggtttatctgaagctaaggtcgataagatctgtgaagcagcagagaagatagtgnttagttgaattcatctcattgntttggtccttttttcctttcgtcaantttctgatttcnnnnncttttnnttgttcatgttttatttactcagaactttggttatatcactggaagcgatgctctactaaaagtaagttcaaatttcatgttttaattttattttctcatttcacntttttagttnatgtttatgttaaaactnaacgctttttgggcattcttgtttttggttttgtagagaaaatctgtgattcgcatcacaactggaagccaagcccttgatgaactgttnggnggnaagtgcttttattnttacgggagacaagttatatattaatacatgtacatatattttgattaaagttctctnnaaatgattttaataactaacttttaaaggagggatagaaacttcggctattacagaagcttttggagaatttaggtaagaacaatagcatatagtttgtcattttcttcttatagatattaaataataatatcatctacctgctggttcatccctatcctaagcatgattaactt

SEQ ID NO: 5512 - DNA, 648 bp, Gossypium hirsutum
ggatgggcaaagtacataacgcttggttatcaattgaggctgaaacacctgatcttgttgcatcatgaatttttttctccagttcctttctgccattgtaacaatttcgttatttgaaaagggcaagaaaaagggaaagtgaaatgatgagcaatgaggatagagataagcgttagtcatttgcgggtagagctatctttgtatgattcctttagtaggtattgcttgatccttaaatctttgttctgaaaggagcggctcatgtactaaacttttcactttttggcatttgttggatctacaatggcactggaatgcctgaggatacggttaaaaccgcaaacatcatccttatctttcattttgtattgggattattcattagttgggattattcattagatacaatcagatatgatccacttttatgtggatgaaagtgcattttcatttcagattagatatttttctgcatgatctatatattgtttggcttcagtgcggtactagacgagctgctgctacttagttatttaactacaaatatgttgattaggttttaccatttacctgtgatgtgaatgaatcttataggatgattgccaatcttgaacaattaaactatttgattgatataccaccaggttg

SEQ ID NO: 5513 - DNA, 630 bp, Gossypium hirsutum
gcacattgcacacaaaaagatgaattaaacatcaaaagataagctttcatacatgattattaagttgaacaaaaagtatgtgtgacatgggtgtcccataagtatatttatttaaaaacaagaaacaaagtcataaaacttcaccacttgccaaacaaatatttgtgaataaagccagtaacttaagatatgaaataagaaattaagtgcaacaactaaaaccaagaaatacttgcttacaaacatcaatcaatggattaaaacttgaaaaagccaaaataagaaacatcgaccctgaatccatcaatgattaaaaggaacacagactgacgatggacatgcatatatgcatataagcaagcatagaaattgaagcaaatgaaaaatagcatccacatttacaggcaaatcaagaataacttattacttttaaggcatcaaaactggacaattcacattttcttcatatttgcacatgcatccttttctttgttattattatttccatgagcaacgtactacttaagcattaggataacacagaattacataccatggccaagaagatgagccagaaaatcttctggtttctgcagatatgcttgcaaaagacaagggagtgcccacctt

SEQ ID NO: 5514 - DNA, 390 bp, Gossypium hirsutum
atgagtatccggagcaagtcccaaaactgccaacatagatctggaaatggcaaaccccaaaaagaaaaacggagaaggtgatgagaaaacacagggggcgtttatagagtatgtgatgaagtttattctatccaaaataataataataaaggtcaaattatggttttgatccctctattatgctcagatttagtttctgtttcggacatctacttctataacgtcattagttagctattctagttaaaatgttgaagtagattttgtaaaaaaaaacacctaaaaaatccatgtcagcatgataagttgagatgagtgttttcaagaaaaacttgagcatggtaaaagtagaaaaaccataagttgaccaaaaataaaagttcatccttc

SEQ ID NO: 5515 - DNA, 636 bp, Gossypium hirsutum
  misc_feature (48)..(49): n is a, c, g, or t
  misc_feature (51)..(51): n is a, c, g, or t
tgacgaaaaaaagcgaaaagaaggcgttcacgttccatatcgagatannanacttactcggcttttgcaggtatctttttgccaggcattatttatccttattttacgcaaaagtgttaagaatgtaaaattgaatgtttattttgttggaaactgtctatttaggcttaaaatccattccttcctccttccaaagctttgttggcttggaaaaattaaaatccttaaaccttttaacaaaaatttgaaccccttaaggaacccaacccaaaaaaaaaaaatgccattattccatcctgaacctggtggaaattttgggcccccctttttaaccccaaaccccactaaaaattggtaacgaaaaattacccccccattgggccagggacggtcccggctttaattggttgaaccaggttatgccccaggggaaaaaaaacttaattccttgggcaagaatcccttgggggccaccaccaaaccgggaagaaaaggaccggccttttttccaaataattaacccggcccattttttccttttttttaaaaaaataataatttgacatattcatgttcaagttccttcccattttgtgcactttaatcattgtccttaactctttctttatgagcagc

SEQ ID NO: 5516 - DNA, 563 bp, Gossypium hirsutum
  misc_feature (48)..(50): n is a, c, g, or t
  misc_feature (460)..(461): n is a, c, g, or t
  misc_feature (527)..(532): n is a, c, g, or t
  misc_feature (535)..(538): n is a, c, g, or t
  misc_feature (542)..(544): n is a, c, g, or t
ataacagtagcagagttactcagtcttctactaggtttgctaatattnnntggtgtccccgcatctaaaagtaagtaatttgtaaatgacagagaactgacaagggatatccaatgaagcttaatgtttatccttaacagaaacaataattatggtgatcaatgagagatttttccatttatatatattttccaacaagatttagaataaaaatcaaatgattctatgatctcaaactatagaaaaaatcctatattcattatccaagtgtggacccaactttaacagaagaaaataattaagaaaatatgaatatgcgatacatgtaattaaggaaataatcaccaggaatggtttttgaagcaaatcgattgcaatttaactaaaaaaaagaaacacaaaaagagagtcattactataaaacccaaaaaaaaaaaaaaaaaaaaaaaccttgaaaaanntttaaaaatttttaaacccccaaaaaaccttaaaaaacctttaaaatttttttatttaattccccnnnnnnccnnnnaaannnttaaacaaaaaaatccccc

SEQ ID NO: 5517 - DNA, 634 bp, Gossypium hirsutum
cattctagggctacagtttttatactcataaatcaagatcatgcatgagatagaaggatttatcatgataatgttggatgagcatgactttgaccctgttccaaaaaagaaaccaaaggaaaagcaatttgtatttgaacttcaagattatggcctatgaatttgccatgatggctcatttgaaaatgcagaatagagataagaggagaatatgaccaaaagaggaagtagctaaaagatcggataaaggagcaagagaagaagagaaatgaaacactctccaactataacaacccttcaaacaaattaaacaaatataaagtttcatgtaaattacgaggaaaatttgggactgcatcatatttaaccataatatgatcatgtcctctttgcatatttgccaaccaagaaaagcctgtttactggcagaggtggggagacaccacaataggttcataacaaacacattagttggaatgcctgcagaataatagactcaaatacatgcatcaactctttcagattccggattatttgaagttttttgattcaaagatccacctagtagtgaagtcaaatgaagagcacttcagagacccctaataacgtcagctaacaaaaatatttgcactga

SEQ ID NO: 5518 - DNA, 638 bp, Gossypium hirsutum
ggtgtctgtcgtctactcctggaaggtccctgctgctcgccattataactgatattctatgtctatgtttgaatatgtaggtgctttttttggatgttctctcgaaggaagtatcatcacaactcgcagacgagagaattcccgattctatggcagccaaacaataacggcatcagatatacttctagggtcaatgtctcaagcacccgctgctgccattctctaccatgcactttctgatctatacagcacactaagttgaatgccggaagtcaggtaccgaactgattagcttcaagacttagtatgaagaaggatccaattcaacatgaatctttatgtacattgtgtaaatcatatatatttatgtcatcttccataccatcattctttacctgtgtaagatgcaggtacatattgttgaacaacgttcaaatcataaaagaaaagaaagaacaaatatatttgtttaaattatgttgttggctaatatatccttttccgatacgatgtcggtgcatcaccgagacttcaccgtggatgctttccgtccatccacggcctatacatttttttggaattaaaattttaaaattcgaaaattaaattaaaatacaagatctacgacatgcatactg

SEQ ID NO: 5519 - DNA, 490 bp, Gossypium hirsutum
cagaaggcaaatttgattgacaacaatatatatataacttgaatacctggaattgcctcgatctggtcgataacccggcgccgtaaatgaggttctgctttttgcgccaaaatttgcttctgatttcggagttagccaagcttaagcgcttgcctgtaatttgtgttcgtttttttccccctttcacttagatctaaagcaaacttctgaatcctgtgtgtgcaggtgaaatgtctaattccgcaaaatttcgctgcttgccgcattgcaacgtttatgtctggattgggattgggttagtgtgaaaagaaacccacaacaagtttgggctaagttttgtgaccttgtacgcgtccgcctcgaaaagagctttgaacccaaatgtgaaggctgaaggccgattagaggattgcaacttcggctcatgatgttctaatgatcgttagatagaaagcccgattctgtttgatagatagaaagaccgagtctg

SEQ ID NO: 5520 - DNA, 587 bp, Gossypium hirsutum
  misc_feature (530)..(530): n is a, c, g, or t
aatatgaagccatttatgtgcaagttttttcttaaaaaacacaagtctttgtcattattaaaaatattagcttattctataaaggagactcggtaaaataattcaataatcaattgatccctcgatagaaagtagcacttaattgagtttttaatcaaaaataagtaattaattaatctctcgaaaagtcaattttcatgtattttaaagcaaaattattaaattttgccacgacgcgaaattaacgaacgttaggagcttacatgagaaattgagctttttgagggtttagttaattacttattctcaattgaaggttcaattgagtgttgtttttgattgagggctcaattgattattaaattattttacaagattttttatataataagctgaatatattctaaattcaaataattagggtttattgtaccaaatataattaattaaattttaaattaacccataaagtttaaaaatgtttcaattgaatcgttttattaaagtatggttccagttaagcttaccanatcaatttagctatcagctttgacgttaaacagtaaattaaagtattataatacatt

SEQ ID NO: 5521 - DNA, 633 bp, Gossypium hirsutum
ctttggggaagatgaacctagaagaaaaggtcgggcaaatgacgcaaatcgaacgtaaaaatgcgtcggcagaagtcctcaagagttacttcattggtagtgtcttgagtggtggaggaagtacacccaaggtaaacgctactgtgaaagagtgggtggacatggtgaatggcatgcaacaggcttctctttccactcgtcttggtattccaatgatctatggaattgatgctgttcatggccataacaatgttatgaatgccaccattttcccacataatgttggccttggtgtaaccagggatccccaacttcttaaagagattggagctgcaactgcactcgaagttcgagccactggcattccttatgcttttgccccctgcattgctgtaagcaacatgattaatcattggataaattacaccattaatcattaaaatataaatatgtttttttgttttggtcagtaatctattcaaaagtttttatttaagtgactgagttattaagattaatattatatgacttttgctgttcgtattaccttcaccaatagaaaactttttttcccttcttttttacattttagttttttttttcatgaaattgctttaaaggtcacttatctgc

SEQ ID NO: 5522 - DNA, 654 bp, Gossypium hirsutum
aatcacataacaacagggaaaactccaataaattattcaatcaactcacctgcacacaaaatatcaaaattctccacaaattccacaaatactgcagtatttctcaacagtgcaaaatatggctgcaccagggagtgtttaaccttggaatgcagatgtgcaacataactgaagattagtcctaatgtttcctttctctttatttttatttttacctttgcaaaggctgaagggacgggcatgttaaattgaatgcttaaattagctaatggtaccttgatcaaactcaggctcttctcttcactaaattaatagatctatccatagctttaacagtttcaagcataagtactctacatggcaaataaactaatataaaatataatatcatctcccatcttactgttatagcaactgaatatttcatcctagctctttaatacggatccaaatttctcaaatcccaacatcacatttaacaagttcaattctttaataaccaaaagtgcaaataggtacactgagaattacctctgtcatgactgcaacagatgtaggatcatggccacgccagacatagtccttcactttcatcccctccgttgctgcacctttcttgacagcttgaatggcaacaacaagagaagcacctaa

SEQ ID NO: 5523 - DNA, 625 bp, Gossypium hirsutum
tcttctagcataaattgtgcacttcatctaaacacaagaaaacagaatcaggtaactttcttcataaagatatctttttctttaaagtccatggttcatttgagtgcatagtaataaattttacttaaggcacaggctttatgatgttttaaatgtattagaagctgcataaattgataataactacaaacttctcctctggaactttgatttctattgacatcatttttctgtaattgttcctaatggaaacgtgaagcaatcacactgtgcctcgtttagtagcttgtcctttctgttcttttttcttttgaagtataaattcgaaatggaaatcatggctcgaaaaggtaataatgtattcagcagaaaatctagattgatcaactactcaagattttccttttctttgtttcattccctcatagttgctcatgaagcgtctatatgtttggcagcagccccaattggtcttgaggaagcctctgcaacctaataacaagaagcattctgatgatgatgaatcttattctgttacttctctgtatcctctttcttcctggatttaagttcatacatgctttttctatacgtgtttggttttatatgtctttgacatgcagtc

SEQ ID NO: 5524 - DNA, 670 bp, Gossypium hirsutum
  misc_feature (652)..(667): n is a, c, g, or t
atttctatttcatttttctcttcaagattatgtattggattctcttatcttgtgtacaaatatggttattaataattttattaatcatataaatattttgtatcttgaaacttaggatgtgttagatttgaatattcaactttaaatgtgtttttaaaatttttttacttattataatttcttaataatattttttagtacatataaaactttaaaaaatttgttgaataagattattcaacttttctcaattttgtctctaaatttggattccataataatttgaaaaaaaaatatcaaagaccagaaatattaaaaattacagataaattataaaatattttaaaattttcatatgctgaaataacataatctcgtaatgtcatgtcattacactttaataaaattcaagtttagagattaaatttaaaaaaaattctaccaaattcaagaactaaagtggacaaaaaagtgcactagtgcagggaccattttgaaataatttgtaaaattcagagattaaatattactttatcccttaatttaaataagaatcaaagtataaggacttaattaacgaaagtaaactagtttaaggactcatttaatagtttagccaaaaacgtcatacaatgaaattcgaagcggatcnnnnnnnnnnnnnnnnttt

SEQ ID NO: 5525 - DNA, 523 bp, Gossypium hirsutum
aagaatatttggtcttatttatgatgattattaactatgcatatttgttagttcaaaggataaagagtttgatagatttaaaggttacgaatatgaagttgagcttcaatgtaaatcattataaagtgttttaaataagatgaggataaaaatactataacctaagttattttgaatccaccaaatttatttatcaagtttcaactccatacacaccataataaaatggtgtataacacctttattgaaaaaagttcatctcttatgcataatgaaagaaagggaaatcaaatcttaattcatatgaaaccctagactcgaattcaagttcaaaggagagaactgaattctaagatgaaagaatgggaagatatttatagcaaacccttgaattaaatttgaaaaaaaaaaatcaacgataataagtagtaaaataattaagaaataaaattattaaaataagaaataaattaggttagaaaagaagtgaagaattcttgtagaagtacgatttgagcaacgt

SEQ ID NO: 5526 - DNA, 614 bp, Gossypium hirsutum
aagagtgctttctaatcgagctaatgcgtctgcgcaagtgttcccttctcgaagtatatgctttaaggtgttaatatttaaaggcgggaggaacatattgcactcattaattaaatgtggcaataaaatagtaaaagttaattccattttcataaagtgaatgatatttattaaattaaatctagaaacaaaagctagcaacataaatgatgggtagtatgaggttatgttactacattattcagttgtatgttaaatacgaatatgtatcaggtaaattcatttatttttaaaaaatatttttcgatttatttggatggtttagaaagtgcaacatagtaatcaggataggttggcttttagcattaggtagttcacatctgttattaagttgagccctccattgtttgtgatatatgaaccatcgtctctgaattaatcatttaaaatggttggaaaaaaagaagaagaaacagcaccaactatttgttcttgaatcaagttttagacccgatggtgacgggcatttttagatgattcaacaaataatcctcttaagattgaacagtcttcaaacactgatacattaactctcaattttcaagtcaaactcg

SEQ ID NO: 5527 - DNA, 651 bp, Gossypium hirsutum
tgctgtttagtgggtaaattagtgacactattttaggtatttattggtgagagttttattgtttgtatgtggggagattttaggagagtggtttgtaatcatttaggtttaatattggggttgtaaatattcattggtggagagtgatttgtaaccatttgggtttaatattggggatgcaaatattcattggtcaaagggtagtttggactttagctaatagttgatccggactaattatgaaataaaatattctctaagcaaggcttcacagattgaagaattcgaattgcgttaacaaatattacatgttattctctccttacttttctccttgcttcactttgttttaaaactctctattttaacaaaacttacaacaatttgttttgtaatcaaccaaattatatgttcccacaatagttcaaatatcaaagttggaacaaagtgcaaaccaaaactttttcatttattaataaatttatagaagcaatcaaacatcaatctcaatagaaaataatataagagataagtgcttgctaagtagaagaactggaagaagaaaacattctacataaggtaaagaacttttaattaaagtggtggcttgtgtagtgttttacctactcaattccatgttctaagctcctt

SEQ ID NO: 5528 - DNA, 582 bp, Gossypium hirsutum
  misc_feature (561)..(562): n is a, c, g, or t
  misc_feature (571)..(571): n is a, c, g, or t
atcttcctcttcttctccgcttttgactcagtcacgatctttctcggcggctccggcgcctcaaccggcggttttcgtagacaagaacactcgtgtcatttgccaagggatcactggaaagaatggcactttccacactgaacaagccatagaatatggcactaagatggtaaatttaaattcccttcaaattttcacttttttaaaaaattttaatggatgtttttggtttctttttttcccttgtatactttaaggggtttttattattcacggcaatacttgatgggttattgagaaaatcacggagagtaggacctttgtaaaatttgtttatatatgccacagaactgggtttgtcgtagtttcgtatattgggaatgatccaatgttgcttattggtcatatatatttttaattccttagttttgtctcgttttcttttataggttggtggagtaacacccaagaagggtggcacagagcacttagggcttcctgttttcaactctgttgctgaagcaaaggctgaaaccaaggctaatgcttctgtcatttagnncctccgccntcgcagccgct

SEQ ID NO: 5529 - DNA, 634 bp, Gossypium hirsutum
ttcacatggttgagaaattgaagaggaaaatctatgggtttgttatgcagcatgtgggtagcacctttgataattcctcacatttatcctcatattgaatattattagtctatttatttgttttaagttatttggtttctgaataaaaagtaatgcaaatagcatggttttggtatatcaaaattcattttgtcggtgctttttgaaatttcgttaggtatttgaatttttggttcgagatattcgagtctagtgtttttaaatttattattttaaactttggaatattttgaagtatttatttagatttttacaattttgggtcattattattttcgaatttgagtttcttaagatgattaattttttatggttaaatttgatcaaatttattatattcttgtcataggatctttcatcgagccactaaacaactatatttagtaatatccaatgtatgcacagactgcattaataacatataatgtgtatgcctggtagtttgctatttcgttggttagccaactgaaatgatagcgttgcttatttgcattgcagttagctttataacttttatatgtaaatttgagaaaatttaactgggcatatgagaatattattgattcaaggccag

SEQ ID NO: 5530 - DNA, 399 bp, Gossypium hirsutum
tttatttttatacgtgtatgttcataaccgagaccattaggtcattttctatgataagggagaaaccgaaactccgacaaagagcatgagattatgagattcatttaggatgcacaataggaccgatattattaaattcataattgttaatatgtttaattttgtttttgtttccttacgcttaccacttctattatttatatatgttcttttctcatgtttcatacttcaatgtgtgtttgacctataatgatttataaatgtcatattttaagatttattgtataatatattattacatttttttttatctttgaacaaataaagggaaaataatgatttcaaaatgtgagtatctgggagcaaataccaaaattactcgtacccacctatcaatgg

SEQ ID NO: 5531 - DNA, 607 bp, Gossypium hirsutum
gagattcctggaagtacgagaatttaattgcgtagaaacaaagattaattgatggcaaggcaagtggtagtaattgaagctcttccaagaaaatgactgctaaacagctattgttagtgagtcattaacctttggcaaaccaaatgcaagggctctaagccaatttataaatcaaaaccattgaaacatttctatttttcttcggctcaccccattaattgtttcaaaagaccatcagaaattaaaaaatataagaagaaatttgaaatgggaggatttaaataatctcttacagtaaatgaacttcgtataaggattgagtaaatagaaaattaaatgtgaagggaagtttgttgtaagtatggattttctttgccacactaacagatatgggcttcgtttggacttcggcttggtctaatatcatggaagtgacctatcgctccatttacaaactcaactcaatatagacctattcataggtcaagttattcgtctaagtccgaatgtccgtttgaaatttgagaaagttcgagtatgcccgaaaaatggacttaggcaaaaaatttaagtccatttaaaatatgggtcaaggtcggatttgaac

SEQ ID NO: 5532 - DNA, 640 bp, Gossypium hirsutum
tagaataaaataaagaatactccaagatgaaaaataacactcccaaaaagtatcttccctacaaattaaagctacatacatgcaaatgtttcccagcaaagactatcataaacagaaggcccataaccattggcgcaatcatgtgagatgcattagatgcactatacaagaaaagcaaattgatgttcaaataaatatcccccatcgctttttctaatcaaaagaatacaaaaacaggtaaataacgacaataacaagagaagatgattacagagtatcaacgatcaccaaatgaccattccattcaaatcacacataaacttccacccattcagaaagagataacacattgatcaatgcacattctattcacaagatcgagtgataacttctgatactgctttttacttacaaaagtagaatccttcaaaattcaacaaatattttgcacaatctacaattaactttgggttgagagttttccaggagtgttgaattacaatatgtaatgaaattcccaatttacttccactgcatcaaccacaaagttctcagatctagaacgaagccaaacaaaactcaaactcagctatttgaacaacaactgcacagcccaattctcaaagtaataagcagaggt

SEQ ID NO: 5533 - DNA, 649 bp, Gossypium hirsutum
taaaggtccccagttcgatcctgggcagcaacatctttattttgaagaataaattatcaaaataattatttttgtacagcttagcacaaaagcattcgattgaaaccaatgactttgtatataggtttacatatggggatatattttgttaattttcctattgattacttaaccttaaattaaattgtgctttggatatttcttaggttgtattaacagaatgcttaaaaggatttggtccttggtgagctgtcatatttttatcttcatatatttttgtttgttagcagtgcaattttggagccttgtatggggtgttatttcaatatatttttgttctgacaactataagaatttatcatgaaattagagctttgttttgtgttttcttttcatcaggataattgcacatgccatagagttgttgactgctgagagtggccatgcagaaatgcttttacatgaagagcgtcaaatgagggaaaaacaaagagagaagcagaagagaatgaaaaataaagaaaaaagaagttaaagaacataaaaagaaaaattttaaattgctcaaaacgaaaaaataaagggaccaattgtataaattaacctaaattttttgtttgaaatgatgatttaacgtaccatatcagct

SEQ ID NO: 5534 - DNA, 628 bp, Gossypium hirsutum
tcacccttcccgctgctgccatgttattccctcaaaatccggtcttttccgacacttgcgccgccgtcattagcggttccatcgccctctctgtcctccgtttatggcaggagaccgccaaacgcggcctgtttgaccaggtcaaaactccgccaaacttttttctttttaatttttcccgggtttatcggtaaaagattgcttgcataactgttcgcgggcttaatccctgtgggtttgccaccgtcgcttgctaacgtgtttctcttactcaggtcaaagatgctctttttcgattgcgatttaaagtccagattttgggggtttaatcatttcaatgaatgagattactgcattcaatacaaaatgataaatgaagaggaatctggtaacaaatgtctctttgttttcttgttcataaactgaataggaagctcgtgcacgtaatcattgggctagttttcatgctttgttggccattatacacgtgatgatcttcttgttgagacatctttatattgcattaccatatattggttgacaaaattgataatactaatcattacagttcaggatatcgaggagcaattttagcagctattacccccggagtcaagataatacggat

SEQ ID NO: 5535 - DNA, 638 bp, Gossypium hirsutum
tgactatacgggtagtaatgctttgaaattctgtaggaaaaaggtgaacccatctcacattttgtttcaatgaactttggggtatgcgcaaaaggagacgacagttgttcaaagatgaaaaaataggagaaaacacaacactcgatctcacaattttcgtacctttcaacactcaattttgtcacagataactgtttcagaactttcatggcggttgaaatatgctaatcaaggcttggggccttgggccctctctctgttctattgtgtgctaattggggtcattcaacagctacagttatttgggctctgcattcatgttgaatgtaccttccacttttatcacaacccataaaaggcttttaactttcgagttaacgtgttagcccaaattataattaggctaaacccgtctggtgagttttatataatcatgatttttaataaaactaacgcttaagggtcaaactttttcaaaaaaataattaagtcactgtttttttttcattgagtgcttaaaccttcaaaaataaattaaaaagactcttaaaccatttcaaaaaaagcaattaaggctctactttttttttttttgcccccattgaaaatttaaaagggcaaaaagggttaaaaaaacc

SEQ ID NO: 5536 - DNA, 607 bp, Gossypium hirsutum
attttttgtctagaaatttttttgttctttttagtcgtatgtcacgagtcaaatgtgttggaaaattaataaaaaaattaagttgtatttttaatttaaatacaatttatttatttatttttaaactactttttaatctaaaagaatatccatttctttatttaaaaaaatggagaattgtggtttatttttaatatttatattttttttactatactgtagaaagatgtcggtgttattaaatttggtaaaaaataaaaaaacatatattatatttatgatctaggcgtcattggctggttccatccttgcatatttctcaataaataagaatgttgaaggttggcccggacattggtgttgttgtgattaatattattgaaccttgttaaatctcattatataaattttattattgttaattgtcacataaaagttacgttgtctatttcgtagaaagaacccaaaattcttaacttcagaggccatattcataagcttatatatattaatgtggcattatttagagttaggaggaaggaaagcagtgaactgagggtccatttgataacccgatgaagagttgttagttggtccattctcttgc

SEQ ID NO: 5537 - DNA, 601 bp, Gossypium hirsutum
agtaaccaaataaattaattatttagaaaaataatcattcgtataattatgtacgaaaatgatccattttaaacagttaatttcggtgtcactgttgccatcggtggcaccatcctaataatggtccaatcattgattggtttaaaaaattaataattttttgggtgtcgcaattgtcattggcaacaccagattaaaacgtgattattggatgaaaaaaatagtgggactcaattaaatacttttaaacttttggtttatttgtatgttaggtttgtctcttttgaaattaaatttaattagtccttaaaaatataagaatgacaaaaataactatttttcattttttaaaataataaattttaaaaaaatatataaaatttttatttaaattacccaattatatccttaaaaaattttcctaaagttttaaaaaagctgattcgaagttcaaaagttgtttttaaggagtcaacaatgaactataaattttaagggattaaagtgcaattttatcattatattaacttataattttacaaattttgaagagattaaatgggtatttaccattttggggtcaacactcttacttagccaa

SEQ ID NO: 5538 - DNA, 605 bp, Gossypium hirsutum
ccatttgttgtcttctttttgcaaagatggaatatgttgttgattaatggttcataactcataaattcatgtccaacatacttgataattttcttagtctctgtccctcaagtccttctttccattttggttacttttgtaccataaatttttccctgatgacttcaccagtgcaaaaatcttggaagggataatttttgcataaatccttggaggttaatgcaatttttggtcctaaatttggaaattaggttcactttgaaatttgaacttttctttggcttactttaataccaaaatttaaaaataaggttaattttattccatgaacttaaaaaaaggaaaaattttaaaaaggggcaatttgaaaatggggcaacgtcattttgtccattttttcaggggatgaggggcaacatccccaaaatgttacttcatcatttttttctttttttcaagttcaaggataaaaaaaaatttattgcaaatttcacctcccaaagaaaaaaaaaaaacttttttcaaaataacccaaataacttatttaaatggccaaaaaaaaaattaattaatccttgaaaaagaaggaatgaaaaaatctaaag

SEQ ID NO: 5539 - DNA, 643 bp, Gossypium hirsutum
aatcgctcagaattttcccatttcatgtgaaaagggtagaaattttttggtaaagtaacttccaatcatgttgtaaatttcgatttccaacaaactggttatttttacaaaattttaaaataatttaatttttgtcaattttgaaagtgagtaacgaatttccagtcaattatgcataattttgatatgtattctaacaaatttaatctttaatgtttatatattttgcgtaaaagttgatagaatgtgttaatgttttgtgctaaatttgttacaataccaatgaaaaatatgtacaattgatagaagaacattaatgtcgtgattaattattattaattgttcacttttgaaatttataaagattaaatagctctggatttttagaaaaaccagtttgctcaatattgaaattcagagagatcggatagatctttttctagtaaaaataatatgaaggcccttataccagtaatcgaattgcattttagccactactaaaaaaataggcaaattagtccttgttggttaaatttaaagagcaaaatgatcatttttgttaaaaattttattcatttctattgttaaaaattagtccttatacgtcaatatgaggtacgcatgacacaccacatgtaactgt

SEQ ID NO: 5540 - DNA, 622 bp, Gossypium hirsutum
cctttccctgttggatatatttgctgatcaacaagatacttgtatttcttaagcaacaagatgcttgagcaaaactaaaacactaggcatatcgatacaaatacagatacacacagagataatgaagagaagagtttgaagaataagtagagaaaaatagaaattatatttgtgaaagtacctttgttagatgtaaaactgtttttttcacaggctttgctgtgattgtttttcttttcttttctttcttttttactgtttggcttatacataaataatacctgaaactaagtgataaacatcgacttattttgtgatgttacttaatataagtttgagattttgttgtattagaacttgttttcaagctatgaatctaaaactacaattattggtcttttcttttttgccataacaaatgaataataatggctttggaaaaaaagggaaaatcaatggggagaacttgtttcctttgattacatgatgctttagatgaacatgattgtgcttttctagacaagttcatgatagaagtgatttagataatgacacgtaaaaaagaagaacaaaaccaatttgaccatatacgattaaccagctaactaaaggtattgggaca

SEQ ID NO: 5541 - DNA, 604 bp, Gossypium hirsutum
ggagcatgcagataacatgcatcgtgtgcttaatcaaaggccttgatttagtgaattagtggagctgttaattaattgcagcttcgacatgctcaaattttggaacgtggagtcgaaactagggtgctggctcaacatcagggacaagacaagcttataaattggccatcgaaccaggaagccctcatatattttatacttgcggcgaagacggattagtgcagcatgtgagttatttttaactgcaaaatcatttcctatgttttctttacctattttcttatccagggctgtttggcagataaagcggtttcttcaatggaagaacataatttcaatgctgcactctcttgttattgttctctttcctttttgttgtatgatgacatttgctctaatagcctgatttgtttgtctggattttaatatagccaacttatatggctctattacgctatcacttgcatttcagatcgatctccgaactgcaacagctaccaaacttttcatatgctgtccaattgatgatagcagggtttacacgcgaattatgaacctcaatgctatcatgattgatccaaggaacccaaatctctttgcactt

SEQ ID NO: 5542 - DNA, 703 bp, Gossypium hirsutum
gatgacaacaaaaaaacataagatatgatataggatttcttttcaaagtcataaatatttaaagagttgtgcataggtcgggtcgggcccctaataaaattctagcccaatttataggtatagccctatccaaaaaataggtctaaatttttgtccaagttcgacccggataaaaatattaaaacttgggttcgacctgattcgtttgtattaattttttatataaaacaattttaaaaatataattcattagaaacactagaaatattacttaaataacattaacataggtacaatttaataagcaaatgtgtctaaaaataaaacaagagttgtataatatctaaataaaatcaacaaaatagtagcaatataatagtaaaatgacagcaaaacagtgggaaaatagtaaaaaaataactaaactgtggaaaaacaggagcaaaatagtaggttttttttgtgtaaaatatctttcgccaactctacaatcttgaaaccaagtaaagcaatatccacgttccatttacaccccagttttctgatcttccttttgtttttatttttcattcacaccacagttattattgaagttatgttttctttctgctaagcaaaagcatctaaaaacatatccatcagtaaaatatttatcagtttatagttcatcaaatacttgctaaaaacataaacaacagtttcg

SEQ ID NO: 5543 - DNA, 634 bp, Gossypium hirsutum
  misc_feature (22)..(22): n is a, c, g, or t
  misc_feature (409)..(410): n is a, c, g, or t
gacagcagacaaggaagtgaangaagatgaagttcccagcaaagaatgtttggtttagcgtttcgtacaaaaccaaatgccagatctggttgctacactaagcaaaccataaacaatgaagaggaaataaatctagctggggaactctacgcgtttttggtgacaaggcaatgaactgtcgtatatcctattaatctaaaaaccaaaccctcactaaaaagagtttttagttaccaaacagagaaaggcaacttgtatttttttaaagttaggaaaaaataataatacttgagaattgattattatgagaaagaacccaccccaacccaggtcagtttcacaacatttcccttccaccaaacactcaaaaacaaaagtttttgtttttttttgttacaaaaaggattgnntcccaaaaaaaaaaaaatggacagctttctcccacaaagaaagcacagaaagtgggttttgctgactatacagcaatctgccgacaaagccacattctgtttctgtttagagtcggtttcaatagtgaaaagcagcttcaagtagttaaataaaattcaagcagtagtatcataaaactaaggaatctttgcaaaaactgcctttctgtttgtcctaaactcca

SEQ ID NO: 5544 - DNA, 648 bp, Gossypium hirsutum
gtcttttgctgatttctgttcctgtgtcgcagcaattacttgttctagagaccagcttgttccttaatggcctagacttttatgaccagcatagagacatgagactggatatagataatatgtcatatgaggtttgtttttgttttgctatgtcagtgctaagtatatatgttttattttccgggttacatgcttgttaaagatgaaccgcaccgtaagctttatgctgctatcatgacaggaattactagccctagaagagaggatgggtaatgtgagcactgggctatcggaagaagcattgtcgaaatgcctcaaaaaaagcatctatgacacagcatcttcggagtttgcaaatgtgagctatgagggtgaaaaggatgatgtaaaatgcagcatatgtcaggtactttttctatatgactttccactaccatgctttttcatttcttctactcatctatgtatggaaagggatgattttgcacatttgcaggaagagtacgtgaatggagatgaagtagggaggctgcagtgcgagcatacgtatcatgtggcatgcgtacagcagtggctgcgggtgaagaactggtgccctatctgcagagcatcagcagagaagccacacaatcttcttcgttccacctc

SEQ ID NO: 5545 - DNA, 633 bp, Gossypium hirsutum
ccgctcactctatcgtatgctttactcatgtcgagcttcactgtcataaaacctttttgccctactcttttctgtttcaatgtgtgaagaatttcgtaagcaagaagaacattatccaaaatcaatctccctggtacaaaagcacaccgagccacatcaatacatttctcaataacttctctgagcctattagcaatagcttttgccataattttttaaatcacattacataagctgattggtctgaactgcttcatattaacggggttagaaacttttggaatgagtacaatgtgtttagagtttacctgtttgaaactcttatcctcattcaggatttataagcagaatttgattacatcatctccaacaatgtgccaacacttttgataaaataaagtcggcaatccatcttcccttggggcttttgtgggtcccatctcaaacactgctgctttaatctcttcctttgtgtagagtgtcgtaagaaattgattatcctccttagatatacatctatcaattccctatagcaaattattgcaacttcccctttcttctgacataaataaattttaaaaataggatctcgcaatgccttctatatcttggatgacctccgtttctcttcct

SEQ ID NO: 5546 - DNA, 805 bp, Gossypium hirsutum
  misc_feature (34)..(36): n is a, c, g, or t
  misc_feature (551)..(554): n is a, c, g, or t
  misc_feature (558)..(564): n is a, c, g, or t
  misc_feature (567)..(570): n is a, c, g, or t
  misc_feature (578)..(579): n is a, c, g, or t
  misc_feature (581)..(595): n is a, c, g, or t
  misc_feature (597)..(610): n is a, c, g, or t
  misc_feature (612)..(624): n is a, c, g, or t
  misc_feature (626)..(646): n is a, c, g, or t
  misc_feature (649)..(655): n is a, c, g, or t
  misc_feature (661)..(661): n is a, c, g, or t
  misc_feature (668)..(674): n is a, c, g, or t
  misc_feature (676)..(680): n is a, c, g, or t
  misc_feature (686)..(691): n is a, c, g, or t
  misc_feature (697)..(700): n is a, c, g, or t
  misc_feature (703)..(703): n is a, c, g, or t
  misc_feature (712)..(727): n is a, c, g, or t
  misc_feature (736)..(743): n is a, c, g, or t
  misc_feature (747)..(757): n is a, c, g, or t
  misc_feature (764)..(773): n is a, c, g, or t
  misc_feature (777)..(785): n is a, c, g, or t
  misc_feature (789)..(792): n is a, c, g, or t
  misc_feature (797)..(802): n is a, c, g, or t
agatttttattatcatttaatttacacattaacnnnggcagcaatagataaatgaatgccacatattattataccattggttttggatttcaaattttttttcccgtccaattttcaacaggtaagttgtatttcttgtttttttttctttttttggatgttttaatattttattaggtaaaaataaaataatagaaaaatatcaaataatttaatctacagtcatattcaaaacccaaaaccaatctaccacattatatattacatgatacatattacatgaaagttcaaaggtaaactttgaagtttaatttttataaaaatttataatatgtgatttatttagtcttgtaaattttcatttaaaatttcaagacaaatggaatcaattgtgattgttttggaagttggaagtcaaatgcaagaattgaaattttaaataaaattaagttcaagactggttgacaaaaccagagacaaaaatgagataaaagtcgaagcaagcaaaaaaaaaagggcccttcctttttgaactccccaaagggcatttnnnntgtnnnnnnnatnnnnttctcatnngnnnnnnnnnnnnnnntnnnnnnnnnnnnnnannnnnnnnnnnnnannnnnnnnnnnnnnnnnnnnnatnnnnnnncccaancctcccnnnnnnntnnnnnttctannnnnncccccnnnntcntttactttnnnnnnnnnnnnnnnnttttattannnnnnnnatannnnnnnnnnncccctannnnnnnnnntttnnnnnnnnntttnnnncctcnnnnnntac

SEQ ID NO: 5547 - DNA, 619 bp, Gossypium hirsutum
ggtttccttacacaaactagttatccaagtgtatttcagagaggattttccaatgttatgtattgaagcctatgctactcaagattttccacttacagaccgtgtcatatgcagacacaaatatgtatataatcctctaaacatatgaaaatttttagtatactgtgtcagaccccgaaactaactcttgaacatgataacattgaattgggacagctcagatgcatgcatacctgtctcaactttgctctgatttctgaacctgaagatgaccagcacactgcacaaaaagcttcaagaatgtttctttgaatgttgggtcccgtgaaagaaatcaatgaaaataacttaaagatatcttcaccagattccagcaatgagattttctcatcgtcagctgctgggctattagttgatttggcaaggtgcatgattacaactgcaacctgttcacgcaaacttggggatgacaagctatggcaataaaggatttcaaataatggtccaactgcaccttctttgatcatctgcaacccattttggggcaagctcgacagattctgaagggcttttactgccactgttttcatccctagatcttcatgagagagtaactgaa

SEQ ID NO: 5548 - DNA, 570 bp, Gossypium hirsutum
aaaatctaatctccttgatctaaacaaagcatcatcaaaaagtcgaatttcttgatgagctaacgaaacctaatatgcgcaataaaagctttgatgtcaatgcaaaaagagatgtttagccttgaaaagtacagtagcatcatgcaaatgccaaactagttttagcattcgaataggaaacaagcataatgtggtaggacttgtggcttatctgatattggtcttcaatattttatcggcttcacctttgctcatttgcccatgtgggttaagatcctgctaattaaagcttctttcttcccactaacaggaaggttgtgggcatttaagtaaactttcaaatctcctactgttaaattcttcaactgcaaaagaggaataaataagcaagataaacttccttggatttgttatgtgtgacaatttcagtaccccaattaccagcaatcttgctacatatactaggtttcatgccaatgctcattccaaagtcaggggaaaatagaatcggaaaaaccaacactagtatatttttactaaccgagagttattcaactgaatacgttccaa

SEQ ID NO: 5549 - DNA, 634 bp, Gossypium hirsutum
tccaatttatatacaaatcccaatagtgacttcacttggagtattcgaagagaaaaaaacctacgactttcctctattcattttctagcctaaaaaatgacagaatctacggagcatatcattcatttgacttgcttgagtcaagttggcttcaaagaagagaatgagatcgtcaacgaaaaatagatgagaaagtgcaagacctcctcttgaaagaaagatcaaaaaccaacttccacatcctatagcctcataaattaagtgccccagtctttccatgcaaagaacaaacaataggataatgggtcaacttgtctcaaaccgcgcatcggacaaaaactttccgtgatactaccattccatagaatctagaaagatgcagaggaaacacagttcataatcacagataccaaaaatctaggtaggcccacttccaaaagtgtgtcttccaaaaaatcccacttgatcctgtcataagccttctctaaatcgatcttcaaagccatcccatatttatgacatttgaaacaccttatagattgaatggcttcctaagtaaccacaatattatctgtaatataccttcttgcaacaaagctagcttggttctgattagtgagcttcatcatcaaag

SEQ ID NO: 5550 - DNA, 696 bp, Gossypium hirsutum
tgtctagaattgcaagtgaatctgcaattaagaaaatgatgttttttggtgtgtttttcatgtttttctttctcgtgttttagaacactttacattagttttgtgcccattcataattttctttcccctatccctctggcttgggttattgtgtgctggtgttgagagactagagtcagtagattatatttccttagtgtatacaaactgttcagagcagaagcagcttcccccctcctaccccccacctgaaaaggcaaatctattcctctaagccttcaagtacaatgcatgtatatatgttaacaatcaatggtgtctgaaagttgaatgggacaatgtgtgtgacaagtatattgcgccttgagaatttcttgtttaaaggatggaatttcaagtgaatagatcttctctagtactttggtcttgaaagtgtccagggatggtaatgctaatctctctctgtttgctctcaatctcttcattactaggatgtttttaaatgtcaatgaaatccaccttgctttggtggcgtagtgcatatctcctttctatcatctattttgtactaatgccatgaaggctgtggtattacctgagttcctatttcttaacagccttgttctactgcttgtatatccacaaatttaggttgacaactgctccgtggtcaccctatgcacccaaattctagaa

SEQ ID NO: 5551 - DNA, 621 bp, Gossypium hirsutum
cgccgtcattccgtatgtatcgtatttatgttgctccgacttttacttagcctatcatctataaccaaatctgaaaatgtagggaaaaaaatatactcgtatgagacgcatccgactaacgtagttttacattgttttctcatttttcttgtgaatgatttacatctcagttcaaatctgcctcgatgattaagttttgggaataattgatagttatgttattttgatttttcattaatcttttgaaattttcgaagcatatttggatataggtatgagaatataattgttcaattgcacaaacaatttataaataaaaacgaaacatgatcatctgaagatatgctcatatccgagtaattcataagggagagtcttaaggttgtttgaaccgaatcaaacctgtcagttttattggaaattggtcaagatatcagcccgtagaaggacattaaaccggttgacccaggaattaatacaaactggttgaatcgggtaaaaatcagttgaactagatggtttaaccagattattaataatttttattttttataaatttttaatgatatatttaattgaaccggtaatttgatcggtttgattagttttggaaaccttgaa

SEQ ID NO: 5552 - DNA, 633 bp, Gossypium hirsutum
ggggtttcttggttttgcaagaaatggagaatatatagaaagaaaaaggatgatagagatggtagcgtcaatgaaggcttgatggtgagtcgatggtctgattgtggatgccagtcttgtgtttcatggatgaagaaaggatatgatcagaagcttcatgttgttgtgaaaaatcttcctcaaggtagctttttaggcagatttgttttatttagttatttattttctcactcagaggcatttgctattgcagtagttgattttgataccaacatatttttgcttgaaagtaggaagaggagatgaggcagctcaaaatgtgatatttttgcatggcttcgtttcttcttcttcattttggactgaaacaattttcaacaatctatctgaatctgtaaaggatcattacaggcttttcgccgttgatcttttgggattcggaagaagtccaaagccaaatgactatgtatacattgcttgatcatgttgaaaggattgacaaatctgtgatcttaccatttcacttgaattctttccatttggtggctcattccatgggttgcttaattgctttggctttagctgctaaataccccaagttcgtcaaatcagtcacccttgttgcacctgtga

SEQ ID NO: 5553 - DNA, 623 bp, Gossypium hirsutum
ttttagcttgtatttgaataaacttcataggagaacattatatgtcgttttagggcagctagttctctacccagcatcaaacaaatagggaggaccttttaccatgagccaaaactaatagtctgcaatgagtttcatggactcaattattaaccggccactggttatcccgaacctacaccgaggtattaatgttggacaacttgttaaacccagttaattcatcgaataaagaattaccttttaccaagcattccttgtaaaggattcatgaaaagcatcagaagaaaaggatgaaatgaacatcatttctgctaaaaatggttttaatataatttaagccagtagctacaacttgcaagatgtttcgtatttgactgctgaagttgacctctaaaatacaaaaaccttgatttccttctgtggtaaaaatcacaactcaaaatgaaaataattgggaacatattggagaattgaaacatcatgcattaaaactatggtgcctacgtatagcctctacttataggtatctagatctactaaaaaatcagatacaaaactctgatgcccggatgagcgatgcattacagcagacagaacatcagtctccagtaagggtatgg

SEQ ID NO: 5554 - DNA, 624 bp, Gossypium hirsutum
gtggtggttcgatccattcgtgagaagagtccaagagagaaactataacagtcaaaaggccttcggttaactatatctgcttctatttattagaaatactaaaggaatggggaaaccctgatcaagaagaggctaaagatttagggataccttacgagtacatgggcaagaagcaagtttgtttgcgagcagattctgacaatccagtctatgagaagtcgagatcggcttactcaattcttatagcggagtgagtgatggagcgacccaaaacaaacgaagaaggaaatatcacagaagaaaagcttacctgcggagggtatcaaactcctgtcgaaaaaacagcccctggtggtgcatatcgtggtcccagaagcggtacgaccacctcatccctctagggaagcccatagcttaaagcagaacttacaagcttctcactgacctccgtgggaaagctaagtgcccctatttagtaaggcgccctctctttacgcgaatcgggtattaccggccgatggcgaataagtcctcacaacaaaggttaggtgcttgagatcataactgcttacagcagcgctcctggcgcgagactctttcgcctagaatgaattcggtaaggaa

SEQ ID NO: 5555 - DNA, 643 bp, Gossypium hirsutum
tattgtgtttgatcttctttaacgacaaagagttttctctttacactctacatgatctctttgcttttaggttgccttgaaatttgagcatagaagtagcaaaggctgtaactatggaccgccacatgagtggcaagtttacaagttagtcttgttgcacttctaatttatttgtaattttttaagtatgtatccctacttatatttacgatatttgcttgcttcttgtcattgctgtagcactcttggtggcagtcatggtataccccgagtgcactataagggtcgtcaaggtgactattatgtcatggtatgtattgccgatttgttgttcctgttcttcttgcctgcttttggtatttaggtttgagcagctttctgattagaccttttatcatgcaggttatggatatgctgggtcctagtctgtgggatgtttggaataataacaatcatacgtgagtgatactaaactaagatgtattctttaatcttatactggctattgtgttcatcttctttgaactttcagttgcttaattagaatatgctcttaacacagaatgtctgttgaaatggttgcttgcattgctattgaagcaatatccatattggagaaggtgcactctaaagggtaagcagt

SEQ ID NO: 5556 - DNA, 726 bp, Gossypium hirsutum
caggttgtatgaacgccgtagtgggacagggcgcgggtaaaaaaggaagcttttgtttaacatcagctttgagacttggctaaaataccgatatgcagaatatatcaaagctaatgttaaacaaaagcttccttttttacccgcgccctgtcccactacggcgttcatacaacctgcgaggtcgctccccatctgcatcttccccattactgaaaccaccacggcgaccaccacggtaaggtcgaggaccaccataaccacacctttcagagggttttccactctctccatcttcaggtacagcattattgctgaataagttctcgtcatttgcaaaatcacgtctgtatccaccactaccactaccaccacgtccacgtccatatcctcgcccaccacgacctccgccacgagcaccttcactctttgcctccctcacttaggaattaaaaacactgacatcagtgataagcccaagagagctaagagcttcatcttgaaggcagctcaagaaacaaaatcttcaaatacagaaatttcaggtttatatgatttatgctataaaggaagaaaccataactgacaattagatataaaacaatgttaactgtcataactatcaagatgagatcagttatacaactatcaaacttccctaaaaacaaaaattcataccaatgcgtaaacacttcgggaaaaaaatctcagtttcgatggaataccaac

SEQ ID NO: 5557 - DNA, 626 bp, Gossypium hirsutum
  misc_feature (600)..(601): n is a, c, g, or t
aagggttggatctttccgaagtttagatgctaaacttgtgagttcatcaaggtctttgaagcaaatcaacgaagggaaatccatgtcaagaaatgaagacagtttcattcgagcttcagccatttcgctttctgcagcaaagtagttatacaacacaggatgggaaaacggttcttcaggcaaaggctgagtgagcatgtcatccaatgcattgagatagttgtcgaattccgctgtaaacattagaaaatgtcaatgaaaaaaaaaaaaaagagagaacagataagttgtatcttcaaaatcaactgcaatttcatattctaacctcttgttgtttcatcatctaagaaagatagttcaagactgccatttctatcttcggtttccggtgggggtggggcaggagttttaacacgctgccgagttggttgtcgcttagctgtggctgatgctgatcctttggctgatgctgatcctgatcctttacttgtcttctgcttcttttgaccattgctgggagtgagaggcttaggcgggggattcctcttcctctggctgctacggggagtctttttgttactttcgattttagcatcctcnnaaattactttcttttttagcctcct

SEQ ID NO: 5558 - DNA, 648 bp, Gossypium hirsutum
tctcttccttttttattttattttattgccaaagacaaatttcaatggatttcgttgtcatctttttctctcaattctccaattctactatagttatcacatccatcattccttctccttgaaatatcttcttccttgaacctcttcattataaatttgtagtaacatctagaaaaacaaagagtacaaattagatttaaacaatgaaatttatatccataaattttattgttttttttacttcacaaaaactcgagatttaatcctatagatatataaatttgtcgcttttaaattcaattcaatgacttacattttcatgacatcgaattggataaatatcatgaaaaacaaaatctaatctatcaaatcgattcaccatcaagaattgaatagtatattataagaagatctacccacactaaacacaagaaaatgatttcagactgtaaaacagatgaaattcacccgtggttataaaaaaattattacttcatgaatatttccaatatgttttacaaattaaagtatatgttaatatggtattttaatattaatttatgtaattaaagatagatatgttctaatcctaattaaatttaaccattttattatattgtaaataataaaaatgcttggtggtcattg

SEQ ID NO: 5559 - DNA, 608 bp, Gossypium hirsutum
tatacaatctcagtgtagaaatttctatctatcaaattaataagaccatgttatggttatggtttgtcaaatattcaataatgcacggttgaaaacaactacaaaaccctacaaagactaagaagaattagagaaaaggatatatacttgtttttgttaatcaaagctataatatcctaaatgagactagcttactttagattcaaagaatgatagtagccataaagtatagtcgattctaataaaagacctaatccaacttcctgcacaactgtatcttaacaaaataacaaacaatacaacaactgaaactaactaagctaactaacaactgacttaacaactaatacaaacagcctatactacaatattcacccatcacactgactcttgagcaacttcgacaaactcctagttttcctcgaatcttgtaaaaagctgaacttacaaattaattaggtgctccaattacgcctaaatttagaaaaattcatcaattataatgattacctatacagaatataattatgcccaaatctaattatcagcggactttttaaacattacttagataaatatataattacttgaagggagactaaccgagc

SEQ ID NO: 5560 - DNA, 614 bp, Gossypium hirsutum
gatgaagggggggtagagaaagtagggaaaacagtgttgcaaaggaatttggatgaaattggagaagatttgaaggaagccgtggtgagtgatgtgaattggagttgtacggatgaggaagaagtggatgtggagattaatgataataatgataatcatgttgaagagaaggatgaaaaggaaaaggagaatgagccatttgctgtgccaactgctggtgcattctatatgcatgatgatcgctttcgagagaatgttggcggtcgtcgtaggtattcaaaaaaaatttgttcgcttttctagtgtaatttacataatatgttttaatttaactatttaagctattaatcgactgttttctagtatatggtgtgtttacctaagggttttgttatgcttattttagttttcttaaggattgaagttggaatgcttacttgccttgctacttaactccctatgcagacaatagaaattaatagcaaataagtctttcatacttttaagcaatgttacagttggacgacaaatgtgtttgggtaggtttggcacctatgatattcatgctctgtgtgcagctgttttaccttttgtcctcgggctgggagtaggtt

SEQ ID NO: 5561 - DNA, 597 bp, Gossypium hirsutum
tatgcccaagctctaatttcgatggagaggcatcgactcggcgactccggcgaaaaggtaagtttttcctcccttctcttctctttatttaagctaaataaaataaataaataaaagaaatatatatacaaataaaaataaaagaacgatgaacactacaaagtaaaacgaaaaaaatcacattttgtattcgaaaaaaataaataaattttgtgtctgtatttagttttttcaatacaaaagattggccttttaatagccctagaacaacttatttccccccttttttgttgttttacattgtttggactctttgaatctgttttgcaggtgaacgtggggatacggcgcgtgtggtgggggccggttccgagacgtgcggctgctagggtcttcgggaagctgtttgagttttagggtttcggttgtttttgtgttaggcttgggttagttgggtattgggttttaatttgtaatgggtaattgggcttaggtggatatcaggcctactattaggtttgtaaaagaattgtttttggattttaaaatgttttacgggcccgggcagaaaaattgggtattacataaataataata

SEQ ID NO: 5562 - DNA, 635 bp, Gossypium hirsutum
  misc_feature (492)..(492): n is a, c, g, or t
gtttgctggagtggcactatagtccactgatctggggcagatttagctttcgaacgagtggttattcctgagatagactttttttaaggaaaaaaaaaacaagaaaagaaaaaatatcaagttacttcctcgtaagcataaccaagagacaatgatgttcaaccatttaagaaaatatcaaccttaattagatggccttggacattaatatttgttaattcaggatgcctagtggatagcagtagggccaaagcactggtggtaactttgatttgatatgccccctgaatctcccctgcactccaaaggatgtatgagaagaaatatcaaatgcaagcttactttcttgcaagaatgaactgttcattttctctttcataaatattggatttggttaataatcacaaataattaacaagagacaaaagattacacatccttctcatacactgtaaatcatggaaattgcagaagcaaaagagcttgacaccnttagacaatatagtccagcaaagatattgttaagagaaaacaaatcatgcaacttatactaaagagaaataaaattaggtcacaattttgtctaagacaatctattcaacccctcatattaaaatttaaacttgccaaattag

SEQ ID NO: 5563 - DNA, 643 bp, Gossypium hirsutum
attatgataaaaaaaatcagtttggttaatgaaagtaattgctaaaataactataatatgacatttgaatgcctttttggttatttattaggttaagattctatgcttttttgattagatatatgaaggtttatgtttggatttataaaattatcagtttttgaccaaattaatcaaattggaataatttcatccaaaataaatttgttttgatgacttggattaattcaatttgattattaaacccaacttaccgactgagcacctctactgatttaagcaaactttaaaataaccttattcactgcattttttttaggtaaaagatgtggccaccatactccattggaagctctactagggacattatcatccatgcaaagatgaggctttgaatcttcaccttttttacttttctttcctgcctcacattataatctgaattctgaactgagttttgtggatgagacagtttcaagaactaatgtttcagtttaagttctttagcataatttctgagtagtttttaagaatacgcggtttggttagacctttttaaggattgagttctttgtcctgtctaataaatttgatttgcttttgactaagtttagacaagaaaaacttgatcttggattggatt

SEQ ID NO: 5564 - DNA, 521 bp, Gossypium hirsutum
taacaaaaaggaaaacggaaattaataaagtatacaggacttagcatgttaaaataactttaaaaacttaataaggagggtcaggtacaacaaggatggaccaaatggttttaagaataattttaccatgttttccaccctcttgtctcatgtcttcaacaatgtccccatactcctcatcatctctaagatcatcttcactaattgcttgagtcaagcacacaacctttgtgggcacaccttgtggttgcaacataagcctctgtaaaggacaaagacactgcaaattagcctatcatctatagacgatacttgcaacaaatgagtaaattttagaaaaaaaaatagcactatctaatcttacctgcaaagcaatctgctgctgtgcatgctgaaggatgctctcttgctcaggtttaggctgggtagcaccttggtttgctcgcctaacagtgagagttttatcacccattttaattccatttaaagcagcacaagcgatgtctgtaacctgacaaatc

SEQ ID NO: 5565 - DNA, 661 bp, Gossypium hirsutum
aatattgtatttttcgactgatatttgatgttaaaatattgtagccccgcattcaagtctccattgctgatgatatggatgctccaaagagatgctgaagctgcgctcatcttgctttccctagaagaactgctccattcaacttttttagtcaaatacgcgtaatcaggcatcacaccttcacataagttttagttcaaccaatatcatcaactttgcttctttattactactactactactattgctattatactctccataagcttgtaaacggctgattaattaatttctcaatatatttatttttgaaattaagtatcctctatatttattttacagtttaatccttttaaaattcgagattcaaaaattaaattctttccctaacaatcctacgtacaatacatatgtatattatacataaaatatgctaataagagtggttagggtgctaaacaactcagcatgtcgtataattggctgcacaaaattgcacataatataaatataaatagtactaactagtacaatatctaccaatatataatatatgatattgaaagagtatgcattaagatatgatatatgttttaaaccaatgaaatgagtctattatataatatataaagtgcgcttttttcaagctttgacagctcta

SEQ ID NO: 5566 - DNA, 642 bp, Gossypium hirsutum
  misc_feature (566)..(566): n is a, c, g, or t
  misc_feature (605)..(606): n is a, c, g, or t
tatctatcaacacctatcaagtaagaccctcaaatgcttcgtatttatgattgttgaaagactttaggtcatcattgcattaatacctttccgtattaaatttaaaatacgcttagtgaatcaataagacatcttcatagacacactagtacccgcaactgcccttgatatgcaagggattttaaatgcttataattgctatcatagactctgagacaagatataggcgaaaaaatcttttggcaactggctacctacatgtcatattaagaatgaaaactaaaaatcagaaattacgtacataagctccattaaatcagttatttggggtttgatggctataaaggatgaaatgaaggaagccaatcaaacatggttacccctcaattgacaccttttccattatttcaataatttataatacttataaactgataatatttatactctgaagaacattcagttaagaagcttaaacacatgatgatatagatgaagttgtttgatgtcctcaaaaaatatctggacaaaatttaaattgcatacctcttcaacaagatccccanttattcctcttataacttcacataagttgttctctgtanntgaatcattgacccaaaaactcatgtttttgtaaca

SEQ ID NO: 5567 - DNA, 637 bp, Gossypium hirsutum
cataaatgtccaacatgtaaccatgagcttgatttcttttctttttatgattttttttcctaatggtgtcttgtctttatcattcactttcattttttcctttttccagctttatagtttagaatctttgtcttgtattcctatccttgttagttttaaatattttagcctgctgacttgagttttgatctcaatgcagcaagctttcttccagaagctgatggagctattcagaatatgtgaagatttggaaaatgtagatggtcttcacatgatatttaaaattgtgaaggggataagttagctctctttctcacttgaattctcttattcttagttaagacttaagacatgcttttattttacagatgattgatggatcattaattgtgttattggttgtcatacagttatgctcaatagtactcaagtttttgagaaaatatttggggatgaattaatcattgatattatcggttccctagaatgtaagtcccatctgtttgttctgacatttattatttgtgactgttgttgaattgaattgaaagtttaattcgcaatttacttgtatatagctgtttgcatgcaggcttctagttatagaagcatacacaaaccttgttatgtcttggga

SEQ ID NO: 5568 - DNA, 508 bp, Gossypium hirsutum
atggttggtgtcctgttttggcgtcccataagacctttgaggaatggataaagatggaggatgacccagaaggaaaagaacactttgccaaagagtggtccccaagcttcgtaccctttgttgagggcatcggagaatccggcaacgacaccaaccatgttgacgatgaggagtgttgttggagggattagaagtgtagtccatttcacaatgtagagctcaccaaaatctgcatcatcagctgctttggcagtgacagtaaagttggtgtcaatgcccgcaagcatcttaaggaaaccttggaagacggcaaagagatgggctgaaacgccaccgatgacccaaaactgctcgttacgccataagtcctcaatgctgacaccactccatcggagctcgagaacagcagtcacgataatggaaaggaaaaggccaagaaagagaacacttgccaggtttgagagctgatcatcaaattagaaaatgtgaagcaatggatatatatgat

SEQ ID NO: 5569 - DNA, 568 bp, Gossypium hirsutum
  misc_feature (516)..(518): n is a, c, g, or t
gcacagatgcatgtctttgcccatcagcaatttgatgggtttgatttccatttgcagcaatatggaaacatctagagctacatcaaatgactaaatagtaaaatgataggtgaaatgtactaaaatatcagatcaggcctacaggtacaagatctgtcaaatttaattgactaaatagtaggaaggggtgcattgagagcattttaataaagttgaggattcaattggaacagttagataattatcaaacttaaataggtcaatgctatctggtgcaaatacccaaaataggaatcaattgaaacataaaccaaagcacaaagtaacttaaatcacataaaagattgacacgccataccatcaatgcttcagaaagcccttcagcaattgcagcatcattgaaaccaccaccagaaaaaggtatggccgacagccattgtaagaaaatatcaacatcttttgtccacccactacgttgtactaggcaagctgcatagagaaccatattttacaccnnnaaaaaatgtagttccaattctagtaacccactttaagttcaaggaagaaa

SEQ ID NO: 5570 - DNA, 633 bp, Gossypium hirsutum
tttcactggccttagctcagccatagacaacacaatgcactgcactcagaatcatcctcaaactggaaaatggaagcaagagagtatatcagttcttttcaacttaaaaaaaaacaaacaagagacaatcagaaaaagtaaatctcattggataaggacacatactattcagaggaataagactaatgatcagatttgaacaaagaaaggataaatattaagcaattatcatgcaaggaacaatccccacctgtccaataataatcctgctagttgcaacatcaacagcacacatgccaaaaacccgcttctcattcgggtttgttgaactttgacagctttcagtcactgccatgaggtaagaagggtcaggatttgatgacagcatttctccatcagttagggttcctctggtaaccacagcacatatttcacgcttgacaacctaaacatattgaaaaacatcaataagttatatagctccatatcatcccatacaattaacaaattatggaaaagaattctaaaaagcatactagaaaacaatggatataaggttaataaaatgacagaaacaagccatcatatgacctggctagaatccagatggaaatggttaatggtcctcagcat

SEQ ID NO: 5571 - DNA, 666 bp, Gossypium hirsutum
aaggcaaaacttcttgcagaccaggaagaggatcaaatccggcaacttacgacatcattaatggaaaagcaggtaatttatttgcaaaagcaaatgcagactcttttacttgtgaatagaatttgtcatcctgaatccctaaaatttaatcaattttatttttttacttttctaaaaattccaatcattatccaaagataacaattgaatccttttggttaaattacgcattagtcatttattaagtataatcagattaatcttattccctacccttttcgaatttcgaaattttaatcttaatgctaacgacaatttttaaattcattatctaacttcttttatttttttagtatgtggaaatagaaactaacatggtatcacatatgtgataatatatctgtcaaatcagatttttgaatataacatgacaaaatttaaaggctaccatttggaagattgaagttttaaaactcaaaaactataagacttaaaaattagttgaattaaagcatagggactaaattcacaacttaataataaaatttaactaaattcaaaagtactaaatatatatgtttgcggtagtaaaactaattatgatttttttaacttcattatgcattgaaggattttaattagaagtgttcatgggctatgctaaaa

SEQ ID NO: 5572 - DNA, 657 bp, Gossypium hirsutum
cttaatgccagacaacgatgcaaggaggcaagcggaggatcaaattaagcggctggcgaaggatccgcaagtcgttccggctctcgttcagcaccttcgcaccgccaagactcccaacgtccgtcagctcgccgcagttctcctaaggaagaagatcactggacactgggctaagctcgctcctcaggttaagcaacttgtcaagcagtccctcattgaaagcatcacaatggaacataggtttattattggaattcactttttttattatttctttattgcttttgatctccaattggaattgaaatcgattttcggtggcttgatttttgacagtccaccagtgaggcgagccagcgcgaatgtagtgagtatagttgcgaaatacgctgttccagccggagaatggcctgatctgctgccgtttctgtttcagtgtagtcaaagtccacaggaagatcatagagaagtaatattttgatttatgttttcgggaaagttggctctgttgcattgctaaaaacttcaccatttagtaggatcaacaaatccatgacttttggaagtaatcaagaaagtctttttttttatgtgttcaattatgcaatttatgccaaaattgatatctgaagcgcttctttcaaagtccaatttacc

SEQ ID NO: 5573 - DNA, 483 bp, Gossypium hirsutum
agcataataccaattagaaggatgaagaaaaatgcaatggcacaagctactaacacaccccaccatggcaactgaagtgactcgttgtagtattggcaagtgaacagaacaaggccgatgttcgagacaaggatgaaaacaaaccaccatgtcggaacaaacttgtacttcataagcttcatgtgaatatccatcttcttatcacctttaaaagcagtctttgtttgtctccataggtctctgcatgtagcagcagaaaatgagaaaaagaaattgagatttatataacgttttcgtatcatgtcaaggtcccccgttcaaatccgaaaatcgaaaatcgtggcagttaacgtagcaaatccgaagtgctgagatgaactcccccgttctgccgataaaccatttcgtcaagatgaaacatggtattaacaatgctcaagatgtcatactattcaccatttgacttgaaaagtgcaccggaaa

SEQ ID NO: 5574 - DNA, 633 bp, Gossypium hirsutum
catagggcatagcatatggagtatatgaagaattgacttttgagttgcaaaaacatacttatgatgatccaataaaataagtttgtctttgaaatcaccacagctagatgttttctgattgctttctatcaatttgaatgctgccaatcttactcgatacggatggtttgtcaacttgcttctttggtgtttgtattctgtttttaacaaagaatatttaaagcttttttggagtttgcattccgcctttaactaagttctcatgttcttggctgatgcgaggcagtttggaggacttcccttgtgcttttgcatctaccatgagagtgttggatgtgatgatggctttagatgatataaagctaagagcaatgctggagtcctatcagcttatggattcagctagaacaggccctttccgagttcttcaagctgtttctgttttcatcttcgtcttccataatctaaataataacctcgaattgccagggtctaaagatggaaagaacaagcaacatctcgagttgatacaattcgcattgagtgctacatttattttcatgggacgtgttgtaaatagatgtttgagggcaaattctttgaactcgtgtccccttctacccgccatactag

SEQ ID NO: 5575 - DNA, 658 bp, Gossypium hirsutum
gatgtgttgacgcttattatgattaaaatgggttttgtttagaatcaagatgaagagttttgggttgatgataatttcaagtttatctttcacctacaattgaaaaagccagaaaattcgtcattgtcgtggataaacattgatgggatgatcttcgttaacttcgctcagctatcatatattaatggaggtgagtttttacattatctaggtttaaatcacaaacatttacaacttctattcctaggctatgattttctatgtaacaaaagaatttaaatacgtgaagtatgactaacaataattatatttataattttttttgtttattacgaaattatatattttttaagatttctgcatatcattatttttaattatttattttattatgtagtgatctataaatttatacattattttaatttaatattattattaatattaaatatgtttttaatatttcttgttatatccaaggtgaattgtaactagtaattaataaaaaaacatgtgaaagaaaataagatgaagcaaagtaaaacaattgtgagtataacccccacatctttagcatcagcaacaaatcactgcttttggcacataaccatcaaagccaaatattctggcaacagcaagcacagcataatggactttc

SEQ ID NO: 5576 - DNA, 395 bp, Gossypium hirsutum
taatcattagctgaaacagaaactgtattatttgaacccatttgtcatggttcttaagcaaatgataaggcaaaggattgatcggcggcgggtgagcggtgcaaggcagggttttggtgaatcttttggcggcggcggtggtggggttttggccaccggcggtggctgagacttggtctatgcttaaacatatggctgttgaagcttgggatgcacacaatatattcattcctttcatttttcttttttgtttggataacaatgaaggataactaatggcttagagaatatgtgatggaagagaaaaacagagcaatttcctaaagaacagttggtttttcatgcttcaagttcttgatttattgcaagagaggagagagagggggggggggggg

SEQ ID NO: 5577 - DNA, 635 bp, Gossypium hirsutum
  misc_feature (597)..(597): n is a, c, g, or t
  misc_feature (599)..(601): n is a, c, g, or t
  misc_feature (606)..(608): n is a, c, g, or t
acgttatctttcaagaaactaaaagtgagtggctttcttttaaagataacgaacttgctagaatatctcagaacgaaggtgagatattacctacacttaagttgagttatgatcatctctcatcccatttgaagcattgttttgcttattgtcgattatatccaaaagatcatgaaattgatgtacaagcacttgttcaattttggattgcacaaggtttcgtaaagcaattgaatccaagtcaatctcttgaggagatcggatttggatattttaaagatttagttgaaagaagtttctttcaagaggtagaaggagacttgatggaagaaatgagatgtaaaatgcatgatttaatgcatgatctagctgaatcagtagcagggatggagagtagtattatagattcaaataaaattgcaagtgatgttggtgaaaaatgtcgccacatatcaattaatccttcattaattcctttgtttaagggaaagaagttgcgaaccttgttacattttcaatacggaataattcaagatttcagctatgaaacttgggatttgataattgcaaattgtagatgcttgcgtgtattggatntnnntgtgnnnagctactgagatgatttcaccctccat

SEQ ID NO: 5578 - DNA, 672 bp, Gossypium hirsutum
tgtattggtgtcaatgttggaccgcgatatgaatatgtgctgataaatatgtcttttacatagacagtatcacagaagataatattgtacatcagaatgttgttagtctgatgttatcaattattacggggatattatttcaattcattctttctggtttgttgtttgtaacaactgtttactctcaccacttcttggtcagctagcacggatccgctcaaggaataaacagttaggatggactcgccaaaaagtaagtgttatgttgctttctatgacgttttagttaaaatatcattctatttgaatgcaaactaattcataggctagctagtttaacacgaatgtcatcagaccagctagttgagtggggactagcacctcgatttgatctgtgagtcacctgaccccttaaggcagagcttggtgaattgttcgaacaaaggaatgtcggtgactcttctgacactgcttgaacttggagaaactggtaggttaaaattaagttgcagttgcagcatgcattagctcaaaaactcgggccctagagttgacagcatgcgttgcattagaaatttatttgaccaacattccctagaattaaactttttcacaattgtcttggttgcttttgtaatttctacactttcttcaaataccagaagaatggat

SEQ ID NO: 5579 - DNA, 643 bp, Gossypium hirsutum
cgggtcatgggacccatggctatgcagctcctgagtatgtagcaacaggtagctttttacctctaatccatcgtcatttgattgcaaattatgttttaacgtaaaatttgttcttatgaaggccatctgactgcgagaagtgacgtgtacagttttggggttgttcttcttgaaatgttaaccggcaagcgagcagtagacaagaaccgaccatctagagaacataatttagttgattgggctaagccttaccttactagcaaacgtaagtttttccaaattatggatgctcgtatcgaaggccaatacacacctgaagcggcgttaaaagctgcttatcttgcagtgcaatgcctatctacagaaccgaaggttagaccgaaaatgactgcagtagtgaaagcactagagcaacttcaagactccggtggcgacaaaggggtccatcagaatgcagcagttcatagttctcatccgacttcgaggtatgctctgaagaaaaatcccgacggaccccagccatctgcatctccattaagtacataaatctgaaaacagtccgatgcattgcttttattatttcagatggtattctatcttgaactccaacatatatattccggctaccggtcactgtacagct

SEQ ID NO: 5580 - DNA, 597 bp, Gossypium hirsutum
gcctgatacagtgttctttactccaaaggcatatgttaagataaactttgactgcccccatgctatcaactcttccgaaactgaggttcttacagatctttttacacggttattgatggattacttgaatgaatatggtatgataaatgctgatgatttttctttagtgttttactgtgatctttctccacagtggtttaaatgttcaaaggcatagtttgtgatatgcaaagcctttaataatgacagtagattgttgttatcatttgactaggattatcttctttactaattctgagttttgtcttccatgcttcagcttattatgctcgagttgctggtcttcgttatcatgtaaggtgcacagatagtggttttcaggtattctttttatttttattttcgtggcattaatgtgattccatatgataacctttttcctttgaactaaataggaattatctatggataaggtaatgaatttttatgacacatacatacctatattaaaagcaatatttcttgaaatggataatattatttgtgaagaatattattagagacagaaattagatgtctatcacagaaattggaggt

SEQ ID NO: 5581 - DNA, 612 bp, Gossypium hirsutum
gagagtttcctgattcgtatgtcgattgcaaatcactggaaaggttgaggatcaataagaatcatctttctgggaaaattcttgatggagtttgggcacttccacatgcaaccatgattgattttggtgataatgactttgagggagagatatcccccatgattgtattttccattagcttaaatcagttggttttgaagaacaataggttttcaggtaatgtcccatcagtacttggcaagttggcaaacctagagaggcttcttttgaataataatagcttttctggcaatctacctgctgaaattggtgctttgaagcagttatcttccttgcatcttgagcaaaattcactgactggattgataccgggggaaataagcgactgttttaggctggtggacttgaatcttgctgataatgatttcagtggtaatatcccatcaacagtttcattgatgagctctttgaattctttgaatctttctggaaaccaacttacaggtccaattccaaagaatctagaaaatttgaggctaagttccattgatttatctcggaaccagttgtctggaaatgttccttctgatcttttgactataggtggagacg

SEQ ID NO: 5582 - DNA, 601 bp, Gossypium hirsutum
tgtttcatctttgtttatcctgtaaccatatttgattttagttacaatctccaaaacttagtgtctgcaatttttatgaataaaaaaatcacatcaaccataaaagaaattaagactttacacttcacccacaaagaaatgaaagtgaaactcaatttaaataaacagtcgatggtgatgtccacaaaagtataatatatcctccatgggttccagcttctcctcactgtgtgttgaatgtcttcctctctcttatcatttttcttttacaggaaattaatctactctgaacatatatatatatagattaataaatgttaaatgcacaaaagtggggccacagtgaatcaaattattaaagatttttaaattgcaaaggcatccatccatttttttcttcaagctattttcccctgtttacgaggctatctattctactcttgtgtcttaaccatttcattttatgtatatattctagcttctagtcactgggccaaacctactgttgatatacactcttcatatatattggtaacatggctgcatccttcaatgttttaaatcagaccacctattaccagaccaataaaaatcaaaaaga

SEQ ID NO: 5583 - DNA, 578 bp, Gossypium hirsutum
attgagttttgaacttggattttcatccttggacatgtctttttcagtgaccccaactgcaagtatgtcccctttccattctgccacatcgatctcttttgcagcaaaagagatctttccagcatttttcacaaaaaggcaacatccattttagtatttcaccaaaataaacacacacaaacaaaacaacctttacatattaagaccataagcaaataaatccgtggatctaactaacatgatcttatcatataaaatcaatattaaaaaaatgaaaagaaaaatgtttagcttatctttactccatcgatttcagaatttgagcctatactaaaagaaatggacatcaagaaattaaataccaagaacccttaaagcatcaatccacaatcaaaggccagttccttaaaaacaaaatcatccccaaacaattaacaagaagttcactttcttttagatatatgcattatccccattagcaaaagataaaaagattttcaacccagaacttactctgaacctaaaaagtcaatccaaaaacaattttgcttaaacccaacacagagaaaaaaaaaaaa

SEQ ID NO: 5584 - DNA, 654 bp, Gossypium hirsutum
tgacaaattgaatcagttcatccaatttgattctccttctggtacggtacctgtagcgaatcaattctgcatatgtctttccgtaccgtatatttgtatgtatatgtattccatttcgtatttttcaggagaagtcagagggaggagggttgtgtgcgtgacatcaggcggaactacggttcctctggagcagcggtgtgttcggtatattgataattttagttcagggaatagaggagcggcttctacagagtaagtaatgtgaaggaattttgaacagtttgagattttttattgaatggtgggctcctttttaactgagtgaaactattttttgcaggtattttattaaggctggatataaggttatctttttgtatcggaggtgaatttcatttttgttgattgtttatttccacggtcggttattttttgtttgtgttcaatggatatttgtattgattcttcaacttgtgtgtgtaggggaacctgccagccgtattgcaggtctcttcctgaggatcctttgctggaatgctttgagctcgctgatgatttcaattttcaaggtttgtggattatctttaccccaaattatacagttttagtggaatctttctctttattttataatttgatatcggtcatgactcg

SEQ ID NO: 5585 - DNA, 648 bp, Gossypium hirsutum
ttatcctatttagtgttgtgtgtccaccttcttttcatgattcaactttctatgaatatcctttctcacagatatcttttttttggtcacacattttcacagatatcaaggggtttcttactgatgtcaaacctgcattgcttagtgcactggatgttgaatatcaaaaaaatccatttgaggtaagtatactatgatggtagtccagttattgtgtgaattgatagaccaataaattattctgaagtgaaataaagttggggacattaaagcaatatctttttgctttcactcaattttctcgtatgctcagttctggtctaggggtgagcattcagttttttgggtcggttcagtcagttttatgaacttaaccaacaacctccaacataactgaactgactgactgatttaggctttactgacctaactgaactgacttaacatcagccaatttggttcattaagtcggttaaccggcttactttttatgttttataaaaatatagttaaatcatttaaattacattataaatctatttaaattaaacaaaaagtaatatatattaactcggttaggttctgatttttaataaccaacaatcaaccgacttaaccgaatgagttggctcagtcgattatctccgg

SEQ ID NO: 5586 - DNA, 605 bp, Gossypium hirsutum
gaaccttatcagtaactgaatcagatggtcctattgagactacattagaggttttctctaaactcaattgctaaatatatcttataaaagcatctattgttttattttctattgctctctccacttttgtaatctatatgtagtattgtgaatattacatgtgcatcacagttgttcattgaagagttatgagctgattctttgagctgtaatcctaccttttgcagtacatcatttactgtggtgttagaggggataatggtccagtgtccatgtgctacatagtgtttctattaaaaagtctgttcatgatataaagttcattccatgatacttgggcttgagcatgagtgttagatacaagcatgtataggacatgggaatgttcaacttttctatgttcttctttcatgtatttgtaaggtccttggagaatcatatccccatacccatgttcagaactgcaactggcatgaatgtcaggcacatattcttaaaagaaaaatgaagagtcagagcaacaaagagtgcatttaaaatattattgcttttatgataccttggtaatgtctagaacatgaagtcttgtcctacaataaccaacg

SEQ ID NO: 5587 - DNA, 623 bp, Gossypium hirsutum
  misc_feature (6)..(6): n is a, c, g, or t
ttggtntatcccattcctagttataaatcgactaccgtttgggagcagtgtatgtttagttcgatgtttaagacgggtcattcgggatttcacttgtgtaaaagcatgctacaagagtaggagtgttaagaaatttacctgcacgcatctggatattatatcggcaaagcgtgacaatgacttcactggatacactccgtttagggtgatatcaaccatcctaactaatgcatcgatatcgtgaagctgctgaattgcccatctaacgagaaattgctcccccagaggccgtgacctagaaatgttctttaattataaacttatggcaaggaaaaagatttaaaccggatgcaagatttggtttacctatcgaaggattctcgcccggtgagcagttctaacattacgacgccaaggctatagacatcactctggcaagtatagcttccgaactcgatttccggggctgcataaccgtatgatacaaaaaggcttccagagaactgggaatacatccaccaagattagcctcagtgttgtaagatagttaatacgaaaacacctataatacgcacatcttaacaatgtttgagcaatagtaggaaaatcagttcccattctct

SEQ ID NO: 5588 - DNA, 750 bp, Gossypium hirsutum
  misc_feature (666)..(715): n is a, c, g, or t
  misc_feature (721)..(722): n is a, c, g, or t
  misc_feature (725)..(738): n is a, c, g, or t
  misc_feature (743)..(744): n is a, c, g, or t
  misc_feature (746)..(746): n is a, c, g, or t
catgcctcacaacatagtattcttaccattagactaaaaggttgctgttaaatttaaatccattaataatatcattttttgttaaaagactattaaatgagtattgtttttttaatattaatatgttatgccaacaaatttaataaaaggacatgtgaattatcacatggatgacatgtcagtatttaattaattttaaaaaattaaatattttaaaaaattatttaaatattaatatatcatccacgtgtatatcatatcaactaaattgaaaacattaattttttcatctgatgattcgtgaaaaatgtaaattaaaaattttaaaaataaaatattaaataaatgaataaaaatttaaaagaattgagggtgaaataaattattatgttttttaatctaaaaataataaattattgtaaataaaaacataaacaccaaatttcaaatataaaaaaaatagattgtcctaagaaaacatctaattttaatgttattagaatgtttttattatttattttacgtttgttgatgtgaaaaagcctctttctttaaaggaatagaataaaatttatttatgtctttaagcgaacatgttttggtaatatactcttgaagaagatgaggggagacgcaatctcctgcatctgagatcatttcaatcannnnnnnnnnnnnnnnnnnnnnnnnnnnnnnnnnnnnnnnnnnnnnnnnntttatnntannnnnnnnnnnnnnaatannantttc

SEQ ID NO: 5589 - DNA, 564 bp, Gossypium hirsutum
ataaaaaattaccgccaatgccacaaatgtatacacagtttctaatatcattcatcgcccaaacattttcatttcaaccaaagaaataatgagcgaatcctaaacatgactattctttttattcttaatcaagcaattaaacgactgaaaattggaaaaaaaaaacgtacctattaggatctgataaaagaagagaagaaaatttgcgggaaaataggagagagaattaaatgatggaaattgttgttcaatgagtttattatggttcaatggggagttaatacaaggagaatgaggggaaggccatttatggacttgcaaaaagttcttcttttgagggttttgggtctgtgcaatgcacgcaaccattttcattttttgtctctgttttgggttttgagagagactaggggaggataaattttaactcaggtggaatttcgtgggccgtacaaggcaattaaacggtcaatgaatggatcatgttcatgtaaaaggagattttaggttaaatttttctatcagtccctgtattttgcaaagttatgtatttgtctctatact

SEQ ID NO: 5590 - DNA, 471 bp, Gossypium hirsutum
tagacagaacttaaagcttgtcacactttatttatctgcttaatctctatgctttggtggtaatggtatattatatatcctatgaacacatgaaaaaatatgcaggaactgggtctaaaacagtccctacaacagaaggcagcatatcaaatggaagtatcatggaaaagccgcttcctcttactctcttcactctgttcattgcttcatacgtatcgattatcgccttttattaagcattttatgtgaaccaggagcttctttacctactagtagacagtagccatttgtattcctgctttgtgatgtatgcttaatggaaatatgagactccattgctatatgactacagttttgttcccattcactaaaagaaattcatgagtgatataaaatgaaacgcaaccctaatcaacatgacaacatcacattcacaacttgtagccttccacgtgattccctcaatacaaa

SEQ ID NO: 5591 - DNA, 626 bp, Gossypium hirsutum
attagactaaattaagaatactaacagaatcagtgagattatcaaatgtttctgccctcctgctccaagcttctaaatctggaggtgtggcaatgctgaaacaaaactttatagctcttagtaaaactgatcaaaacttcctgcaattaatacctcgatccaaatttaatggtgaattttggtagttaacagccaatcccaacggtctgacattctaaccagtaataaatataaccttttgccaagtgctaaaatcacagagatagaagagaaaaagattgacaatcaactagtgatgctccataaaaaatattggattgcctaagccagccgcattgtgcagcaaagagttaagccataacaaagtaaaatttataacaaacttagttatctgatgatgtttagagagagagggatgatgaaatgttgaaccaaaaactaacctgagcaaattgagctgtttcagaattgaatgatgagcattttggttctgaagcaatatacaatatgtaacatcaccaaaaagaatataaaagaatgagactaggaatctttaagttccagacaaatggaagaactgctatagaacatactctaagtaaaagaggaatatgccaaatgttggg

SEQ ID NO: 5592 - DNA, 550 bp, Gossypium hirsutum
gtggggaggtgactttattagagtcaaacttaaaagtgattgagagaaaaaaatggtgataacatgttacttgagacctaacctaacactctaaaagacagcttgcattttgcctgatattctcaaaacaaaaacattacgcttttcaactttattaagggcatgcttcagtctttgaacatgggttgggattggttttaaatcattctaattatctatatattcttctttcgggcctacaaaaaagctgaattatgagctgcttaaaggctttgccaaagcctgtctttctcagctttaagcgtatacttatgcttacagcctgaagctggtttgatcccggctaatgcttatcttcttcctccctatctatacgtttacaatccacctgtacttggtataaatttttttacttgacattttttaaaattataaaattatatagattaatagttttagtgacatagtcaatctgttttgcttgacattgtttggaaaaatcaattatacagatgtcaaaaatatgatacgggaaggtcaagaatcaaaa

SEQ ID NO: 5593 - DNA, 603 bp, Gossypium hirsutum
aagtgttggcgaatatcttcttactttgcctcaacaattggagccacttgctgagggtatttctaatagtgacgccaacaatgatgaagcacagttctttgcaacagaatggatgttcaaggtagcattcaattcgcttttaactataaacagctaaagatggaaggatatttaatgtcttcttttagaatgatcattttgttttctaccgtgcaagaaacatttattatacattggtcttgtgtttggaaggttgctgaaggctccaccgccttatacatggagcagctacgtggaatccagtatataacagatggtggagcacagcagctgtcggttgatatcgagtacttgagtaatgtgctttctgctctttcaatgccaattcctccggtcctggcaacctttcaaacctgtcttgggactcctagagatcagttaaaagacctgttgaagtccgataatgggaaccaacttgatattcctactgctaaccttgtgtgcaaaattcgacgtctgaatttggattagtaaattttactcacaattttgtaatttcaaaacaagctccgcaaacgaatcttataagccgctattgctaaa

SEQ ID NO: 5594 - DNA, 639 bp, Gossypium hirsutum
tcttttagattctcaaattgttcggttcctgacaagcttgcacttcaccatcaataactgttggtctactgggcgattcaaaaggacacgaaggatttgaagctgttgctttggaaggtgaatatgactcttccaaattattggtggtttcagcatcattgccaaattctgacttgtatgatgattgataattctccaaatagccacctgatgtggccacacaggtgctacttgaacatgttcttcgagcagggtcttccaaatcaaaggtgacattggagcagctaggagattctgcacattcaccatcggttctatctcttgagtgcatcacactgtaatgtgcatcttccactctatccaaaccatcaggttctctgatagtcatatcagcagacttgtactcttcagaagcagcaccatggagagaatttccttgtggtatactaacaatagcatcacaatttatattagtttgaaaagactgatccactggaatgtcatccgcatggggaagcattgatttattagaagcatgttctacatattcagaattgtccaattctatatgattatgatgttctggttctacttctacatgatcaccaccagccagtggatcatgaacaccagacaagt

SEQ ID NO: 5595 - DNA, 567 bp, Gossypium hirsutum
tcgcgggtaacgcaccacccatccaaactcaccctcaactatggattgcgccaaagcctttcatacttctcacaaatggtattttaaaatgttggttatgtggctacgattgcagtggtttctcctacaaacaaggaggtacagatgatggcattgtcttctgcttgcgatgtgccgtaattcctcacagttatatgcatcaagcaaatgaatcacattgcctcttttatgatgcagaaagtaaaagtcattacagtgcttgcggtaaacataaagaccgagaaggtgcattacattgccaaaaattgctggacataactgcaatgaacatcctttaaaacttatttatggagattgcaatgactatccacttcatcattggtgtgacatatgcaaaaaagaaagagacccaaagctttggttttatcattgtgaggtttgcgacaatacaatgcatcccaaatgcattctgaaaaaaatctatttatcaagtttgatattaaatacaaatataaagatcataaagatcatccgcatcctctcacttttgtcaaaaaatgactccac

SEQ ID NO: 5596 - DNA, 574 bp, Gossypium hirsutum
cgtttctatgagctgcccgagacggtcttccttcttgttgacatcacccttccttactcgacttattggcggaggtcgaagaacaccctgcaaatcattgacgcaaaacagggcattcttcgataggcgaggaggagggggtaaatctagcgtggcacatctaacaccgatgctggtttcttcacatgacagttttgtgacgccgggtttgagctcccatgaaaagggtatattgagactcattttcttttgttgtagttggaatattggtcctcctgagaccaaaactgtgattttttaaggctctcaaaagctggtattccttcgagtgttagttccgaaattaattaacgagattagagacaaaatttgcatgttacgggaaagaagcctaagtggctttaaaggtggtttacatcaggaagaaacgtagaaaagctgttaatgaaagttggctaactaacaaacttggagtggccaccttcggggaagttaaatgttaatgtcatccctcccctcatgtacttatgacgtatatataaatgcaattgataggccaccttcgaccgatctg

SEQ ID NO: 5597 - DNA, 621 bp, Gossypium hirsutum
cctacccccccttgattgttgggaagagggggatttatagtgatttgtaccaaagttttttcatttttcccccggtatacatgaacagaagctaacgttaggactataatagggggtacgattgagaaagctccggctatcatacatttgagaaaaacaagagttgttgtatttatcctatataatgaactttagaatggcatgcattggtagggagtaagaacactataaaagaaaaacagtaacattatatatatactatgatgtcatggtttctattctaggccgagatttttagactctcatataagactcggcagtcagggatgtgatttttgtgaagaaatagagtcgatttcttatgtctagttgtttctgcattaatacaatggattatctctttattttccgaagcaggaggttttgactagaattgttcacaggttgagcacgaattggagtttcgtaatcgaaaacaccttgggtttgagttattattcaatcattctttttagtttatattttttaaaaatataaatattatagaaatatataacttttaatatttttaaatagcaaaacaagcttttctgtactgtctatggacatctctagctctat

SEQ ID NO: 5598 - DNA, 411 bp, Gossypium hirsutum
ttattctgtttacacctatgcagcatttaggaacaaaggtcacacgattgtaaaagctaaaggaacagggaaagaagcaaattaaacaatcctaaataaatactaacaaattacaaatctgattccaagatccttcaaaacataacttaaagggggcctttagaatgtctcatactcattagaaaatccactacaaggatagatgtaactgaatccagaacaatgccagacaacatcagcagaaaaaatacgaaacaagtgcttataacaacacaccttaaccttattcccaataagaagcaaaaagtgaaattcagacactgccatggaactgggtttgactacttccgtgccattagacaactttgcatagtccagaagagccttgttctccacaaagttctgatcacc

SEQ ID NO: 5599 - DNA, 642 bp, Gossypium hirsutum
ttttgtacattttgccttactagttgcattggaattggcagtttaccatgaatacatgctgaaaagtgtctagaaattgtctggtttttctaggctatagatgagttaaactgttggttatcctcttggacttggtttaatgagaagcttgctcaagatggattcaatgatgacctggatgatttgcttgtgaatccgtttcaagtcagcttggcacagacgtggatgagctggtcttgagggttattgaggacgctcattttttgggcttggaaacatattcatatttaaaactgagttccattaatttatagccaatttcttcaggatttcttaccttcaaaacattaaaaattgaagaattgttgattgtaataaaccagtttaatcctgagattcaatgatttaattagctgagagccatttatctaagttgctagctagttctaatgttatggaacttgaactcaacttgatgctgtcagatgcattgtttatttatttattttctaaatcagaaggaatttgaatagccttaaagctattctcttagcctatttgtggtcatgtcaattttatgaaggcatttgttactgatatgccatgatatataaccggaagatcctctgtaggaaaaaaaaa

SEQ ID NO: 5600 - DNA, 622 bp, Gossypium hirsutum
  misc_feature (612)..(613): n is a, c, g, or t
cttgatttcgtcatattttatcagatgaaatggaagatcagatatctatctggtaccctaaaaatgatgttaaaagcctatcaatggagatgaacttgtttctttttaccctgagatctctaaaaacacaaaacacggccaaatgtagcatctgtatcttcatttttcatgccacttaactagacattgcacacctttttttctgccattgacttggcagaatttcaaacagctaaaatttgtcaaacaagcaagacaatataagaacatgaaatgaacacaaaaatcacattgtcaccatcttaaatctatgtcatagtgcactcattcttaagatatttagctcttttattcccacactttccggtgacaagcaacttacaatgtcaaagcccttctatatcaacatctctacaatattataccatttgaaattagctttaacagatgaagttcctatggtaataagggggattaacaaaaaaaaaaattgtagaaactaattgcatactctcattttaccaaaaaaaacaccttaggtcccaattctaataaaatctgcaaataaaaggctgtctgagaatgatagaaagagataaattgcccctatannttagcaagc

SEQ ID NO: 5601 - DNA, 646 bp, Gossypium hirsutum
  misc_feature (632)..(634): n is a, c, g, or t
  misc_feature (641)..(643): n is a, c, g, or t
tttagaggtcctcagtactggtattgttagtgcaacagtaaaatgtaactatgctggagaaattgctggcatgagaaggttgtataatagcattggtgggtttcaatctgattctccacaaacaggtcttggcggtggcctccagaggttgatctcaggagcattctatcaaccagcagaaactgagaatgattcatttaatgagatgttggtttcgaagttcgtgcatctccttcaacaatttgtcaatattgcagagaaaggtggagaagtggacaagtcacaattccgtgaaacttgttctcaagctactgctctacttctgtcaaatctggtaaatctgtcactattttatatatgtatatacatatatattatatttagacttcgtgttgaaaagtaatttttagtgccattccactcttaccctttaaaaacattccaattctttgccaggattctgaccggaaagcaaatttggagggctttgcaaaacttctgcgtcttctctgctggtgtccagcttatatttctacccctgatgctatggagactggtgttttcatctggagttggctggtttctgctgctccacaatgggggtctcttgtccttgctgaacttgtcgatgnnnggatatnnnaaa

SEQ ID NO: 5602 - DNA, 596 bp, Gossypium hirsutum
tatcgaaaagaacttcagacagaaattcctcacctggtacagcttaagagcaaccccgcaagaagtgaggatcgtgaaagtattcgttgatatcttcatttctgatccagcatctcttgcggagcagcttgtggacacattctccgattgtatctccagcaaaggatcatccgtagtacctgctggcttttgcatgaagctttggcattgacatgaacagactgttgccgagcagtgagctacatgtttccgagtgcaaaaccggattaaagtctgtgtttggcaataattctttagacccacaacattcttgagttagttgcttttgtcattgttatgatcatgtaagaattgccagaatcgtcttcttatctttttacaaaaacactttgttggttcattcacccaggttttttaagttattttctaatggtatttccatttcatgttaattgagttgcaaaacttttaacatattcaattttttatagtaaaaaataaataaatttaaaccagtttttatggttctattggttgaaccgatttttgccccggttcaaataatctccaatgtaccagacagaattgattatcgg

SEQ ID NO: 5603 - DNA, 633 bp, Gossypium hirsutum
cctggaatttaaagggaagcaggaagataacctggctttgaggaatatcaagagatcgaaagttggccacatggctgtccaaaagactagcatgcttggattaggtaaatccccatagtttaattttaaaccgcattttttagtcatataatcttcttaatttacttggtgatgcagcccattcaaagctccaggtagtgtactatcctcgagattatcgaagtgaaggaatttcggcttcagaatggagggaagttgaagtgagatcaagtactgaggtcatattccacccacaaaattctactaaagtccgtaaatacaagctttcttcaatctcgtctatgtcactaagtgcctaagtcctaaacgatgaagaccaggtatgccgacttcggtttataataaaacaggccgctgataaaaaccagttctataaatgcatcaatatcttttgttaatctagggttttgtttttcttttgtggttgtttagttgctagttttatagaaaacaattccaacaaaaatggaaatatgcatatattctattcaaagtataattgccaaaatatcgggaaaaaaaggggtgatatcttatggttatttgaattggactagaggtgtcacaaagtgg

SEQ ID NO: 5604 - DNA, 590 bp, Gossypium hirsutum
  misc_feature (569)..(569): n is a, c, g, or t
ggagatactcaagctatgaagtaagttacttgctaagctcatgttctgctcttgtagtaatcaagtcagatatgtcccctttttggcatgttttatagatttttcattgagcaacacgttactgactctcatttcagtaatatctacaagcttacatacatgcttcacttgtatatctgctgtgagacaattttaaaacttatatgatgtgatgtccacatgatgaatgtacataaaaaagtatcgaactaaagtactaaagcttgataattaagtgagataagatattttttgttagtaataagtcagcatgaaggaatgagaatttaagtctcatcttatctgcgaataattgcagtgacatggaatgttacatgcacatattcccaatttctggctcaaaagactcctacatgttgcgtctcgctctcttccttctataataacactatcgtgaattgcccgacatgtgcttgtggctgtcagaataactcaactgaatctgggagttgtgtaaggtaagtttctcaattttctgtccttccctctggttgtccttttacattagncagtcatatttattttcttgt

SEQ ID NO: 5605 - DNA, 807 bp, Gossypium hirsutum
  misc_feature (618)..(621): n is a, c, g, or t
  misc_feature (624)..(638): n is a, c, g, or t
  misc_feature (642)..(646): n is a, c, g, or t
  misc_feature (651)..(651): n is a, c, g, or t
  misc_feature (653)..(654): n is a, c, g, or t
  misc_feature (659)..(663): n is a, c, g, or t
  misc_feature (691)..(691): n is a, c, g, or t
  misc_feature (694)..(694): n is a, c, g, or t
  misc_feature (699)..(700): n is a, c, g, or t
  misc_feature (702)..(703): n is a, c, g, or t
  misc_feature (705)..(710): n is a, c, g, or t
  misc_feature (716)..(716): n is a, c, g, or t
  misc_feature (719)..(720): n is a, c, g, or t
  misc_feature (728)..(736): n is a, c, g, or t
  misc_feature (739)..(741): n is a, c, g, or t
  misc_feature (746)..(748): n is a, c, g, or t
  misc_feature (753)..(757): n is a, c, g, or t
  misc_feature (761)..(762): n is a, c, g, or t
  misc_feature (772)..(778): n is a, c, g, or t
  misc_feature (782)..(786): n is a, c, g, or t
  misc_feature (788)..(791): n is a, c, g, or t
  misc_feature (793)..(802): n is a, c, g, or t
ttccatacctatacatttatatgaaattttatcaaaatcatatatttagaaagtaaaaatgtgtttaaaaataacatacaaaaaataataaaatgcatagtttgaaactaattaataataacaaatgaaacatataagatataaaaaaatagattaaattgtgagtaaaacgaaatttaaatacaaaagtacatcatataaaaatattaaatgaatacagttgttatcatggtgttgtcatccattttgagttggcgttgagttacaccaactcacgcaataacattattgatactaaaaattctatcacttgcatattggtgtgggaactagtacttaaaacgcaaagtggtagtttttggtaattccttaactgagttgggacttgattgataaataacaccaattcagtaaagtttcatataataattaaaattgttttagttcagatgataaaataaaaagtttcattaatttttattaattcataaaaatataaaaaataaaaaacaccaacaaaatcatataacttactttccaaataaaatcatactttaataattaacagagttttataaatagtatatatatacatgcatttgtaggaattggtggaannnnccnnnnnnnnnnnnnnncctnnnnnagggncnntcctnnnnnatccccctttctttcctttccccccccnttntcccnncnncnnnnnncccccnccnntcccctcnnnnnnnnntcnnntttcnnntttcnnnnncccnnccccccttcnnnnnnnccannnnntnnnncnnnnnnnnnnctttc

SEQ ID NO: 5606 - DNA, 664 bp, Gossypium hirsutum
tttttatcttacaaatcattagaagtaaccagttcattactcaaaacaagatagaaacctatgattatactagatataactaaaaagagtattaaggattacaaccagatacatcacttcattcacattttgttaacagagaacagaagctgaactaagagacaataactcgcactacattacctaatgataaaacataaagctaattgtggtcaggttataggtaacatcatggaaacagagctcaattaagaaagataaagttaatctgccatttaatcagaaaatatctagcatgcagaagatatcaaaaggaatccatagtttcacaactatcaagagagattagcatgaagatacttcaaagaccaacacaatctccaagcaattctttttggattccaattgcaaataataataataataattaaacattccattgatatgccaaaacctgattaagagaaaaacaagcacctgtgactcggcaatcgtgagaaccattggcagaataattggctgcataaccaaattccttagttctgcacaaagcggtggaagtacctgcatttagaaaatattatgaattgacttgtttttgtcaggaaaatgcattagataatataactgaatcactagtatcaactcctctagctcgctgaaa

SEQ ID NO: 5607 - DNA, 612 bp, Gossypium hirsutum
tgtcatccacttcctacacttttgtatacatctcatggagtggataattttttgtacaacgatgatattattcgtgatgttccttctgattgtgaaccttgcttgctctagagttatgatcttaggaaaaacaactctaaagcgatttgcaatcaccttcataactaatttgtaaaggaccgtgcataaattgattggtctgaaatgggaaaaactcttaggactactgctttttggaataaggacaattagagtgttattcaagtttgaatcaatagcttgtctatcaaaaaccttttgaatccactcacacacaacatctctaactatattccattggctctaaaagaaaaaaagcataaaacccgtcacttctagatgtttttaactgagtcacattgataaagctttctcgatttcattccttaaaatcgccttgcccaaaaagagaatatcactaaactcaagcttcgaaaaattattaggtggcagatctctcattctagtggggtgttccccaaaaaatttttggaaaaaagtaatcacctactattgttaaatggtttcatcaaagatccattcaccctcctcatttttaagagccgagatttg

SEQ ID NO: 5608 - DNA, 619 bp, Gossypium hirsutum
gcgtactcctactaggaaaatacgaccgagccttgagtctgaggtttgtctcaaccttctgcatcgaaacttgttgtctaatatgtttaattacctctaatcttttagaaaatcactgaagtgaacaaggttactgagaaactggcaatgcctttgccatacaagagaaattgtttttcagcaatagttacctaatttccttgctgctatttaaccaactgatttccaagctgctggtttttgttactttttgacttagacaaacttgaatgttcaaatggtttatttgctttgagtttatatttttgcaatccgtgttttgaaccatttacaatgatatatttttttaatgcaaccagtaatgttattccaatttcatcaccattgctcccactgagtgctgttactctatttaatgaaacgtggaaagagtgaggcaaacgctacgacaggggtttagattgactggcagtacattttgggagttacttttaaggtgcaaagaattggtatgctgttcttgtgactaatagagaatgaatttttgctttgcgggtgttgttttgagttcttataacatgtaccaaatcctagataatttcagagttcctgctgatca

SEQ ID NO: 5609 - DNA, 506 bp, Gossypium hirsutum
tttgatttttccttttactttagaagatgctactagctttcattaatcaaaaaccaaataagctcttttctaaagagttgtaggttaacaacgttttatcaaaatttgaaagctcttatgttcatttaataatagtggaattgatgcctgatctgcattgatacaattattgatttgaagtggagtatataagtatgaaagtgaatggttagaattagtaaaattatataaatatttatacaactcattaaaatggtttccattgatgaatgataacatttaaaataacaataaatatatatagtagcggaaaacagttataaataaatattaataattctcgaatttagagttttgggtttaaggtctagaatcttaaatttagggttttagcatttatttataattgttatgttatttaattatatttaaataaagttattaatatttatttataagtcatctactatttttattttatttaatgatgatgtgttatgttatat

SEQ ID NO: 5610 - DNA, 598 bp, Gossypium hirsutum
tagttcttcttgttggtcgattattttgtgggtaagtttgttcatttaaacaatttgtttcagtactatcactatattaataaacgagttcttgccaatgtatattcacaggttaggttctgctcgagctgtaaacaggcgttatatcagcgattgtgtgccacataaactccggatgcgagcatctgcgggctttgttagtgcaagtgccctcggaatggcatgcggtccggctctagcttgcttatttcaaaccgattttaagatttacaagctcacgtttaatcaggaaactttacctggttggattatggctatttcatggctcatctacttattgtggttgtcgatttcgtttcgagaacctcctcaagagatcaagcgggacataataccgcaagaagttcgtgctggttggtcaacacgatcaaacacttctcattttagttcattgtatgtatttgttcaatagtttattcacggaacaaactttgcctgtttcagggacggtggtgaactatgcagtagagaacggtatcacgcagccactgcttttaaacatggaaccgaaacaaggtgaaaatggagaccaagaata

SEQ ID NO: 5611 - DNA, 566 bp, Gossypium hirsutum
gtgtgtctaagaactgccaacttcaagacctgagtctagaggacatgagaaacctaagtcctgtatttgataatgatgtgtatgagtttcttggagtagaaaatgcagtgaagaaattcagttcatacggttcaactggttttgcatgcgttgccgatcaacttgacgactgggctgccaagcttgaaatcaacaaatcgacatgtcattgatagatgtggcagagatgaatgagttacttgagagctttgaaaataattatcatggccttgaagggatataatgttattggcattaaaaagaagaggaaaatgccatgagtgagtaaaatgtcagtgaaatgagtattgttgtaagatttattattgagcagatagtaagtagatgatgaatgcagataatggtttttgatcaacttatgtttgtttgtttttaatgctgaatcaattacagagacagacatgacagtaaggaataaacaactatagtcaagaatggcagaaaaaggatcatgttgtctataatttctcttaaccaacaaggtatctactgccaatagcgattaa

SEQ ID NO: 5612 - DNA, 591 bp, Gossypium hirsutum
ctgagagtttctctcagcttggttagaaatgtttccatcagtaacttgtcctggtctgtttgaagatgacaaactttcttgagattgtgaatttccagaatgtccccgacttttcttcaattgaactggctgaccacagccatcttacttaatggtgatccttgacaactgtttctagccgcagaagtaggaccaccataatgtccaggaaagcctactgaaccttgaacataggagcttggaggagtaaactgtgagggactagtgccaaggtgaagcagggcaaagtttttggccgatggactcataccaactccattcccatgagagtactgcatgattctccatctagcattgggactacctccaagcattgatgcaccactctgcatatgcagagtcatcacagacggaccaacaggtgaataacatgcaaatatgctactgctatctccataactcccatagctgcttccgagcccactattatcattatagctactaagacttcccatactgctatagcaattggcatgaccatacggtaccattgggaactgtgggctgttatgaaaagtaactctgttcctc

SEQ ID NO: 5613 - DNA, 604 bp, Gossypium hirsutum
  misc_feature (538)..(540): n is a, c, g, or t
  misc_feature (571)..(573): n is a, c, g, or t
tcttcgtatagtcgagctaatcaccctcatccatcgcacaatccatcatcaattccctccatgataacccagacgcccaggcttccaccattcctgaaaactggccatctaaacaacaagctatctctacctcatgtttctcttgaagttggacaaacgagttcctttgttcttctagtaaactaatcacatttaggacagtaggcgaagattcgtatatgtaattattgtttttccaagcgcgtaccttgatcccctcggacactaaactcgcgcacacagcagcgagttccgcaggctttaactctagcaagattttgtttctaagtacctttgccaaccacagttcattttctcctcgaattgcagctgctgtttcacccaggggaaatattacatgtgtattgatgtctaatgcccttgtttcatgaatgactttgctgatttgtagaaactccttccaaccagaaggttcaatttgctctattctattgatcaaatgatttgatctagccttcaacctttttatcttttcctnnngtaaacttagccgtgtctaagatctttttannnctcggaagccctcagtacgggcttctttctc

SEQ ID NO: 5614 - DNA, 607 bp, Gossypium hirsutum
gacatataatgctttcagcaaccatatgtattgtctgggttcaagaagctggaaatcagaaaatatcagccacataacaggttttttaaattccaaagagaaacaaggaaaatggaaatctaaaccaaatatgtattacaaaattgcaactacaatgacaaccaataaaatcactaaagctcacatattttgtcacagtaaaatgattagcaaggcctaattttcgagttcctggatatatgcaactatcatataaaagattgataaccagtcactgaaattgcggatgcataaccttttcaaaaaggaaggcttcataatgcacatcaatggcataacatcccatcataaaatggtagaggtaaggaaaatttttagacattaccatacgagtaaacatatatattatggcaaacaacataaaattgcaatcgaacatgaataaaaaatactgcttaagacttgctgaaatataagcaaatatcaaaagtgaaccaaaagctaaaagaacatatcaggtgatacaatccccaattaaagctattaaaacaattgtaaggcaagttgttagtatttgtctaagcacctgcaatcttagataagcgaa

SEQ ID NO: 5615 - DNA, 622 bp, Gossypium hirsutum
cactttatgtccttcacatctacaaggaaaaagaaggaacattagcacaacagatgtactgagtaagacataggtaaagatgttataaattgaaggctccaagaaaacccaagtaacttgtatgcttgaaataatttacgagacagcccaacaaacagccagctactaagattgacattgttttaatattgaaggtcattaaaaacttatattgcatgcaacattcttttcataagcaggctcaatgcataaagaaccctaggaattttcaagaactcccttatccctgcaccctaagatccaaatgatcaatattaagataacacattcactagataaatgtgcccaccttaactttgcagggataaggtctaccgccaccatttctgtacccaatcaaggaacataagcaaatctgagtcaaccaggctgccacaaagaccagctccataaccgtggatgggcgacactacaacttcaaccatattacttacacttgattataaggagtcgtgccaattcagacaattcaagcaagtacatacaactagacataacagagctttctaatttttcttttccctcaacctaaaatcgggatataaaacttctcaaacaaagg

SEQ ID NO: 5616 - DNA, 626 bp, Gossypium hirsutum
caacttgagatatctttatgtaccatacaacaatatttccggttctgtgcccttgtcactcaccaactgtactcagcttcaagtgcttgaccttggttctaacgcctttaaggggagtatccctccaggattttgctcttcaacctcagccttggaaaagattcttttagccaacaattacctcgcaggaagtgtgcccatggagctcggaaactgcaagaaattgaggacactggaccttagttttaacggcttgaatggtcccattcccataaatatttggaatttgccatatctttctgatttggttatgtgggcaaataacatcaccggtgagatcccagagagcatttgtctcagtggaggaaacctggagaccttgattctcaacaataatctcatcagtggaagcataccacagtccattggcaagtgtaccaatatgatatgggtgtcactttccggcaacaatcttactggggaaatcccttctggttttggagatcttccgaagcttgctatcctgcaattaggtaacaattctctgactgggcaaattccacctgagcttggtaaatgccagagcctcatttggcttgatttaaacagcaatgacatcagtggtg

SEQ ID NO: 5617 - DNA, 649 bp, Gossypium hirsutum
tgagcttgtggaaaggtgtatggttcaagttggggaaagagacccaaccttgaagatcgaaacttgccacatgcacgatctaatgagagatctttgcctgtcaatagcaaagcaagaaaattttctcagcatcatcaatgattcctcattgtctccatccaatacgagggcagtccgtagaattgctgtacatcaacacattcatgttcagcgcattaaaagtagtattcctctcagatccatcttgttcttttggagcccgtttgatttggaatcggaaccccgtgaaagagatgaggaagatttttgctgtgtggtctggtttgtttgtgtgatgctgaaatggaagagatcttggaagtacatgtttggaaaatttaagaagcttagagttctaagttttgaaggagacatgctaggatattcaggatgtaagttatctagtgctataggtaatctcatccatctcagattcttgaatatatgtggtattgaattcatttggtcaaaaatcccttcgtctctgggcaacttaaggtgtttgcaaaccttggatttaagaatttctggtcatgctgatgatggtgctatgaatgtacctaacataatatggaagttggaacagttaagacatctctatctcccgatg

SEQ ID NO: 5618 - DNA, 615 bp, Gossypium hirsutum
tgttctttaaaaatgatcctgttagtacctatcatcctttcattgtatgagtaattatagcatggcttatttattttttcgatatataaatattctgttttactgatttttaacatttatgtgtggccaaagacatgctactattagtaatctgttgtttgattgttaacttcatagtgtgatttttattgactttataaaccaggaattttggacaatgactgtcgtgtttgcatattaaaaactaaaatattctcttgcatcatattcaatttatttgttttttttgctcacctttttatactttatgcatatttcatgtcatttcaatgctttagttgtaggaatggtttaatagtataccttaaatcattcagagtggttgcacatagattaggatgattaattgtatgcaagacaatactacaagtcatcacaggaatttgggagagtggttgtggaccattctatcatcaatatgctatttggtagtaaagaatgtgcatgttggggattcttgatgcttaaatgatggcatatgatcattacagtcctattaaacatatttgattatgtttttggaaaaatatttaagagtgaagccttggtatcttc

SEQ ID NO: 5619 - DNA, 491 bp, Gossypium hirsutum
tatgaaattatttcagaaaactgtgataccctgcttcatattttattttttgcatgtaaaatccagggaaaatcataaaaatgcaaggaaactaagtgactgctacatgggaaaattactatgttgttattcctttggaatgtgaaaattgaaatgcatacagttattctgttagatcccttcagagcctctgcaacaatgtcaaaatctgaatttatgcaacgaaggaagtggtctgatggatttcttcgacttggacatggaaatcctacttcagcaaagaactgcaaaaatcaaattttgtaagtagaaatgaacaaatttattttcaattttatatgcttaatgtgatgaaacactattatctatgaacaagtttgatgagattgtcaagataaacctttgcagccatttttgcctccccaaaataaacctgttctccaccggatagtaaaaacaggtcatcaaaaagggaaaaaacttccctactt

SEQ ID NO: 5620 - DNA, 639 bp, Gossypium hirsutum
aaactttctctcattgcatgtatgttgtctatcccaaagaaaactatctgacaaggagaacaaaaaaaaattagggcactaaaaactacagagccaaattttattaggtagagatgcatatcttccaagctcaaacttaagacagacctcagaatgaaaatagtttgaagaagactccgagccccctcccattgctccatttgccaatgcattttttcttggtcttgcatcagcaatatatagctttctaaattggcagaagaaacaatgttaaaatagaggtaacaccagcaattcctatatggacattactttcatccttctggaacaaaagcaaaacagaaacaaaccattaaaagttcaaaaaacatgtatactatcaaggcatattctaaaaatctggttacttaaaaacacgaggatctttctttgtgagcaagctcccatgtgattatgaaaatgaagtcattgtaaaatctagtggaatataaaataaataaacacattttaatttgataattgatatacaccacttattctaggagcagtttaaagtagggaagtagatgctgatacttatgataaggaaaaacaacctatgacataatacaggaatcaacaaaacagagtacctcctga

SEQ ID NO: 5621 - DNA, 636 bp, Gossypium hirsutum
gatgacttgatatatttgaaaatggatatctttctaaattcttgacattttatattttaactggattttaggttttgcactcgggtgaaggaccaatccatgctgtaaaatggcgtacaagtctcgttgcttgggctaataatgtaggcgtaaaagtttacgatgctgcaaatgatcagcggattacatttatagaaagaccaagatgcagtcctcatcctgaagttttgcttccttatttggtttggcaggttagtcaatgattaaaatgagatatgttggaagttgttcagactatgtagattttctaaaatttaaacggcaatgtcattttccattttctttttgaagttttcacttccctaattttccatgaagcatgatactgttgcttctcgttattgctattgttctttgtttgaactttgcattcaggatgatactttattggtgattggttggggaacctctgtcaagattgcagcaataagaacaaacttgaataatggagccaatggaacatataggcatgttacaatgtctaacatgaaccaagtagatattgttgcatcttttcagactagctatttcatatcaggaattgctccttttggtgatgctttgggtcttctagct

SEQ ID NO: 5622 - DNA, 613 bp, Gossypium hirsutum
  misc_feature (606)..(610): n is a, c, g, or t
tctcttctttccactacaaattaaaacttaatctctcacctagtacaaaaagagtgcttaaattggttttgttttgtatgtggtgacagtgttcttgggggatttctaataattgccagtctgtatacggtcacttgggcatcctacagcgaaagatgcgcagaaggaatgatgcctcagaatgttcggtcctccgaacctctcattcacaaagatgtatcaattaacaagaacccgtaccagagagcacgcgttttctctgaaccgtctgtttcatcacctaaatccagtgattaactctgtaatgaaatgtgatgtaaagttatatgattctcttttcctcaggtacatggcaaattcattaaatacatgttcaacatgcaacataagtttgctcctatacgctgtctaaatttgttgtaggaaaactttccttttttgtatgatttatacacttcagtacaataaatactcttaaatggatgtgaatttcctaaattactacttactggactttgggtaacttaaaaaactcaatttctcctacagagagaactttgcagtttgcttatgccaccaaatccaaaacccaagatcggtagatannnnnagc

SEQ ID NO: 5623 - DNA, 559 bp, Gossypium hirsutum
  misc_feature (8)..(8): n is a, c, g, or t
ctattttnaccgattaaaattttaaaattacttttgtagcatatttatcttttttgtcgttcatgatgaatccataaaatgcttaaagaaaaaaaaataaatcataataaaatttataatataaaattaaataattataagtaagttaaatataaacctaaaataaaatatataactatataaataaagtaatattaaattgaacaattataattaaatatataattagttctgaaatattaaataaaataataaatatttgatttctttcttaaactttaattaaattattattaaagataaatttacttgtaataattttagttatttattaatttgtaaatgttaaataatttatatttttttattatatatcatgtttaatctaatatcattttttattatcattttaaagctacagttgcatttgaatttaaacacacattccactctctcaattatttttaatctcattaatatagtatccaatccattacttctaatctcactaccctagcatctaatctcatcattaaattaattaatcgtaaaaaaaaaa

SEQ ID NO: 5624 - DNA, 613 bp, Gossypium hirsutum
attgtaattataagtccttgcattgttcgcggttgccgcagcttcattctcatcgccatgtgaagcccacccggtctctgtgacaatgacttccatctttccatatccagcatcttctaatgcagcataggctgcatcaatctgagcatcaagcaagttatcataatgcaacttagtttttggatcatctgctccttttgttggtaggaagagagcataatttatatcaatttggtctttattagacatgtaggctagaaaagggtaagcatttaaacagaaaggcgagccgatttgcgaaaaaaactctaagagtggcttcatgtactgaacaacattatctttgaatacacatgatgaaggagggaaggaatcagcaaaaacagcctgtgaatgtgcagtggtaatctgaactaaatgacttaatttaagcttatctaatgcattgtaaacattcttaactgcacccagaagaaatcctgaaaattcatcactgcttcctaagacttcattccctatagcgatcccacgaatatgtgtatcgggaagatatgccaatacattgtccttcacccaattcatagcatgatctgcattggcactcacatctctc

SEQ ID NO: 5625 - DNA, 467 bp, Gossypium hirsutum
gtgcttaaaatgctttgagagttggcttttactactaaatgacaaacttcgtattgttaaatcaaaatggtgataggaagcattcatgatgtggcaaaaatatagacctaattggtgaaacgagttgtgaaccctgatctaagtgactaaatcaacaaacatgcatatatgcatacggagagtgcactggtctaaggcttaggtattatcctaaataaggtcccaagtcaagtccaaataggcattatccgtcaagaagacagacaattgattgaacccgaataattgctccatgaacattgataatatttcaatagcattatatacaaagaaaaaaaattttaagcaatttctaatttaggcactgcttcttccttttaagtcatcttctattccaggctttatcatagatccattagaccttttgcttttaccagccaaaatatggacatttcaaccctctagga

SEQ ID NO: 5626 - DNA, 624 bp, Gossypium hirsutum
agtgttgtattcacctcctcagtgtctggatttgtttcactcaagtccatgtcacttcaaggagcaactaaaggtagtatacatttaagataaattcaatgaaaatactgatatgtggaaccaatttgtataatcaaatggttatttccttttgttttacttgggtattgtggtgtattttgatgcctaggagctatcaatcaactcacaagaaacttggcttgtgagtgggcaaaagataacataaggagtaatgctgttgcaccttggtacatcagaacttccatggtggaacaagtaattttcttttcactcgtacaattttttttgaagtttgaattggatcctgattatattttcacaattatgttggattatggtaataaatagtaataggcaatggctttgattcgtcggcatgatagcttacatgcttgtttccctgttcaacatttatttcatacttagattgtttcaagttaacatagtactgaacatggtgactaaagagattcagagaatacttttaaacttactccaccatacacgtttttggaaagaatcgtttcttagttattaaacagtgtcctaattctaacagctcagtttcctggtattgtgaac

SEQ ID NO: 5627 - DNA, 625 bp, Gossypium hirsutum
gtgttttaatttaattatataaaaatataaatgatatgtttataaagatgataatctattgatttagccatggttgtagatgcatctttacataaacttgatttttattatataaaagataaaagaaatttattaaaggaagaaaaagactgcaaggaaaaaataaatagataatggagcatttagcacattaaatttgtgtttaaaataataaagtagttatatattatttttataatattatatattatgatttttattaatttatattttaataatattattaaaaatgttattaaattatatattattttattaaattatatttaataataattatgttaaaacatgattaaattatttattattcttttattaaattatatttaataataattttattaaaatttaaaaacaataatcatctatctaaaaaatttctactaaaggtattttggtcatttaagtcattttccttatgctattataatatctatttcattcaaccaaacacaagaatactattacaattttattccattttattcaacaactgaattactgattacaactgtattctattacagctctattccattctccccaaccaaacgtgccttgaaag

SEQ ID NO: 5628 - DNA, 622 bp, Gossypium hirsutum
ttcttttcaattgtttttgcgactgagaacgccattttagattatggagttttagagcagcagcagcagtatactagaaatgctttggtgtttccaaatattctctgctacactaatttttcggctcatttaattattattatcatctatttttggcagtacttagcatgccatttttatgcgcatattatttgtgtgattcagaagttttcaaaatttccagccccaaagtggattaagatgtgagctggcatttgattttattaggccattgtttatcgtaaattgttcatttgttgattttaaaataatttaatttgaattaatccaaaaaatttgagatccacataacaatcatattataccatacatgattggggcacacacttaaaagtaaccatttctcatcaaactaataaaataagcaatcaacttagccgtccaaagagtcggtggcttgtgaaagctaccatttttatcattgaaaattgacactaacaattattactttaattaaattctttagatacataactagtataattgttaattatcgaagatggggaaggatgttgagggcggttcacatagaggtgtgcagagagttgcatcctgagctact

SEQ ID NO: 5629 - DNA, 674 bp, Gossypium hirsutum
aatacaaagggcttaatcttaaatgcataaaaatcatacagttaataaaaatagagacaacacccaaaagcagcagtactgttttaaggacaacatgttcctaatatgaacatgaggcgccaggaaaaataaataaattagctaaagaaggaaaacataaagtactcttagctaatagtttgagacacatgtcagaacttaaacccaaataaaaattaatactatgtttgctgaactaataagagaacaaatttatctgtacggaaaagataaccactctaacaatcctgaagttcagtataacaaatatggcaagcagatcaccaaagaagggaaaaaagaaccttttcaatgcaatagaggcagcttttaccacaggaagttcaaatactttgcctggtactagaaaagcatgactcttaaaggcattgtttctgtatggaactgaatgtattggcctgtacaaactgttggagagccgaattctccaagaatcctgctgctggaactatggcaagaaagataagatgaataataaagattccttgaacatcataaagaaatttaaattgttgctcatgctattaaattgaaagaattaactccaggccaccttctgaaaggccacaaagcagttcataacaacacttcgttattaagttcagggtattctg

SEQ ID NO: 5630 - DNA, 625 bp, Gossypium hirsutum
cccttttttcgattccctgcaacccgtgatttttttatcggataattttttttccatattttcgtttttattttgaatttttttcctactggttttgttaaaaaatatatattccccaatttttatggtcggccagttggttcttttgtaattctgtttttgggtcttttcacttgttttggacgtttacgctcacttctcgataaagatgattagacgtttttacccaatcgacaagtaaaaaaagattttttaattgacgtttttaccctttgttgactatctgcttacgtggcagtacttattattattttattataaaatgagtcatcaacagcgtaagattttgacacctgggatctgtagaaagcgtaaagaacgagaagctttttattcctttaaaccgtccgttccggttcaatcctcggtttatacgaatccaaaatccccgccccaacctaattgctcgaaccggctcttagctggctacatggcgcatgagttcttgacgaggggaacgttgttgggtcaaaaattcgatccggatcgatcggaggcggttccgatggtcggctcattggctggaccgcgaaaggtcaagacgggaaccgaaccgaatggtaaa

SEQ ID NO: 5631 - DNA, 567 bp, Gossypium hirsutum
gtgggaataaaaagaagttggttcttttcaattagaatcctcggccgactgatctgattggtctactgctcatccagcaacagaaatggaaatgacttttagatgctggaaattccagaaatagtattaatttgtggaaacagctggaggaatttgcagtgtcgatggtgcctcgctttctcccacaatcataaccgttccttttttctttgaatgaggtgggtggcggctacattgcactttatacatattcttaaccaattcacagatcacaaaaacttggttccatgattcttcatatctctccctaagatcttcacaccccaaactgtgacagattcttacaagagaaaactgatgccgttgctgtctgtttcttgcttcttactttgccggctgagattgatttgatggtttagttaaatattttatataaatgattgcttaccgtcgaaacttgaaacatctaatcttatgtttctctttctattcccacaggaattcttaaggtagaacctggaatattactattttcatttcttttaaattttacttcctgtgttttaa

SEQ ID NO: 5632 - DNA, 577 bp, Gossypium hirsutum
acagtaaatggtaggtggtggtaatggatgcaatacggggttgagaaatatgagagctacagtggttgacaggtgggggtaatggacacaataagggactgaaaaagatgaaagctatagacagaaagttgtagagagaattttagagtgttaagtttgtcagaagatcaaaaagtctcccaaataagatgctcaaacttctatttatagacttaaaaaaggaagttatctcaaagaatgattatgaaacaagtgacatattttatagaatgcgggttattttacaagtatgcgttgtgaattattgggttatgaaagtaaatgaaatcacgttcatgtcacttgtagtgagtaaagaaaatagtggatataatggtagtttagcaaaagttactttcgtataacttattttagcaaagagagtgttacatgcaaacttaagtggaagtgtacagcttgatcaacaaagatagggaaaggcaaaaacacttaatactccaaagaaaggttaaaaagtaaaattcttaatcatatctgtatctaagtctctaagtcatgcttttcaagacatcccaac

SEQ ID NO: 5633 - DNA, 638 bp, Gossypium hirsutum
  misc_feature (15)..(15): n is a, c, g, or t
gatgcctgatgaagnacttctttggctccaccatagttctcggcctcgccgttgtcttcgttctcctccaactcttagctattggcttggtaagccattcatatgctatcttttttcatttccatagcgttgaggtagctttctttctccgattacaaaacaggtttattcacaagttgcttatgagatcatgggaaaaccaatcagctgatgtgaaacaagggatgttttccaaaaggaaccttatccctaggctaatacttcggtcactgtatgtgatattctgcgggtttatggcagcaatgctccctttctttggtgacattagtggggtcgttggtgccatcggcttcatcccgttagatttcatcctccctatgcttctttataacatgacttataagccttcaaggtcaaccctcacctactggatcaatttgtccatcattattgtcttcacaggtgtgggaatcatgggttcattttcatctattaggaaattggttcttgatgccaacaagttcaagctttttagcagtgatgtggttgactaaccagtgatcatatcgcttaaaagctcaggaaattctgcttcttaaaggcaagaagcattgtttcctttgttgtaaccaagtgta

SEQ ID NO: 5634 - DNA, 620 bp, Gossypium hirsutum
  misc_feature (13)..(13): n is a, c, g, or t
  misc_feature (64)..(66): n is a, c, g, or t
  misc_feature (550)..(550): n is a, c, g, or t
  misc_feature (590)..(590): n is a, c, g, or t
atcctgtgagttncatagtgatgcaagaaaaaagaatgtttgttcgtccaccttgaaatggatnnngcatgcatgtaacctgatgataaggtttgctatacttgtggctcagacaacattgcctaatgttgctcacactttgcttccaaaatggacctccccttttctccatttttttttctaacttaattaactgtatgaaaacatgtttttttgttgtatccatagggaaaatttcttcttataaaatgttctcattcacacacacacagtcaaaggaggtttaataacaaaaaatggctctagctgaaaaaatagaggtggaagattcaatgacaagaaaggaacatggtgtttgcatggcatggcaatgcatgaaaggaattagctttgttgcttgcttcaggagaaatgcccaatgcatcccattttttacttgtgcttttaaaagggaataataaaaacttgtgggcattgatgcaatcatacaggagttaactttaaggctgctttttttttttccccaatttttttttcatttaaggaaaantaatttcggctttttttcttttttttaaaactattttttnccaatttagttaacaaacccctccccaaaa

SEQ ID NO: 5635 - DNA, 623 bp, Gossypium hirsutum
ttatatttggatttatgggattcttttttttccatctaaaatttggaagagtaactaacaataacatcaagcatttgttgtttgtaaacctactaaaggcttctaatgcttcaacttaaatatatcctaatgcatctccattcaaattgtccccttccatcattgggcaatctgatgaatcatgttcgaaatgcccacagcaagaatcagaataatgtcttcgttttcgagttatatcaatcccatctcttggccttctatccttcagctttcctgaagtgagaggttcatgagaagtccccattgtgaagctttgaacaattccatctgtatcttctacctctggtaagatcaaatcagatggacaattgtatacgatatcatttgcactttgtgtcgtcctaggaaggtccttgatgcgggaaagaaccatggcggtttgctcacaagcaacatcgaggcgttcctttgtttcgattgactctgctatgagtgctgaagtcaaggactctaacaactgaatcttttcggagtgctgtctcgttgcattgcttaatgggtttatggaagacgaactattcaaacgccaacggctcggcaggtatgggtctggaatatggaaa

SEQ ID NO: 5636 - DNA, 663 bp, Gossypium hirsutum
gatcagttgtgtgccttcttttatttaagcggttcctgtattctaatctatttaatcaactcttctttttgtgatgcagaccttttccgaaggttgtttagacaggatttactagttgctagtttgttcagaaattttttgcttgccgagaggattatgcgctctgcaaattgttctccaatttcttacccaatgttgccaccaacccatcagcaccatatgtggtactacaagggatattgacttactttacaacttgtttctcagttgtttattttaaaattttcttctgcacattccagggatgcatgggacatggctgctgaaatttgcctttctcagcttccatcattggttgaggatcctaatgcagagttccaggtgtgtttttcttccaatttctttgctaatattgatttgttatcctgaatttcgctgacgtgtattggatccagacaagaattgagtagcagaatgagagggttcctatttactgctcatcatgttccctcatacctgagtgtacttttgttttgtttcagccaagttcatttttcactgagcagctgatagcctttgaggtatggcttgaccatggatctgagcataaaaagccaccagagcaattgcctattgtgcttcaggtgctgtaatctttccttg

SEQ ID NO: 5637 - DNA, 618 bp, Gossypium hirsutum
cggttgctgccgattgccaattttaggtgcataagcagagatttcctttctgctaaacaagtcatgattactcatcattgtctccatccgtccctttccaagccctctctctcttttctttcctcttcctctccacctttcctccaacacctctctttccttccaacatcaccttcaataacaaaacccgtacttgtccattccgttaaaccactccatgtcaaatgctcctccaccaatcccacatcccaatcccacccagaccatgcaccacccatttccaccctcaagattgccatcattggcttcggtaactacggccagttccttgctaaaactcttgtttctcaaggccacatagttttagcccaatcgagatccgattattcccacgtagccaaaaaactgggagtttccttcttcttaaacccccacgacttatgtgagcaacacccagaagttatactcctttctacttcaattatctcaaccgaacaagttttgagaagtcttcctttacaaagacttaaacgctccacgttgtttgtcgatgttttatccgtcaaagagttcgccaggaatctactcctcgattccttgcctcctgatttcgataaa

SEQ ID NO: 5638 - DNA, 610 bp, Gossypium hirsutum
tgaggataaggtctgattgacataccggttcatccaaaatgactaactttggatcccctagaagggcgactgcaacactgagtcggcgcttcattcctccactgtaactcccagctctcacttttgcagcttctgtgagtctgacctcctccaatgatttttgaactacctgtgatttgagcagataaatcgatctttatgggtaggatagttgaaagggtcttttctgatgtaaaagatttcatctggcatgcttgtaaatatttaaatggttatatatgatggaatgtcgatgactaagaagtggtccaatttcagagatagacatatctacgtggtacataccgagttgattgtagatggacgtaggcctttgacactagcaaacagctccagatgctctttaccggatagagcattccaaagaatatcaaactacaaaaatgcaagatacagaaaatgttaagatccgaatcgaatgacaattgatattatatgttttcttagaaatgctgaaaacagcaagctctgacacacctgccgactatgaatggctgcatatcacagagagagagagagagggttacctgaagacaaactccctatgatt

SEQ ID NO: 5639 - DNA, 1032 bp, Gossypium hirsutum
  misc_feature (632)..(633): n is a, c, g, or t
  misc_feature (681)..(682): n is a, c, g, or t
  misc_feature (684)..(690): n is a, c, g, or t
  misc_feature (692)..(693): n is a, c, g, or t
  misc_feature (696)..(698): n is a, c, g, or t
  misc_feature (702)..(702): n is a, c, g, or t
  misc_feature (768)..(770): n is a, c, g, or t
  misc_feature (774)..(780): n is a, c, g, or t
  misc_feature (808)..(809): n is a, c, g, or t
  misc_feature (812)..(814): n is a, c, g, or t
  misc_feature (817)..(819): n is a, c, g, or t
  misc_feature (831)..(832): n is a, c, g, or t
  misc_feature (840)..(845): n is a, c, g, or t
  misc_feature (854)..(855): n is a, c, g, or t
  misc_feature (869)..(876): n is a, c, g, or t
  misc_feature (885)..(889): n is a, c, g, or t
  misc_feature (894)..(905): n is a, c, g, or t
  misc_feature (911)..(911): n is a, c, g, or t
  misc_feature (925)..(926): n is a, c, g, or t
  misc_feature (937)..(939): n is a, c, g, or t
  misc_feature (941)..(941): n is a, c, g, or t
  misc_feature (944)..(945): n is a, c, g, or t
  misc_feature (947)..(949): n is a, c, g, or t
  misc_feature (954)..(960): n is a, c, g, or t
  misc_feature (966)..(974): n is a, c, g, or t
  misc_feature (981)..(983): n is a, c, g, or t
  misc_feature (992)..(999): n is a, c, g, or t
  misc_feature (1001)..(1002): n is a, c, g, or t
  misc_feature (1004)..(1004): n is a, c, g, or t
  misc_feature (1007)..(1007): n is a, c, g, or t
  misc_feature (1015)..(1026): n is a, c, g, or t
tttcctctggattgataattctcatgtaggtctcttggcctaggtaccatctatccaagttctccactctaaggttccatactccaacattatcaagagatacaaggacagccgtccatccacctgggtagacctacataaaaccaattaatagaaatattaattgattaagcacttgccattgcacacagcggtgaaaaaggaagtggtgttagaaaaaaacaaacctctgttgtggagcgagaaatcgcatcccatttattataattgtttctgctgttctcactccacacaccaaaatccattctgcataaaacacccaagagttgcttaaaatactgtaaaacataaatgcagattggcacttgacacatcatgtataagtttcttacccgaccacaaagaatgcatagccatccatgtgaaagctctgcattttggtgtcattattctgcaatataatttctatgaatcctttgtatgtagcattaatgacagatcggtccatgtggggagttctatcatgtggcttattggggaaatccagcttataagcaccctttactttgtgcaggtcagctaacctgattggtgtatcagggttgacgaaagagataccaaaaaaaaaaggnntagctgacctgcacaaagtaaagggtgcttataagctggatttcccannannnnnnngnnagnnntccnacatggacgatctgtcattaatgctacatacaaggattcatagaaattatattgcaaaaaatgacnnnaatnnnnnnnttccatggatggctatgcattctttgtnntcnnntannnaattatacatgnngtgccagnnnnnngctttatgnnttaaaaaatttaannnnnnnngggggtttnnnnnagaannnnnnnnnnnngggggnagggggaaaaaacnnaaaaaaaaatnnnanaanngnnngggannnnnnnccccannnnnnnnnttttttnnnccccttttnnnnnnnngnngnggnggggggtnnnnnnnnnnnntttttt

SEQ ID NO: 5640 - DNA, 475 bp, Gossypium hirsutum
cctcttccttggtggtttgcagttaaaaatgtgatcttgcagctgaggccgttactttcaaagaaaaagctcctggtttcaattgctgcaggagtaaaactgaaggatctggaagtatgtccttttgagctctttgcctttacaaaagcctaaaccacatggtgctagtataaattatgcattatcatgctattcactgaagagtagcataatatgatttaaaagaatctcctttctttccagaaatagtttttcacgacttaatgaaatcttgacatcagtatttcagttttatgagctttggtgaaaaaaaagaagataaaagagagatacaacttccctttatagtgccactgtgagagtattgaaccttctaagtagcataatgccaatttggagtgttattgtcttttgagttcttttatcttttctactcttaatgttaatttaaactgtgaagagacttttttttttt

SEQ ID NO: 5641 - DNA, 603 bp, Gossypium hirsutum
  misc_feature (47)..(47): n is a, c, g, or t
  misc_feature (229)..(229): n is a, c, g, or t
  misc_feature (285)..(285): n is a, c, g, or t
gagcacaggagtaaacataaactatctcaaacaataatgaccattcnccatatgcaaatcataataatatataaactaagaagaagaaacaaaaacaacacataattactcccagaaatagatacctttatgccaacaacagccagtaaaacaagggcatcctcagggaaggcccatttaacaagctcttcttcattaatcggaaccttttcactgtcatatgatctgnatgcaattgcaacacagcgcaaactaccagctgccatagtttccatcgccttcccnaaaaaggccatctgaagaggataatttcaagaaatacatttccttcaaaatgttagcaaccgcaatcctaacgatatcaaattacaagcattatgaactacatagttgaaaattttaaaaagtttaatcaaatacaaaaatagagtaaccatgattcaactaaagaaaaaaggaggcaacaatgatgtttaataggcaaagtttctcaaaccttttcttcatccattgctacagcttcaccattagtgtcaaggtaccgagtgcatgcagctaaaactatttcagctgcccctttccagtgaatatgaactttaaagt

SEQ ID NO: 5642 - DNA, 614 bp, Gossypium hirsutum
tgtcgatctctatttgcattgccgtgagaggaatagatgactctcatataagccacttccatacacttgtaagccaaagaagcagcagccatgtcctttaatctctcatattcatgggcacaaaacctgaataataattggtaaagaaacaaaaataaaaccaaaaactagaaaatgaaatcatcccaaaacaatatgaaataaccaaagagaacaccaactggaacacatgatatttaacttactcgcagagttttgcagtgctactataaatttgcatagactgaatcatctctccatgtttggcactatcactgttgcaagattctagtagagaagcactatgaagaaacttcagtgctgcctggaagtaaagtgctgtgctctccacatttgatccagagttctgagagaaaatttattattaaagaaagctagctagaggctaggacaataacgcaacaagttacaagaaaacagtatggaaaaaccttgaaacgatcagccagatgctttaagtctttagcctccttcaaagcattggtagctgccagacttgaaaaatcctttctcattgggctcggggcatcaacatccctgatcctacgtccacc

SEQ ID NO: 5643 - DNA, 607 bp, Gossypium hirsutum
actctgatccttagaaaattgagggctcaaggggaactaaggtgctgacaattttgacactgagctagagaattttgaagggggtgttagatggcaacaacaaaagtatagctgtgatgacctggatgggtgcatatatgtgtatgtattctaaaacttttcagtaaaaataaaagaaaggactccctggaggtggctacagatggatttcggggggctattgaagtgattgttggcgaatggaaaggtagcttctttcattgtctgcttccttctagctttgtgtggtacagtgaattaatgtgagaaaccttgacaaaataatcatacaccgagaagggcgtgatttgcattcaaattcaatggcgccattctcaatcaaagaaaatgcattcatccatggagtgggattatgctccttcaaattttttggattttctatttcattttttatttttattttttgtcttgttttgttttgttttagatcgtaaggaaaacggtccaactaactaagcctccaattaaaattttttttctttgtattatttgattttggattttttttcaatgcacaggtaattgtcgtaatgctagctgatttcac

SEQ ID NO: 5644 - DNA, 611 bp, Gossypium hirsutum
tatccacaatatctatcagtgatggtagtattattatataataagcttggacgatagtctacagaaccaaccctttttttttatatatacttcaagaattcagatgcctttttagttcttaagctttgtttctgatttgaataatatacctgacctgaaagataaactaccaatgtgaatgattttaacaggttttcttcactcgtaataaaatacaagcagaaaggactaaaattcattaagaccattaatttttattaaacattagctgcttcaatttaatgcttaattggtttgcaggtaccatggaaaaggccatagatttgtgctggcaagtggaagggaccctgctttggtgaacaaggcctctgactttttgaaagatcattatttggttccaccatattggaggcaatatgagaacaaggggatggtaaggaacgaggatgggcgttggatgcagcctgaacggccgaaactcgacgaccaccctgaagatacacaccgatatctcaagcaattaggcttggcatctcatcattagaaaaataaaataaaatattctaattaaaaagaaaaaaaaaggggcaatattttgccgatagaattgg

SEQ ID NO: 5645 - DNA, 609 bp, Gossypium hirsutum
atgtagctggtgttttcataacaaatagtaccctcttggatatattcactcaaagccctttaccagccattttcctggaacaaaaaggtggcgatattgtcgtcgattacattaagaccaataaaaacccaaaagccagcattgagtttaaaacaacatttctgggttccaaaccctcacccactgtaactagttatacatctagaggaccatcctatagtgctccatcggtcctcaagcctgatattatggcccctggtgactcaatcctagctgcttggccgctaaatatcggagtggctcgtttgaatgacgatatgttgtttagtagcttcaatttactttcgggaacatccatggcatgcccccatgtagcaggaattgcagcactcctgaaaggggcacatccggattggagccccacagcgatccgatcagccttgatgactacgtcggatcccatcgataacgccggcaatcctatcgaggatatcggtactaatctccaaccggccactccactagcaatgggagctggccatatcaatcccaacaaagcgcttgaccccgggatcgtatacgatgctacagtccaagattacatcgaaa

SEQ ID NO: 5646 - DNA, 609 bp, Gossypium hirsutum
tggacctgtgtttgctctatcaataagcaattgacttatgatttgaatgcattagcttgacatccaagtgggacaaaaagtagggtacttcatttttatttttgcaactttttactttgtatgcttcttgaaattagtgttatctaaggttaaattcttgggaaggatgctttgaaatttgatttgaagtaattattaaatattattaggtaacataggaaaagcaaaaattcttgagatgaaagtcatttttggagccaaatctttttcttttttttgaaaggcaactattattagataataagaatatgacacctgagcaacagaccataaaggaatacaaccacagaacattaaaccaagagggataaaatcccaatgaaaaatgagcgatctatttagtacatcctaccctattacaaacaagaatagagagatgtttaagcattagtggattttgagtgaatccagagggataaaattccaatggaaccaaatcatgttgaaggaagacttagtggactctaaatgaagtctagacatctgagaaaaggaagagagcgttaagaggcttcgcaaagttaacaaagtaactatcttggttggtga

SEQ ID NO: 5647 - DNA, 571 bp, Gossypium hirsutum
  misc_feature (50)..(54): n is a, c, g, or t
  misc_feature (501)..(506): n is a, c, g, or t
  misc_feature (535)..(536): n is a, c, g, or t
tatagcaaatctcaggtacatttgctaccattagcaaacaagttctatgnnnnngtttcccttagaagaatggctataatcaattaattgcagtgtttactaatgtaatggttttttttattgtagtttctagctactgtttcccatgagatccggactccaatgaatggtgttctaggtgattagaaagctttcatttgtataaatatcatttctctatttttcacaattagttaacagaatgtacttgtattaacaggtatgctgaagatgctgatggacacggatcttgatgcagtccaaagggactatgctgagactgctcatgctagtgggaaagatcttatctcgctgataaatgaggtccttgatcaggctaagatagaatcaggcaggcttgaacttgaggatgtgcccttcgatctacgatgtcttcttgataatgttctctcactctcctcggacaaatctaatgataaaggaattgaggtaaaaagaaannnnnncttttctattattgttattattgaaaacnnaatttagtccttaccataatcttatttgttttgtc

SEQ ID NO: 5648 - DNA, 653 bp, Gossypium hirsutum
aaaaacaagaaccaattcagctaaaatagagggagtgggggataaaaaggttaacgagttcaaacattaaaaatatttgtaaccaaaaagcatgctaaagaaatggtatgagagcaaagtaaagcatgacagtagctaccatattcggatcagaagttaatgtgcaattcttttcagcttcaagtattttccccaaaaggttacattcacgaagaagatgctcaacaagcggaacatttttgctctctaaacatgacagtattatgttctccacatggtgatgcaaaaaattgttgtacgggtacctgcatgcataattaactgagggaatgagaaagaagattcacccagcaatgaaatcattgcaaagcggattataaacttactcaaagaacaagttcaaaatcctctgcacagcacccagtcgaattaattccttttcagcagcttcactaccaaccatcagtaagacagaaataaactctacaatctgtaaaatcccatgccaatttataaataaccaatcagccttttctggttgagcaaatttctgatccatagaaaaggaccattgaaatagtgttctggtatacatattaattagttcaactatcagctatagctgattcatgcaagacaacagacaacagaca

SEQ ID NO: 5649 - DNA, 360 bp, Gossypium hirsutum
ctgccaataattcaggaactgaaaagttggaattacacatgtttctattcaacaaactcagtcaacaaaacagaccttagggtaccgatgagtaaggaatgtgagaagatgagaaaaggcgcgggagttgataggatcggaaactgaacaaatgtaaccaagtattgcaatgcctgcatataacttagagaagtcttttgatgctttcaattcaaccgccagagaatccaaaacaccggaacagaaagccaaagtatgcgcctgtaagttaaaaatgcattccaaagaaatattcataagtttgacatctaaacaaataaattattaaaccacaattattcctcaacctttttttttttt

SEQ ID NO: 5650 - DNA, 630 bp, Gossypium hirsutum
caaaaagaaggaaacacaaacagacattacttgtacttttacatgctttaacagtttgctatgaataagtccttaagctcataaaggatgctcacctgtgtgtccatgacattgtttaacttgatgccaaattggaagtacaatgcctgtaaagtaagaaaaagatttaatttggccgtaaagtataccaaacgcaccaataattcaaaattacaatggaaaaaaattagacacctcactatctcgtttgcaatcgtgaataacttttttgatgtaactagactcaagtgcaggcttacaggcatttataagcacttctccaccctcaatggcgtcaactaaatatatggcatcctgaaatgcaagctgcaagaaaacagcatttctcaaaaatcttggagaaccaatagcacatgaaagtttcattttaaactaacagaaacaaaaattgaccaactacggaaaatatatccatgtgtaacaataaaatcatagttcttaataaagcatatcattattgagtcaagttaaacaatttgagacaaacagtcattaactagagttaacctgcacaatacaaagagtgccattgcgacaaaggtcaacgccctcacagtcaaaccctacaac

SEQ ID NO: 5651 - DNA, 658 bp, Gossypium hirsutum
ccgatgggaaagccactggagaggcatacgtggagtttgcttccgtcgaggaagctaaaagagcaatgtgcaaggataagatgatgatagggtctcgatatgtggagttgtttccttcaacaccagacgaagctcgacgagccgaatcaagatcgaggcagtgaagaggtcctgttatctgggtttttgatatgtagtctttggtttgtatgtttgtcattctagcctgaagaaatgcatgtcaacccatatttaatgggttaatcttcttcctatgtgtgtctctgctctcaaaatataatctcctaatcctattaggttaaatatgatcagtatgttgttgatgtacttttttttgtttttcttttagatatttgaattttggttttaaggatataaaatatattttagataaatatgtagactttttacctttcaaattcatgctcatggttgccttcgggtggtttcattgttcattttgcatgttgtggtattgccatggcattaaatagagtccttcttgatcgaagattttaaagattattatttgttacattgggtggttttaattccacaaggttatttattttttaaatactagttaaggataaaaaaatccaaagggccgatggattgggtttcaatcggattaaaa

SEQ ID NO: 5652 - DNA, 591 bp, Gossypium hirsutum
gagatttgcagagcccaacaataacggaagcaagaggaagattttagaaagacttgattctgatgtgcaaaagttggctaaccttcaaataactgtgcaggacctgaagaagaaggtagagataattgagacaggcaaaaaggggaaaggaattgaatatggtacagttaaggagcagctagaagaagctgaagaagccatcacgaagctatttgatgtcaatcgcaaattgatgacacacgttgaagatggcttctggtcgcttgatgggaaatctgcactagaaccagatgagaatgggagcgtgacgagacgaagagtatcagaacaagcaagaagagcgtccgaaaagattggccggttgcagttggaggtgcagaagatacagtttttcttactgaatcttgatgataaaaaagaaagcaaagcacaaaccagaatcactgagcgtagaagaagagttttgttgcgggactatctatatggtggggtaaaaagtagccagaagaagaagaaatcgcccttctgcgcatgcgtgcatcccacaactaacggagattgaggcaattgctcatcatcggcacatttaca

SEQ ID NO: 5653 - DNA, 672 bp, Gossypium hirsutum
gagggatttgacttgagagataactagagaggaagttaaggcctctatatttgatcaaggaagtgagtaggccctaggacctgatcgctacacttaatctcttctttcagactatccggtccattctggggcaagatttaactgaagcggtgttgtacctctaagctcctccctgccttcaactccactgctgtggtgttggttcctgaatgtcaaaaaaccttgagcaagtgaaagactttagaccattctcccgctgttcaatagtttacatgtgcataacaagaattttggtgagaaggatcaccagatatctccctgaaatgatctctgctagccagagtgcttctatccaaggtaaaagcatcattgacaacacactgatggcttcagagattgtcaaaggctacaacagaaacaatttatctcctagatgtgtggcatgtgcccttaaaatagaccttcggaaggcctttgattcctttagctgggactttgtacttactgtgcttgcagctatgggctttccagaacagtttgaggtatggattagagcttgcactacaactccaaggttttctatctctcccaatggaggttttgtgggttatttcagaggagaagggggataataaggctggggggtgttgtggacgcaagacttaagataaa

SEQ ID NO: 5654 - DNA, 685 bp, Gossypium hirsutum
ttaatgcttaacacaggtggaaacttataatattaggttttttcctggaaaaagcacagcagtagttttatgaataaatattatgagataatattaggatttagtttttcaagggtatgatgaatggtagagttatgggtgaattttagctattaattgataagtcatggcagtaatgtcatactaaatctgaaaagtgtaaagtcattgcagtagtgtcacacaaagtctgatcagtgtatactagtagtcataggtatgaatgcattaaatatggttcaaatacagacttatgaataatttacttttctcattcaatgtgtcctatatgcaatttggtttctttcctcgtttatcacttaaattgcgttgattcttggtttaccagctccactaatttatcatttttcgtcagggtggtaaatttgaccatgcagatcgtctttttcaaagcattgaaagcacatatagaaattgcctatctaatacaagtgacgtgaaggagttgattcctgagttctattacatgcccgagtttcttatcaattcgaactcttatcatcttggggtgaaacaagatggtgaacccataaatgatgtttctctccctccctgggctaaggtatgtgaattcccattgaggatgtcaagtttcataaattatatagcaccaagtttctgacta

SEQ ID NO: 5655 - DNA, 728 bp, Gossypium hirsutum
  misc_feature (618)..(620): n is a, c, g, or t
  misc_feature (623)..(629): n is a, c, g, or t
  misc_feature (656)..(656): n is a, c, g, or t
  misc_feature (668)..(673): n is a, c, g, or t
  misc_feature (679)..(683): n is a, c, g, or t
  misc_feature (688)..(705): n is a, c, g, or t
ttgttgtttggaagtatatttttacttttgttctttatgaatatgaaattgaaaaataaattagttttttttatttaaaatttcatcaattgtaccattaaaaaaatcgacatggttgtcagaataatcatacaatgatacatggcatacaacatatacttcatactgacgtatcaagactaatttttaatagcaaaaattgatgaaattttttaatagaaaaatcagtttttcctatgatataatatataatgattattttatctaatttttttttagtaaagatgataaaatacaattcgactcctaatagaataacctctaagtcctttttttttagttaaaatatatctcttactatattacaattctattgagtttgtgtaaccctcaatcaggacacaaactaactgaatagaattgtaatatagtaaaagatatattttaactaaaaaaaaaggacttagaggttattctattaggagtcgaattgtattttatcatctttactaaaaaaaaattagataaaataatcattatatattatatcacaggaaaaactgatttttctattaaaaaatttcatcaatttttgctattaaaaattagtcttgatannncannnnnnnatatatgttgtatgccctgtatcattntatgattattcnnnnnnccgtgnnnnnttttnnnnnnnnnnnnnnnnnnattttaaaaaaaaaaaatttttt

SEQ ID NO: 5656 - DNA, 713 bp, Gossypium hirsutum
  misc_feature (608)..(609): n is a, c, g, or t
  misc_feature (620)..(623): n is a, c, g, or t
  misc_feature (627)..(627): n is a, c, g, or t
  misc_feature (629)..(629): n is a, c, g, or t
  misc_feature (674)..(675): n is a, c, g, or t
  misc_feature (682)..(686): n is a, c, g, or t
  misc_feature (695)..(696): n is a, c, g, or t
ttctccctccccacttctcgaggcatttgccaagaactgctgcatctagtatcgacatgtttgtgcttcttagaccatgaggagttgttgggtgagcagcatctccaatcaacactacattgtcccaatagatctgccttagagggtcacaatcatatatggcatttaagaaagggttcttggtctccttcatcactttaaccaactccggaacccaagctttctctgcttctttcatcatctcatcgatcatgtcttcgcttactttcatagtaactgaatttctctgaacatgcagcaaaaaggaaatgcagaggcatgtcaaagcagtacgatcgtatccgactttagctgtcctgaaaacgtcattaatataacatgtaattgctatgtaagcagcaaaatgtatcaaattagagtaaacaagcacctttatctcaggctcaggttgattgacatagaaaatccaattcagccttttattgggaagttcataaagcacacaatgagttttagagccgaggtcgaaatacaagcatttcccaaggtcagggtatgcttttctgatgccttcaatggtttcggaatcctctcttcctgagaagtcnngaacccaaagnnnngaangnttcagaaaagcataccctgaccttgggaaatgcttgtatttcganntcggtcnnnnnctcattgtnngctttatgaacttccat

SEQ ID NO: 5657 - DNA, 617 bp, Gossypium hirsutum
tcgcttaactggtggaagctacaattcagcaaatgcaagccaaatgaaatttgtcaacccttcaaaagttacaggtttggatatgaaactgttcaaattgtttgaatctaagtcctaagtgtaagccaaatgacatgtgcaattgttttaacatactgatgagtcatatgttctttggtcagatcatgaacaaccagaatgcaatggagatcaagttgatatggtggtgaggcttggtttgctgaagttagtaagtggagtttctggtctaactttggattttctgccggaaacctttactcttaacctcgccagattgaggggtgttcaagctgagattcagaagataattgtaatatccacaaggtatgcggatgattgatttcttgcaaaaaaaaaatattttgtagccttctgacagtgaacaaaggatctgatcttaaatatctgatcatttacatgcagcattcttatttgtcggcaaattttctcgagcgagcaagttgtagctagccctactgacatggaaagcataatattgatttgcactgagcggctcttgaagctcttgaaccatgttaaaaatgtcgaaattgaaggaattgttaaattaatca

SEQ ID NO: 5658 - DNA, 607 bp, Gossypium hirsutum
cactctgagatcatttcagcagcctcagttgcagatagcaatacggcttgcttgactttgaaggcttcagagattcctagctctgccatatctcctacctgttgaaaaggttgaaacatatcacccgtcacagcaagtaaggaacactactattaagtattccattttgtttggttgtattgaatctctatacaatcattgcctgtcttgtctaccaaataggcctaaacaatatcagtatttcaatctataacattaggatgaattctcccaagaaactaaatctcttggtaaggtattcatgaacggtgaaattagtctgtaatgatgttcagcagccatatctaagctgctacttatctaggaataatatccttagaggattgaacatgaaattaccgactggacaaaaaataatttgcagctggtttcaaacaaattacaaacgataaagaaaatttatcctattctactttttaaaataattcaatttcagcacttacagatccagagatgacatcaatccctgcattgcatccctccttgtggtgctctgcacgaagcttagctactaagtctgcactgtctaaaccagcattgtcagcaa

SEQ ID NO: 5659 - DNA, 657 bp, Gossypium hirsutum
tgctgatgcagttcatttatcccccaactctaaataatttcagatgagaatcaagttaattgatgttccaacatatcttctttttttcattttcacatataaattcccatacatggtatggaacagggcatatatcaaaagtttttgtaatagcccctccccaattatagctatcgacttccatctacttaacaagcatcagaagtgtggccataattttctatgtcaagcacttaggtaaaacaaattgcacacttagaagtcattgacacagataaaatgcaaggataaaagtacatacttgaattctaagagatacaccctggagctgtgatttgagcttataaaacttttcaatctgatggcgtgtccggataaggtcttttgccatccctcaaataaaatcccgagaacaaaatatttaaaggatagtaggctcggtggacagcaaagcccattcatgtcaataagaaacatgcagatcatatacaataacttttaaatctgaaagttaaaagaaacctactttcacaagataagagatgcgaaatacaatattgaagctcaattagacaagaaatgactacactagtccactaatacgaagcaaaatagacatacacattactcaagctaccaaattgccgcaagtgaaat

SEQ ID NO: 5660 - DNA, 606 bp, Gossypium hirsutum
gttgtcttaattctagctcaaagaatctgccttaaattgtaaggcgatgtttttgacgagcattgttcttctgattggaggtttattctaaattggtgctgtatagaaatgcttatatttgcctgcacatgaacctgcatctattccgctttttgtgcgcaagtgcctgttctttttgttactgagatgcacacacaacatacccttttcacaatttaagatttacatgtgagtgaattgaaagagaatgccatttgtttttaacttgttcgtatattttctcataaaaccttcacagcatataagtttgattttccctgtcatatttttgaactgctctagtttttcccttacttttatgttgttagatatgaaggctggcattcaatcagattttggtgtgattgttcacctgttttctaatgtttattactgttgtcacaaattgcatgcttcttgtatacattttcaataaatcctagacttaactcatgcttatgggagatagagtcctgaatagacttttagacaattctttgttgcatttatcactatcttaaagaatgactatcccttctggggtattaaccattcttactctctctc

SEQ ID NO: 5661 - DNA, 587 bp, Gossypium hirsutum
  misc_feature (281)..(281): n is a, c, g, or t
  misc_feature (312)..(312): n is a, c, g, or t
  misc_feature (536)..(538): n is a, c, g, or t
  misc_feature (572)..(572): n is a, c, g, or t
tcgcaaggagttcaagctcaactcagataggttgagctagtcaagatcaagttttccaacattaaacttcagcaacggaagatcagatacaattatttaaggtttaatgtttctacatattatataaatattatattacttgctcttttaccctaataattggaatcagattgatctcaaatgttctacgtatctcctatgttttaagtgattgaatgaataattaagcagcaagtttttgaaatagtcaaagctcaaatagttcacatgacaaccagctntgctctgtgcaccaattaggagaacctttantggcagacagcaaggtttaagagctctggaaccttgagggaaataaatgagccaaaattttcacctagattattataaaactattttactgtatccattgaaaaatagccactctgacatcacagtctggatacaggatgcagataatctaaaatacatttataatcataaagtaatttctagaaaagatattataactgagtgctgatcaataattacataannnttgccggtgcttaatctttgaaataaaagtcacnatgttttggtggaaa

SEQ ID NO: 5662 - DNA, 666 bp, Gossypium hirsutum
gtactttttcttgatattttcacttcaatatctacttcaaattcttctcgtaataagtacaagaataaaaccacaaatgacactggcctataaaaatttaatgagtttctgattcctattcttttctgatatattgcacctcaacttttgtgtggtaatgaatgtccattttcaggtggccaccaagaggaatggtgcaacaactgtttctgcaactatgtttttcgctgccatggtgactactagatttgaatcacctttccacttttcatcttcttccctgtaattgttacccttaatagtgtctccactgacacattcatcacttgcaggttggtatacctgtttttgttactgggggaattgggggagtgcataggcatggcgagcatagtaagttgtacttccacatctgcaatagtcctacaaattgtttgtctctgatagtgtttaaaattttgtgaccaatgaaccatactcttttttcatgagcatgtggactgataccaaaaattgcacgaatattctatgctttactaattgtaattttctgcttcttatgtttcaaaacgcagcaatggatatatcctctgacctcacggagcttggaaggacaccagtagcagtcgtttctgctggtgtaaatcaatagctctgccagaagtt

SEQ ID NO: 5663 - DNA, 571 bp, Gossypium hirsutum
  misc_feature (516)..(516): n is a, c, g, or t
  misc_feature (555)..(556): n is a, c, g, or t
  misc_feature (559)..(559): n is a, c, g, or t
tggctgatatatttaggtgcatggggaaggcagctcgtgttgctttatgtgcaatagcaaggcaccttcgtttacaaagcgagtaaggatggtgatggtggattatcttacctgtattaatttgctcatatttatttttccgccctccatcctggtaatggaatcccaaaaacaaaaaaggattggaccagggggtccaacctttgcttgaagaaacccccttacccggcaaaggaggggccccctccggggctggtgcctcccaaccccccctggcctttccaaaaggaaaaggggctattggaagaaggaaacccaggaacggctgggaaatttaaaaaggggtagtgaactttaattcctccaaagggcccgggccaccgggccccttaattttccttccctggcaaaaaaaaaaaaacctttaaggaagaatttttccttaatccagccccttcctccgaaaccggtggttttcctaatttcttttttctgaaaaaaaaaccccgtttaaangaaggaaatataccctcgcaggcacatgtatttgcttannatntttggaatattt

SEQ ID NO: 5664 - DNA, 640 bp, Gossypium hirsutum
tataatcaataagctcagaaaattttaggcttttgagtttctaaaaaagttaaaaaaaattgttttcatctgtgtataatctagaaattttatatatcatataaatacaatagtttaagatattattttaccaaataaaacattgaattaaaaaatatataaaataatataaaattatctatgaaatcaattataaaattaaatttatataaaattataaaacacttttaatatattttaatttatacatataacgtacaacgggataagataactaaggaaacgttatttaaaactaagaattaatcttaaattaaaatgaagttaattttttgttttaaagtgtgaatgtgaggatgaggagggaagatggtgtaggtgataaatagtaacaaaattccgagatgcaaggcattaatagggtgaagattaggagtgtagagagaggctagaggggccgtgccatatgaggaaattttaaatttgggttagtagtaaatgtcatctccgtatttggaaaatctttggatgaacaaccgccacttgtcaatgtcaatactgttggtgctaccaaaaaacgaatgaatcctcattaattaattaaccaccttagttgcagaccgcattcaagtctccatgt

SEQ ID NO: 5665 - DNA, 1342 bp, Gossypium hirsutum
  misc_feature (611)..(615): n is a, c, g, or t
  misc_feature (618)..(620): n is a, c, g, or t
  misc_feature (622)..(652): n is a, c, g, or t
  misc_feature (654)..(655): n is a, c, g, or t
  misc_feature (657)..(659): n is a, c, g, or t
  misc_feature (661)..(663): n is a, c, g, or t
  misc_feature (666)..(670): n is a, c, g, or t
  misc_feature (674)..(680): n is a, c, g, or t
  misc_feature (683)..(694): n is a, c, g, or t
  misc_feature (702)..(712): n is a, c, g, or t
  misc_feature (715)..(717): n is a, c, g, or t
  misc_feature (721)..(733): n is a, c, g, or t
  misc_feature (739)..(749): n is a, c, g, or t
  misc_feature (752)..(754): n is a, c, g, or t
  misc_feature (756)..(767): n is a, c, g, or t
  misc_feature (770)..(776): n is a, c, g, or t
  misc_feature (781)..(786): n is a, c, g, or t
  misc_feature (790)..(794): n is a, c, g, or t
  misc_feature (796)..(802): n is a, c, g, or t
  misc_feature (805)..(810): n is a, c, g, or t
  misc_feature (815)..(832): n is a, c, g, or t
  misc_feature (836)..(842): n is a, c, g, or t
  misc_feature (846)..(854): n is a, c, g, or t
  misc_feature (857)..(875): n is a, c, g, or t
  misc_feature (879)..(884): n is a, c, g, or t
  misc_feature (886)..(891): n is a, c, g, or t
  misc_feature (893)..(902): n is a, c, g, or t
  misc_feature (905)..(913): n is a, c, g, or t
  misc_feature (918)..(922): n is a, c, g, or t
  misc_feature (925)..(930): n is a, c, g, or t
  misc_feature (933)..(937): n is a, c, g, or t
  misc_feature (941)..(946): n is a, c, g, or t
  misc_feature (949)..(969): n is a, c, g, or t
  misc_feature (971)..(974): n is a, c, g, or t
  misc_feature (976)..(984): n is a, c, g, or t
  misc_feature (986)..(993): n is a, c, g, or t
  misc_feature (998)..(998): n is a, c, g, or t
  misc_feature (1000)..(1017): n is a, c, g, or t
  misc_feature (1019)..(1019): n is a, c, g, or t
  misc_feature (1021)..(1027): n is a, c, g, or t
  misc_feature (1029)..(1030): n is a, c, g, or t
  misc_feature (1037)..(1040): n is a, c, g, or t
  misc_feature (1047)..(1047): n is a, c, g, or t
  misc_feature (1049)..(1087): n is a, c, g, or t
  misc_feature (1093)..(1106): n is a, c, g, or t
  misc_feature (1108)..(1108): n is a, c, g, or t
  misc_feature (1119)..(1119): n is a, c, g, or t
  misc_feature (1121)..(1121): n is a, c, g, or t
  misc_feature (1125)..(1134): n is a, c, g, or t
  misc_feature (1137)..(1141): n is a, c, g, or t
  misc_feature (1143)..(1153): n is a, c, g, or t
  misc_feature (1157)..(1172): n is a, c, g, or t
  misc_feature (1175)..(1175): n is a, c, g, or t
  misc_feature (1178)..(1182): n is a, c, g, or t
  misc_feature (1184)..(1187): n is a, c, g, or t
  misc_feature (1191)..(1193): n is a, c, g, or t
  misc_feature (1198)..(1202): n is a, c, g, or t
  misc_feature (1204)..(1218): n is a, c, g, or t
  misc_feature (1223)..(1229): n is a, c, g, or t
  misc_feature (1231)..(1239): n is a, c, g, or t
  misc_feature (1242)..(1247): n is a, c, g, or t
  misc_feature (1251)..(1258): n is a, c, g, or t
  misc_feature (1263)..(1263): n is a, c, g, or t
  misc_feature (1270)..(1274): n is a, c, g, or t
  misc_feature (1277)..(1293): n is a, c, g, or t
  misc_feature (1302)..(1312): n is a, c, g, or t
  misc_feature (1315)..(1316): n is a, c, g, or t
  misc_feature (1318)..(1318): n is a, c, g, or t
  misc_feature (1321)..(1325): n is a, c, g, or t
  misc_feature (1329)..(1332): n is a, c, g, or t
  misc_feature (1334)..(1336): n is a, c, g, or t
cagatagcaatgaaaacgtgagtctcaaaaactgtatgaaggtgatttactgtacttgttaactgttctttcagtggctccattctacttcgtatatcagattctcccactgtttctttagaatcttggagaatctttttcaactttgtcacattctgtaatttggtctgaaataaagaacgaaaaggaaaacaaaataaattccacagtgaaagcaaacaaccacaagacttgctggtaccctcctctgaacttggaccagagaaattaagcaagacttacattctcagcaagtttttcaacaacagcttgcaggtaccctctgaacttggttctcaacatcacggtaacctcactaagacgctcaccaggggctgtgtttccaccatcaggtatgcaagaaccccaagacttgaactgtgtctctatcttcggacgtagcacatcaagcatcctcttcatagaattcaacaggatgcccagctgaaagaagcaatcgaactctcaagctaaaaaactaacggagtaagcaaagccaaggaagaagattcttgttaaccaaaaaacctacggcttacctcatcaggaacagtataggcacatacagatcnnnnnacnnngnnnnnnnnnnnnnnnnnnnnnnnnnnnnnnngnncnnnannnatnnnnngccnnnnnnnaannnnnnnnnnnntctagggnnnnnnnnnnnagnnntaannnnnnnnnnnnntttctnnnnnnnnnnncannntnnnnnnnnnnnntcnnnnnnntactnnnnnntcannnnntnnnnnnnacnnnnnnccgannnnnnnnnnnnnnnnnnaatnnnnnnncaannnnnnnnnctnnnnnnnnnnnnnnnnnnncccnnnnnnannnnnnannnnnnnnnntannnnnnnnnatttnnnnncannnnnnctnnnnncatnnnnnnatnnnnnnnnnnnnnnnnnnnnntnnnntnnnnnnnnntnnnnnnnntattnannnnnnnnnnnnnnnnnntnannnnnnntnnattacannnnataactnannnnnnnnnnnnnnnnnnnnnnnnnnnnnnnnnnnnnnnttatannnnnnnnnnnnnncnttttccttacnanaatnnnnnnnnnnatnnnnnannnnnnnnnnntccnnnnnnnnnnnnnnnnaancannnnntnnnncacnnncttannnnntnnnnnnnnnnnnnnntaacnnnnnnncnnnnnnnnnatnnnnnntaannnnnnnncaacncacatannnnnacnnnnnnnnnnnnnnnnntaagcaatnnnnnnnnnnngtnnantcnnnnnaagnnnnannnacaaat

SEQ ID NO: 5666 - DNA, 630 bp, Gossypium hirsutum
ttgtctccatcccaacaacgtgggccacttcaaaataattagaattcaatcgaacactgaaattcatgtagcccaattcttgagaggtcaaggtcaccttatgctggtgatcggggaagatggtgtggtgactcagcaggagaggggaagacgagtatatgctaatggacctcaggtggaaggcatggtacctcctgtcattgatctcttttgacctttggatttagtaatttgttggttatgtaatgcttttctggtaccgtcttctttcgcagttcgattctagttatatatatatatatagtttcagaagttgaaattacacgggattatttgatggatttttgggttagactttgtagtattttagatgaatggaggaaaattttagaagtttttaaaggtaaaataaaagtttgtaatgtatgaaggatacaaaccttcatctctttttaatcttttaatgtattagttgtgtgaaatctcttctactaaaatgcgtttaaggtcttataaatcagtgtttatagacaggattattttaagttctaggtcttcttttttttttactgaatttgaaaagtaatctattagtttttttgcccccttgattttcacctgaatgtcagc

SEQ ID NO: 5667 - DNA, 611 bp, Gossypium hirsutum
  misc_feature (234)..(234): n is a, c, g, or t
  misc_feature (327)..(327): n is a, c, g, or t
  misc_feature (378)..(379): n is a, c, g, or t
  misc_feature (514)..(514): n is a, c, g, or t
  misc_feature (521)..(522): n is a, c, g, or t
  misc_feature (525)..(525): n is a, c, g, or t
  misc_feature (535)..(539): n is a, c, g, or t
  misc_feature (546)..(546): n is a, c, g, or t
  misc_feature (548)..(548): n is a, c, g, or t
  misc_feature (551)..(553): n is a, c, g, or t
  misc_feature (555)..(555): n is a, c, g, or t
  misc_feature (558)..(558): n is a, c, g, or t
  misc_feature (588)..(588): n is a, c, g, or t
tttctttgcctgtgccccatggtcaacctcaaggagtgaaggaggaggccagcaattatagtactgttccaaattacctagagcaaaaacgaaccctgaagcttcttttacttgggcttcaaggctctggaacaagcaccatcttcaagcaggtttggaatatcctggtggctaaggaccaatttcctttaaccattatgccttggggtggctatgccaattgctttaagtggnattggaaaagaaaagaaaacccccttcaaaaattacccccaccaagaaattaacctaaataacctggttgaataataaaaaaggccttccttnccaaccattaataaaagaagaataattaaaaagaataagaaaatttaaatnntggaatggcatgaaattcaacccccaccaaggcttccaaggcatgggctgaatggggaatggggaacaaaataatccacttaacctaaatccgcctttccttaagccttgctgggttaaaaaccaatgggaatanggggaannctnaataaagagnnnnntaattcncnttnnncntanatgataaattcagttgctaggatcatctanagctatgttatctacccaattca

SEQ ID NO: 5668 - DNA, 616 bp, Gossypium hirsutum
tggtagttggattgatctcaagtgcattcctacttgtagctgctcctttattcagtgttgctggagtgtggactggcttatttctcttcatgaccttacgtgtggttgctggattttggaggtaatctaatctgcctctgttcattaattataggaagggaaaaatatcctatgaatatgaaatctgatgagatcagtggaccgttcaatgctaggttgggcacaaaaagtggaccatggaaagtgatttactgtgatatggagaaaggaaagggataagaagaatgcagctaagttggcaatggccaaagctttcaggatggtgcactgcatagcattcaaagacctatatattaaacttctaattgaagctaactggattcagaatcaatacaagatttaggcgcttctctgctatgttttaagatggcatcaccagaactattcaattctgggcagaatttggattttgacaccaataatcagcaatgtgaatctgtttttctttcgttcactgccagtgccaggttaatgtatatattttaacattcaatcatatattttctttaccctgtaaaataagagacgactcctatagaatatatgtcacgtctag

SEQ ID NO: 5669 - DNA, 601 bp, Gossypium hirsutum
gttttcatgaatttcaaaaagaaaaggagaatttgtgtaaggattgactcaatgagatataaaaagaagttatttttgtataaaagattaaggaagagagattgtctaaaagttaaacccgagattaatataattgaaattttaaacacagataggtttggtgaataaatgaaaggcaagaggattaaagccatgccttcatgtgccaacttagagaaatttaccataattcaagattgggccttcacaaaaggaaagaaattttatttttctttttttggatcctatttacaggtctatgtaatctgaaaacagcctcagaaagaaaaagggcctatatagcccatgttgggagaagataaagggaggggacacatatgaaacatcgtcaaattcgaatgaaaacaaatgcaaaatcgaacataaagccgaagaaaaatattccccggaagtatagagcagatcataagaaaaaaaaaacccaaacatagacagggaaaacagagaaggaaaagttgacagtttttctttcaaaaaaaaaaaaaaaaaaaaaaagaaaccatggtttggaaggggaaaccaccgggaagaaaaagaaaaa

SEQ ID NO: 5670 - DNA, 646 bp, Gossypium hirsutum
catccaataagattttaggtcattccaaaataaatctaagagaaaaaggcaatattaatagggtatctggaagaataaagaagtcaacaggtggaacagtggatgtgagggatacatatctcaagcatgttcaaagcaaacaagtctgattgatctgcctctttcaaaccattcagtctcctttcttgagtgtttctcaaacttcacttagcaggaagaatagtaacagtatctttttagtggatccaagatgcatgtttcatctcttcagcccctgcattctaatttatggttgtcattgagctaataagcttcttccttttggggcctacagatcatcaaggaatggaatgctgaactgcaagaacgcactggaaaatttcgaaagcaggctagtgcaattgctgagtgggataggcgaatcttgcagaatcgtgatgttcttcttaggcttgaggtattatatttttactgtgaggcaactttcctattagtttatttatatgccttgttgacaaagaatttatattgacatctaataaggtttttattctcttatttactgaatttttgcaagttgtctacatatatttctctattaattctaaacaccaattcagattgaagtggcaaaagtggttgagac

SEQ ID NO: 5671 - DNA, 585 bp, Gossypium hirsutum
  misc_feature (540)..(540): n is a, c, g, or t
  misc_feature (570)..(574): n is a, c, g, or t
ttataaaatgtccttgtgcatttttaaggatactttttagtgttttgggaaactagaacaatatagaaaatatgaaagtaattttagttaaattacccatgagataggtccgtggaatattttatattgttatatttgaaataacaggtgaagactgcatcagaacatcctgggacccgcctttttaccgatgatattatcatgcgctatccaacattaaagggtgggaaattttggaaagaggaacatgatttgttgttactgagtgctgttctaaagtacgtatctctgaagttcttggacatactctgaatggctgctcccatatttcctatgttcttttctttttccttttcctttcttgcagttgatgaaatattagtgactggacaatgagaagaattatattttttgactgtcaatatttctcaaaggtcttttaattgtggaggtgcaattttgaaagtgcatcttcctctggaataaatcacgctctgttgacaaatttgtggcctgttttttgtactcttgaagctcatngaaattgggtaccctgatgcctatgacgcnnnnnggaataccttt

SEQ ID NO: 5672 - DNA, 616 bp, Gossypium hirsutum
ctgctgacatattactggggaccgtggacagaccaaaagctgctgagcccttgtatgctgcactacataacctctactccagcctacgcttttagttccggcactatttggcaaagcaggttgtgaaacaagcagcagcttgagtgcatggtgcatttcttgccctggatgatttgtgactgtatggtttatagtttatatgcatgtggatgatggattgttatttggtggacgagtaggcattgggtcaaatatatatctacagttgtcaaacaaaccattcagttactatgtaaatatttctattcttattccttgcaaaaagatattatatatataaaaaataatatgaaagcagtattgaatttgaaacaaaccttagttgcgtttaaaatttaattattaatttagctgattcttaagataaagtcatattagaaagtgatatctgattaggtattaaatttaaataaattgaaatactttaattaattaattaattaatcctcttagattttagttgaaatgataatagtgttattaattcggtgtattcaatttagacacaaatagagtaagactactttacaatgaccagccctacagactttacaaa

SEQ ID NO: 5673 - DNA, 640 bp, Gossypium hirsutum
agacaattaaattttcacagaataacggccatatcttagcaagagctctccataaatgggaacattgattcttgctgattgaattcgatatctgatctttccaactacacttgaagcgaaggacacgaacccatagagcatcacttttggagacaagaataaacccgattttcataagaaaagacttattccgatcctccaaatttctaaaaccaagaccacctcgagcccgaggctgataaatggagtcccatccaactaaagacattttaggatgattgtcagtgcaaccccaaataaaatgtctaaccaacttctcaatctttaagcagacacctctcagaatcatcagagactgcatgaaaaaattttggatagaaagaagaactgattgtgctaaggtgattctccctgccatagatagcgtcctagtatcccaactctgcaatttttggcttaccttatccaccataaagcttagcgaatttttggtaaacctttcatgaatgagaagcacacctaaatacttacctaaattttgaacttcctaaaaaccaaacatttgaataatgtgattacgaacatcacctgaggtaatcttggaaaagaagatactacttttcttaacgctaatacgatg

SEQ ID NO: 5674 - DNA, 634 bp, Gossypium hirsutum
cgcctctattccattacattcaaccaaacaattgatttgctattacaattctattccattaagcctctattccaatacagcgaaccaaacgtgctgttagtgttattctatcaatttcgggtttttgggatctttattgtttttgcatcattttttttatctcatttgtaaatttgtttttggttttcttcctttattttctctattgctttacttgcccttttggtagttttgtgtcgtctatccggctttcggtagttcttcgatttatttgcttgtcatagtgttggaacggtttagagtaagtatagtctcttttgtgatttaaattgtttgctttgatttctttgttggtttaggattggaattattaaagatattgtgcattttctaaattgagtttcaaattggttgagttcagtcgaattaactggtttctcatgttagaatcacgttctaaggtgtgtttttgaaactaaattatttagagattgaattgatgccagattttacaattttcaaccagttttggtatggtttcggggctacacgggcagccacacgagcgtgtgaccctatttttgcaatttttattttttgtttgtaaattgactcgttttcagcttggactcgt

SEQ ID NO: 5675 - DNA, 579 bp, Gossypium hirsutum
aacaaataaaaaattatatatatcacaactatacaagatattccacaagcaatcaaatatggaaaggctggtaaacacacaaaagttcaaatatttgtaaataactctcagacaggaaaaaaatcattaagacataaaccatttccttaaccatattaaaaataaagctagaatagttaataacctggtgtaccaatgagcttaaaaacagatacaactaaagtataatgtacataatcatgtaaaaagaatttatacatgtacaaggccattacaactgctaggagtattcctcaatgtggactattcatcataatcatggtaaataggacaaaccaagaaccatatccttagacaataagcccttttcccctttccagacagcttagacatgtgaacccaatgcattttcgacaaaaaacttcccaaatctaaccaatagctttaaatataactctgaaactgaaaattaaaagggcagggtccagtggagcataaacctatataacagcattaataataaaatataatttctacatagtgacagagaattgttgatcttgcttatatcaacttcta

SEQ ID NO: 5676 - DNA, 626 bp, Gossypium hirsutum
  misc_feature (621)..(621): n is a, c, g, or t
gagtcaatgcgtgatgctgctttacgtgatggagctctgttgaggcatttattacatgcatttttccttcctgcaggtgagcgccgtgaggttagtcgccaacttgttgccttatgggcagattcctatcaaccagctctagacttgttgtctagagttttgccacctggacttgttgcatatttgcacacacgatctgatggagcacctgaagaatctatccaggaaggatcattgaccagtaaaagacacaagcgtctactacagcaaaggagagctcgtacagggcagacgattacatcgcaagagcagtccttaccttctgttaataattttgaggcaggtgatgcagttaggcagatgaattctggttttcatagggtggcagataactatcacaaatcaattgcagaccctaactccagtcaagttttaaaccaatcttctgctgctcacactgtcgaaagttcggcaactgatgcatattgcactggaatttctcaaaatgggcattcatttatatcagcttccgctgatgctccatcaacaaatgtgcatggagtatcagaaacaaatccttcaaattcagttgattctggtggcaatgctgttgggtcacanaaaac

SEQ ID NO: 5677 - DNA, 648 bp, Gossypium hirsutum
ggtgcaataaagaaagaagataaaggcacatatatgtatatatatatatatatttatttatagtagggtgagcttgatataaatagagaagaaaaggaaatgaaaaacaaaggaaggtagttgtacactttttattacacaaacacaattcggatgatccgaatttgttgagttagtaaactaagaaaacaggaaggaaaaagttatataggaatctcttggaaggtcttctgcctaagccctaatggttcagacatacacacacgttcacatcacaaactcaaagactaaccttctaattgcgccatattcaaaatgagaatcaaccctcaaccattaaataataaataaggaagacagaagtggagccgaaatgaatgaaatgaatccaaccgaaacaaatccgaaatctcagccaaatgttcttttataccaaatgattaagaaaattggatttctctttattaaggaataaaagaaagtgttatagttattgaacctgccacaattgctgaggctttttcttccaaagagtggactctcgctgcccaacaggaatatgatgctttgatgaaaaacaatacctgggatttggttcctctacctgccaataggagagcagtggggtgcaagtggatattcaagctt

SEQ ID NO: 5678 - DNA, 642 bp, Gossypium hirsutum
agaggtaagtatatatcatggacccaaccgcatggctcaactctcacctcactgttcaaaaatgcaacaatatatgaaactatatcctataatcgcctttgcaaatgctatatttgcagtcgaaacagttgagtaagatgctggatgaggatccagcagttcaacaacgtcgtgccaaccttgcaaagcgactagaattgtacaggagcgcacaacatgagatcgatgctgttgcctggtccaagtagttgaattgagattagccatagaatttgttactcagagagtacatttgaaatttcttttcttaattagaagattttggatctttgaatactaattcagatctatttgaaggactggtttaatgcaggaacaagcattcattggttaggtaagcatacttgttctgtctgaattaatactgccactataacttagcattgacttattatatacctatctcagaaaagaaatttaaagttccttggatgttttagtaacaactaacaataaggttgaatttttgttatgttgatggcagtgaagttaatggcactgttttgcagtgacaggtatatttattgttattactatgtatcaaacattatcataaaatattgcataagaaaggagccactg

SEQ ID NO: 5679 - DNA, 562 bp, Gossypium hirsutum
  misc_feature (524)..(526): n is a, c, g, or t
  misc_feature (551)..(551): n is a, c, g, or t
tgcagggcttgtgctgatactaatgactgtacagcattgattagatatgtcaagcaagtgtcggatttagctttcccgaataacatgattgttataaatcgaatcatctttgcctttggtgaatgtaggcagatagagaaggctcttttggtatttaatcagattaagggttttggatgtaagcccaatgtaataacatataatactattttggatatcttgggtcgtgctggtcgggtggatgaaatggtccttgagtttacttccatgaaggaagctggctttgttccagattttattacttataatacattgttgaacaatttgaggagggttgggagattggatatgtgcttagtgttttttagagaaatggatgatagtggagttgaaccagatttgcttacttacagagaaatgattgaggcatttggccgatcagggaacactagagaagcattaagactctttaatgatatgaaacagaggaagatacgcccgtcaatctacatatatcgatcccnnngttgacattttgaagaaagcaggancaggtggattg

SEQ ID NO: 5680 - DNA, 515 bp, Gossypium hirsutum
  misc_feature (491)..(498): n is a, c, g, or t
actaaatttaactaaaaaataagtgcaaggttgtttgaaccggatcggataaactaattggattagttggatcgagaacccattggggtactaattcggagaaaggcattgatctgttttactcgagaaccagtatagataagttgaataggcaaaaatcgattgaactaggcttttaatatatacatttttttattttttatgaatttttaaagatttatttaattgaaccaaacggatcggttagattgaaaaactggtggtttaactgattcgacctccggttcaattttaaaaaccttaaataagggcttaatttgataaaagatgtaaatataaagtgttaaatttatcattactctgtgtgaataacttctaatatactttgtaaattttaattaattaaaatatttataatattaactcaaattttttttttaaaatgacaaaaaaaaattactatagaagttaagggcaggtaatgaccttgnnnnnnnnggaaatttttttttttt

SEQ ID NO: 5681 - DNA, 775 bp, Gossypium hirsutum
  misc_feature (294)..(301): n is a, c, g, or t
  misc_feature (483)..(483): n is a, c, g, or t
  misc_feature (486)..(487): n is a, c, g, or t
  misc_feature (537)..(539): n is a, c, g, or t
tttcatttttaatgtttaagtttgtattataattaaaaataataatttaattttttttaaaggttgatagtccaattctacgccttttaaaaggttgagaactaaatttaactaaaaaataagtgcaaggttgtttgaaccggatcgaataaactaattggattagttggatcgagaacccattggggtactaattcggagaaaggcattgatctgttttactcgagaaccagtatagataagttgaataggcaaaaatcgattgaactaggcttttaatatatacattttttnnnnnnnnatgaatttttaaagatttatttaattgaaccaaacggatcggttagattgaaaaactggtggtttaactgattcgacctccggttcaattttaaaaaccttaaataagggcttaatttgataaaagatgtaaatataaagtgttaaatttatcattactctgtgtgaataacttctaatatnctnngtaaattttaattaattaaaatatttataatattaactcaaatttttttnnnaaaatgacaaaaaaaaattactatagaagttaagggcaggtaatgaccttggtaaaatgagataactgtaaatttaggctttttagaataattaattacttaatttaagttttttaaccccactaattattgaaaaaattatatagtcgacccctccaaaaaataacattttaatttaaaccttttatttttttaactaatttaaaccgaacttttacaaaatcgtattacactaa

SEQ ID NO: 5682 - DNA, 638 bp, Gossypium hirsutum
  misc_feature (626)..(626): n is a, c, g, or t
aattctccttgtattctgatgatcgtcagaagtctggtctggatgccatttctgatatatattcaatattacgagatgaagctgcaagggctaacaagatggacgtgagctatgcccatgcattgaattggatatctagaaaggtttgttctcgatacaaacagttgaacttgagttattgttgcttattatttgggaaagtgaaatgttattccacaatgaatgccactcaaaactgaaatgtataattttggttgtcaagtttatgtaaagcttaaagattttttgtttggatttgacagggatatagcgaagctcagttgaaagaatgtttagaggaatatgctgccttaaacgtgtggcagatacatccccacacttttgatatccgatttatagatgcttgaagttgctataaaatcacttggaagagtaagctgcatccatctgctgccaagttcgaaattaagagatagttgtccgctgtaccattttaagttagtagttagtatttgcagagttgagtttgaaccttgtttgactgtaagattgcaagtgattatgttcttcacatgcagcaagataaaaaacgtttctgtttcaacttttactctctactaatagcnaaagagatgatg

SEQ ID NO: 5683 - DNA, 567 bp, Gossypium hirsutum
tgtgattccccactaccttttcttttgttctccttagacttatgtgtactttttactgctttgttgcttttgtcatccactggctgacctttttctgcctcagaaatcaatacctgcaattgtgaaatataaaatctattattttcacaaaatcactaactggactacaaacacacgtctaggaaaaaatattaaaactatatccaagtaattagttaaatttgagtaagaaacaggaaatgcagccatacaaacaaaattctgtaattaaatagaaacccacacataccttaaaaagtgcaaagtatacctctatcaaacgtttggctacccttggcccgtctcctttgtggctcaaacgaatttggctcaaaaaattgacctgtacatgaaaaaggacatattagcaagttcccagctaagtccaatgaaaaaatgaattgcataataattttgattaatggagttcagaatagtgacaagcaattcatctgatacagacatcaagctctaattatcagaagcaattccaaaaaaaaatgccagcaatagggcatttatatcaag

SEQ ID NO: 5684 - DNA, 583 bp, Gossypium hirsutum
  misc_feature (511)..(511): n is a, c, g, or t
tactagtaactgaagttcatccaagcttagatgataaaacatgtgtgcagtcaaaaagcattatgcaatgatacactattaaggttggctgagacagtctcagctttacatgaagataagaagcagaggattcataaggtatttctattgaatgtagtagttctgtttttttttttttttcctcctcttttcgggggaaaatgtactcccccttttccttcttgatacgttagcatcagacacagatatatgaccagattggcacatctttattacggacataaatatgagctttgtaatatattcaacttttatacttctattccaatagtttaaaatatgaaatcagcatgttcctctttgacagcttcaagagttagcaactaagctaactgatctgtggaatttgatggacactcctgaagaagaaaggagattattcgaccatgttacctgcaacatctctgcatcagttgatgaagtggatgttcccggtgctcttgctctgganctgattgaacaagtaatcaagtttcttagttggttgtttaggtatgagtgagaagagttgctaacttgtatt

SEQ ID NO: 5685 - DNA, 614 bp, Gossypium hirsutum
tattggtgttatgatacatgaagattttgaatttctacttgcagcattttaagtgttcccctcacatttgatagttcatcatttacctctagaagtttgtccagtctattttgcgcagcatctcgataaggctccccgataattcttacaaacttttccaaattctgggtggtttcttgaagatccttctgcattgcatcttcaagctcttgtcctaaagcatctgctgtctttttcaccttttctattattccttgtctacgggctgggaaatttgaaatggctataaacctatcataacaatatttaattaataagcggttggaaacattaaacccttaacgaatttgttaaggtcaaaagaaagtaaaatccgatgccaagcggaccaagttacaggtaacttaggaatgaaaggcgcatagatttaatacagcaaggaccttaagtcacacagataactgactattttatgaaaacttgggcatgcagcttgaagataaagaattaatttatgaacttaagaagatacttacccgccagcagaacacaggccgagagcaagaagatcttccaaggtggtaggtaatatagatgttagaagtgaagctgac

SEQ ID NO: 5686 - DNA, 573 bp, Gossypium hirsutum
  misc_feature (7)..(7): n is a, c, g, or t
cgaatgngatctgactgatgatttattgcatatggtagatagcttgaactatttcgtttcttttctagttactataatttttcacattgttccattgtgttgaaccttgtcttttgttttccttttttcaggtgttctcattcttggaccattgtaatctttgtcatgctgctatggtttgtaggcagtggcgagcagctagtgctcatgaggatttctggaggtgtttgaattttgaaaacaggaatatatctcttgaacaatgtgagtcttgtatttgcttaatatctttgcgtagttcttcatttggttgaaaaagagaactccaaaaagataatagaaattagctgtcataatgagaaagatagtctaaatggcttaggatgttaatgaaaagaattaagcaagcatgcaactatatagaagcagtccttttatatttatatatgttgagattgccttctacaatgctggttcctaggcaagaagatacatgcatgtaatcatttttgtaaggcaattgtccattgttagtaatatagttggattcataactgctataattttgcattt

SEQ ID NO: 5687 - DNA, 586 bp, Gossypium hirsutum
  misc_feature (21)..(21): n is a, c, g, or t
ctatatatatatatatgtgtnagcactgatttgaaaatggaagaaaatagaacataatttattgaaaaggaagaggatggaccttgaagttggatagcgggttgccaagtccggtcataaggcgtttcattctgcccaaatcgaacccatcatcggaatcggtaccggcgtctttagggacgccggatttctcgtactttttgagggaatcgatgaactggctaaaaccttcgagctccggctcctccgtgtacgacgagaggcattgtttctattccaattggaagtttgataacggttttctgtgagtgagagaaaagagatggctgacgataaacttacggattttcattcctttttttgggggggattttccgtttgtttcccacgaaaaagatgctgcactcactttaactcaattggcttctttaatacatagttattatttattaagggttaacataacttttaatccctgaacttatcaattaggtccaatttggtactcccactttttttttttttttggttttttaaattgggggggggggcccttttagggcttcacctggaaaaaaaaaaaaat

SEQ ID NO: 5688 - DNA, 591 bp, Gossypium hirsutum
tgaattgtgcttaacaaattggataacagtttctggtagaaaataacctttggggagttagttagctcttcacagctcaagcagttaatctcaaaccacttcagtaaaattcattccactcgaaatattcgaaaaagattttgaattttaaattatttgaattgaattattcgagttaattcatttttttaaaattttaaattaaattaaaattttaaatttaaataatttaaataaactcaatataaattatataattttaaattttaaatttatatttctcactccttgaacctaaatctttttacaatactcatttactccaaagcccaaacccaccctatttcccctcaaaagcccatctgccacttttccaatttcccaaagcgccatcccaatttccccaaaagtcaagattctatgttcacttctccattcaaacttgaaactcccgattctcaaataccaaatttctttttcttttttaaaacccctaaattaaaccgtaaatcaattcttctccttcttttttttcaaaaaccttaaattaaactctctattcttcttcttgttcatcagttcattcaaacc

SEQ ID NO: 5689 - DNA, 609 bp, Gossypium hirsutum
  misc_feature (53)..(54): n is a, c, g, or t
ggactttcgtttcttctctgaaaaggtatgctatgttggattaagtagttctnnggctaaattaatctgaaactttgatggaaagataaacaaaatgcctctgttgctcatggttgaaataggccagtttgtatgaggtagttatatgacattcaatctaacaattggtttgataagctgcttgcttccaggtgagtcaccacccaatgattgtcgcctgtcactgtgagggtagaggctggaaattctgggcagattccaatctcaaaggaaaattttggggacgatctattcaactcgatcctgttggtattctaactttgcagtttgaggatggagagacttttcagtggagcaaagttaccacgtccatatacaacattatccttggtaaaatctattgtgatcactatggtaccatgcgcataaaaggcagtggcaattactcttgcaagctcaagttcaaggagcagtctatcatagaccgaaatccccatcaggtcatattttattctccttaatggaatggtaaaccaagcttcatcgagtatattccataagttacatagtttctgtaatggtggacaagctcatgatttgttttctggt

SEQ ID NO: 5690 - DNA, 620 bp, Gossypium hirsutum
gggagaccttgacttttcagctgtttacgagaccgtgaagcttcttaaacattcatcttgataccatatactacctttcatattgttaggctgatgaagccatattcagtgttggtttgaacctgaatttttatatatccattttgtagttcctactattttgaaagttgatactattatgtttttaagaaacgatcccttcaagttctgttttcccttagtcagcatagacatccccaaaatacaataccagatttgttgaattccgcttcaagggaatccaaatacaaaatgccagcaagataaaactatattattgaagacctttcaacaaattataagaaaaagaaactggaaattaacacgtcaacttcagccacatatgctgatctcattttattccttaattgcaaaactaaaaatgacatgtttactgtcaacacttaagacaaggatatgcaacattccattttctacaattaagaaaggtagaaaatggtaatcatattccactaacttgggtatccattgtataaaaaacttgattttcctgcatatgtatgaagctaactctgtacaacatctaaataggttcagattgcctggttaaggaacattca

SEQ ID NO: 5691 - DNA, 673 bp, Gossypium hirsutum
  misc_feature (37)..(37): n is a, c, g, or t
  misc_feature (342)..(342): n is a, c, g, or t
aagtcgttgcttaacatcaatgctttatttcagatantattcgcatgcctcctctttaccacgagaagtaaagttattcatgttattccaagatttccaaatgagggtaatgaagttttccatagcttttttatcaaggattctcaaggccatctccaatcagtcgatgcaccgatcgaaaacattgctgaacagtctatcgtcaaggcccccacaaatcagagtctccctcgcagttggacaatcctttaaagcgtgaatgagcgtttctttatcagccctatagcgccggcaagccggattcatcaaaggatgaatagacgtaattttttaatttgtagncaaattttcatgacccactctccaagcaaaaattcgaatcttgagaatgattttaagcttccagatcattttccagaacaaccggtgagctcccatgcccatctttttgagaatgagccaggagtaagcgactttagtagtataagtgccatgatgactgtgaaaccaaacaagcacatcattcggacagtgagaaaagatcgggatattacaaatttggttccccaaagtttctccataaatatcattcaccctattcctgtcccagcgtttactagccggaatccacagctcataaactttcttctcgctcacttgctccctattgcac

SEQ ID NO: 5692 - DNA, 477 bp, Gossypium hirsutum
  misc_feature (463)..(463): n is a, c, g, or t
atgcctgctggtcacaaggtcaacaggcgagcgcaggatatagccattctgggtcagcgcactacgcaagtgtgcgaagcttttaaaaattttaattcggtccaaatcaattgggtccatcgtctttgtaataaggttgcagactttttgagtactttagctattacgaataagtgtgatttgtactttgatatggattatccgatggagatccataattttattattcatgatgctataaaatgaggttgacccttgggtcgttttctttcaaaaaaaagaatgtcgcctagtagcacattgaccaagtttttttagctctttagggggaggtgatattgaagcgagcaggggttgtccaaggcactgcccacgctcatctcatgcccagacgtcggttccccccatcaccggttaggttcccggcggtgctccggcgagccatcccggaatataaaagatngggcggggggaacc

SEQ ID NO: 5693 - DNA, 309 bp, Gossypium hirsutum
  misc_feature (61)..(63): n is a, c, g, or t
tggtgcagagttgttatcgaagtaagtggattatatgtaacttctatccaaaattacacannnggtcaatgtcaaaagcaaacttcactgagtttacactttggatctttttgtcccaataaaaactagtgtcagaaacttatctaatgaagttcaaggtagcatgatattataataaccacttctagcataacaacatgctgacacttgggtgcatcttagtagttgcaatttttcataccacaagttatcttcaagtaaactaaagtccttcacattcacatgctaatgcatttagaggtttttttt

SEQ ID NO: 5694 - DNA, 621 bp, Gossypium hirsutum
tgattttgaatggtgggcagggataacccctagagaatacaagggaagaaaaacataattggtacactaaaaagaagcaaagaaacaacaatcaatcaaactagaaatcttattcaccagaaaataagagggcatacccctgacgctgagcagatcctacagcaacagcagcaaaatctttgatctttgtacgaacaacattgatcccacggtcatcgcttgcatttagctccaacaccctagatttgtagagttcaggtctgcaaaaattgggtttcagttggattcagacaaactgaagttaaaataaaaaaaaatcttaagtgtaaaattgtaaaatgaaatgaaagatcatcataaactctacaatcaacaactattaagtttaaaatagtaaaaagtctggaacatataaatcagcaaaactacagtgaagcattacactaataacagaaacttaaaagttcaccaatgagtaatcttcaattcaacactaatagttaatctaattcacaatttttccataaaaagcttaatccgaaatgaagggtttaagtcaaagtttcacttccgtaaaacaacaattttacccaaaaaaaataaaggaagagtacccaaata

SEQ ID NO: 5695 - DNA, 595 bp, Gossypium hirsutum
  misc_feature (531)..(531): n is a, c, g, or t
tcaaatttctgttgtatctctgcctccagatgagaagctttagaatcagcaattgccaatgatctccgcaaaacatcagctatatcattttttatagtcaactccttttctctccaagccaagttatctttctcagcctagaagttttaggaagttatagtcagcatcagaatcgtatgcactcaaaaaatggcaaacaaaaggcataaatgaaactaccgagtaacaacctgtagtttctcaaataaatcttgataatggaaaacttctgactttgacttttctagttgatctatcatcgaaagataaactggggaagaagaaatacccttcgtgctttttaatgagttctgtcaatcagaaatccccattcaatttatatgactgaataaataaaactgcatttcagaaataaatgaaaaaataataataattaaaaagggaaaaagaaaacctgcaaatttgacaacttctgcaatatctctatcctttctacatgaagctcttttaatttgattagtcgggaagaancttgttcctgtaagaatcaaattgatcatcgtgactaacatacaattcagaaactccacgagat

SEQ ID NO: 5696 - DNA, 653 bp, Gossypium hirsutum
  misc_feature (64)..(68): n is a, c, g, or t
  misc_feature (70)..(72): n is a, c, g, or t
atgtctctgaatctttctagaagctttgaaaagggtagaattcttgacttcaattgttttggtnnnnntnnntgatgatgccacctatcacgtgctaatctacaaattcattcttttttgctgcatgggttaatttcaacatgtcctgaaaaatacttatttgcatgttgaacttccgctggaattttgtttatattttttcgtcttgagttaagcactatgtgctgaatggctgaggttcaacattgaaacgaactggccacttgttaggtgtaatgactaatagggccttttatataggttgtttgagactatatttacatagaaaagagtgaaataatttatgattgaaaatttctattttgctccaatataagaatatgtttgtcatatttattggaaataattaaagtggaatgaaactggaaaagctattaattggagtttcgtgtgttgtcctcttaaattaatgatctgttcttcagaatttgtagaaatggtatgacggttatagagcggtagggccatattctttgacaaacctaaaactgaaatttggtggaaacattgttatatttctgtctctgtttgtgtatcccttttaagttcacccttttttttttcttttcaccaggcctttcttcaacatctgg

SEQ ID NO: 5697 - DNA, 629 bp, Gossypium hirsutum
tggttcagccagttcaattttaccttcaagcatataaaagacaacaccaacattgtcttggacatgttatccagacctcctcagcctaaactaatatcagccatcacgtttatgggtccttaccatccccaatgcttttcctctccctcttcttcaaacacctctacaacctcatacctagagttgcttttcctcaaatgaccttttagactaactccctagtgaaacaaaagatgacataggtcgtaaaacccttgaagccagagccaaacaaatgttctaccattagtccaaggtaataaaaaagcacagagacagtgttatcagacccataggcataaacccgaaattttcgttcctccacctctttcgcaccttgtactaccaaagcctcctgaaagaagcactgttactgttatggtacctaacccaactttacacaatcgccattgagtttccaacaaagaacattcaatgggtggtcacaggacgttccacaagaaacacccttagaaccttcctagaatggttctcaaccactgagacatggaaagatcgacgtgaagattacatcgaagaaacctacataatattcctcttccacaggccctacacgaacaaagaaatca

SEQ ID NO: 5698 - DNA, 649 bp, Gossypium hirsutum
ttatcatcttcgtgaccccgctaatgttcttgtgctaaaatacatcttaccagctacaacatctgcaatattgttagtgacccatattaccatcttcgtcagacaccgtaagtcaatcgagaaactcaattgcccctggcaacatgaagaagaatttcctaccttgagcttcaggttgcaacaaatggattcagtgaaagttgcttgatgagtgctgaaaattataatggcgtattagagtatagaaagttaagtcggttttgaatctggcaaaattcggttacattgtttagagctgtgactctagccttgtatctactgtgcctcatgtattgaaagcttaagcattttttgaataaaagaaagcattcattctctgtttggttagatcattctctctctttttatcaagttctttcaaggcgcgctttcagaattcagataccataagagttgcgttgaaagttatcaacctgcatgtagaatttcggagttttgattcaatgtgagaaataattcaatctattagccattgcaatcttgattaaatcatttaacaacaatttgaaagttttggaattcaaattcatgtccttagaaagtagtattttcacaacttccgctttgaatattttacaaagtccggaat

SEQ ID NO: 5699 - DNA, 694 bp, Gossypium hirsutum
  misc_feature (662)..(662): n is a, c, g, or t
  misc_feature (664)..(690): n is a, c, g, or t
gcatggtcagagaactaaaattccaaatgatgttcccagtgctaataaccaatgtactcctaacactatatcacagcctttcaactacaagaccatgaaatcaatctcaaatttgtgatcttgtacctgccatgtaacccctttacaaagtcccctagtaaacagacaactgccatttgctactgagacccttagttgctcctgatgccacactggtaaagacaaccgattgaccaaccttgtgtcaataaaattatgcgtactccctgagtcgactaggataatagcccaaaatgctcccactcgagtggccaccctcatagtattatccccctataggccaataagagcatacaacgaaattataggcgacttaaggcccccttcatcaataccagtttcttctaaattttctgaacactcctgaaattcttcagtctcatagaggttcaagaaaaaactgatataattgagacttcatgcacttatgccccgcatggtatttagccccacaccaaaaaaagaggcccttttgtttcctttcagccatcaatgccggggatatagacttagacccagacttgtttgatgatgtattattaacagattgataactcattactgtctttgtaggagaataggaatacctggaattgaccgantnnnnnnnnnnnnnnnnnnnnnnnnnnncccc

SEQ ID NO: 5700 - DNA, 575 bp, Gossypium hirsutum
  misc_feature (563)..(563): n is a, c, g, or t
  misc_feature (565)..(565): n is a, c, g, or t
tcgtggactgcatccatttttgccataggcccttatgcacatgaaacccagttagtcacaccacctgtattctctgccttgacaactgaaccatccactgctccttttacaccccctcctgaatctgttcaactgactacaccttcatcccctgaagtaccatttgctcaattgttgacatcttcattggagcgtgctcggagaaacagtgggatcaaccagaagtttggattgtcccattatgaattccaatcttatcaaatataccctgggagccctggtggtaatctcatatcacctgggtcagtaatctctaattctggaacatcctctcctttccctgatagacgtccaatactcgagttccgcatgggtgaggctcccaaaaccttaggattcgaacattttacgactcgcaaatggggttcaaggttaggatctggatctttgacaccagatggactggggcaaggttcaaggctaggttctgaatgtgtaactccagatggtatggggttgggttcaagattgggttcaggatcattgacacctgatggttggtncncctcaagaga

SEQ ID NO: 5701 - DNA, 638 bp, Gossypium hirsutum
ttgattttcgagattaaggattctaagaacgaaagaaagggacgttcgctcatgcatgaattttcacttcctgatgaacaagaagtacgttcatttgctgctgcttctttttttaatatttttgttatcaaatattatgcctggtatataagttcgattattaatattttatatatgctttttttctaataaataataataataaaaaactacggcatcttaaacctctgtttatactttatgaaataaaaaaatttattaatatatatatttgttatatctatattttatctctcaaatttctttgtgagggatggaaatagtgggagatgattaggatgaagatgggtattgggaaaaaatatatttaattactttaattaatttattaaagtaaaaaagaataatataggctattgaatcaatttactccaaatttaccatggtatttgattcatgcataaaatacttcacccatgagctttacctaatttcagctgatccaacccgacctgacccgatttattatttattaataatttccttagttaaatttaaatttaaatacaaaaatatttctttgaaataatcatatcaaacacaacttgacttaaaagaaaatctaacatcatgactcg

SEQ ID NO: 5702 - DNA, 625 bp, Gossypium hirsutum
tttgacacaggaaagcaatttcatttttcacttgaatttgcggctaactgaatcgtagcttgggacattaataactgcaaaatatgacggaaaaaacaagttaatattatctaaaatgcattgcaataaaacaacaaattcagtggtttaagtttcgagtaaactgtaaactaccatttccatatgatgccattgtgagaggagacgatagaagcttttgagctatcgaagaaatatccttcagtgtaatctcatcaacaaccttcaagaaatactccacaggtttcctaataggttcaaaacagtttggttacagagaagaaaattatcatagttttctcattatacataggacatataaaaggtatataatctgacaaggatatatattcatttctaagttctttctttattttaagagcctttgcacccatatatttatatactcaacacgggtatcagacacagatacctaaataaaagttggagcaacattggtccatcagagcaaaggacaacagcaaagaagttagagaagtcatacctctcaccatatgtcaagacttgtttcccaatatcttctgaagcaaccatctgcagaaatcggctcataagaacactaaac

SEQ ID NO: 5703 - DNA, 377 bp, Gossypium hirsutum
gagtcacgatgctagtttcgatttgagtctgttatgcgagtcggtcgaatgaatcgatatttaatactagtttagaagggaggatgattagaagaagattctcatggtctctctcccactttcacagctcaatctgttcatctgtattttgacattgatggtttaggttttttattgcttctgtcgtttagcagtttttctttgttctttttaacaaaatttcataaaaaaatgaggttggagctggaattaaaagccatgcatgcagttgactttccacatatactcaataattaagcttaatatataaattagctccaacattgtatcttttaatgttttcatatataaaaaatgctaaattacttagtcgggtg

SEQ ID NO: 5704 - DNA, 913 bp, Gossypium hirsutum
  misc_feature (517)..(517): n is a, c, g, or t
  misc_feature (529)..(530): n is a, c, g, or t
  misc_feature (552)..(552): n is a, c, g, or t
  misc_feature (570)..(571): n is a, c, g, or t
  misc_feature (574)..(574): n is a, c, g, or t
  misc_feature (580)..(584): n is a, c, g, or t
  misc_feature (598)..(600): n is a, c, g, or t
  misc_feature (608)..(610): n is a, c, g, or t
  misc_feature (638)..(641): n is a, c, g, or t
  misc_feature (643)..(643): n is a, c, g, or t
  misc_feature (645)..(645): n is a, c, g, or t
  misc_feature (648)..(653): n is a, c, g, or t
  misc_feature (655)..(659): n is a, c, g, or t
  misc_feature (671)..(671): n is a, c, g, or t
  misc_feature (673)..(676): n is a, c, g, or t
  misc_feature (678)..(679): n is a, c, g, or t
  misc_feature (686)..(689): n is a, c, g, or t
  misc_feature (691)..(697): n is a, c, g, or t
  misc_feature (699)..(701): n is a, c, g, or t
  misc_feature (705)..(710): n is a, c, g, or t
  misc_feature (720)..(722): n is a, c, g, or t
  misc_feature (725)..(739): n is a, c, g, or t
  misc_feature (746)..(746): n is a, c, g, or t
  misc_feature (753)..(753): n is a, c, g, or t
  misc_feature (758)..(769): n is a, c, g, or t
  misc_feature (779)..(792): n is a, c, g, or t
  misc_feature (795)..(796): n is a, c, g, or t
  misc_feature (798)..(809): n is a, c, g, or t
  misc_feature (811)..(814): n is a, c, g, or t
  misc_feature (819)..(819): n is a, c, g, or t
  misc_feature (821)..(827): n is a, c, g, or t
  misc_feature (833)..(837): n is a, c, g, or t
  misc_feature (846)..(847): n is a, c, g, or t
  misc_feature (849)..(869): n is a, c, g, or t
  misc_feature (874)..(877): n is a, c, g, or t
  misc_feature (882)..(892): n is a, c, g, or t
  misc_feature (897)..(905): n is a, c, g, or t
  misc_feature (907)..(907): n is a, c, g, or t
cttattacttccgagtctatttggctctctctgcgatgactaaacaattcgcctgaaacttcttgcgctatctatgtaagtattttacatcagctcttattttaatccttctccatcaataactatcaacttagaattttaaccctttgcctatttttaatgcaatttctgtctgggtttttatttaaaaccgaaactgttggtaaaaatctaaactttttgttcagttttggtggcaacagagtaaaaattcattctttattgctgaaccttgtattaaatgcctccacaaagactttttttttttggggggggggggaggttcaagatctaaaataccattttgaattactgaaagcgtgttgtaagaataatgctgccatctttactagtaccaccatgcttaaagaaagcaaaattttgaattttgtgaaaaactatactgtgataagacctgtatattataataaaaaatgatcctcaaatgtattagttggattccgtgaaactcatacanatacattactgnnactgcttcatcaagtgaagganaggtcactttggcatggnngangctgcnnnnnggtttcttaaccannnaataggannntatgaaagagcttgaaggaatatgaagnnnnananaannnnnnannnnngaatggttttangnnnnannaaaggannnncnnnnnnntnnnctannnnnnccctcacccnnncannnnnnnnnnnnnnnccccttntaccctnttttnnnnnnnnnnnnccccccaccnnnnnnnnnnnnnnccnntnnnnnnnnnnnncnnnntcccncnnnnnnnaccccnnnnnccccttttnncnnnnnnnnnnnnnnnnnnnnnccttnnnnccccnnnnnnnnnnntcaannnnnnnnnanaaaatt

SEQ ID NO: 5705 - DNA, 612 bp, Gossypium hirsutum
  misc_feature (584)..(584): n is a, c, g, or t
ctaactcatcattaatgtttacggtgatgttgctgcaacaagtaagatgagcccgagtattaccgagaggatctatgtaatgttctgcgcttcaatcaaagagatgcgtgatctacgacttgagcaaatcaccgagtgtaggatattgaagtggaaagatgccatcaaggatgctttacgtatgaatttcatggtggatttcgccatggaacatttgaagaaaattgcttgcgcttatatcggtttaatggaacgtcaaaggctggaggaggtggctttaaggatctccaagttagaggctgagttgagtgctagcaaaaaggagcactctaagatatgtgaacggttcaaggtgtacatggatactacaaaagagttcattggcaagcctgttagcttgggtatgttttagagttttcctacattagaaatgtacttgcttaaggaatttcgctaggggatttaatagcgagggctacgtaacatatatacttgttaaatatttacatgaaaacaggaatgtgagtttttttacagaaatagattaaaaaaaaattaatattgaaataggtgtcagatagatnatttatggaagtggtatgtttttttgta

SEQ ID NO: 5706 - DNA, 619 bp, Gossypium hirsutum
aaacggtgagcctaaggggttaagtactaaaaattttaatccagggttttgggatttcgaaaattttgagagaaattcttcccaaatctggaaattttgctttgatgccatgttaaaatcagagaatagtatcgaagagaagagtgggagaagaatttctatatattgttgatttgttcaatgagaaaaaatatataggtatttatataatcaaaataggaggaaaaaggaaaattaaatccctaaacataagctaattgaataaattgaatcgctagtaatttgctatatacagtaattatctgctgtcaaattagtcaacacctcaaattagagtaaatagaacctcaagatgtggcctattagcaggacgtacatcttccccaagaatagcctagattcaaaacacaattgtaccaaaaaaaaatagagtaaataaaaattaagcttttttaagggaaaggaagggattctcaatttccctttattttcttttgcttaatataaaggtctatccaaactctcttactttccttctttttctctcttaatctaatccaaacatatggttaagagtctgaaaatttctgaggtgttctccttgatggaatagctttgg

SEQ ID NO: 5707 - DNA, 630 bp, Gossypium hirsutum
acagcgcaacggggcctactatctttcccggtttagctgaatagagaaaatatgtcggttcaagcaccaaaaataaaagagcgagcagaagcagaaggaagggtgtgctaggataatctaagatattacacatacctagtgggattctttgttgtgcctgcaaggattttgaggcttgatatgcctcctctgcattttgtctctcttttaaggacttgaggcttggctgctgctctttaggggcaatggtattggaatgtacaattgttgacctgtaaaattcataggattacagtttcaaccatcagattaaagcaaaaataaaataaaattgctgtacgaacaaccaaccagttccaataaaaggtaacataaaaaaatgatgctctaccaatagcctttttcctttcttttggctcattgaagagcatttccactgcaaaagtagaagcaaggtatttggctctcaatattttttactacactatacctgtataccatacattataagtgcatcaatagtattttttggaagtccacaagcacacgttcggccatgaaatgaaaaattgaaagtaaaaggtagagaataatatctacctcggaagggagacatgctttctttcaagt

SEQ ID NO: 5708 - DNA, 653 bp, Gossypium hirsutum
gaagaatcatctgacatcacgacgacaaaataatattcgaaataaagacaaaatagagatgatatcgtgatgagaaacttgggatgtcacgacgaaacgggaatttcctaacttaaaacaactccatattaaacttttagcaggattatttttttactgtgtcaccctagaacacatagaacaatcaccgtataagctccgatgagcactcaagaaccacaacatttgactccattaagtcaccaaaatctaattaatccaaagtgtcatcatcaaatccatatcccttagacgatgaagtatttattgtgtgcaagttacatgcacgttatttttttcctgatatttcaataaaatattttatattattttatattaaaatttattttttataaatacatataataaaattgtgcatcacacatgtataaaatttagttaatttattattttaaatattttaaagatattaaactaaattttatcatttaaaagggacaaaatgcaattttatcattatatcaatttaggagttaaatgttatttcttttgtcttgtttagcggcagtgtcaacttccgggctggctatcgcccattttttttctcttctatcaaccttttctttctttcttcttctcattcactacacacg

SEQ ID NO: 5709 - DNA, 658 bp, Gossypium hirsutum
ttagttgcttagcaaccatttgtggttaatccttttattaaaaaagggagaacatgcttactcagatttaatatgtgatgccctacacatgacgttttttgaaccttttcattgctagtgaactgaatctcatcttggaatccctgccttgaacagcagaaatgcagtggtctaatggctttgaatagaagtatggaaactgataacatttagaggggtatcattagtgcttttcgctttatttcatcaatgtttttggttttctgcctattttgcttagatgcattagttgatggtaggcacgagtaaaaacaagtaaatgtacgttaagaactgcttcattcttgaatcttgttttgcttctctttttcttccattgctttctagttttgctcttggaacctgcaatccatgcttgattgcttgcaagtcaacccttatttgtttaggtataactttattttatccaggcctcgtcactcagggtcaagtcaatttctgtacctctttggcatcgtcatgtgaacactgtttttgaatctggactgtgttttatttaaaatgtttttgtttctttctatataacagggtttctggcagagacatcaattggcgcatacagtctctttaagatcatacacgattgaaccagagtgca

SEQ ID NO: 5710 - DNA, 627 bp, Gossypium hirsutum
atcagcataagagggatttgatatttgacaacatcgtgataaataaaagaaccaataaggtgccaattgaagagaataaagtagaaggccaccataataaatttcctacaattaaaacaaacttatgaaaaatgaagcagttttaaaacattctttaccgcatccaaaatacatgctccacaaaatagcatcaaaacaccttcaaaagtatttaactgcttggttttaagaaaaccatgggacgaaacattaaagattctacatctcaatgcctagggttcaaattaagaaaaatcactccaaacagctttgaaaaacaccactattacctgaaatttgaattttaagaaaaaccaaaaaatagacatagatattgtatgaaaagactaaggcaaagggaattcagaaaaggacaaaggagacattggcatacaagatataagaaataacaaaaatgttgaagaaagtgatgaggtcctttttatctaaagcaacacatctgcataaaatttctgagctagagcaagtttaaaataactaaattttaggatttagcaggatcttgaggggaaaaaaagaattcattacaagataagcataaagaaggggcactctcctgtgatttga

SEQ ID NO: 5711 - DNA, 640 bp, Gossypium hirsutum
  misc_feature (16)..(17): n is a, c, g, or t
ttcgcgctttttcctnncatcagatggttccgacaatctaggctggggcactgcttcctcgtggtccagtcgcttgaccaaggaccatttcgacggaaccataactccccaagctggtaccggagatgccgaccaatccatacagcttacggatattgaaaatatatctgatgcggtgaaaaaatggaatgccgacgacaagaagttcaaggagttcactgatggatgggaagatcgactgcttgaaacaagtgttttgttgaaacaagtgcttgaacctggtgctagagggtcttatcttaaggactctgaaaaggctgaaatgtatcgtttgcataaagagaaccctgaggtttatactgttgagaaattgtccaaggattataggattatgagacagagagtggaagctattctttggcttaagaaagatgaagaagaattggagaaaaaaaatgctcttcctcttgatgactctgttgagatgcttcttgacaattgccctgagtaattgcctcacttcttttccttttattttcttggtagtgtttggaatttctatccttgtttcgtgatttcaatggctctttgatgcattaaattgtaaatttttttactgctaaagttatggtctgttcat

SEQ ID NO: 5712 - DNA, 670 bp, Gossypium hirsutum
cagtgggatcagcatattgtaagcttgctggtgctaattgggagccgaaagatgggaaatggaaggtgatttggaaagttctaggacctcagagagttagacaattcctctggccagctgttaaagagcgttttttgacgaataacgaccgattgaggagaggcatttcgggttcaaatctgtgagattcaagaattcggtgaaggatgagaaacaattttgtgagattcaagaattttaaaactcacctctactattttgaatttatttgtttttttcttacatccataatttattgatgctgctcaaaacatatgtagaaccttatttaaatttaaatgattggcaggattttgatctaagccttcaccataatctacaattctatcttaattcatatttataagattgaataggatcacacgaattaataacatgatacacacatataattaatatccatcaaatcacactaactaataacatttcaacacatttaattttcaatatctttgtacatatctaaaactaaacaccaacaaataatatgctaacacgtaactaagtaagattttgtgctagctcccttcgtgagcctagctccctatgctagttctctatgataaatctttgtgcgtgcttctttccgagccatgttggatatattggt

SEQ ID NO: 5713 - DNA, 638 bp, Gossypium hirsutum
ctgaatggaaccgcaaattagctgaaaaagaggaaacaatcattaatttggaaatgaaattgtccgaagctcctgatgttcaaggtttaaaggaaatgaattctgaaaaagaaggtaattctaatctaatcaaagaaattgaagatctaaaactgaaggtgcaggaactcgagagagattgcaacgagcttactgatgaaaatctggaacttcattttaagctcaaagaatcaagcagagatcatagcaccacctctaattctcttttacctgatcatccaggaaagaactctttttctaggcatgaaccagaagtaccttctgctgatcatttacagagtcaatctgtagttcttggaaatcgatgtgctgacctagagctccagctggaagctttcaaggagaaaacttcttatcttgatgatgaactctccaagtattgtgccagagcagatgaacaggagactgaacttgtcacactgcaacaacaattacagcattaccagcagacagaaattcagagtaaagaatccagtatttctgaatcacctgatgccattgaattctctacattgcttgctgagttagatgaacagattcaactttctttagctgacttaaagcgtcctgagggaact

SEQ ID NO: 5714 - DNA, 617 bp, Gossypium hirsutum
tgaattaagggaacaaaagcacaatacgaagcattttcataaaacaaaatctgtttatccaagtaaaagagaggcagcttcaaacttttaactttcactggaaaacaattttctttttcctttcccctctcttcccagtaaaatcattcataagtctagcagatggaattcatttcaataatatggataactcaagctatgttactcagactagggtgtaaatgtggatacaggtatgtgttccaccacaggtatcttaagctattttctaggttttccatacattaggagggtccttgaagggcacttcaaggaaaatgaagagttgagcgacagagatcaagtatactaccttcttttctgaagccatgcctgttgctgggcttgttgacgtgacaggctcctgtagtaaaattggaactgccaaaagggaaatagagaaatgctatttatgttaaacataaaattaacagaaatgacaccggagtaatatgggagaaacaagaattcataccttctgctgttccactgacaaatcatccatgcattcaatcaaaaattccatattcctctccatatatggattgcttgaccattgcagacgatcataatcacac

SEQ ID NO: 5715 - DNA, 626 bp, Gossypium hirsutum
gaatgtcatcaaccacaataatcagatcagctattttgtgtcgactacattttaagtccgatacatgcaaacaagcaataaaaaatcataaatggtaccttaaaagcaaggaaggatgtctgcttctggatgcggaaactcctaactttgtcatgatccacgagatcaaaatatatgtcctttccgatttgttctagaagatcttcatctctagcaacctaaatgcattaattatattcactcaaatgcatgaaaaaaagaatatccataaatgctgtaaccttgattgtaacagatagatacttttataatagtataaaggtgggcctgtgctttatatctccttctgtcttccttctcttcctgctccttctttaacctcatctgatatttgcattgaatgcactgatcgtcattaacagggtcaacattaggaagatcacatcaatttcaaggaaatgaaaaaattaccctcaagtgttcagcaatgtccttctcatcaacattgcaaattattttgtccttatcactttctcgtatgtagacaagcatgtacgcatttgagtattttgtaaacttgaaaggcgtgttattgaagccagggtttgtctgtggcaactaatgaa

SEQ ID NO: 5716 - DNA, 557 bp, Gossypium hirsutum
  misc_feature (504)..(509): n is a, c, g, or t
  misc_feature (511)..(511): n is a, c, g, or t
cagcatgacggacatttttttttcttttaggtgatgaagcactacacattctcaaatttatcagaaaattctcagcattttgtatctgacttttttcacttaatatcatcattggctgagacattcatgtaagacatttacatacgggagttatctttgtgttatatgaactgatttaatttattgtccatgccataactttttccattgtgaagcaaaatcattttgtgcaattttgcagatttatatacatgggttttgatattgccatggaaaagcacagctggtcgcatgtgggatttatctttttctcaattgtatccttgtattataatgattattatgaacctaggtttggtggctgcattaaattatggtctcatggttgttccttgacttgcttcattatcatgtcagttatttattgcaattgccaggtaagagttatatatgatgatattatggaccttcaaaactaaagatttatggatctttcaaaatttnnnnnngntattgtcgatggacctatatagagtaattaatgaggttgtgtgttt

SEQ ID NO: 5717 - DNA, 609 bp, Gossypium hirsutum
tttgttgtcttaaaacttgtttgtctccagcatttccttcgttctgtatcagaacattttccacaatctgcaaaatacatagtatcgtaatgaacaaatcctcatatatccaggggaaagaaaatgcagatcagttaagcttacatcttcgcacgagtctacgagttgcggctgatggcaggtaacttcagcagatgacaataatccaactgtgctttcgattatatctgggacatggaaagcctctccataacttgaaacagcacttgcaggcataaccaaatctccaacatattcggaaatctgctgagttgtgttacacgcaggtccaacagatattgtgtctccatttccagccgaaaatgtagggctaggagcggagctggtttgagcatcacaagcagcaaggaggctcaaattctcagaggaagaaaacttcgaagcatttttggacatcacctgatcaagttgactcctgagtttttgaaccttagcatgcacaatttcaatcttcctaaggacttgctccaaggaattatttccatctctgaactcgaaaagcaattgatcattattaacgtcgaatttatcattgcgctctgtatcttg

SEQ ID NO: 5718 - DNA, 515 bp, Gossypium hirsutum
ttcagaagtatgtgctgcctttcttgctaacctggatgataaaactgacaagaatgtagtgttccggaatgtgtcatatcacctgccttcatggtcggtcagcattctgcccgactgtaagaatgttgtgtttaacacggcaaaggtaaattttcatttttttttcaaaaaaattatttatacacatcaatgtctgaacattcatcaattgcctgtagtggcagatcttgacatttatatatacacacatatatatatttcttttttctttgtggggggtggggggtggggggcaattacaagattaaattgcttaagaaaaaagttgcgatctcatagaacatgttcttgttataatttttgactgaattcgttgcaaacatatctactttgctgttattttcatgcacacatatatacctatatataatatataccatttttgctctcttaatcttatttcctaaaataaacaatttttttttctttttgaaattcctgacttggaatgtaac

SEQ ID NO: 5719 - DNA, 655 bp, Gossypium hirsutum
ggttgctaatttcttggggaactggaacctgacaatccaacttattgactaggtacaaacatttagaaacaaagctcatcttcctatgtgatataggattttggccattaattttcccacagaaaattttagccttcttattagttttacttcctttctacttctgatatccggttagcttgctaacagttatacttcctaatggttcactcaggcaagcctgtgttcgtgctgatagttcttgtgccaacaaacgcatggttggtctcgactctgcctcgatatttgtgcatgccaaacccattctgacaatgaatacaacttcctctgctattttgcccgtaggtggtgggagtcgttggtctagcaaatccttcaaacacatttctgtatttccaggtgacaatgtcgaagaagatgatgataggggattcaagagttcccctggatgtcttcccatcattacctctaatgccactactccaaagctataaacatcgcatttatctgtcagccgcatggtgagtgccaactctagacattccaggtaaacaaaaagaaaaaactttagtgttattcagacagtatgtgaaataagaatgcagaaatcatatagtgttaacctggagccatgtagccataagacccaacaaca

SEQ ID NO: 5720 - DNA, 643 bp, Gossypium hirsutum
atcctctcattcgattcatcttttgccttctttgccatggaattagtgcttatcgttttatttaacaggtaaaacccaaatatcctgattttaaacacaaagacggtgttcttgcactttggctcgatagtgcaccaaagtgggttgtaccagaactcgaaggactgaaattcgatattcctaaactgaaaacacctaaaggtataatttttaaatagatatcatattggcttcattgcaatggtttgaatatagtatctatgatgatgatgcatggtgtcttataatttgactagatttagtggaaggaccctggaaggacttggttgaaaacccgaataagtggtgggacaatagattgcaaaaggtaaaaatgagagctgttctactttttggttgaactgagttttatttttgtcattgatttattgtttcttgccactcgcagataaacggcaaggtgaaggaaaaataccccgatttcaaacacaaagaaaccggcaaggttttatgggttagtgacatgccaacttgggcggaatctaagttgccgcctttaaatagtaaaaaatggtccggcaactcatgaaaggaaataggtaaggctagtttagcattacttttgtggtcgagaaagaacctt

SEQ ID NO: 5721 - DNA, 506 bp, Gossypium hirsutum
atagaaatacttccccattgaccttcagggttgcacccatatatcctaagacccccatcagcatccaatctcaggaacaaaatagttgtatatgttgagcttgaattcacaacatcgagttgcagttttaccactgtatcatttgattggtaatagaattcaatccctcccattgtgaactgaacatatttcagagaaagatcctcagtcgcctttggtattgcagagaaaagttcatctgccctaggaggttcaatagttagatattaggttggttcctcacccactacggatgcaaccatgccatgagaattcagagaaaggtaaaataagctttgattgtcatggattgaagtggttcttaaagtaatctagtggtttgcccatagtacttggcctaatagaagagtgtcaataggatattgggaagattcccaaataggtcgtataacaaccgaatttcaatagtgttgggaacagtgatttaagctcactaaatccgacga

SEQ ID NO: 5722 - DNA, 620 bp, Gossypium hirsutum
tcagcagaatcatggttgcaaatatatggttgtagaatctcagttctaccatgtttaaatttaattaaaaacaatattttaaataaaagtaaattttttttattaaatcaaatgataatttaacatgttaagcataattgttttaggttaaattatggttgcaatccttctattatgtttaaattgaaggtttgatatctatacttcaatttgacatgatttgattccattacttttataatatcattaattagtcaaaataatttacactcttaattattttttattaaaatgctaatatcaatttcttttaaatatccattatacttgtgttagaaaatatttttaagaaaaattcacatggtcttgtagcagtaataattaaggatgttaactgttttggttaattaatggaattgtaaaaatagataatgaatttatatcaaataaattctacagactaaattactaaatgtgagcataatagaaggaccaaaattgaaatttaatatattatgatgattaaaagaataaaataaaggaactagataattcccatggagaaaagcccttggggcattcctttcatgtaaagttagaatgtgtttcccatgactctc

SEQ ID NO: 5723 - DNA, 1122 bp, Gossypium hirsutum
  misc_feature (595)..(605): n is a, c, g, or t
  misc_feature (607)..(647): n is a, c, g, or t
  misc_feature (650)..(663): n is a, c, g, or t
  misc_feature (665)..(665): n is a, c, g, or t
  misc_feature (668)..(671): n is a, c, g, or t
  misc_feature (675)..(682): n is a, c, g, or t
  misc_feature (688)..(692): n is a, c, g, or t
  misc_feature (700)..(702): n is a, c, g, or t
  misc_feature (704)..(713): n is a, c, g, or t
  misc_feature (720)..(727): n is a, c, g, or t
  misc_feature (729)..(734): n is a, c, g, or t
  misc_feature (736)..(738): n is a, c, g, or t
  misc_feature (741)..(750): n is a, c, g, or t
  misc_feature (752)..(754): n is a, c, g, or t
  misc_feature (757)..(767): n is a, c, g, or t
  misc_feature (771)..(772): n is a, c, g, or t
  misc_feature (774)..(776): n is a, c, g, or t
  misc_feature (779)..(791): n is a, c, g, or t
  misc_feature (793)..(795): n is a, c, g, or t
  misc_feature (800)..(800): n is a, c, g, or t
  misc_feature (802)..(805): n is a, c, g, or t
  misc_feature (808)..(819): n is a, c, g, or t
  misc_feature (822)..(833): n is a, c, g, or t
  misc_feature (836)..(848): n is a, c, g, or t
  misc_feature (851)..(856): n is a, c, g, or t
  misc_feature (862)..(879): n is a, c, g, or t
  misc_feature (881)..(883): n is a, c, g, or t
  misc_feature (886)..(901): n is a, c, g, or t
  misc_feature (905)..(907): n is a, c, g, or t
  misc_feature (913)..(917): n is a, c, g, or t
  misc_feature (922)..(929): n is a, c, g, or t
  misc_feature (931)..(940): n is a, c, g, or t
  misc_feature (942)..(947): n is a, c, g, or t
  misc_feature (950)..(953): n is a, c, g, or t
  misc_feature (955)..(957): n is a, c, g, or t
  misc_feature (962)..(962): n is a, c, g, or t
  misc_feature (964)..(971): n is a, c, g, or t
  misc_feature (974)..(975): n is a, c, g, or t
  misc_feature (978)..(986): n is a, c, g, or t
  misc_feature (988)..(1010): n is a, c, g, or t
  misc_feature (1012)..(1023): n is a, c, g, or t
  misc_feature (1025)..(1039): n is a, c, g, or t
  misc_feature (1041)..(1051): n is a, c, g, or t
  misc_feature (1053)..(1054): n is a, c, g, or t
  misc_feature (1057)..(1063): n is a, c, g, or t
  misc_feature (1069)..(1071): n is a, c, g, or t
  misc_feature (1074)..(1088): n is a, c, g, or t
  misc_feature (1092)..(1117): n is a, c, g, or t
agccagttgcactatcttcctggcctttggcagaaggatacttcagaactatttcaagaagctgatcaatcacttgagcaagattggctggaatctttttgtggcctttggaacacttacctgttccatcatttaccttattctcaggaattcgcacaggttcatttgaagctaatccaacttcagcaccagaagctttcaatttgtctttctctctctccttttccttcaatagaactacaaagggtctaccccctgatgactccaattgacaaaccgcagtagcagctttcataaacactacaggatctctgcatataacaggcgccattgatgttaaaaatgtgcgaggtgaaacacggccagcatgcctgctgccactcaaagtctgtctaatctccaactccatggcagtttgcaaagtctgaggatcttcaaggagatgtctaataatggcagatgcaacagtatcataaccaggaaaaaaacaagttcttggaagactaaagagagcagctaagcctccattctcaagaaattgcaaagctagagcatgtgtttttgtcaagcgagcacataactgaagaacagcctnnnnnnnnnnnannnnnnnnnnnnnnnnnnnnnnnnnnnnnnnnnnnnnnnnnccnnnnnnnnnnnnnncnaannnnccannnnnnnnaacacnnnnnccaccaannncnnnnnnnnnncccccannnnnnnncnnnnnncnnnccnnnnnnnnnncnnnccnnnnnnnnnnncccnnannnccnnnnnnnnnnnnnannnaaccnannnnccnnnnnnnnnnnnccnnnnnnnnnnnncannnnnnnnnnnnncannnnnncccacnnnnnnnnnnnnnnnnnnannnccnnnnnnnnnnnnnnnnaccnnnccccannnnncaaannnnnnnnannnnnnnnnncnnnnnnaannnnannnaccancnnnnnnnnacnnccnnnnnnnnncnnnnnnnnnnnnnnnnnnnnnnnannnnnnnnnnnncnnnnnnnnnnnnnnncnnnnnnnnnnnannaannnnnnnaaaacnnnaannnnnnnnnnnnnnnccannnnnnnnnnnnnnnnnnnnnnnnnnacaca

SEQ ID NO: 5724 - DNA, 512 bp, Gossypium hirsutum
cttttcctgcaaatatgtgattcagtattccttttcttgtgtctaaagatacaagaagatattaagatatatcttaaaccctagaatgcaggggtttatatatagagagagattaatcatagcatgtatgttattgtgaaaactgagacttgtggtgtggtttttttttttttttgttttccccaaaaaaaagggggaaaatttttttttttttttggttttttgcttttggaaaaattccaaaggttttaaaaaggtaagggaaaaatttaagggccatggggtccccctttccccaaaaaaaattttccccggggggggggaaacctttgggtaaccccaaaaaattttggaaaaaaagggggaaaaaaaaaaatttggggtttttttttttttttttttcccccccgggaattcccctttttttccccttttgggaaaaacttttcccggaaattttcccctttttccctcccccggttttttttttttgggccccggtcccctttaaa

SEQ ID NO: 5725 - DNA, 182 bp, Gossypium hirsutum
gagaagtttttattacattttatttgttgcttatcaattcatactagttgacaaaatcaaatacacgagtgtaatgccatcttttagctttgatttgcttcaagaaaaaaacagaataagagatgattagatcaatatatatatgtatgtatgtatttaaacacaatttaagaaatgaagca

SEQ ID NO: 5726 - DNA, 615 bp, Gossypium hirsutum
  misc_feature (609)..(609): n is a, c, g, or t
gcttttcgaggaaatacgaagcctgtttatcctgtgtattggaaaacaaagttatgtacaaagtgggagacaacaggccattgcccctttggtgagaaatgtcactttgctcatgggcaaacaggtatatttgtcattgtaatatctttgctctagcttgatatcatgtcatttttgccatgcaactttttaagttttgactaagattaaagtaatatttagcatttggtaagtgatttcttatttaggctataacttaaggagtgcacttactagtttagtattcctttattggtcttctaaatttgattttagaagaggtttctatataatcaaaatgtgatgctgctgacagttgctttaggtgttagtttttgaaacagaccaggatatttcattgtttgtggtgtttcatatttcactttcctggaaagtttcgatgcagatacataaatgactggaatgctgcttttatttttacgcatatttgcctgtgcccaaattgatgtgttattagtcgtgacaagttctgcctgtatgaaacgggaagaacaccttttaaacaagatatttgatggcaaatctttttgtaatgcttgcctgtttctntaatca

SEQ ID NO: 5727 - DNA, 625 bp, Gossypium hirsutum
atttgcatctggaggcccatttgttcgaatggatagccatgtttatcctgattacgtagttcctcctagctatgattcattacttggaaaggtttgtaatatctgtcttatactattaagattatgtatatatgagcaattcaatgcaaactcatgaggtcaaaaaaagttattatggaagagaagggaattcttaaaacttcgtttcaggaaagagtaataagaataccatagtttgtcgttatttcaaggtgtatatggtaaactgaattatctttcaatttttgctaaggttattcttaacatattaaaatataaacattcatgtttgatctttgtgtttgaaaatgaccatgcttatgagtccacttttctagctttgacattgttctaactatttactctgttgtagcttatcgtatgggctccaacaagggaaaaagcaattgagcgcatgaaaagggctcttgatgacactgtaattacaggtacttggttattgactaatagtttgctccgatttgttgttttttatcatttacatcttggtcacatacattaggttgaagaaacctttaactagaaaaaagtgattctcagcgtctcccaatgaccataatcagtg

SEQ ID NO: 5728 - DNA, 569 bp, Gossypium hirsutum
  misc_feature (531)..(534): n is a, c, g, or t
  misc_feature (536)..(536): n is a, c, g, or t
  misc_feature (543)..(543): n is a, c, g, or t
  misc_feature (549)..(552): n is a, c, g, or t
  misc_feature (557)..(560): n is a, c, g, or t
tgatacagtgagtaaattgaaccatagtttgttgagaaagatacgtggatagataatacaccattgctactacttcgggtttattttctattctctatcctgcatcttgctggaatcataaccttttgtatattaaagatgattttagattttgtttttcaatgatatcttgcctttttgtcttctagagcatatattccattttctagaactgtgtgatgttgtgattatagctttctgtgcatgcatttaagttgatttagacagactttgtctgatgtagcttttattaggctcgatatgtggccttgttggccatctgccttttttattaaatactggtcctactctttctctttttttttttttgctttttttttggaataaattttgttttttttttttttccaaaaaataaagggaaaatttttttattccatttttccgttccggggtttttttttgcttctttttttggccccaaatttggggggggcgcccccttggggggcccatttcgggggggttttnnnncnaaaaacngccctnnnnggggnnnnctcttgggg

SEQ ID NO: 5729 - DNA, 621 bp, Gossypium hirsutum
agtatgcacactctacttgcttaggaacttctatcaacttgatattttatatattggcttaccagttaccactaattatttaataccacctctatttgcaaatcattaggattattcatgtggtatgctaactgttcaatggccaacttgtttcagttcagtcctatgtaaaatcattgggtcaaccggagttgcttgacctgcttgttcaacctgcatccgaatctgaagatactgtcatggtagaagttgaagatttgagaccttccaagagacaagttgtttatcaagaagtatgtttgctaatgctgtttgccattgttaattgtaaacaatgaatttggttaagatttgttcccatgaaacaaattggttctctaaggcttaatcttttctttgtttagcataaacccatgtctgagattacgttgggcttgcatcgtggaatataccatcaaggaaagcttcgtgttaatcgttacaatccatttcaagcatatgttggaagtgagagcataggtgatgaaataattatatatggacgtcaaaacatgaaccgagcttttgacggtgatatagtagctgtagaacttctgcccccagatcaatggcatgaggaga

SEQ ID NO: 5730 - DNA, 628 bp, Gossypium hirsutum
gaagtttgtggctcctgttgatgttaaagaaaatggtccagttgacaattatactcttttggaacaacttcagcaagctccggaatctgaaagtcttgtggacaagagttctgtgcgagagtgcaatggttcacttctgcatactgtgaatactgtccaagagcatgtgcctccagtcgaggaaccctttggggaaccccaaaagcacacctatgcttctgttgtatgttctacatgtggctgatattttatgtcatgcatgaatatataatgctcatgaactttctaaacttgtttgttgaattagaaattggcttctcttctcgataggatttaatttctctcgttttctatgcatgattgttggagttacgggttgctaaaggaaaatcggcaccatcagttgctcctcaagtttctgttagcaagaacctgccccctgcttctgactgggaccatgctccccagcacactgctcagcagcctgttctctcctcaaatgttgtcgagatgtctggggttgatatggttgatgaaaattcacccatagagtatgaaggtaaagcttcaactattccttttatgcttagctattttgaaaaatgggatcgtgagacgtgagacataa

SEQ ID NO: 5731 - DNA, 653 bp, Gossypium hirsutum
taatgtcttatttctcaataaaaccttatcatttcaaaataaattaagagcatacaatagtatattatcattcacataatttggagttcatttggataaataatatacatcttcaagaaccatgacttacaaattccaagcacaagggcaaatatatcatgatcttccatcatttatacctgaatcaaatagtctactttattttcaattacactattatgatactgacataaaaatcaaaatagaatgagaatactacaagaagctaagttaaatgtagaaattcttaagagattaaaagattttccttcattcaaatatttgaagataaatattgcagcaaatgctaatcttgtactgttgtatttgttcatgcacattcgagaactcggcattgagtgaaacattggtttagatgttatgataacaaaattaacaataaaataaaagttacacaatattcaaataatgacaacaaaataatagtaatataataataaaatagtagcaaaacagttggaaaatagcagcaaaatagcaagaagtttttgcccaaacctctcacttttcggacgggccttcacccatggaaaagtctaactacaatctaatacaattttgttttacatttttgctagtctagggttaaatgc

SEQ ID NO: 5732 - DNA, 555 bp, Gossypium hirsutum
aaatcctgcctatatttaattgtttcatgataatttaactattttaaaactaaaatttaaatatattttaagagatatataatattttcttaattttattgtgaacttaaaatattcaccgttaaaagaaataatttgtgtattaataatattttaaactgttccaacttctttactcatattataatttagtaaaaaaaattaaataattttatattttgtcaactaaataataaaatattatattctaacaaagtaaaataaaaatatgatagcaaaataatattatattcataagctaagataaaaaaaaaagtatatgcctagggtaatataaaatggttataaatatgatcaacattcatgataaaaaaatatttggcctaatataataggagttccttaaattaccccctttgttttgtcaaataaggaatttaaattctattttgtaatcaaaattggtcccattaaaaaaaatcgtttcaaccaattaaaaagtgtcaggtggcaatatctgattggttttacctttttctaaaggagtgaacaaag

SEQ ID NO: 5733 - DNA, 687 bp, Gossypium hirsutum
  misc_feature (9)..(9): n is a, c, g, or t
tgatgctcntggttggcttctatttttttagtaaatccttaaagacgtttttgttacctaagtttttcaccattcatccctctttctcacatattcatgctaggctggaaactagaggaggttaaccttttctttctttgtagaaggataatacttgctatataatggttaagactgaaagtaacatcattcgtatgttttaagaaaacgttttaattttttatgaaagtaaaatattaaaagtatgccgatgatggaattagcttttataaatgacttctggactgttgtgtgatcacatgtcttgatgattgatgttaatatatatatatatatatggttttgctctatgaaaatccttttgttttcacatgttgccatgctaaactagcagcactcttatcttaattttgcagtcactactcagaggtaggttcttgcatgaaagacttgttgaagaggagagaccaacttcagtggcagtgagtgaattaaatcaattaagacaatggcacactgtatctggtttgaggtaggaaactttttctttcattcttcgattacgaattctttggagaatgtttcactcttgttcaaaaatttcggtgatagttctaaaatggttaatgtttgtgaaacaatgttctaaaatggttaatgtttgtgaaacaatgatctttatgggct

SEQ ID NO: 5734 - DNA, 643 bp, Gossypium hirsutum
taggacccattccttggattgctattggagatttcaatgctattttatttcctaacgaagaattggggggtaattctagtaggagaaggtatccttagttcgatgattttgtagacatgactaagctacaagatttaggtttcagaggcccttcttttacctggcacagatgaggtctttttgagaggttggatcatacgttgggtaatgttaattgggtacgtaaatttttgatttgtttggttacttatcttccgaagattaagttggattatagacctcttctcttatctgttaatccaaagttaaacttacttaaaggaaggcattttcagtttttggctaggttggttgaacatcccgaatttgagaattttgtgggtgttaattggaaatttagtgggaatatgtctgatgctttgaccaagtttacttttagacttaaggattagaacaaattgatttatagtcacatcatcgcccataaaaaaaatttgataaataaattagaggatattcagtggcacatggattctcatggttcaaataagttagctcaaaccgaattgagtattagacaggagctgaaaaatgtgctttatcatgaagaactcatttggaaacaaaagttgagatgcgatta

SEQ ID NO: 5735 - DNA, 628 bp, Gossypium hirsutum
  misc_feature (61)..(63): n is a, c, g, or t
  misc_feature (67)..(67): n is a, c, g, or t
tatgttgttttgtttctctatattatagaatattaatattgtatatttataattaagtttnnntttnatttatttggcattcgggtatttgggtgaaatactttttttaagtatctttattttttttatttaataaataattgaagtttaattgataattgtgaaataacttcccctcataaattatgtgacatttgaaaaaaatcttacataaatttaaaataataaaattaatatcaactttcaattcaacttctgtcacctaatctaatttaacagaaatagaagttggatatcaattggactctaattattaaataaaaagattaaaattttgaaattaaaaataaatggagtaaatttcaaatgttagaagaatgtaggggcttggaacaaaattagaccaacatttaagaaaagtaaagccctacatgaaatcaaattttccttaataatctttcaaccttaattattccacctaattaaataataatgacgctaaagtaaactattaaccctaattattctaactctttatgttaaataaataaaattaattaataataacaacaaaggaaaatataaaatttagagtttagtattatttcgaggtttgattagagatgca

SEQ ID NO: 5736 - DNA, 619 bp, Gossypium hirsutum
agcttatgtcatgtgtgtaggttgatattttgataaatcagaaccatttgttcaagcgtagcatcatattgataaaagcatggtgttattatgagagccgtatattgggtgctcatcatggacttatctcaacttatgccttggaaaccttggttctttacatattccatgtttacaataagtccttttctggaccacttgaggtggccatttttacctttctatttttttttattcttttttcgttagtctccacatctgtttgacttttctcacgtcttcatgcttaggtcctgtatcgttttcttgagttctttagcaagtttgattgggaaaatttttgtgttagcctatgggggcctgttccaattcgttcgcttccagacatatccggtactgcattttctggacatcttattctaagctttgaataagaatcctccatttaccaaatgttttttttttattaattacattgtttgaaatacattttttttgcagcggaacctcctcgaaaagatggtggagagttattacttagcaaatattttcttgatacttgcagttcaaaatatgctgtttgccaaaaaaatcaggggaaacccttcacttctaaact

SEQ ID NO: 5737 - DNA, 621 bp, Gossypium hirsutum
ggtcatccttctcgtgaggctctttctagtttcgttctattcgtataaatgacattattcttaaaattgataaacgactatggtaaactttttcttctagtatgttggattctttttactctaggaaattattattgaattgtcaacacattatttctaggttttaatctttatttgtctattggatacgtagggatactaacaaagcaactcatgctttggctaaagtgactttattgaaagcaaactactttgattgtatttgttgggtattgttaatgttaataaattggttcaactaggcaataacgaggagactaaagaaaaggtgtattaagtaagcctgctggcttggatcagtttaaatgaatttgattttacctaaaataataataataatgacatgatgaaatttgaaaaataaaataattaaattttcttaaaacttcaaatatataacaagtagaacatattttaacttatttataatcatgtttttaaaaataaaaatacatatgaaattaattttaaataatttatttattttgacttggtcttctcaaaataaaattgaagcataagatttagtaataaataaggcagataaaaaggtcaatagcc

SEQ ID NO: 5738 - DNA, 628 bp, Gossypium hirsutum
aaggagaaggagagagaggaaggaagaagaaacttgggtgaatggatgatatggctaattattgtgctgccatggcttcccacattattgtgttggaaattttgaccttttttctttttaactgggatggcgatcggtccatttggatttggacggattttgcttatatttataacttgatttgttggattcgatttttttgttgtattttttaatattaaattttgatttgatttgttctaaagttttatatcaactgttataattaaaaggcataatattaaatttaatttttaatatttttatttttattaatttttagttaaatatttttaattttaaattgttgaactaaatacacatgagctgcctgagctgtgacgaacaaatagttcgacaatcaactgtttaacggtaagtttcttccgaccgatcaagattccagtcattttcaattgcttttctctaagattttaaaattatatataaattcattttaaattttaattatcttaatttcaaataaatgatgacctaaaaataatattgcttttgaaaaacaaaagtttggggtcaataaaataagatcatgaaaaacacatgagaaacctctctcatcgtgttgaaa

SEQ ID NO: 5739 - DNA, 613 bp, Gossypium hirsutum
gtatccttctttttcttaagtgagcctctgtttttattgtatccaaataaccttttattttcaaacaaaagattgacttctgttatggtcaatgccgccaaaattttctttatccacatggaagctgacctggcttgatgatgtggtaaaaaaaagaacaatttgtattttttgaaaaatataacacttaagaactttctttcttcttgcctcccaattctcactaccaattccttaggccaaatcagttttggcctccagcattgatcataacaaaagtaaactttctattagaaataatttctttaggtacaaattaaagggtaagatattgtttgggtacaaaaaaagcatatgagcttactgtagaaaagtgacaacattgggctcttttagtattctatcctcccaccaactttgtccaatgttttttgccttatcaccagacagtaaaagggcctttgaccttttcaggctaagcgcctgcctggtgcatatagggggaaaaggccttctaattgaagttctttttaatatctctttaattgtttcttaattgtaacaaagggataatatcgaactctctacttctcaatatttgagtattcaacac

SEQ ID NO: 5740 - DNA, 523 bp, Gossypium hirsutum
tacttacctgtttgcaaatcccaaggtttattctcaaatgaaacatattgcagtcagataatcatttttgtgcaaaccttggtctaacaacagaagtgctcatctttctactaagaaacaactagttgatttgcttaccaaagcagttcctgttgaagttggcctgcatgcaacacatgcagcacaggaagcagccaggaagctgccagagccatatttatgccacctaaagttcaagctgctgttcattttgttacttcaagcactagtttagttatttagttcaaaataaactgagttggtatagcttttaatgtaattaggtgctcatagattgacaaatcagcttacctatgtgtgcaaataatgttttcataaatttcaatgtaacttagtggtgttatgtggatgtttaggtgatgtacttgactataaatgtattgtttttcttattaaaaaattgagcaaaatagagcaaaaatgagctgtcagccataagctcccttactgcacatttgtaaac

SEQ ID NO: 5741 - DNA, 686 bp, Gossypium hirsutum
agtagtgaagggcttgaactaagatttctagatggatgggatgaggtattagtgcctctaacacataatttaaatgtgagaatttgtcctctaaaaaaggaaatactgaatgaattgattatacattatttaaaccatgatttaaaaaaaaacatcgatttatttaaaccatgctcatgagcaagtgcataaatatactccagaaaaattagtgggtatagggaatcgtgtcgacgggatctatttagttctatatatacttgaatttcctccatttcaaatttgatttgaaccaaagataggcgatctattcggttattaaatgatgcatagtgcgatacagtcaaaacaaggtattatagtaagaaaagcatagatacctcggagacaagcggattcatcaacggattctctatcccatcttttgccgtctaattgatttatgttcgttataggataagaagatggttagattgccactattatttttaagggtgataaatggttgtctgccttgtatctcacctctgtcaacttatttgttgtaattcatagatacggtagagttgtagataggggaaaactaattttgacttgacaagttttccaaaaccacctgatattttcaaggtgacacatacatccatttcatgtcttctgttttatatatacattggattagggtt

SEQ ID NO: 5742 - DNA, 525 bp, Gossypium hirsutum
ataaaggaaaagcacaaaatttatgaattaccgtttctcccgtctctttcactttcgtaataaggtttaaatatactttttcaacctttaaacttaaattttctgatttaaaaaattaagatttaatcgatcaggcattcaaatttaacttgtaaatcttcttaaaattaaaaatgattcaattttaagagttgaaagcgtacagggaccgagacagaattaaaccacgcaataatagtaggaataggctaatagcggtgaaaatatttaaaaataattgaaaataaaagtctcattgtaatgtccttctccgtgttcaactcgcgtcgcgttctctactaggaaaaaaaaattaataataagcgaatccataacccaaaaagaagatacacagggataaatccagcgaaagtgtttcgcaaagttttttttttcaaagaaaagtttccttcatatttatatcgaagctgaagaagccttaattcaacacttaattccctcgttcattttctttgtcttctttat

SEQ ID NO: 5743 - DNA, 665 bp, Gossypium hirsutum
  misc_feature (616)..(618): n is a, c, g, or t
  misc_feature (627)..(627): n is a, c, g, or t
  misc_feature (629)..(632): n is a, c, g, or t
ttgtgtcacttaaagaagatttccgcatagcattttcaattgcaagcgcaaatccacaccataagcattctgacaatgcagtgcaagagcgggaccctaatgactcacacgttgtctccttgacgaggtgagtcattcccttcctacttactaacgctgctaaagagaaaagtgaactgaacaggcttgaaatgcatgatccggacttgcgctcctcttctaagagttgggatgcatacgaaagcacaaatactagaattttgagcaggctgtctacgtcaagcattttgtttaacatgcaagcctaccacgatagcgatttgtgtctaaaggggacaatgtgtagacaacatcttcaaactacataagacgatggacaacttttcgagtccaaaataagatcctatgcaataaacttgcatgagatggagtaaccctttaactttgatatcgttatgaaaatgatgaattaacagaaaaggaaaaagaatgttaatatattctattatgatgaagcaatcaagtgatgcaaagagtgaatgttattatgatgagtgtataccataagcataaagccaatgcgatcaacgggcatgactggccagtcttccagccnnngaatatatntnnnngacaggccagtcttccagccgaggaatatatat

SEQ ID NO: 5744 - DNA, 649 bp, Gossypium hirsutum
  misc_feature (641)..(642): n is a, c, g, or t
gatttaaaacttgactaatcaattaattcaaccaacttagccccagtcaatttaattggtttaactttattttttaatttaaattttatttattgtatatgcttattataaatatatctaaagataatatatattaaagtatgttatatcatgtaatagtaaaaattgtatcatcccatgaccatgcacgcgtgcggtgcaatcatattctccgtctcatctccaactaatcatcatgccttgttacttccaccaacttggattatttgtttgataataatctcccattcttaaatcattattatctaatcaaagttcaacttcttaattagcatgctaaatcattcacctgtaacaaacaattggttcagtaatgcagtaggattgaataagctgaaagactgggcatatataatccaggtctccggacaccgatgttcagatatgtaccagacatgggtgttgaagaaaaatgaaatgtccgagtaaacataaaagaagaacgatgacaacacaattgaagcataactattattgacctacatttgcatgcattttatgagtgcccaggcatttgcaagctaatgttgaacaccaacaaaaatctttgaaatttatgcaggtagactagctggaaacgnngtcatga

SEQ ID NO: 5745 - DNA, 666 bp, Gossypium hirsutum
agggtggagtttcatgaatctgacctgctatcttattgtagggaacgtgatattcaacttgaacggatagttggatgcatacctcaggtactgtgacagttgataactggtatagctgtgtagtaaataatgaagttacataaaatcctgattccgcaatacttctatcattttttctacttgcagattcttaatccaaacccagaggcaatgtcaaaactaatcactgaaaatgcaagcgaggaatttctacacgccttgagtaattattgtgcacttcaggttgaatgtttctttattggttccatgttacacagtatgttagaaaagtaataaggtgctacaagctcacatttctgactatttactctggcttagttgtattcatggataaggttccttgggacagttaattataaccaagacacaaactggctggtcctctttgaaagaaatatgtttttttattccatattggagctttttcaagatcagcttggcttaaatctggacgcctaggcacattataatttattaggttgcatagaagtttagaaacttttctgtagagaaacattttggaactttgaattctctctctttattaacttcatgcagtctagttatcagtcatatgaattttaactccgttcaattcttggattc

SEQ ID NO: 5746 - DNA, 877 bp, Gossypium hirsutum
tataaatccacgagcagtgaaggtttcttggataaacttgtacatgaactcttttgatgagaaaggccaaccaatttatgacgtagaaaagaaaaccttacttgatagggtggagtttcatgaatctgacctgctatcttattgtagggaacgtgatattcaacttgaacggatagttggatgcatacctcaggtactgtgacagttgataactggtatagctgtgtagtaaataatgaagttacataaaatcctgattccgcaatacttctatcattttttctacttgcagattcttaatccaaacccagaggcaatgtcaaaactaatcactgaaaatgcaagcgaggaatttctacacgccttgagtaattattgtgcacttcaggttgaatgtttctttattggttccatgttacacagtatgttagaaaagtaataaggtgctacaagctcacatttctgactatttactctggcttagttgtattcatggataaggttccttgggacagttaattataaccaagacacaaactggctggtcctctttgaaagaaatatgtttttttattccatattggagctttttcaagatcagcttggcttaaatctggacgcctaggcacattataatttattaggttgcatagaagtttagaaacttttctgtagagaaacattttggaactttgaattctctctctttattaacttcatgcagtctagttatcagtcatatgaattttaactccgttcaattcttggattcttcctttatataatatgctaattcaacaagattgctgtcaaattttgtgatatcatgtgcgctttcattcttataaaaaaagacaaaagaaatttaaaaatcctc

SEQ ID NO: 5747 - DNA, 606 bp, Gossypium hirsutum
tgttaggtaattaaacgagccttcaacaatattaaggtattattttcgtgttgaggttttgtctgagtcttgcaagtcaccgatgaaaagctcttgatggagaaaagagatgacccaacatgaaaacaatacatattattattattgacggacagaccggctgtcagacgaccatatattcaacacttcctcccaacgagatcggcccttcaacaaggttcttttcatgaaaagtgtcaaagcaatagagtattataagccaaatctttttgaaaaatcgtaggaaaaacacacacacacacatatgtgtgttaatgccatcaaaatccctcattcaaacagtagctatcaaacccagaattatatgcctgtaaaaatgaaggggaaaaaagaaaccgagaaccaaagctaacctgcatctcatgaacctacagccctgggttctcttaacgacgaatctacagtttgggcacctagcccacttcttttctttagcaagcttcatcaacataatatcttccttttctctttcatctttatgcaacctttgaaatttcccacattcaagctaagcatgccatggaactttacattgcgcacataaca

SEQ ID NO: 5748 - DNA, 661 bp, Gossypium hirsutum
  misc_feature (17)..(17): n is a, c, g, or t
tgaatgggaggtgattnaggttcagtctgagattgttcaacccttgtctgataatcaccaacctattattcgacctctcattcgattacaagagaaaaacataattttgacacgcatcaatccacaggtatagaatttgccaattcatgtaaagatctattgcatattgttcaattgttcttttcttgcatctgctacggttaaatgtttctctgttccatcccataaacgaggaactgttggaatctttggattttatgcagttaatcatttagagagttcttttgcatgttctttcatggttattgtcgattatctattgcattattgactctatattttcctatagattcgtgatactagtgttcttgtgagactgagacctgcatgggaggatctgcgaagctacttgactgcaagagggcgtaaacggtttgaggtttatgtttgtacaatggctgaaagagattatgctttggaaatgtggagacttcttgatcctgagtcaaatttgataaattcaaaagaattgttggatcgtattgtctgtgtcaagtctggtaagctagtaattggtaaagctgatttacatgcatggcttgcaatttgagttgctttctgtccgaaatgttccactacttgatcattctctgcgtattgc

SEQ ID NO: 5749 - DNA, 598 bp, Gossypium hirsutum
ttgtggacgagttcatttgcctcctcaacgtttaaagatgctagcaaagtcttctcacaaaccgatttcaattccatactctcattacagaattccccacaagcaatacagcgaagcaaagtaacagtgagagtccacctccaaatctccattcctcatacaataactccctagcttcctccaaattcactcccttacacaacccatcaatcaaaatcgataaagaaaaacccaaattcggcttcattcccttttgacagcagaaaacaaaaagcgggatcaaagtttaacggagatttgaacccgacgtgaattgaacacgcaaccttctgatctggagtcagacgcgctactattgcgccacggatcccgttgtttactcttttagaaagagatcattttgattggttttataatagtaaatcattactagctctgattcaaaaggaagagactccatgaggtattttctttaacagcttatattgatgacatatgcacatcgacggttggttagtggctgccaccacaacagaggttctaccattgcatatggagaaagagagcagagttgatgagtttctagggtgtgtgagca

SEQ ID NO: 5750 - DNA, 653 bp, Gossypium hirsutum
taatttctggggcacgagtcttgacccaaaattgacacgcaacagaaaatctagagacttgtactacttattcttgggccgtgaatgtgataaccttttatagcctctaccctacaagtgtgtagtagtccaaatatagaagtagaacaggaagcaaagaatctgagtcaaagcaaagtgcgactcattgaaggtgggaagaaggtctttggtcaagtaaaactgctagctttgttcagttcatagccagtactgtctcccgtgtggactgcatcaccttcctcactgccgcctaacttttcaaccaagtctttcatctactgcacttggtcggtggaatatattgccctaaaaaatcatggcttctcctgtttgttttgctctcacggatttaacaactgaagtgtatcgttatctgcctctgttttaggcctcgtcagtagtgattgtaacacataaaaaaccaatctgcttctagtactttgctttgctaagttcagtgttgatgatttctctgatatcctcttcctcaagtgatccatccagaatttgagctgctttaatttacctgttgatttgtcaagctagattagaaacaattcgattgcttatgctggggcttaaccgattaaatccacccatccaggcttcta

SEQ ID NO: 5751 - DNA, 635 bp, Gossypium hirsutum
cagaccgatcaagggtcctggagaccttcaacctgttctttcagcaaggatatggctgcaatcagagaggtttgggtacccaattagaaagttcagctaatataaaataatgtaagatagcaaaacagctagctaattttaactacgctattgaaagcaaaaaatgtcatatttgaagcatttggctcaagacattattatattggaaaatgttcaagtaaataattcaagaaattaaatcaaaatataaaagacaacatggtcaagagcctaattactttatgcaaagcctcataggtaacacaagagcacgagaaaatgaaactcaaataaaaccttaagccaaatgggtttatcctggaagcaatttttagtaattagcagaagtttctgctgaaagaaaaataataagaacctaagcattagatgccggtaaatcagattagcaagtcaaacccatccatctggattaagcatattgtactgtacactgcaatattcgcaacctagtcatagaaattctagtgattcttggaggtggaaaacgaccataaccttcacccttgcagcagtgaattaaaaagtaatggatgcatacatataaattacatgcaactgagagtacaagtcacatg

SEQ ID NO: 5752 - DNA, 816 bp, Gossypium hirsutum
  misc_feature (56)..(62): n is a, c, g, or t
  misc_feature (100)..(101): n is a, c, g, or t
  misc_feature (570)..(570): n is a, c, g, or t
  misc_feature (601)..(603): n is a, c, g, or t
  misc_feature (610)..(611): n is a, c, g, or t
  misc_feature (618)..(619): n is a, c, g, or t
  misc_feature (626)..(626): n is a, c, g, or t
  misc_feature (637)..(638): n is a, c, g, or t
  misc_feature (640)..(642): n is a, c, g, or t
  misc_feature (654)..(660): n is a, c, g, or t
  misc_feature (663)..(685): n is a, c, g, or t
  misc_feature (689)..(691): n is a, c, g, or t
  misc_feature (694)..(697): n is a, c, g, or t
  misc_feature (699)..(714): n is a, c, g, or t
  misc_feature (716)..(718): n is a, c, g, or t
  misc_feature (720)..(734): n is a, c, g, or t
  misc_feature (738)..(744): n is a, c, g, or t
  misc_feature (746)..(746): n is a, c, g, or t
  misc_feature (748)..(748): n is a, c, g, or t
  misc_feature (752)..(757): n is a, c, g, or t
  misc_feature (759)..(764): n is a, c, g, or t
  misc_feature (768)..(779): n is a, c, g, or t
  misc_feature (781)..(782): n is a, c, g, or t
  misc_feature (792)..(799): n is a, c, g, or t
  misc_feature (804)..(809): n is a, c, g, or t
tatgcttgttttgagagacatattccaaggagtggtccgataaggcgaaaatgaannnnnnnagagtgataagcttaccttgtcctcaaattgtagcccnncttcctaaggagatggagtattcaggtctttcctttttccatatggcccatgatgattcagtggcaattcctcccgattttttcagacgaattgaaagtctcaaagtcttggatttaccttcatattcctatctacctgagtcaattaatcacctcatagaccttcgcatgttatgtctaagagaatgtctagttgaagacataaccatcattggagagctcaaaaatttagaaatccttgaccttgctttctcacggatcaaagaactacccaaggagatagcacaattgactcggttaaggttgttagatttgagtgggtgtcgagaactcaaaatcatcccaccaaatgtcttatcaagtttgtctaaattagaagaattatatatggagggaagctttgttgaatgggaaaatgaaggagtagttgacaacgagaggagaaatgcaagccttgatgaattaaacnatttgtctcgtctaactactttatatgttcnnntttctgnnatccaanngattccnaagcatcgggnncnnngagacattagannnnnnncgnnnnnnnnnnnnnnnnnnnnnnntagnnnccnnnntnnnnnnnnnnnnnnnnannntnnnnnnnnnnnnnnnatcnnnnnnntntntgannnnnntnnnnnncaannnnnnnnnnnnanntaaaaataannnnnnnntacgnnnnnnatataca

SEQ ID NO: 5753 - DNA, 659 bp, Gossypium hirsutum
tgtttctttttttggccaaaaccattgctacttgatagaacagacaataaagcatatatacagagttggagttgtcatatcaacatcggcttatcatacaagggaactaaccagggaaggaaaattttcccctacacgtgaaatagaatataaaacaatgaaaaaaaaatgcaagttgtaatagtaaatggaatataatgtacatatggtccaaactgatacaaaatttagtgcaacaggcttaatcaggcaactgcatttgaagcttgaaacatggtgacctaggaccgaggctcaagaattgtacttcagagtcttggatcaatgattacatgtctgaaatatgctacagaaaatagaataaagcacccgtacaatcccattatcatcttttgctacagctgacccaacttttcctgttagagaacatgagaagcaaccatgtttagaatataatagcaagcaatatttaagcatatcataactatgttactcccaactccttattttttcctagaagtactcatgtccaacatattcagagttagagggacatgaaactttaagaatactccaactatatgaaaatgctttaaaaaatttaaacatactggtgacagtcgcatacccatatctaacacaaacccaagtccgagtaa

SEQ ID NO: 5754 - DNA, 354 bp, Gossypium hirsutum
tgtgaggtttacatgcatagaattggcagagcaggacgatttggccgcaagggtaagttgtcgaaatgattgaacccttttgcgtctcgtccttatgttaaaacatcatgtacatggatttgcaggagctgtgttcaacttgctatgcggcgatgcagacgaaaagataatgaccaaaatcgaaaaacatttcggcacggaaatagcagaggtaagccctctcatgtctatgatgtgtgcattatctaaattttgtttttccttttatgctttttcattttcatgttattatggatgcaggttcctgactggagaaatgaggaagactttgtagttgctcttagatcagctggt

SEQ ID NO: 5755 - DNA, 628 bp, Gossypium hirsutum
ataactttaatggaaaattaccaactatggtaatgattaaactaaaatttttagggtaaactccattcaatgtcactaaattattagtaagtttacattttggtcactcaactttaaaaagttataaaatggtcactgaactatttgaaagttttcatttaagttaatttcattacaacgccatttttttacttgcactactacacaatgagtttttttttgtttcaaaatgtcaccccaaatttaacagtgctaaaatttgaaatatgaaaagtagaggactaaattctaaatttgtgaagcgtacagtgacctatggcatatcttaacttataataaggtcaaattctattattaggcattatatgtaagttgcggaattaatttttatcctctaatttggttaattttagtctatatacttttcaatttttaaaatttcaatcttaactcaaatgatagcaattggtcaaattctaccattagtttcataatatgcttaaattgtggtttttattttttttgcaatttgatatttttatttataattgtttaattttgaagtttcagtgttctcaaatagggaaaatggagaagggcagtggtagatgttccaaattcaccatcg

SEQ ID NO: 5756 - DNA, 628 bp, Gossypium hirsutum
  misc_feature (623)..(623): n is a, c, g, or t
gagcttctcaacagggtactcggctgccagaatggaaagaatggtatttgcggtgacaagaggtggttctttctcgggatcggcagtagaaacaaagacatctatgcctggtagatcagatcttcccgaaggattattcggactagggttttcaaatttctcttgtaaagcattgagatcaacatcacgattaaccggacaaagcttaggaagctggtcaagcagccaagaaaaggcaaaccatatctcgcaaaccacagacataagccacaaccagattgcctcttcatttgggtggctgattctccactctaaaaataatccaagaaccacaattcgaataaggattaggagcctgcaagcatatgaacagagaaacgaatagaaaattgttatcatgtcacagttattaaacaaagctgtaaaaaacaatccaatctccaagttacttcacgtgttatgaaaccagttgtagcttaaagctgaccactaagcaattataaccaaagctgggagtagttatgaaatcttgttatcacagtaaagaattgaagaatcataccgatatggactaagtagtgcagcacgtatgctcgatttctgtgttagaggcttccactgancactg

SEQ ID NO: 5757 - DNA, 648 bp, Gossypium hirsutum
agcagaagtaaaacggtctgccaagacggatttaccatgaggcaacggaggcaattgccccagctgaaaaatcctaaaatatattacttcgtaattatcattatcatttcttatcaaaaaacagattttactgtaccaatgaaagaaaatatttatctgtccaattatcaataaaaaagatttatttatcgctttgggtggatgtttgtagcatggtttggtctgacctggaagttcgaattttgaaaattatttttcatgaggcaaacaggtacaggataattcctgtatattgtgtagttatgtaaattttgtttaagatgttatgtaaatttcaacccttaattctttagacaaatatatgtattcaatttctgtgttatcttttaaaatattgttttcttattatgttgtgctatttatttttatttattgacttttttgtgcatcctctctaatatgatttgcatatcatttatatactaccatccctttgccataccatatcttaaatttatcctctgccaacgttttgattcagtcccataaacagtagaaaagtgacagaataaaaaaagccacccaacaacatcagtgtctctctatatattaatatgatttcagaaacaccagatttaaattcccaac

SEQ ID NO: 5758 - DNA, 630 bp, Gossypium hirsutum
attctcttatttaataattgaagagggatatagataattttaaacattatatcgaaaaataaacattaggaagtaaataaaaaataataatcacgttttatcccattttaagttaacttgtcactaaccctttttgaacggtttgaacggcacgaactttttttatttagttaatattttatctatttaatttaaggtgtcccataaatgcagttgtaccagtaccacataattttcaattttttaagttttatattgatatttttattaataaaaagtcatataaatttttctttttcatatttttctttattgaattgttcaaaattctccatatttagttcttgctttggtcgattaagttttaactcaattaatatgagtattgttgtcaatctaggaggatgtgggttcgagtgtgctaaagcgcattatcctcctattaatgggttggagagggattataggtaattctaagcattgtgtcaaaaatagtaaatattatcataatttataatgagactattaaaaaaaaattcatgtttgtgtttagttttcttttcctaagttttttaatttactaatggtgatactgacaagctaagaaaacaagaaccacctatgaattag

SEQ ID NO: 5759 - DNA, 518 bp, Gossypium hirsutum
catcaattgctgggaccaagtgaagccctggtgtttttcatgctcatagagtttgcattcaagctaacactactaatcaacttttgctgaatgcatggcacgaaatgcaagtttccatttgtcacgtagacaggcatgctccacatttactctttggttattaagctgatgaattctagaccatctatatatctaatacaggacaatcacagagctataggtaaagtactgagttgacagtgaaagaatggaaagaagaaccacagaggttacaaggaaagatatcaattccaagcaatattgctaatggtgtgcttttaatatcagccacttgtaaaatctcttacctgcgacggttcctcaacagaaaaagcacaaacttgatgtctatcatcttgggtatcatggtgctgcatcgatacatctatccacaacaatggagttggttgatagttcttgcttagctttcaaggtgaatccgtcaatatgcgccaattattgagaagaaaggtaggccc

SEQ ID NO: 5760 - DNA, 651 bp, Gossypium hirsutum
atgctctctcttctttgactattggataaaatttataatggacttcttttattttctctattcacttatttctatctttttttttaattatgctattagtctttatactttgcgaaaattgttgatttaatccttatactttaatttagtcattcttaatttcagtaaattatattatttttaaaatttgatatgacaaacatattacatatgtataataccatgctagcttattattttcatagattattcgctaaaaattcaattaatggatcagtaattatcattgggagaagatggattaaatctaccattgtacgcttagtactgaactagtaattgaatttaatcaaatgaatttgattgttactatatggatcaagactaaaattttaaaattcaaaaagtacgaaaactaaaatttatcaaattcagtacatagactaaatcatagagactaatagtaaaatttaactcttttttttcgtgaataattataaaagtcagactccattttcttatgaaatcaaaaggtattgggacctcgtctggaatctagcaggaagcaaaggaacaaagggtaaatttgataagtatgttttttttctttttcatgtattcgaaaaatcatatcttatactactcgaaatg

SEQ ID NO: 5761 - DNA, 624 bp, Gossypium hirsutum
ggtcagctaaatcgaagggatttgaaagactgaattggaggacagctagttaaatctttatttataggagagacaataggtgagattttcttgtgttaaagtttactttttgtgtattctccagccaaatgtcactgcaccaggttgaggaacatcaactgatttgtcctcgtgaatttcaagcaattgtctcagaaccataccgaactcattaatggttgcctttagattgagcaccaagtcaatggatttcttggcgctcaagaaaacaccaagtctagcaaccagaacatcgaacttcctagagtgttgatggagaaggggagaggaaagaagtgcagatctctgagtaggcatagggaggacaagtgggtaaatccaagatggtcaaattgtgatggctgatggatgaggatgagtaggagatgaggaaggtggggagacaagagagagggagagaggaaaactgagagccataaaagggatcgcgatagaggtggaggatggattttcaggtagaaccggtggcagtgtctacaatggattcaggggttaatgccattttcgatgaggtcgaaactggtaggatggatttggggtagggccatttagttgttggagcaa

SEQ ID NO: 5762 - DNA, 620 bp, Gossypium hirsutum
ttaggactttgttatttggttacatgttatcctgttgtgtttctggtcttggttcgggtgtggggaactttctagaatttgatttctttgtgttttgaagtactcttagtatatgattttagatttggctgcttgatctgataagaagcaaggatggaacttgaaatgctcttatatgtagtgttcatacaagggataccctcctcttgatggtcccaccttttcgatctttttggcttaagtgcccttttcaaggtttcgcattgtgccatgctgaagccatctcttctattcatcaaaactaggattaaaaggcgataatcatgtttttgttgctgcaagagtgttatgctcaaagtttatcttattttgattggggtgtgggaatgtttcgaggtctaatgtaaattacgggttgggacatttcctttttgtatatgtgccctttcatgtacagtttctaagatgtccgtatgctttgttattgcatagtaattctcacttgttctaggcacatgttttccacatgttgcagaaaagtacaagttctatgtgtacccttttgtacccccaccccctttccggtacaattggttatgactatgatgctatttgattat

SEQ ID NO: 5763 - DNA, 548 bp, Gossypium hirsutum
aaattgaagtggtagaaaaataggagagaaaatataatttctttccataggtgtgcctggtaggaaagatgaaaaaattgaaagagtaattctttccatcaattgcttggtggggatgaaaaatgagaagaaagaaaatggaacttttgaaaatgcacaattttgattaacatacacctcttttattttcttccttttattatttcaatttggaatgattggtttttaagcattagaataaaaatgatcatctcttctattttctttcctaccgagcacacaattattctttttccacttttccactctctccttccatcctttcatttcttcactcaactaagcacacccttaaagattaaacagtatagctctttaatcatatatgatatatatagatacttagtgtacgtatatgcttgaaaaaataggtgctacttctgttacagttttaatctgagctgctgtgaggcttggatatgtgttcgtgtgtgtacagattttcttcttcttttttgtttttttttttgggggcagggggggggggc

SEQ ID NO: 5764 - DNA, 597 bp, Gossypium hirsutum
acggaggctggtaagtaatctcaacctaaagctttattaatgctagaagaaaattcctggtgaatgcacatatatgtttcctctttattttattgaacatttaagcagcaaggtcatgtttaatggtagcacttcacattggtttcggtctttcttttatgatgaaccagataaaaccatacgagttatatgagctgtcattttcaatgaccacttgatcttggaccatttccttggtttactagataaccaaatcttctgaaccagtaaaaaattttgtcattaattgttggttgggctcatggattctgacattaaataagttgtgaaccaaagcaaaccaattagaatccacttgacttgaaggagacagattgtttatgtaattagtgaaccacagtaaatgcaaaatcttggaaccattatgacagtacaagtgtcaaatggaaatgaaggtacttggatgaattatgaaactcacaataatgacccttccctttctgccagctttttccttttccttttaagatttccttttcagccttcatagtgttactttgaatcacgtttatattttaggatacatgaatgtgtagt

SEQ ID NO: 5765 - DNA, 611 bp, Gossypium hirsutum
  misc_feature (63)..(64): n is a, c, g, or t
tcataggtatcagcaagaaaatggtagttaatattgatgaaaaagatgggctttgtgtgatanntaagttacctctagtgaagagccaatcatctgaataagattatcaaatgcacttgtcctttcagcttctaatgttctccagtgaacaaggcatttgtatattgtaaatgctgcaacaggcttttcttggctgaatccaagattctgtgtggtacattttattagagaatcaacaccctcttgtgcctaggcatacgacaaaaattaatcccaaaaaactttgacccaatacaagttgaaaaaaacgcaaaagtagaaatccatatcatttgagttcatacttgtggcaattcaatcttagatctcctcattctgctatcttctctaccaaacctttttgatggaccagaattcaattgagcctgtcaaaaagagctttctatctcaggttcaaaccaacgatgctgatataactgatacactgaagttaaaagctaatcatagagtctcttcattcttcacttacatgattaccattttgcaaaggctgcaatgtgaaaaaaagaccaacaatgaaaaataaggaaaatgaaagtaatcacaaccaa

SEQ ID NO: 5766 - DNA, 653 bp, Gossypium hirsutum
gttctaaaagcagactcaacatgcaaaaagcagaaaggtagtacagctttggcattgattgaactccataagctcatctgaccaacacaaacatcctagaactaatacatttgagtcaaagcaacaatccatgaaagtcaacactgaacactgataacatctagtacagtaggtactgagatccatcaagcaaatagattggataagcgagaatattggtttcacactttccttcttgatcaaataaacaagaaagacaatcaaatggaagtaatgaagagtcaaagaccaaaattcaaccatactgtagaaaacaaagattgtgtccctgtcaaacattcaacaagacacaaccaccagaccagaacagcttagtagaaagagaacattgtgattccatacttgcacaaggatttgtaggacagttgtaaataggcagatttttgttaagtgggtataccaccctaacatgtacgttaaaagtcactgtagtttgcttgtagcaaactttcttgcttcttttgctgtagaaaaaaaaaatcaatcatccaaaaaaataaatactgggtcacagacgccaaaaagcataattatagagttgatcaaacagaatgtcaatcatgtgataaacagaagcacccagcttagtatgt

SEQ ID NO: 5767 - DNA, 662 bp, Gossypium hirsutum
  misc_feature (656)..(658): n is a, c, g, or t
ttagaattcctacaaataaatacgaagtataaacaagacagagaaaaagagggagtttgggcaaatgaaaatcaaaggtaaattcgaaaattcctaattttataaagtcgccatcaccaattaatacgatctaaatagtgaaatttctattattattaaactataattaaccataaagtgtacaattttaagctctctgtaaaatgttttaattaaagtaaattaaaagagaagatagaagccttgtcagattacctgcaattgagttagttctttttcttcctccgcggcttctttttacggcgatggcgaaaattctcaccctatatagtaatacaagtgatttattattttagttgcttcgtagaatttaagttccttttgagttcttttttattactaaaatttatattccataattatttttataaaataaaaaataatagattcgtcaaaaaatataatacattacaaataataataaactaataaactaataaactcattttccatttaaatgcattttctgttattactgtagttcttttttcttttttttaacacgtaacaattgcaaataatttgagtgctcaaaaactcaaatgttgagatctgattgatgtatgtttttaccagcaagtctgctagatttatannngagt

SEQ ID NO: 5768 - DNA, 620 bp, Gossypium hirsutum
cgagtttctttgctgaatcttttgatgtgcttggcaggttatccacaagcacgagattcttgctagtgctgcctgaccaacaactctaactcgataaaccatgctaagatctgcccatattgtacttcccgtggcacctgattcaagactctggtcgtatccatcgagatcagcttctgttaccaccactactgaaccatcatcaaaagtcacaaggtctcgtgcaggtgacaagtctgaagttcttaaaattaaatccatcatgtagctgtggaagccagccttcctcattttaagatagtagaactcttcaacagcctgcaattgaaagaatgagagagactactcaaacccattgtttcaaaatcatggtgatagaaataccaattcattattcctgaactctctattggagaaagtggaacccgagacattatacctgccattgggaagcagctaaacgcacccttggcctgatcaacttcacataatcatatgcagaaacaggtgtcatctgcttatagtatacctatgtagaaccaaaattcatcagtgcagctagaaccaacaagtattatggtccacacaactttatagtctatatagcactaaccaggtaa

SEQ ID NO: 5769 - DNA, 692 bp, Gossypium hirsutum
gtgagttgaaacaaagcacgatcaaggagagtagctgaatccattaggaaaaaagaaaaagaaagaaaacaatcaaacaaaaagcatattaatgatattcttgaagtaaagtccaagctttgggtttggtttggtgattatcgggaaagtgcaaagtgcaaagtgaaagaattaatgaaagtgctggtcagaatcgttaaagatgtagattttgtttgaaaagatgatgaacaactgtaaatgaacgtgaatgaaagagaaagctaagagatagaaagccagcgaaagatgatgaagcttcgcacatgcaaaggttgattggaacgtgaaaggcccacaaataattcatccatcacataaattactactaacttttttgttttatttacaatcaacgaggaggtaagacaatctaaacacctaccaagatcaataacttttcaccaatacaacagttcggtaacttggaagatttgattgtaaccttgacctcacttagttgatatccgtacctgcaacatgttgggttaaatttccattatcgtggcaatgaactttgaacgtgaagggatgttgacaagagaaattgaaggaagtgggctgacattttaacctattttttatctttgtaaagttgggtttgtaataattgataagtttgttttcctcgtgctcatgttgggttaaataga

SEQ ID NO: 5770 - DNA, 628 bp, Gossypium hirsutum
gcctgtagatcgggtcaattcgatttgtgtggaatttgaattaattttttttatatttcaaataattttttaaaattacttatgtttttttaaagttacagagtagattaaatacggatgggagtataataacaatttcatgattttacaatttaatgatgtggtgaaatttttattagtgcttaaaaattatacttttttaggatgatattaatatatatgttattctcttaaagggaatttattttaataatttatgtataatcatattgaaacttaatttaataatatgtgcatttaagcttagagattactctaaattttgaaaaatatttttaaagacatttgattaaattaaccccccaaaaaaggcaagttatactcaagttactattttattagtaagtttacgttttagccatttaatttcaaaaagttacaaaatgattatttaactattcaaaagttgtgatttaagtcactaggctgttaaaatagctattattctgctcccaccgcctacaccaatcaaaaactcttcttccttttttcttatataattcaattttttcatgaaacaactttgaacatcacaaatctgtgaaccaaaattcaaatagctttcttc

SEQ ID NO: 5771 - DNA, 500 bp, Gossypium hirsutum
  misc_feature (442)..(455): n is a, c, g, or t
  misc_feature (457)..(458): n is a, c, g, or t
  misc_feature (463)..(465): n is a, c, g, or t
  misc_feature (479)..(485): n is a, c, g, or t
  misc_feature (487)..(497): n is a, c, g, or t
tgcgatgcctattatttgttgatacagttctagctatcttccaataaacatttcctttttatttttgcagaggagaaatatctgttatttgcgaggatataaggttgcttaaacagaagttcgatgaccgtattccattaagcaaatcaatatcctcaagccaaaccagctgcatcctggcctcatccggttcatctctgaaaagcagatcatcagatcttggttccggccaatgggaaaccgctaaaacaccggaaaaaagaagcccaacaccatctgtcgatggacaatctccaaagagcagatcatcggatgaaagatccaaagctgatggaaaagaactatcagatgatggatgggaaattttcgacaaagatgctgaattctgagtttgtacactgaagctatatgaatcgacgatgcatcataaaaaaaggttccnnnnnnnnnnnnnnanntactnnnctgtttttttatcnnnnnnncnnnnnnnnnnntgc

SEQ ID NO: 5772 - DNA, 653 bp, Gossypium hirsutum
acgattgtatatgtcctagagttgggggaaagcgagagggaatccaggtttataatgtaaacatattcagacatcaatatgcaattgagattaggttttttagtaaatacaaagacagcagcccacttcaatctttgaattatagcattcaattcaccttaatttcttcctatcagctatgttaacggactacccattcagatgaagacaatttgcttttggagcctacatacgtaccctccaaaacacaataaattaaattcgaatacgtatataaagtgtgagtgcgggagatacagccactaaagacaggcaatgaaaggaataaaagatgccttgattataaacgattgttacatcacctaacagccaagaacatggcaactcttgtaatgtatctcggcagtgtaagctacatacaaccttgagatggtttggattatgtctcttccaattctctcccttttataatcttgaataccctgtctgtttttcctgtttgcaccctcacttcttctgtatattttcttcttcattgagctttgttttcaactctgcaacccttgagcctaaacacttgctcaaatggcaactggggccagatcatccaagccattgaagcaacttggagagctccctccaggaacagcaag

SEQ ID NO: 5773 - DNA, 669 bp, Gossypium hirsutum
  misc_feature (25)..(26): n is a, c, g, or t
  misc_feature (452)..(452): n is a, c, g, or t
  misc_feature (499)..(501): n is a, c, g, or t
  misc_feature (503)..(505): n is a, c, g, or t
  misc_feature (507)..(507): n is a, c, g, or t
  misc_feature (511)..(511): n is a, c, g, or t
  misc_feature (537)..(537): n is a, c, g, or t
  misc_feature (551)..(551): n is a, c, g, or t
  misc_feature (553)..(561): n is a, c, g, or t
  misc_feature (571)..(573): n is a, c, g, or t
  misc_feature (578)..(578): n is a, c, g, or t
  misc_feature (582)..(589): n is a, c, g, or t
  misc_feature (591)..(594): n is a, c, g, or t
  misc_feature (599)..(601): n is a, c, g, or t
  misc_feature (604)..(608): n is a, c, g, or t
  misc_feature (626)..(642): n is a, c, g, or t
aaggcggaggagggaggataacatnngtggagattaggaagaatcgccgtgaagagagtttgcagaagaagcgacgtgaagggcttcaagcgcagccaatgcctgcttctcttcactcctctgccgttgagaaaaaggtcgattttcaattgttctatttttctcgtttgtttttcagtattcataaattgctttaagttgttgaaccttgcttattcaaaaatttttcggtttttaattaatcttatcgaattaggattatggaaggtttttaaaatttaaaaaattttgcatatattaggtttcgattgtgttgatgaggtcatatatatatacttttgggggtattttcgtagattcgatgggaaacttggtagttgtttaaatgttttgataaaatgaaacatgatttgacgaataaccaattaatttaatttttttctctttttctngtaataattttagaaaataatgatttaaatttttgatattaaattannnannntnctgntgaaatttttaaattctgggtttttngcttctcaatttantnnnnnnnnntagagttgcnnncttgntttnnnnnnnncnnnnaattnnnacnnnnnattcttctattaattgannnnnnnnnnnnnnnnnttttagtaattggcagcatgttccatg

SEQ ID NO: 5774 - DNA, 636 bp, Gossypium hirsutum
ctatggaaatctccgatatggagttatccataagcgacactttctcaatatccaccgtccattcctcctccttcggtaacttttgtaattggaaacctgcttgtatcatatatcgaggattcatacttgtgatggataatgccatgtctcttactgcatcatgcatcttcactttctgatctgaatagctaacattttccaacaagctgttatcctccaacttcttcaaaatagcatggcccttatctttcatttcttgtcttgtatccatttcatctatgaagccttcatcaatccaactttcgattagctcatccttccaaattgaatagtcttcaggatataatgcacaatgtaagaaacaatgcttcattttctcatcttttaagtgattgaaactaaatttcaaacgctcgatcacttcagcttccactccttccactttccctattctctctttcaaatccttgagagcatttttccatatacgagggtcatcttctcctttcatggtaccagctatgacgacaattgtaagaggcagacctgcacattccttgacaacaagcctcaaagttggcattaaagttggactttgcaatatatttggtccaactttattcaagaatagtgtca

SEQ ID NO: 5775 - DNA, 656 bp, Gossypium hirsutum
tcggcaagttcttacaatatggtgttggtgattgccagatgaagctcgtgttaaggagtttgacttgaagcagatgtggaagagtcctaatgggactattaggaatattttgaacggttagcattaatacattcatatctttctagaattttcctattattttgtgatgtttcaatatcagttattttgactggtgtaatctttcaggcactgtctttagagaaccaattatttgcaaaaatgtccctcaacttgtcccaggtatttagctttatcatgatgttgtagatgtatatttttatttagttagttacatttatattaagctatgttgatttcttgtgtcatcaggttggacaaagcctatatgcattggaaggcatgccttcggtgatcagtaccgagcaactgatgctgtcattaaaggagctgggaaacttaaacttgtttttggtaaaatcttttctttgccttgatgatttctgatattcaattgtttgtttttaatggtatttggtagtacctggcgcttgatttttggataattagcatcgattgctattgtttgcagttccagagggacagggtgagaagactgaatatgaagttttcaacttcactggtgaaggaggagtttcactggccatgtataaata

SEQ ID NO: 5776 - DNA, 626 bp, Gossypium hirsutum
catatctaacctcagatccaacagttccaactcaccccagaatcccaaaaagccaaggtcctagacaacatataaccatcctttattgataaaaatcttggaatccctagttctcactctaatgctccaattatatcagatacattagtttgttgccaccaaaaacaataaaaacaacccactctgatgacagtcacaatcgtacctttcattgaccaaatctttacagtgttgtccatcccgcaacttgcaattcgatatatgtctgaaggatggaaatcctacaatagccatcataaacatagcaaacattatacaattagtggaaaatatggaagtagaaaacatagcaaacattatatgacatagtcccgttctccagggaaaagacaacaacacgataactcaatattctctgcacctaccacactcaaaacttcattgcggtgtcccccggctccagcaaatatcagaatgcagattccagtatgaacattccacaatctaaccgattcatcctgctccaatttcaaatgttagccatttgataaagcaaacagttgccaagcaaatgttttgacgcttactttgcttgcagacactataagtgatggtttcagtggctg

SEQ ID NO: 5777 - DNA, 626 bp, Gossypium hirsutum
ctgcctgctacgcatattagctgtttctcccgccaattttggtaattaattattagggtaccaaaaaaattatgtataatatatatttataaaaacattatagggaaaaatagtaaagttaaggatataaaaactaatttatccttctttatatttaaatgtggtttcagtgggaatgatgatggttaattttttaacattatttaatataaaaaaggcaccacaaactatatttattattttgtaagagaacaagttttttaataatttttaattaaattgacagtttaatttattcgtgacacaactaaatcaatagtttaattataatgtagatagatatatatggtgaccgcacatggcattaaggaggtttaattataactttgaaaatttttgaagagttagaattaatttttttaaaaatttaaagagtttaaagaaatatttaatattttttaaaaagtttgactaagttttcaaaagatttaaatgaagtagtgagaatttttaaaattttaaaagtgttgtagttaaaattttaaaattttcaaaattatgggagcaaagattttgttccatcaattctattttaacgggatgagaaaatttactactccttcacg

SEQ ID NO: 5778 - DNA, 635 bp, Gossypium hirsutum
aagttttggaaggggagcttacaggtaacatttggaaaaatatgttaacttaatgtactactgatacctgttagagaaatgattcagggtgaaataactaatatttgcatattaatttgggtctcctttggtggatctattcctgatatctagctgaaagaagccattagataaaagttcttgactatggaactttatgcagatgcatggatattatgtgtggctgcacatatcatcatggtcagggtcattttggcaataggatctgattttcttagatagcttaattgaaatctcctttacattttggtgggttgattgtgtactattttatattaggaagtttattaccttttgtttgttagtaactctcagcaggggtcgggtgctccttaattgattctttgtctgtaactttccaatacacattaatcactgttcataggtatgtgtcacgtttggatcctatgcatatgaatggtggtgatagatgtgctggaaagtaatagatagaaaagtaatgtaggggagccttatcccaagatatgaacgcttggttagtgcatttataaataagctttattaaaaggattcaatggataagagttcaggaagcatggctctgtatctttcta

SEQ ID NO: 5779 - DNA, 625 bp, Gossypium hirsutum
ttgaagaatctcttgctggaaacttatgtcgttgtactggttacagaccgattgttgttcttatgtcaatattattgtcaatattcttaccttggactaggccctttgaatatgtcaaagaatttaaccaggcacatagaagggatgatgatattgccattgtgaatgctggaatgtgtgtctgtctgcaggagaaaagtgaagaatgggttatttcagatgcatcagttgcttatggcggggtggcaccactctctttatgtgcaattaaaacagtatgtgaaggttctatttttgcatttacactattgtacctactgtttccttgaagatagggcttttgtgccttatcactcttctaggaaatgtctcatggtcttttcagaaaaatgtagcctttcttttaaatacctattctttggaatttattctcaaatatgctcatttttataaattggaaaataatttcaaaccgttggtatttaaaataaaggctatatttttataaaagtgacaagtctctttttattagaatttctgaaataatacgatgagatggattcacatttttcttccaggaatagacacgaacataatattactgtttcatttgttccctcttctg

SEQ ID NO: 5780 - DNA, 613 bp, Gossypium hirsutum
agctctgatgcttatatatgataaaatcttgcctgcctacttgcatcactcgaagttccaacaagttatggagattccaaatccttttttcttaacttgttctattatataaaaattatgaacttaacatcaaagcaccagtggtctagtggtagaatagtaccctgccacggtacagacccgggttcgattcccggctggtgcaattataacatttttggcttcattcgctttcttcattatttatatatatttccatatactaaaagagagtatgtattttttgaaatttgtaccaaaaaatgataatttttatttagaagaaaataaaggtattttttttcaagagaataatttttaattgggtagttttgttagagttgaattcttaaaaaagaatagtttaaattattttatttaaatatattatatcaatttttttaaaattggattgctaattactaattagtgtttatattattatcggtatctcctttgagttttattttattttttttgagaaaatttagccgtatttccttcttctacctgcctacttggaatgagagtttagtctaactgaacaaagggtttaatcacaatcttcccacca

SEQ ID NO: 5781 - DNA, 595 bp, Gossypium hirsutum
tctgcattgataaatggagcagtagaactgtgctacagaaacactgttaactctaacatgtctataaatgaagaagatagatccagtaactaaattcacctctctggtgcagttacaaagatatcatcaaactcggaaggttgcaaagatccatcctggtaagttcaaaaaagaagaagaaatacagtgattgtccataaatttgctttatagaaactctaaatatgagaaggaattgtcataaacatttgtgtcttcttatttctgtataagtgataagtatttggaagattaacacgtacattatcactgtcatacaatcggaagatcccacgcaaaaagtcgatagcttcatttgtcagctccacagtctacaggatgtataagagtaagtatattgctatcctcataaaagttgtcatgaaaggaataataaaattataggaagtacaactattcaacaagtaaagaatttgttactgggacatacagaaaagggaaggcggggggggggggggatttatcaatgatgcagtaaagtagctaaaacttcaaaactagtgatacatgcaacattaaagctccatatttcctt

SEQ ID NO: 5782 - DNA, 650 bp, Gossypium hirsutum
  misc_feature (644)..(645): n is a, c, g, or t
tttgtactatgccagaaaagaaccggtacctgttattgaatgcaaatacctgattgttttaactgcttagttttcatatttgattatgatgattgggaatagtacaacggctacgtagttatgaggatatgatagttgaaaatttaaaaccttttgaacttgacagatatggtgggatctaagttattgaggaatatgggaaaaaaaacctacacactcattcactaaacatgcagatagaaacattgatatatactagctccctttgcaaactagtttgggtgcatgcactacaaaatatcttcattaagaatctttgttaacttaatttgagatgaaattgctttttggaagatatatatattaatgttcttcatttctaattaaccctcttaatttcagattggttattgatagagaaactggtaaaccaaaaggttatgggttctgtgaatacaaggatgaggagacagctctaagtgcacgaaggaatcttcaaggttatgagatcaatggccggcagttgcgagttgattttgctgaaaatgacaaaggctctgatcgaaatcgagaacaggtgtacccttttttctgcatcttttatttttttcatcagggtgataatttagcaccgtcatagttcnncttct

SEQ ID NO: 5783 - DNA, 589 bp, Gossypium hirsutum
tccagtttcaagaataatgtaaatacaatctgaacaaatgctctatatattttgaaggaaaatgatgaaaccgttcagggtaaagggcgcaagagagccggtcctaggggaagaggtagagggtctacatctaagcgaggaaggaaatctgaagactctttagttcacaaagcgctcatgaacaagcatgatgatgatgaagaagacgatactgaagagattataaggagatttaacaagcctcaacctcgggttagtgattgttcttctattctttgtttttgacagtgtcactttccgcaatttctacttctaaattacaaatatttccactcgaaacttcaccgtgttgttggactcgccaaccgaagtttgaacctcttccttcatgtttcttaggtaacaaaaagttatggtgccttgagaagataaaagtctcatcacgcttccccaacctttgagcatcataacaccaacctagatgattatgatgataaattgaaaagcaacacaaatccagcagcaaccttgagacgtgaataatttttaagggagaaataggtacagatgatatttttaagtggtaggc

SEQ ID NO: 5784 - DNA, 651 bp, Gossypium hirsutum
catttaccaagtcaaaactacaatttcggtcaacaccatgtgtttttcttggttactcaccttactataaaggttataaatgtagagattccagtggtaaagtctatgtcacccgtcatgtcaccttcaatgaaaatgtttttccatacaacacttcttttccagcaactacatcacctactacacctactccacatgtcagtgctaagcttttagttctacctacttcccatgaaccgtgtccaagtaccctacctacacttccacctattaccacatctacttctactacacctgtcctgtcacaatcaatatccaccccagatactttcacccataatgtcccacatagtcaacctactacatccacatcacctatgtcaacttcccaacaacaggttacttctttacaacctgcgtctatgacatcgttacctcaacaaccagtacattcacttccacatctacctattaacatccataaaatggtaaccagaagcaaagctgggattttcaagccgaaagcataccttagcatgacagattcttcatccagcgatgatcctcctgacattcatacagcaatgacatttgagtgttggcagaaagcagtttacagtgaattacaagctttgactcgcaataatacat

SEQ ID NO: 5785 - DNA, 457 bp, Gossypium hirsutum
atattattttacttgtcattagatactaatatatcatattaattatcgaattgttacttaaaacttactaattaggcttaaaaataaaactcaacttctcaattacttaaataaaaacttttaaataatttattaaccattttgtaacatttttaaaattgagtgactaaaacataaattcgctaatagtatagtcaatgccaaatttacccaaatttttaaaagtcaatgccaacttcaaaaaaagttaaactgtacttttaagtacatgtactttcaatatatttaaaatttagtttccttacttttattttaagaaatttaatctctttattttttaaattttaaaatggaagtctaattgttattagtattaaatttttttattaaattcagatttattgcaatattatttttttcattacataactattaagcagggagaagcaagaaattt

SEQ ID NO: 5786 - DNA, 629 bp, Gossypium hirsutum
cagaaggctgaacctttgtttgctgagcaagggaagtggcaacatgcacaatatgtagcttgtatactgggcttcttcagaacattcttgtgatcaagatgctttattaagatggacagtagaaaatgtgtgttttcccctgtagaataatacaaaaatcaacaaaattcactcaaaagatgacaattaattttaatggagacaaaggctgcttaagtagttttgaaaggcagcgattcctatcaatactgaagaagtaccgcagttttcaattatcaactgcatgtcctgcaagacagaaagagctaccccatcctggatagaccacagttcctcattatcaaaaaatcgaaacaaagattccaagacacgtcggacagttgtagcttccttggctaacttggccatattatgcaggcaaactcttgaccaaaatttgggattttctgcttcctccctataatattaacaggggaaaggggactgaaaattagccattaagcattccctaagtacagaaactactacaattgaaaattgacgacaagagcaattacacaggcacattaaattctccattctcagtcacaatactcctccaagaaagtgttgtaatggcatctgtggga

SEQ ID NO: 5787 - DNA, 581 bp, Gossypium hirsutum
tactttcatatacatacagtgtttttattgttcttctgatagtattctcaatcaatcacgtgttgaacttgttaagtctaaaaaaaatatacaattttatcttttaacgttcgttcccatgacaaataacgtcgagcctgctcttcctgtgatgacatttcatggtgcaatattttttcagataccttcctggaccagatgacatgttagttttggatattgcatacacaatatatcttaagtttgaggaattcgcgagtgcacttcaaattgcactttcccttgacaacatgcaggtttgtttcctattatgtttttctcctttcttgccatgcagcattgttttgcaaatccttttcaggatttcagttttaaattgatttttgtattaacaatttagtatgtgctctttcagcatgtgagacaggtgtttagatcttgtgataatcagctaaagaagatgcaattttgctacattcttgctcgacatgtaagtacgcagcttgctttattttgctttgttgtgctgaaagcatctgtaactgtttgttgctaagtatgtcgttagtttatattttctt

SEQ ID NO: 5788 - DNA, 578 bp, Gossypium hirsutum
tacttgtaagtttgttcagaatcataatctcatatatcatttattcactcatcttttataactaaaataaaagaaaaccttatctgctatgctagttttgaatatttgttcaaaattttaacattctatcgttcatggatacggattggagagtgaatagaatcaatacatgggtttcaggtccagagtactgtccattatggttacactctttgtagcaccgttgagcttgttaccaagacgggttttgaggctaatttctgaactttcgaatgggaattcatggtctaatactgcccacgaagcttgttgctctcacttaccacaggtcaagtcctgttaaagtgcagttctttctgattataagcagtatttctttcttttctgggtctattcggaccctcagtacagattgccctaggggactatttaattgtattcttgcgtgtatatatgtgtatattaaaatcaagtgcttgtttaatattgaaggctttaatttttgttttacatatttttcatttgcagtatcataccatacgcaatgtgctatatatggccaggacggagtcataaag

SEQ ID NO: 5789 - DNA, 642 bp, Gossypium hirsutum
tgatgcacggaaattttagctcgagttttctgactgctgtttctattcacatataagatagctggaatggatggattccaatctctgatgtttcttgtgaaagattgtggtggtggatcatgtatatagttacacatttactgctagataactgttctctttggtcataacaaatctgttatatgtctcataggtgttgcatgtgacttgattctgctgagaatttggaatgaactagatatttttgcccccaatttagcatgttttgttcgagtttttatcggcacctggcaccgtacatcgattctccttgcaagacttgataatgttgttgattcttaactttgtccggttttttcgtgctacgaaattctcttttgaggtggtatatttggggttaaattatttagtggttgaatttttttaatttattctcgtacaattatttttggggcttgaattttttgtccaagttggtcactgaatttagatgaacttgataattgttctcatattagagtctgaattttagggctttcaagaaaatattaaggacttgaaaaaataaaagttcacgtcccaatgtcaaaataattgttaagttcaagtcttaacctggataaaagaagagaggttatggtc

SEQ ID NO: 5790 - DNA, 620 bp, Gossypium hirsutum
  misc_feature (552)..(552): n is a, c, g, or t
gttataaaagccccaaatatttttaaaaatttcatttcagcattctccaaaaaaaaaatttaaaaaacccccccttccccccccccgcttggggattcccggccaccgaacggacccccggaagccggggccccccccccgccaaccaccgaacaggggggccaaaaaaaaaaaaggaaaaaatttttatttttatttttttctatttttatataaaaaaaaacaatttttaaaaaaaaaaaaaaaaaaaaggttggaaggggaagccaaaaattgaaaaaaaaaggaaaaaaaaaaggaaacctaaacgcgttgaaaccggtttttttcctccaacactggcttcttttattttggtatccaaaaaaaggttgaaaaacttggatttaacttccccatttttcgaattttttttaaaaacccccccaaaaaaacaaccggtccccccccccaatttttatccggggagggtttttttaaacccaaacaaaaaacataatttaaccgtaacggtttggctccccggcttcctcctggttggcggcccccttncccaggttggcgggtggcggggggagccaacaaaaaaaaaaattcctccttgggggaagggccaaaaa

SEQ ID NO: 5791 - DNA, 600 bp, Gossypium hirsutum
tttttgtccaagtttgactcggataaaaacacaaaaaataataaaacaaatatttctcaacaaattaaatttttttaaaaatattatacttaaataacactaagacgaataacaatagaatagttaaatgacagcaaaacaatagaaaagcaacaacaaaacaacagagtttctttttacaaatttgggccgagctaaacccaagcaaaaaaacttcacctgagcccaaaaaactggtattattttctgtccgaacctattttttaagtttatatttttttttaaatcttcccacttttaagacggatttttgggttgaaccaccagatccaacctaagaacaagtctagtattgagtatattccctcaaaagcgtgaaggagtggattggaatgttgttatctaaatcaaattgggcctacggcatgttgatacaataccaacaagtagctttctccattttggaaatgggctaagctggtcactgcccaaaacatatattcatacatcagaattaatgatttacttattatttaatatgaaccaaaatttatgataccatatgcggcggacgtgaaggcttaggcggcccaaagaaac

SEQ ID NO: 5792 - DNA, 603 bp, Gossypium hirsutum
  misc_feature (580)..(580): n is a, c, g, or t
  misc_feature (583)..(584): n is a, c, g, or t
attattgccactctatgtgtaatagggcttcttcctccataaaagctctctccacaaaagagttcataccagctctccccattccaagagaaagggaactcaggtggcctatcaaagctccaagctcatgaaaccctttaaaacctctgatttttaatggttctcaacatcatttctagtataaatcacctccatttttagcagttcaacgtgaattatcaatcattttataatagggagagggatttggatttgaatcatgctatcaaaggatgctgtaccaatcaaatgctccattgccattactcattaacagaatgaaagtaggaatcggagatttaattcagttgatctataaaaggtgaatttcgataggatatcgcttcctttgtacaagtgaaataaaaaagtaagtttttattggataaaacaaaactgtggcagaatacttctttgatacaatgcattaaaaggaataattaaataatataaaatagatattttaactaataatatttgcccattttataactgatagaatcatatatatttctaaataatatatgattttcatataacntcnnatatttaaccatgcacgta

SEQ ID NO: 5793 - DNA, 557 bp, Gossypium hirsutum
aagagccaaaaaggctaaaaatagcctttcaaatttgttggttgcacaacattccatgaatgaatttggtagaattggagttataaaagccaaccagttggtatgtaaatgagatccatttaaaacaaaaaactaatttgactcggccattgttatctattaagcaagagtaatattgatggattttcttttcatttgaaagcagcttatcaagtgtgatttgtcttgagtttgtgtatccttgaaggtttgtctttcacctttaacaggtcggtattgttctacgtgtttaaataagtgttatacgtaacggaagtgttttatcaggtgattgataaggtgactcataaaaaaattcatgggtatatcatagttgctattacctgtataacaagtataacaatatacaaaatgttaaatttctcaaaaattaaataattaaaacaatgaaaacactcacttataataatattaattaattaaaaattaaggtaataaaattgataaaaatgtaatagaatagacatgttaagttttttcaacaaataataataata

SEQ ID NO: 5794 - DNA, 612 bp, Gossypium hirsutum
cggagtgtttctcgagtacgttttctcttagaagcgatctcatcaggttcttgtaacatttcttgaaacaggttttctctgttttggatgataagacatacaggacactcaaaggtcaacaaagagattatcacagggataaataattgaaatcaagtcaaatgacagaaagctttatatcacctgtagagctttttgataaagacattgtgaagttcacgttttgtatggtttacctggacatcgatatcagagatcactactcatgtaatgcttcagcttagcaatgcaaatattgcaccataaactatcattagaaagacatggcttatacggttatatttacaaaattacaacagtttcaggttccaaataagaaataaatgaacaaatttcaaccaactagctagctccatgttacagaagtcaaactggatacattcacacaatcacgtaattcatcactgttctaacataactaaaatacatcaaccacagaaaaaagaaatggtaacctagttcaaattacatgatatatgctccactacagatcaaaatagttgaggatagaaatcaacatacttagcaccaaatattgtttacatcaagcca

SEQ ID NO: 5795 - DNA, 486 bp, Gossypium hirsutum
ggtctgcataaaattacagcacaacattaggctccaacccagaaggaaaagtgatttcaaacctgaatgttgaacgacaaaataagcaaatctatatcaaaatcatttcgaaaacattagcttcaaattcttttaagtacatgctgtgaatatccatgggtcattcaggcagttgtaattattaacaagagaagcttacatatcacttttttattttttttttaaatcttccacctttttatgtttcaaaagtaccattaggatggttctaatcttcgaaattgtagcttgccaaatagcctattaggtagaaaacttcatacctgaacaggatatgtagtcggataagcaccatacccagcactttgtggaactgatgtgggtacttgtggagtagcataattgctaccataactaccatacgcaccatatgcagcctacaaataaataactcatggaacagtcaatcaaaacattacattgaca

SEQ ID NO: 5796 - DNA, 659 bp, Gossypium hirsutum
attactactattttttctagacctggcaatacatgacacagatgcatgaatgtttcaactccatttaacatgaattattaataccacaattcatacaaatataaaataccttaaaacaggattatgacacagtaaaatacactataaaggtctattaccctccataggatgaagtgattcatgtgaaaagcaaacaaatctcgccttcccatccctaaccatgttccctatcttccaaatacggtttgcaaaataccctcaaacttcgaatgaatgagcttccatattattatttcgcaaatattcaaccagggtttacagattggtatttttcaccttcaaaagaataaatttactattatttattattaccaggataatccaaaaactgcattgcagctatatatatgacagacatgctagtttttcattcattgtattgcaaaacgattttattttcctagaaggatggccacgctctatttccatttttttttcacttctccatgttatgtttgaaggaaattaggccataaaacttgagacataacaaggaatactcaagacagagatgcttcgaatcatataaccaatgccatccaaaggtcaaagttaaataacaggctaatgtattatcctcaggtcatgtaaacccgtcc

SEQ ID NO: 5797 - DNA, 607 bp, Gossypium hirsutum
aaacagcaacaaacaatccatagtttttaagtagtcgagtgtttgaataagacagtcttaacgttacatagtgggcttcattgcacactggcttttgccctatattgaattttgcttacaagcatataagtctatgtttgttgttatgtgtatcctcttacgaatgcaattgtagctttccttttgcatggtaaatgccagttcttgagggctgtaagaaattgatctcgtgtgagatttgataggttaaaaagttttagcatgcattattgaattacaacatttgatatcagagttaacaaattgattgtgttcatacatggaacgagacaaacaattacttgtatcttttgtttttctagtacaaaattgtgagatatttttagctttttgagtgtgaaattcaacagattccaagtgaattatgaaaattggcatcagaaccaatacattgattgtgtccttaccatctttaaaaaaggaaaaaaaaatttctttttcgtcaaaattacttgaaaatttactcttatcatgattcatgacatgtacaaaaggaaaagatacactattgatgagccccttcttgcttctcaatgaatcccttatc

SEQ ID NO: 5798 - DNA, 643 bp, Gossypium hirsutum
  misc_feature (15)..(15): n is a, c, g, or t
  misc_feature (636)..(639): n is a, c, g, or t
tgtagtattttctcngtacattttctttattttatactctctacttttaggctcatcaattgaagctgtttttgtttgtgtccagtaaagaagtatttcatccatttctagaggctatgtaattcgatcttacttttttctgctgctgttttgttagttgtactcgtcgcattttgtggtgcctcctatttgaaaattgtgaagtctagggatgaccaggttcctacagctggtgattttcttgctgcctttcttccactggtgtgcattccagcactgctatctctttgctctggattacttaaatggtttgtagtcttcctgaatttagcaaataatgaatgcttaaatcccaatatgatgtattgtttacatgatctgttttttacttattgtcgaccattatttttcattatgcaattcatgttattatgcaggaaagatgatggttggaaactttctcgtggtgtatatgtatttgttactattggtcttcttcttctgcttgctgcaatttcagctgttattgttgtaattaagccatggacagtaagtgaggcttatttgagtgtccttgatttatatcacactcttatatatatatctctatatcatctgtggtgtctctcgagaccnnnnaaaa

SEQ ID NO: 5799 - DNA, 644 bp, Gossypium hirsutum
aaatcataggcaacgaccttcatttgaaagaacataaagaagtgtatgagcagtcacaaggcaaggatctaaatgcactgacataaactttcaaaaatatttctcactctgtaagtctcctgatctcttccattggagttgaagtcccaatctgattttgttttatcaacccactcataagaggcattgcaagtaacaccacttattaaatcaattcctacaaaataaaaagaagaatagggatacatagggacacggctgaccttctcatttgaaaatgcttatatctttcagataggatacagctattcttacctacaatgtcccaggaacgtgacatttccaaaagtacctcatcacttctagattgttcagtgctcaaaaccccaataagacttccatcttgcctcaatctgcgggttattgcgcgcgtgtcaacatcgtctggcacattacaggaaagcatcaaggtaaggaggttagaaactatgcccaaagaacaaactaatttgtcattagcatgtcttctaaggttaagcaatccacaaactagttattcagttcagtgccgtatatacaacttacaaattcccataatatttctttctgctaaataatcaccaagggtctccacacatctccaa

SEQ ID NO: 5800 - DNA, 605 bp, Gossypium hirsutum
gtgacaaatttgtgttcttcatcggtttcttcagtaggatggccaagttgtaattatttaccttcttagttacagatagctcttgttccagggtgccgaccctgcttaaagcagtattcaacatctcctttttctcgggtggcaacgttgctggtttatcggcaagtacagtcaccttctcttccaattcagccatgcgtttcatcatggcaaagatgtcagcgtcattaataggtggtgcttgttgagcggcagggcctgtgatcattgggttagcatagtaaacttgaccaccatacaaaagaggttcagtcagtctcctaggaattttgcgggacaagcgaaccagcgctataattcccataatcaaggccacaattcctccgaaaatgttggtgcccattccttgagtagccatcctaacatccttcgtctggtaacaatctacagttttgggaaaaaagggtcacaaacgaatggtgttattgctacattctttaaaactcaagaaaacgtactcaaatgcaaaaaatctacctttggacatgccaaaattttcagcgttaggccaggaaggatgtacacccttgtcaaccatcggcata

SEQ ID NO: 5801 - DNA, 659 bp, Gossypium hirsutum
cgacttgtaccaatagttgtgtcggtagaaggtgcagggtagaccaaaaattgctcattgacttggttgtattggtagaaatccccctaagtattggttaaagtctgatgcttggcttgaaaggctccgacttacttctaccagtagaactcaacccaagtatcaatacaactggagttgtatcggtagaagtctgggagaaatcttggggtggtctctgacttggttctactgatacttttatgtactttctactgatacttctatgcacttctattggtagaagtgtcccaaagttgtagaatttgacttgaaacaatatttttctaaggcattttataacttaaatcatttgatgagtttacaaacacttgaaaataaatttacaagagcttatattaattgattgcaaagttggccgaggagaatttataatttgactttgttatatcaaaacatttgaaaaagtagggctaacgtatagatatacgaatgcttatccctctggtagcggttgtgtcttttagttggtatatatctgtgtttttattaatacttttaaaattcatgtgtagtagctataaagaatgatattattgtaaatagcctttctatttaccaggaaaagaatgaaatctttcacagccaatttggagcta

SEQ ID NO: 5802 - DNA, 840 bp, Gossypium hirsutum
  misc_feature (611)..(611): n is a, c, g, or t
  misc_feature (633)..(637): n is a, c, g, or t
  misc_feature (639)..(640): n is a, c, g, or t
  misc_feature (642)..(642): n is a, c, g, or t
  misc_feature (651)..(652): n is a, c, g, or t
  misc_feature (654)..(657): n is a, c, g, or t
  misc_feature (686)..(686): n is a, c, g, or t
  misc_feature (688)..(714): n is a, c, g, or t
  misc_feature (716)..(720): n is a, c, g, or t
  misc_feature (722)..(726): n is a, c, g, or t
  misc_feature (728)..(739): n is a, c, g, or t
  misc_feature (741)..(743): n is a, c, g, or t
  misc_feature (749)..(757): n is a, c, g, or t
  misc_feature (761)..(765): n is a, c, g, or t
  misc_feature (767)..(767): n is a, c, g, or t
  misc_feature (771)..(777): n is a, c, g, or t
  misc_feature (785)..(789): n is a, c, g, or t
  misc_feature (791)..(796): n is a, c, g, or t
  misc_feature (798)..(813): n is a, c, g, or t
  misc_feature (815)..(819): n is a, c, g, or t
  misc_feature (824)..(827): n is a, c, g, or t
  misc_feature (829)..(829): n is a, c, g, or t
  misc_feature (832)..(834): n is a, c, g, or t
  misc_feature (836)..(837): n is a, c, g, or t
gcgcttatcctcctatttaagggttcgagagtggctatggataattctagacattgtatcaaaaaacaaagattaaaaatcgtaatattacactcatataaaatgaaataaataaaaaattattgctagatatattaaataatttttcaataataataacaatatatatgatttcccggaaattttgaggaaagagcttatatcaaataaaataaatattttttcatcttttttattttagtgatcccagaaccgaatgagcagaaattatttttggattttttgaagttatttaaatattatatacattttatattttctaaatatatctataatttcataaaatgaattatgaagttttagaattttttttatttttaaaaaattctttaaagctattattaattttttgaaaatattatttagatatggtttagaaggcaaataaaatataattatattaacgaagtttaagaaactcatccgtacggatccttaccatccctaaccaattaccattattaccgttaaaccaatacaaactcttataagctaaatcttctaatcgatatttgtcctaaagagatttatttaagtattccgttaaaacnacaaagacaacagggactgacnnnnntnntncgagcggannannnnaggtatttttgcggcgagtgaggttacanannnnnnnnnnnnnnnnnnnnnnnnnnntnnnnncnnnnnannnnnnnnnnnncnnnttttcnnnnnnnnncttnnnnnantcannnnnnnaacccaannnnnannnnnntnnnnnnnnnnnnnnnnannnnnccacnnnncnaannntnnaat

SEQ ID NO: 5803 - DNA, 651 bp, Gossypium hirsutum
ttgtcttctgattttttttttctcaaggtgttttcttgactttaaaatcatggctattttagcagctgattctagagaagttgatgaagcggcagcaaaagagtgggagcacacacttctacaaaatactatggacaaagagttgcacgagttgaatagacgcttgaaagagaaagaggtatatttttatgtcttcaacacttatgcaatattgttcatagttattattcacaagtcatattcttaggggtctctattcttgataagtatatagcatgtctggttttagcagacttggcaacttatccaacactagctaattctcctattttatgtttgagcagtccgagatgaaactttttggaggtgacacaattgcacttaagcatcattttgggaagaaaattcaggaattagaggacgagaaaagagctgtgcaggtttaaacagacatcttttaattctcagactttactcgaagaaaaaaatgcattctaacatttcttaacctatttcctcccttcagcaagaaagggatcgcttattggccgaaattgaaaatctttctgccggttctgatggacaaaaacaaaaagtacaaaatatccatgctcaaaaactaaaatcccttgaagcacaggggacatttaa

SEQ ID NO: 5804 - DNA, 627 bp, Gossypium hirsutum
actttgatttcttctgtaatatatatataaactctgtagtgggaagtttggcacagtttcctgttaagatttgttgtattattggggaaacatgtttgggaaattcatgaaaggttgagttcggagctcgattattctgcacattttattataaaggcctttcttttaaagcaaattgaggtcccatggccataccataccatggactgtcttatttattcatgtaattgcctggtttatatcaaaacgttgagaaatcttcttgtttttttctattaatagttgatgcgtgctttttgtttggttaaatttttctattagtccttgcactttataaagttgtagatttagtcccaatactttaatttggtatctttagtctttttatttttcaaattttaaaatttcaattctcaccaaatgactgttaacttcattaaatcaagttttactattatcaaaatttgatgtgtcaaaacatataatcatatgtgtaatgtcatgctagcttgttatttctacatattactcactaaaattttagttaatggattaacaattattatttgcgttgagattggaactttaaatttcaaaaggtataaggacttaaaatgatccggttcg

SEQ ID NO: 5805 - DNA, 630 bp, Gossypium hirsutum
cagtagtggtaagattagatactatagcgatactgtaacgtgagacaaaaagtaaactaaatgcactacaccgcactcaattgtccatccaaatccaccctaaatggtcgatgtgttaactatttagcagaattggcttaaatattcaatgtgagctcgtaatggctcgtctcaaaccatttttgcaagttgaatattgtgtcaaatttaagaataaataaataaaataggtgatattcttttgtataaaataataatggtattgtttttataaaattcgttggttctctcaaaatcttttgacctcttcactataaaaatggtacgtgccaaagacgaagtctaatatgattttattcccatttgatgatgatattattaaaaaaagaatcactgaaatccatggccagtagtttggatccttgaaccactccacaagttaagtaaataaatcacatataaacatcaatcttagtaaaagttggtttatggacagtcaaataacgagatatacatatttttataaattatgatttttattcaaaactcggcttgctttgaaaatgcattcccattcccatttgcatgtgcaaatgcaattaggtgcggacatcccccctcacccattag

SEQ ID NO: 5806 - DNA, 889 bp, Gossypium hirsutum
  misc_feature (219)..(219): n is a, c, g, or t
  misc_feature (235)..(237): n is a, c, g, or t
  misc_feature (243)..(243): n is a, c, g, or t
  misc_feature (246)..(246): n is a, c, g, or t
  misc_feature (259)..(259): n is a, c, g, or t
  misc_feature (264)..(264): n is a, c, g, or t
  misc_feature (270)..(270): n is a, c, g, or t
  misc_feature (274)..(274): n is a, c, g, or t
  misc_feature (280)..(280): n is a, c, g, or t
  misc_feature (510)..(510): n is a, c, g, or t
  misc_feature (873)..(873): n is a, c, g, or t
gtttgcccttcaaatagatttaaaatttaagttaatcgagtaggatgactcttttttttttttaaattaaaaaataagataattgaggagtgtcattcgttccacgcatttattgatgactatttgacgttgattcatgaagactaagggtgagtttgaatgaacagtgcgtttacttacggttagtgtaaaaacagcagtagtggtaagattagatantatagcgatactgtannntgaganaanaagtaaactaaangcacnacaccncacncaattntccatccaaatccaccctaaatggtcgatgtgttaactatttagcagaattggcttaaatattcaatgtgagctcgtaatggctcgtctcaaaccatttttgcaagttgaatattgtgtcaaatttaagaataaataaataaaataggtgatattcttttgtataaaataataatggtattgtttttataaaattcgttggttctctcaaaatcttttgacctcttcacnataaaaatggtacgtgccaaagacgaagtctaatatgattttattcccatttgatgatgatattattaaaaaaagaatcactgaaatccatggccagtagtttggatccttgaaccactccacaagttaagtaaataaatcacatataaacatcaatcttagtaaaagttggtttatggacagtcaaataacgagatatacatatttttataaattatgatttttattcaaaactcggcttgctttgaaaatgcattcccattcccatttgcatgtgcaaatgcaattaggtgcggacatcccccctcacccattagccaactctggaaatgtgtttccactcttttttttttgtccatttangagaaagaattaaaac

SEQ ID NO: 5807 - DNA, 633 bp, Gossypium hirsutum
aaaattaaatcaaacttgaataaataaatatagggaatttatacatgaattttagttaaatgtgcaatttgatacattaacattgttttgatccaattatacacataaaaattaatttttagttcatatgtatacatggaacttgaattatgattcaattatacacattttaaaaaatgcatacatttatttacatattgagttaagataattatttgtatatgcaacatatcatcgtaaaatagtgctagattgataatgttgttattgatttgtagaaattgaatcaaagcaaaattttatgtataaaattatacaaaattaatattcatatgtaacattatacattaaatcaaaattcatatataattattatatttatcccataaatataatattacaaattctggaggagcacttgtgagtaagaccacgaaatttttataatcttcgattatactaaccaccaacactgactaacaggaagaatatataaataagtttcacgtcatcaattgcggggatagctcagttgggagagcgtcagactgaagatctgaaggtcacgtgttcgatccacgttcaccgcattgtttttgggctctcttttaatggactcgttctctgcttaat

SEQ ID NO: 5808 - DNA, 879 bp, Gossypium hirsutum
  misc_feature (231)..(231): n is a, c, g, or t
  misc_feature (271)..(271): n is a, c, g, or t
  misc_feature (279)..(279): n is a, c, g, or t
  misc_feature (424)..(424): n is a, c, g, or t
  misc_feature (435)..(435): n is a, c, g, or t
  misc_feature (539)..(539): n is a, c, g, or t
  misc_feature (594)..(594): n is a, c, g, or t
  misc_feature (610)..(610): n is a, c, g, or t
  misc_feature (613)..(613): n is a, c, g, or t
  misc_feature (741)..(741): n is a, c, g, or t
attccattactgaatttgagcaaattttagtttttataaaattactgatacttctttattgtgttgttaagtttggactgcctattatagattttagaaaaaaattaaatcaaacttgaataaataaatatagggaatttatacatgaattttagttaaatgtgcaatttgatacattaacattgttttgatccaattatacacataaaaattaatttttagttcatatgnatacatggaacttgaattatgattcaattatacacatttnaaaaaatncatacatttatttacatattgagttaagataattatttgtatatgcaacatatcatcgtaaaatagtgctagattgataatgttgttattgatttgtagaaattgaatcaaagcaaaattttatgtataaaattatacaaaattnatattcatatntaacattatacattaaatcaaaattcatatataattattatatttatcccataaatataatattacaaattctggaggagcacttgtgagtaagaccacgaaanttttataatcttcgattatactaaccaccaacactgaataacaggaagaatatanaaataagtttcacgtnatnaattgcggggatagctcagttgggagagcgtcagactgaagatctgaaggtcacgtgttcgatccacgttcaccgcattgtttttgggctctcttttaatggactcgttctctgcttacttttaatgngcaaataaaaacaaggctcagtttcagtggagctctgtctgcccatcaaataattattcacattgatattttttaaaaacatttcgattaattatcatatttgacttttctggattaattaaaactaatcctatgttg

SEQ ID NO: 5809 - DNA, 682 bp, Gossypium hirsutum
agattattcgtcgcctcggtacctaatgtttctgaacccaacgcagtaaaagaatcagtttggattgattcgggtttatgcgaatcatccgaaccaatagccgaattgcttgtaggattgtcttgagaacgatcagcttttttccccaagaattttgttttcaacattttcttcttgaatcgtgatttctttggcttaggagccttcacagtcgtctcatcaggattgctagctgtctcgattgccctctttctacaaggaataaccgttaactgagagttgccaagtgccctatcagttaattgagatgtactcaactgaatagccagtagagcaactctagcagctttgatctctgcttcttttttcgttttcgctgaagctccaatataccgaatgcctcctatctcaactgtacatgagtagtgaggcaatcgacccgttgcttcatccttctgaatctgataaaccggaatagcataattcatcttctgcgcatactcctgtagtagatttttgcacaagcctgtctcgtgctgaagcagacatcacatcgaaactcattaatctactactccaaaaaacttacaacaaaattatattacttatcattgcaagctacgaatttcaagtatgaagtgcagttcataattgaaaatgccaccactaaatggatctcata

SEQ ID NO: 5810 - DNA, 619 bp, Gossypium hirsutum
gctggtaagcttcttcatcatcgcccttgagctcgacctgtccccgaaacggcttgaatccgtttcgaattcctgaactgaggccttgccttcaagcatgctaaccacggaggacattgcaggcctagtagctgcattgacatcggtgcataaaaaagccacattgatcattgtcattacttcctctttgttgtaattagatcccaatcttggatcaactaaacccaataaattcccttcctccttcaaaacatgaacctgtaaaaatgagaggaaaaatattgagttgaagcaaacaaatatccgaaatttaagcttagagtgaactataaaatcttaacattacccaatcaagaagatagaaactttcttcctttggacgataattcgtgttgctccgcccactaacgatttcaagtatcactattccgaaactataaacatcagctttatcggttaagtaaccacgcattgcatattcaggagccatataaccactgcaatgttaaaagcattacttcagtacatataagatctaaaggaacatgttcataagcaattatgacagtgatgcttactaagttcctgcgactcgggtgctaatgtgagtgttatcctc

SEQ ID NO: 5811 - DNA, 624 bp, Gossypium hirsutum
  misc_feature (617)..(619): n is a, c, g, or t
tctatttatatgttaggcctattttattttaaaattaaatttaaatagtccttaaaagatataagagtaattaaaataaatttaaatagtcctctaaaattctcatttaaattattcaagatatctttcaaaaaattttctcaagtttagatttagaaaaactttaggaaattttttgagggatatatttgggtaatttaaataaaaattatatatattttaaatttttttgtttttaaaaaaataaaaaaaaatgagaagattttatttttattattcttatatcttttatgggctatttaaatttaattttaaaagaggataggcctaacatgaaaataaacccttttatctgcaaatctaaaattgaaaactccaacattatatgctttataaaaaagctagaaagggaagagaaacaaactatacataccaagtcatctggtcaagtggtagattaacgtcggccaccacagacatagtatcaagatgatttggaacgatagtggccacagggatagtagcaagatgatttggagccacagtgacacggtttcttcgtttgatgtaatcaagcatgagcttgaacagaaaaagaagagagaagccggcaagcnnntcaat

SEQ ID NO: 5812 - DNA, 599 bp, Gossypium hirsutum
atctttgattgtggttctcaaagtgcagatgcaatcaaaccaaagaaatggcatcgaaaacccaccaataccaaaaagtttggccaatcaatctgttctaggagggggatgcaaaaagtaaggacgcatttgttcctccaaagccaaaagaattagacaacgcagctctaattggcatttccttggaagcagtcaaaggcatgaaagcatcattaaatatgggatcaggtttagtgagatttagtgtcaaaggtgcaatcccctgcaataagacaccactacaatgatcatttactgcagtttcaaactttctcaagtatactaaacagaatcttttgtaacgttaattaagcacgggcaaaaaaatgggtagatagggatcacaaattggttcatacaagtgggaattcctattgaaccatttcaaaagctttttgaaaagctatgtcccaccaataagaagaaaggtgctttcatttgaataattaagcagcatgttaactgaaatacttacatggtgtacggttaaaacagaaaaaattgcttcaacagctccggctgcaccaagaagatgaccgacagcaccctgtgtatgacgg

SEQ ID NO: 5813 - DNA, 663 bp, Gossypium hirsutum
gatgtccatatcaagagaagcagtccattttgaaagcttaaattccgtgtcttggctgaaccctgaattaattccatacaccttttctcactaataacaaagccaaaaccattgactcaaagaccttgttggtgttgacttctttgttggttgttccattcttcagcattttgtttttgcaagttggaaaaatcagtcctacagtcataaaatccaacttatcttcatcctctcctctcttttctccattgcttacctgtctctttaacaatccctcacaattctgaattcagtatttctactgttttgtagacaacttttattcatgttcgatcatttatttataagttttgttcgtgtttgatttgcgctcattaaaaatttcaaaataatcatatataaatatatggtaaataaataaaataaacacacaaacaataaaaaaaattattaatatataataaacaaataataaacaaacttcaaatgaacataaataaattgaacaaagttttgttcgtgtttaattcgtttaacaaatgagctttaaaatcttattcatgttcatttattaaacttgataaaggaatagaaatcgaactggtcattcatttataaccctagatatgctactacgtcgcagtggagagtgagacttggata

SEQ ID NO: 5814 - DNA, 649 bp, Gossypium hirsutum
tttctttcattatttcaaatggatagtattatccgaaacagaaaaaacccctcaagttgaaaatgctactagtattcaacaagaaaagcagctaagcaagcttaatacatgaaagaaaacaaaataaaactccattaatggaactcaagttgctataatagcaaagaataacccagttcacattttcagaaaagaaaacagaacaaccagtagtgaaagaaaaaaccaacatccaaaattcaaaatttggatacaaaaatgggtttaaaatggaaaaagaaaagaaagaggaacaacctgaagagatgaatagttaccaatgcgaagaattctgccgtcacgaatggccatggaattagcgaaaggaaaagaagggtcactagtaaaaatgaccccatttttaactatcaaatcagcaccaaacttagttgatggaatcagtgaagctctccatttcaaccaatctgggaaaaaaaaagtgaagttaagcagtagaattttaaggagttcccaagttcatgaattgtaaaaggaagtggaaaatgagaagaatttgaggcaataaaaggattaggctttacttacaagtggagttgaacgatggaaaaaggaaaacggaaaggaaaacggcaatagaagctaagttgac

SEQ ID NO: 5815 - DNA, 643 bp, Gossypium hirsutum
tgttccttgcgctgctctacaaagacagccagaaactgacatatattctgtgaaagtacccatttccaagtttaaaagcacaaagtttctccacaaattaccatctcaagattagaaaagtcagggttcccaagggtgaggccatgaaaatgttcttcacaccaatactccacatacatcatggatgtaaagtaagagccacaagtctataaaatatacaaccttgttacaaagaaaaccacatataattccaaagaaataaaataaaaaacatatggaaacaattaaaaggaaatgaagtgtgaagattcagatactcacaattgctgacctagctacaatgagataatcaatagaaagccaatatacctggcaaaataatacatacatctcaaaaaagaaaaatcaagggagcaacaaagcataactaaaataaaccaaacacatccagattccagaattagaggcagtttcacttaaagtgaaatcctaatgagctagacaaagacccagtcaatacttaatttgtagtataaactctcactacatactagtaccgtgcttcaccttcaccagagtaagattatttaattgctcccggtaaactttttcttagccctactcataacctccactgtcggaa

SEQ ID NO: 5816 - DNA, 590 bp, Gossypium hirsutum
  misc_feature (491)..(491): n is a, c, g, or t
ccttttgctctttctcatatctatttactcatcaagctggtttaataagcatgtgatatcacttgatatcaattttgctgtgctgttttgtgatttattcaactatatgtcgttgcattttctagttataacaagcttttaaccttaaattattttaaatctatgtgatgatgagcaacaacctatgttggttgtgagtttccatttgggatgcttttatctaggcagcaaacatgccctctaaacgagtccacatccttctgaaaaaggaatgtccttgcttacaaaattatctgatatttaattcttggaacattcatgtatcataactttgtttttttgttagaggctagcattttaaagaaagcatttcagcaatgttggtccatgatacaaagttctagaaaagggtattcttttaatgaatgcattatgttaccctcgataatgtactcgactactgacgatatgcatgcttcactaatgtcttngaggcttgaacctgcatgcaagtcacctttctcatacacaactgtgtgccccattctatattagttgaaagggaggaaaaagaatgctgatgattaact

SEQ ID NO: 5817 - DNA, 655 bp, Gossypium hirsutum
gggatctgtactgacctggatgccattgcatgccacaatcacccacaaaactggaattcaattgcgggaaacaagtaggttcaagagccgggctagctgcccaagctaaatgatttatctcaaattttgtagggtttgaataaaaatattagattcgaaaaatggcttgtttaaaatataagttgggtttgagctcaagcattccagatgcaaattcggctccgcccatttttaaggtttataatatattatattatgttatttttatataggttaaatttgctatcagtccctgtactttatgtaagttgtgtatttagcccctatactttaattcaatcaattttagaccttatattttttgaattttaaaattttagtcttgacccaaactatagtagttaaattcaattactagtgttgtactgtgtatagttgtaaatttagtatatattctacaattggatcattttaagccctttttttcaaaagttgaaatttcaatattgatgcaaatgtcatcattaacccattaactggatttttagtaagtaaaacgtgaaaataacgagctaacatgacaataagtttttcccattagattttgaaaattaaagaacttactgaatttaacaattattgtttgatgagggtt

SEQ ID NO: 5818 - DNA, 644 bp, Gossypium hirsutum
  misc_feature (345)..(345): n is a, c, g, or t
tatatactctctttttacttaccaaattggattctttgtcttccctagacctttcttcactttgggttgttttagtttttcattttcatttttctgcttcatcaatggctgcttcttccagtagggaagctatgaacaagcaacttcttgactttatccattcaatggaacaagaagtataccctcccacacccttttgttttcccttatgttacctttttttttaatgaatattaggcttatttatctcatttctatacatgttttaaggattgatgaaatcaaaacaaactcccctatggatttataattatttcttaaggatcttttcaagaccgataaagngaatatgatatgtatgatattataccaacttccatggtgttggtgttggtgttggtgttcattgatttattttttttgttaaacatgaaaaaaatttcggggattctttaaatttaactccccccactcgagggaaaaaattaccacaaaatatgatttgatttcttcttaggggatttttcaaatttgaattcttgattagcttttttttttttttttttttaaccaaaaaaaaaaaaaagggaatttcgaaacttggggttttttgggggggtggggccaaaaccctttccccaagg

SEQ ID NO: 5819 - DNA, 594 bp, Gossypium hirsutum
atgtcaatcagactatggcctacctgcttccattttattttattttgttagtgcttctaccatttcacatttttacctaagtttttgtgatattttaacggggataaagactagtgctatggccatggatcatggattctagttgactttagaactatcctatttaaaaattagaatctattatttatttgataatatttagactcttaggaaatcgtcaattcaccaatttaattattaattttagtgactttgatatggcatggaacatgtcaataatgttgacatgatatattacatttgcaaaaaaaactaaaaattatgcatgttaactagcatgccacattaacaaaaaataaaaatttataaaaaatattttaaaattaataaaataaatatatacatctaaaataaatttgaacaattatttgtctaaatcaaatacaatactatactcttttttataaaaattattaaaaattagtaaaagttataatttataaaaatattaagaattatattccttatatatatactttatattttcactttcctttttctttctttttatctttctctcaactctctctacta

SEQ ID NO: 5820 - DNA, 571 bp, Gossypium hirsutum
ctatgaactctcataatggcttctgtacttgtgcccaaaacataatatgtttttctgagaaggcgtaccctctagacagatttgtgggttttttcgaatcttagtcattagctacacacctgttgatgatttttggcatttattttgaggttggtttgtttcccgaattttttgtgatctattacattagagcgcattggactttttcttgacttctttagggtttaagactaggattttggtatctttatgcctggtatatgatccattccctcccttccatctatggatgcatagacttgcctggtgaaatggagctatagtttcattcttaaatattgatcgtgccagtttactgtactcattcctcaggtttggggctttctgcaaaaattaaaagaaaaaaaaggatggtggttaaataaactggttgctactgcttttaatttcatatgccatgcataattctcttttaaagattttgacttgaatgagttctcatggttgtatgtaggttgctatccctgttgttccaacaatcagagtattggttactttcacaaagtttgaa

SEQ ID NO: 5821 - DNA, 609 bp, Gossypium hirsutum
ttatgtttgtctattacttgggttcagataccacctacaagagctaaatctccaaagtttggtcggaggaaaagctcaactccttcagacattgatggtaacagcaataacagtcaccaatcaggccggctaagtctggatgagaaagcatctcagagaatctctgccaaagtgatttctcctgtccatgcgaagaagtcacagaggaaatcacttcccaaactgccttctcagaagacaagcttgtccggtgcaaaaaatgaggaacagaaatccaaggtgtctgatcaggaaacgacaactaaaccaaaagcaacatctaaagcaacaagggaggagagtaccgcatcatcttatttgacaaatgaagaatcatctccaattcaacaactggaagcattttccggagctaattcaggtggaagtcagcctgacttagatctagggccagtgattggagacttggaacaagagtcaattgcggtggagcattaagtatggcaatggttttaaatggacactagtatataaagttctcgacctcatattgcataaataaggacgactgagactgaattatttgatgatcaaaggcatggaaactggaac

SEQ ID NO: 5822 - DNA, 614 bp, Gossypium hirsutum
cacagtcatgagccatctttgtgctaagttcatgaacggaattttttattctttgaaatccaagttatcttgaggtttgctagccagcaccagttgcctcatgacacctcccttattaatgaactctgtttttggccttttctgattttgatcagataaccttttgatgtggcataagacttctggttgtgctattttgcattgtacgcatgtgtttgccaataatggttatttgttccatgtctattaatggaagtagttcggaattatattataagtttgaagttgaaagattagagagttgtataattttcttacctcttcaattggaatctgattattgtaggtgtcttccttctctagaatttgttttccatcattctcagctgtgttgtccggttctagcttttcagtgacctgaatggaaatataatggaagattggttaagcatggaggtttcagcttttagcaaatagattgaaattgggttagtattcatgataggaactgttttgattacctcagcttcatccttgtccacagtttccatatttaggttctgcttttgcacttcatcattgtcattagttcggacatcaggatccattccgag

SEQ ID NO: 5823 - DNA, 556 bp, Gossypium hirsutum
  misc_feature (551)..(553): n is a, c, g, or t
tcacatatgttgattgttgtaatacaattgcatatttctgagagaaactaggttcggtttaatggaaaaatgctcgattttcatttctgtaaagtaatcatgttgaaattgcatctatatatatatatatgattattccccaaatactaaactgagggaggtcattggaatgttccatgtttgagccttttaaattgttttcaagttttctcaataacaactaagaatcaattatattatgacaaattgaagaaacaagttgaatccaacagttgagtttctgatcgaacagatacttcgaaagctatggaagtttcatcagatttgaggaatcagtgttctgcagttggattggcataaatgccccgtgaaaaccatacgggactctgaatgggagtgtaattttagtaactggctcgttgaggaagttcttggtgtcaattatataagcctgtatattgtccaaggaattcaagcaaaatacatgtcagattaacccctcttattctgaatcatcaaaaaccaaaagaacttgtctgacttacttcagnnnata

SEQ ID NO: 5824 - DNA, 641 bp, Gossypium hirsutum
ataaaagatctctaaaaagagttgaactctattcttttaatcagtttagtccatataaattccatgaattttcaacatttgatggttacaaacaatttaataaccatcctatatctaatggcatgtgtatctgaaagcttgtagcttacactttcatgttcgaaaaatttatgcgaaaatgcagtcatatcaagccttgattctacaatttagtatcaccacagaaaatgggatggctcacagttactgaaataacagctgaagggaactacattctaagggttgagaatggaaaacccaaaggaagggttaagggaaaaaaatgcatacctctgaaattgtagtcaatacagcagagatgcgatcataggcgggataacgatccttcattgattttacatctgatagtatgttcattacccactcttgatcatggattggagcagaccatatagggccccccatgttaaatttcttctgacaatgactacactcttgagggactacaggtgcaaagcccgggagatatctcacactggtattctgaacatataaaagtggatgcaagatcaaaatattgtgcaattcaagattatgctacattcagcatactagtctttgatgtaacatagcacacatgt

SEQ ID NO: 5825 - DNA, 652 bp, Gossypium hirsutum
tcaaacattcaacaatggcaacatgaaaaatctttaacaatttcaaaatctaaggtacaggctaactagaatacgaagcaacgataacaaaaacatagaaatccttaaaaaccaatcaaaatacatacctaatcgaagaatttaaagttgccgaatgaaaaacctatttttttcttatttttcttctaatttcggtggtggatgaaagatgaacactatctttttattatttagtttttatttatcttatgttattaaccaatttacaattatacccttaataataatacatatattacatccatttaatgaccaaatatgtccacccaagtttcaaatggtcaaattacaacataaggacctcttaattaatattctatagctattgaatacttttaactaatagaacatgcattttacactttacgcgatttagtcctttttaccgaattaagcattcaaacagaaaaatttcattatgaaattttcacataataattctatcatgctataaaccttattaaaataataaaataaatattttgatctcagatttttggttttgaaaccactgtttcgatttgacccaacccaggtataaagtaaggctagttgcaaaaggttacaatcaggtttcaggtgtagacttcac

SEQ ID NO: 5826 - DNA, 658 bp, Gossypium hirsutum
acgtaacccaactacaagatttttaagacctgcccttataaatgatttaattaacaaagctagctgacaatgcaccatattccaatgaaacaaattggaatctaaaaatttttcatagcgactttccaggctcctcttgtggtagattgcaatcaatacgacccccctacggtaaacattgtcaacttactccaataaaccagcatttcccggcattgatgagagccctaaacttccagcgtgagcagtatctccagcattactctataaagaatcacagagaaaaagcatcactataaaataaaataacataacaaagacaatagaccatagaaagaataatataaggatgagaaatagaccatagaagcactaggatatattttaaataaaaaataagtatgcgtaactaactactatatgttgcctacatgcttgaagcacgtcaaatttgatgttaccatccaaacatagccatatactggttgccagcaaatggcttaaacatgaagaccatagaattaaaatttaataattcaaggatgtaagcagccaaatcaattaattgcagcatcatagcatgaagcttttgccaggttcaaatcattgtttagtattaaaaatctataaaccaagagctgcaaactgtttcattgag

SEQ ID NO: 5827 - DNA, 665 bp, Gossypium hirsutum
  misc_feature (657)..(657): n is a, c, g, or t
cttctagtgcagcagaaaggtgatccacttcatcttctaaccgagcaatgtcataaattttagaaagcacagctatggctttatctttctcattctgtacaatatgatgagatggttcattaaaggagtatacagaatcaacaaagatattcccccgaagtactacacgtaccttcatgaaaagccatcgtggagactcgggcaaacatagcataaggaagaactgaatgacagctggcacagctgaaactccaagcatccatctccaagttccttgaacctgttcgcgtaacaatgttttagacagctagtagtggtacttgaaaacattttggagtgcatgaagtcctatgatgcataaatgcccggtaacattcggaccgatccttcacacattcatattcttctctcatctctaagaacattaagaactcaaaactcgtatatccagatttaaacggatatgatttcaactagttatgctaacagaatcaaatgttatttctcttaagatgcttcgatttgttttacaaaaccacgggtctctactagcagaaaatgcaataagcttagtccccatagcctcgaaattggatctatattttgagatcaaactagaaggccttagctctgagtggacaattagcccaaaaaagnaatggctt

SEQ ID NO: 5828 - DNA, 631 bp, Gossypium hirsutum
ggtctgtaatgcaacagaggtaatgctgcttaatggttatatacaaatctattgttttaaattaaaatttttaattgcttaccagcttaataaatttcaactgccttgttattggctcccactgtgattaattcttacgatgaataaatttgcttctcattaatattaaatggaaggaagatgaaatttgttaaatgttgttatcttgcttccaggaaaatgggcatatgcaacgagttcctccaattcaagctgcatcagtgggttggcccggtttgcctagagcccctacaacaccgattgtaaagagagttgttagacttgatgttcctgtggataaatatccaaatgtaagttatgttgaaaattgtttgttttcattttcttcttttgtaagataataggtcagactcagtgcccttgcagtacaattttgttggccgaattttgggaccacggggaaactccctaaagagagttgaagccatgacaaagtgtagggtgtacataagaggcaagggttcagtcaaggattctgtaaaggtgaagtcagtcatgaattctttttatttccagcaagtaattatggtaaaagagtgtagtttgatatgcaccataggtcaagtcttaa

SEQ ID NO: 5829 - DNA, 648 bp, Gossypium hirsutum
gatatcgatataccatctctactagactcttatttggtttgcttgtctatatctttaacacatttttatgggatgttttagtagattagttttaactaatgacttaaataatttggtttatagttgtgtaaagatgaaagtctctgtattgccagctgttgcggtacaattaggttgtaatccggtgtcaggggccgctagcaagttttatatgacacaaacttgggcattttatcaattattgtatatatatatatatatatattatctttttccgcattgttttgctgactccactacagattgttgtcactggctgtatgatagcttttgctatggcagaattgagttttgcattcagtcattgtttaagatcactcctcttgtgatacttgatcttgtttttggtattgtagtacatcttgtcttgtttctccacccccccccctttccccttgtctttctgtgcagtgattggtagtattatgttacttgtactttgtacttgactttataatcaatgcctagttgtaccaacaattgtcagcatttatccacacatcttatttaacagcatgattgtgcatcctctttttgatgattggctacccatctcttttcttggccaacccaaaagtttgtcaactt

SEQ ID NO: 5830 - DNA, 752 bp, Gossypium hirsutum
  misc_feature (667)..(667): n is a, c, g, or t
  misc_feature (670)..(673): n is a, c, g, or t
  misc_feature (676)..(676): n is a, c, g, or t
  misc_feature (679)..(685): n is a, c, g, or t
  misc_feature (689)..(691): n is a, c, g, or t
  misc_feature (695)..(719): n is a, c, g, or t
  misc_feature (727)..(741): n is a, c, g, or t
  misc_feature (746)..(747): n is a, c, g, or t
tttatcctctcgtggccatatcctctaacaatcttgaagatttcaaggctgaacaaaaagttaggtatccaatatttatataatagaagaaaccaggacactttagaagatagttgaatagcaaacaccacctatttgtacattattttcaaaatacctgtatatactcctccattcccatctggagacttagcaacctggcttgaaaaaaggcactcacgtgaccaccacatttgaaaaagtttgccacttagaaaaagatgcagattgtgaaataaaagaatattattgtcagccaaataaaaaaccttcacgtattactgcttcaaagagaatagtgtagaagcaatactgttgctttacgcaacagaatcagaacttttccatcctaaaacttagagacaggtacctctatcctttcagcaatcaacattactttacaagaattctcaaccctatagtgctgttgcaatgttataatagtatttgttaacatccaatccgaatcagttatacagtaagtagaactgttcaaggacttgatcaccttttaattagaacttgattttttattgacttgcacattcacaaaagaaaccataccttgaatggagtctccatgacatatctaccatcctttgagatacaaggtatggtgccttgctanaannnnaanaannnnnnncaannnacannnnnnnnnnnnnnnnnnnnnnnnntccctttnnnnnnnnnnnnnnncctcnnccccc

SEQ ID NO: 5831 - DNA, 618 bp, Gossypium hirsutum
catgattggagaattattagttaagaaattatagaaccagattttacagttgattagaaggcacacctagcgatgtaatcaatctcataaccaagttcagcttcttcttgcagaggttcaatccacgagctaactagcgttcgatattttctgctcagaatcatagctcttggtgtaataggttggttatctttggacatagcttctagagcttgtagcaattcaacgactcttcctgatccaatcataagtacatggtgacaaaattaaatgtaaaacaaagaaaaattaacttaaatggccagatagaacagattacaagataccttctcggcataatgctcgaagatacaaagaaagtggatcatcaaagtttccttcattgtgcaacactattgttcccccttcatagttctttagtgcacgaaaatgacgaatagcttcccttacaacacaatacttggtaaaacactccactaacagcctggcatatggtgaaatcaggcattacaaacaaaaaaacaaatagtaggaaaaagaaaaaggatatagtacactatgatagttgtgaattgatgaagatgtaaaaaaacatacgaacacagcattcaagtacac

SEQ ID NO: 5832 - DNA, 281 bp, Gossypium hirsutum
gcctccaagaaaaaggagcgcctgcttgccggttttaattttaaaagaccaaagcgatgtcatgcgttgccaacccaacaagctcgttcaaagaaaataataagcctagctgattcgcaaggatattagtatagtattaattttgttttaggatggaaccaccccttcaagttcaatcatcgatccaggctcaccctcaataccaaacctcttgattgaaattgtttttaagttattgccattgcaaacatttccgttcaaatattaggatcttttttttt

SEQ ID NO: 5833 - DNA, 566 bp, Gossypium hirsutum
  misc_feature (203)..(203): n is a, c, g, or t
ttgagcaattaacaatgtttgaaagaagagaaattcttatgaacagctctccagttccagcattctgatccaaaaatacatagataatgggagttagcaatcacataatctccatcagctccattattgtttcttcgaaatctgctacattttagttgtttcacttcgaataaatttgtgttttttttctttcccttaaaggntttttaactttttcagccctcttgactcacagtactgtaatagtacccccttgtcccttttacctccttgattcattcgtgagatcagaaacaatgttattccgattccggagagatccgggcatttattagacataagtatgttcgattttttaaagatgtgtttttctccgatgcgtttacgagaaaggacacaaatttaaatcatggggtcttacaagtatgaatcaggtagtagcaacaggtggttaatcgagtgtcctgataaaattctaaatcttgccaattattgtccaaaacatgacctaaataggaaaagaaggaaagcaggatacgtaacatgtaagataaagtaccattttg

SEQ ID NO: 5834 - DNA, 562 bp, Gossypium hirsutum
agccggaaatgggatagtttctagaggtgattggtgccaaaacttgggacaaagattgcatagttgggttaagattgacttgtcatctttcatgggaccagccatttccacaacaggcaaaacagtagaaagaaacaggatactttgaggagtggggatgttaaatgagacaaaagggaatttttactgagaatatattaaagtaaaatggctttaaagatgaatacaaaaaagcgatacaaagtagtataagtggagaagattatgcaaaaccatcacattgcctcaatatttctatcgtcttaatagggatactttgactttgatggatcacttaaaaaatatattgctgatatatatatatatatgtgtgtgtgtgtgtgatgttttaaatttcactctttatgtttgaaaaagaaaatgaccgtttatgaaaataaaaagccataaaatccaatctcatcagaatcagatatcaaaacagaaatttgggtttgaaagatataaaaaatatggctaatataaaattccgtgaacagaaaaatctacttatatgtaacta

SEQ ID NO: 5835 - DNA, 620 bp, Gossypium hirsutum
agatgcctcttccctcgctgaaaagcctcgtttgcaaattcccacttatcagtatcgattttgcgaaatccctgaaaacagtacacaagatgattcaagaataaatgggggaaacgggattgttcacgaaaacaaaaacatcaaagggtatgattcacataggatttttcaggaggagccaaattgcactatatagatcatcttcataacatcagctttctaaaagaaagagagagaaattaagaaagagttagaaaaagacagtagcaaaataacaaagattccactagaacccaaatttctacctgctttaggatggaactcccaagtccagcagagattcagcaaatgaagctgacctcgaagaagcttaaccaaactttttaataatttccacaaataacaattcacttatgcaacatacatccaagtttacagataagtcttacatttgatcacaacactaataaatacattagctttacacaagctcaaaggaacaaaatacgacaaaaccataagatttgtacatacaaattcaacataggaaatacaattaacccttttctccgattacaaaatctttgtacaaaagttcgataattagaatattacaacca

SEQ ID NO: 5836 - DNA, 667 bp, Gossypium hirsutum
ctgggtatcagtttgaaaggaatcgaattttgaaaatttctttggagtctccaatatttaattttatattagcttcaaagtgttatggtagaagtactttcccatacatggttccctgttttgtataagagaacaatttatatgtaaattgagtggagaatttacttggttgagcttgaagctgccacacttcttgtacacttagaagtgcatttacatgtgtttttctaagtatatgaagtcaacttctcaacttaggtaatcttgtttagccaaggttggtcagagcccgcaaggatcccttgtatttataagttccatggtcctgattgtattttccagtggagccttgaataacttgaaggtaatgaatgtattgccttgatcatggtatttcaaatctcaataaatggcatgtttggactttgaagggagttttggaagttgttaaaatatgatgagaagtgctgaccgttttataaatagctctgtatttaaaaatatttctaataaatacgccatctaaatcctcaattggtaatggaagaattccttctttcataagctgtcatggtcgtggatggttatctggctatggtcatctatccacttctgttttggcttggagatgatgttttagtcagtgcggtgagttgacctttgtttg

SEQ ID NO: 5837 - DNA, 496 bp, Gossypium hirsutum
aaacgtgaaattgaggcagctaaggaaaaggagagatataagtatatgggaaaatcaatacaggagcttgacctttctaactgccaaaattgtactccaagctatcggcttctgcctgatgatgtataaacttttgtttttttcccccatgcaaattattcatgatttggcaccagtttttaatgctctttggtgtttcttttgcagtacccaatacctatcgcaagtcagagatccgagctcggcgctcaagtgctgaatgataattgggtatctgtgacttcaggaagtgaggattattcttttaagcacatgcgccgaaatcaatatgaagagagcttgttcagatgtgaggatgataggtaaattttccgggccttcctcaatttattccagtgctatgtatgcattcaccttagtgattatttatctctttttgtaatttaattatgcggcattcccattgtaattttatatactgcatgtgaaggtgaaa

SEQ ID NO: 5838 - DNA, 650 bp, Gossypium hirsutum
gaaatgggaggataaccataatgaagaaaagataaagaagaagaacaactatatcccctgagaaagaggtttatatgcaggtgtacctcaactttattactgacaacaggatcaagagcatcaccagcacgaactaaaccacgtaagccgcctggaagactaattacaagatccttctcatttacttcagcaacaactccccagagcttcattccaggagaaatattctatatgcatacaaaagagagaaactaagttcatttatgaagcttagaaaataacctaacacatataaaataatcaaagcagagcttaagttcaaagaaaatcaatgaaagaaaactagttaagacttggatcatcaaatgcccccacatttcctactagagtaatgtgacaacatccaaataagaacaaaagatgccggtgatcgggaaaaaggcaaaatgaaatttaaaagaaaaaaataccacgtgaaattttacatttaaagcaggtgacaaaagaatggaacaataaaacgttgtaacttaaagtgaacaactttgaatctaatttatgcaattccaccaataaaaaagccagtaactccacttcaaatatatatgaccatcataaggacaacaagtgaagaagaataacttcaagct

SEQ ID NO: 5839 - DNA, 588 bp, Gossypium hirsutum
  misc_feature (19)..(21): n is a, c, g, or t
  misc_feature (543)..(544): n is a, c, g, or t
agacggtagctcaaacccnnntgctatctaactcggagttgccaaggataccaggccaaactgtgtggtcacatttattcaccagtgtaaatgtagtccctgaaatccctgcgtatatatgtatatatgcagactgtgttaatattaccgctaatattgattctatgttatataaacatggaatgttgaaaatgttaccttggaagagggagctcagacataataaaccaatggagaaaatcagatccatctgtaatgaaaatttgagggtataactaaatacttaaatatcactacgccaaaaagaaggggcaggtgaatgctgatgaaaagattataactttctcttaggaagaaaaggttgcatttccagtgtgatgataatcagtggaagggaaaatgaaataaagggttggtttaatggtgttgtttggggatcatcacctgaaacagtgttggtggtttttcatatatcccaaaaagaaatgggttaagttagatgtctctttatgaggtgatgaaaggaaataaattttatgtccnnatatatatagatggttaatatcatattgataacagggtgaaagt

SEQ ID NO: 5840 - DNA, 674 bp, Gossypium hirsutum
caacactaggaacagataatgttgttcttttttttcttttttctttttgcagttttcaaggcgaatgtttgagaattaaacaaccattaaaaagaaaaacatattttcaagtttgattctgagccaggttttaacgtgcccaaccttttcccacctgcttaaattcttggtttatataaaccagacacactgtttgaatctgtatacatttgagctccaataaacaaacactggttataataataataatcatcattagtcaactaaaccacagttgagcttgttatattatatattcttttatctgctactagcctactactccctactaactactcttgtttactcaaacaagatgattttgactctagttgcaaccttgtatcatcatgcattgactaacttttttaaaataaaaaagttatttagcattttaaaacaagaataatggagcaaagagtggttgagaaaacgttgcagattttcaaacctgttattttcaatggtgatgtgtgtctgctagatatgccgaacagtaacagatacatcaaaaataataattcatggcgtcatgcgtgccctgttgatgctggcttctcggcccgatccaacgcatcagttcggtttactggacttatggctaaaggtagctttagtccggcttggatctcttt

SEQ ID NO: 5841 - DNA, 660 bp, Gossypium hirsutum
  misc_feature (4)..(4): n is a, c, g, or t
atanaccaactaccaagccagatactggttcagcagtaaatatctgttaggaaccttgattcatgtaatactagaacagaatcataagtacataaatcaggtgagcactacatgtcagaaattcaaattacggggtcgaaacacgaattcagtttctctgccatctacattcaaatcaatagacgatagcagcattccgttggaacagcaaatcagcaccaataatacaccaactattgatccaaatattaagtacagcaccgatatctactagaaagcaggattcatgaaatacttgaacagaactacaagtacataattcagatgaaaaataaagatcagaaatttgaattaatgggttgaaacatgatactacaagtatagcaatttctattctttacgcaatttatatttaaatctgttagatcatcgtacattcgtcctaatatccctaaagtattgggaataatagcatttgtctgcataaagaatcagatgaacaatacatatcagggatttgaactaacaagtcgatggttttatacagcaatcagaccacaaatcgccccccaaataacctaaaattcagcgcaatccaccaaacttacataaattttcaagattctagattatgaactcatttagcaggaaggcgattac

SEQ ID NO: 5842 - DNA, 645 bp, Gossypium hirsutum
ttatcacagattcgataagaccttttctggggtcagtcctggtcattcggtgcaagtcaactatcaccagcttcataatcacgggttttcttccttctctgctgtttgttcttctgtaccacactgttgtggctcgttctctcctagtgcttctgcatcttgccagtcttcttctcgtggctccgttttctccccgccagatcagacatggtatcctgactctggggcaacgaatcatatcacccctgatatgtccactctcacaacaacctctccgtatacagggacgagcacagtttctatggggaatggtgacaatgttcctatagctagtgtaggttcttctaccttattggttggttctagactgttacatctcaggagtgttctacatgttcccactgtctgcaagaatttagtagggcaatttgcgagggataatgctgtgtactttgaatttcacccttttttgtgtttcgtgaaggatattcagccaaagagaattctcctagtgggccacatacaggatggtctatatcggtttgatgtttctcgggctgatcttgctcctacttccaagccttctaatgagactattgctgctcagataaccagtacagctctgcttcacaatgctcaacttac

SEQ ID NO: 5843 - DNA, 609 bp, Gossypium hirsutum
gattccaatatactttttttaaagacaaaaacctaagacttacttaaaggcttgctcttaatcttgattcggaatttgggcgcagatgtaggttgtgtaggctcggtcctggtttccaactttgtaattacaactttagggggttcacttgaattcatattatccgcttcctgtttgttaccacccatctgtgttaaagatgtggtctcctctttcttactttttaactcccccgaagctgccttcacttcacccagtatccttgccatctccttttccttgtgttttttctcttttttcaatcgcttcttttctaaatactctggatcgtttcgctctcctttgtgctcttccccctttcttttcttttccttatctttcttcttcttcttcgacttctttttcttctccttctccttctcctggaatggaggaccgtcgtccctcgagattgatagtgtttgtagacttgcatattttttcgcttcagcatctatgtagttaccttgaatgatgcttggtgacgagggatcatcaggctgatggtgcaccgaggcattacccgaatcagctgtacactgaagttccttaccaaagttgtcaccttca

SEQ ID NO: 5844 - DNA, 635 bp, Gossypium hirsutum
ggcttctgcggacacttgatttctagcaccgcaagagcacaaagggtcagggtgatggccaagaggtagacgaggaatgttacattgagtgtctgaactatgaattgatccgaaaagagggacagtgcgggaaggaagcagtaaactatgaggaatatggaagtgaaagggtatatcccaacattaagataagcaatcctctgtagaaacttaagcctcgggctgcctagcagggcattgttgcgtgagaagaatatctcgaccgagccagtggcccagcgtagaacctggtgaagtctatcagtgagatttattggagcagtgccacggaaagcatctcttttggtcacgcaataaacagatctccacccacgattatgcatcctataccctgtgacaacatcttcagttactgatccgtagatccatcctacactttgcccccattcagtcttatcttcataccagcatgagatgacattgattgcctctgcaattgtggatgcatcaagaggctcccgaggcattgtgagagcaccaggtgctcgtccgtatttgatagaaggatgatcagcaaggggctggccttgaattgctgccacccggacagactcaacaagtaaagtcgagttccc

SEQ ID NO: 5845 - DNA, 606 bp, Gossypium hirsutum
tatttaacattttcaatttttaattatacaaagcaatgaatgaatatttatttaaattttttttatgaagtacacaacggaaagaattatatattatttctcttactttttaaaatttttatcttttcgattatcttcttgcgaagcctaaattagactttttattttatttttgagactaatttataatttaaacttttgtttggtgaaagtagggaatatcgaatacaattggggtatttaattatgtacaattcatgaaaatggcatggaacgctagttaagattttactttaaatatacaaaacacctttaatttagctttacaaaattgaccaaaatttctcactcttcttaattattatattttttaaatttatatttgatttattaatgatatataatttgataacatcagtgtatctatattataaaaaaaattaaaatttatatatcgaatattaactagtgtacaatagattataatgatgtgatatgaatttaaataatttaaaatttaaaattaatatcaattcataaaataaaaaaatctaaaattcaaatttcaaatttcgaaatcattaacctatgccctgtctaagaaca

SEQ ID NO: 5846 - DNA, 538 bp, Gossypium hirsutum
aaataaataggataaaataaaacaaattgacctatcgaattccaattgacatgacataagaacgagactgaaaccccatgaatcaaaagacccagagaaaaaagaagccagaaataacaaaagatcaaagagagagagagagagagagaaagaaatagaataccaggggtacgatctgacgttgccgccatgaatcttctgtaaaacaaacaaaataaaataaaagaaaaaagaaagattgccttcaagaatctaaagctaatctacagatgcaggcagtatctttctatttctgttttcgtataaaagcatcacccatcctctttcgttttacttattttaattaattaattactttaaaagtggatttagttttaaaatgtaaaacaataaatactagcattatttatttaaacaatggatttaaataataatttttaaattttatcattttattaaaaattatattttaattattattgaatcaggattaaatcagtcaatcgagcaaaaaattaacagatatattaattctgac

SEQ ID NO: 5847 - DNA, 663 bp, Gossypium hirsutum
aagttcttctctggctgtattgaaacagagttcacaaccttttccgttgacatgttgatagcattggcctaatccaaagacagtgaagggtggatccacatcagagaaggttccccagccctgagcagcaattaatttggacaaagctcccatcactttgtcaacactcctaacgaatctctgggaggtttcgttattagttccacacttaaggcgggatccgaaggatagaagagcagaggaggaaggggagaaacatgaagcaaacatcagcaacatccatatcattataatgttcaaaggatgttggactgagaatcgcatcgaattctgttggtcctctgctctgtttctgttttctttcttttttttatatataaagcaaaatattcacatttttctcttctctccctaaccctttgtcatgttacgattgaagggtttggagaaggagagatgattgtaattcctagggaggtctggagtctttttgtgtgaaagagaggaagatggcaaccaaagaaaatagggagaatttaactcggtttctgtttctctttgctttatttagcccatttctagatattccttccccccacatggcggtcccttgcacactgagcctatttgcttttttcatttttctttgctcgtcaccacttg

SEQ ID NO: 5848 - DNA, 625 bp, Gossypium hirsutum
  misc_feature (599)..(606): n is a, c, g, or t
tctgtagcttttcttttctcgtttcttcctcttcctatgtgtaataattatacatatcattgttttccctttgattctgttctcggtaaaaaggattgaaaaaaaagaagacaaactgtcctttcacttttttgaaaagcctgattctccctttttttaggtcggcaaccaattacataattagatttaattgtttttttcccttcttttcaacgttaatcaacttctaatattttttactccggttttatattaccttgttcctcggacagacatatcctaatccgttgcaagacaatccggcatactctgttgtcaagtaagtccactttcactgcccgttttacaaattttattcgtcaactgttgcaattttaacggattagtattaattggttctatttccctttttcactaggcaatatttcgtccatgtaaatgacactgttcctcaaaaggtcagccctctcctttcatatatatgtaaagttctaagattttgttcaaattttattttaagttctattttctgtttacagattgttgttcacaaggatggtccgaggggagtacattttcgacgagccggaccacgtcannnnnnnntgttttaatgttttttttt

SEQ ID NO: 5849 - DNA, 608 bp, Gossypium hirsutum
taggaaccagataatgatcagacaaaaacatagaatcagtacaagcacaatgctatgatgattttatatctctacattagccatcatattccccttgtgcgaacttgttttctggatagtagacggcaataacttgatttccaccaaatttccgaccattcattgcagcttgagcctttttggaaccttcaacatccgagtattccagaaatacctaattgcaccggagaattacagtaacatcaggagtttgaatagagtagaaatgaccaagtcaatgcattcacttgccaataccatggataagatgaagacaagacaatgatcaaataactacaaaccaaagaaaaaaaaatatactaggttacttggacttgggcgtaaatgttggccacgggtatgtatccaacatagatatgtccaagtttttccatttatttggagattttggaagatcgtatccccataccatgaccaacgagtattagatagcagtacttaaacagaaagttagaaaaccacagaagaaaatgtaaaaagcatcaatactgaccttcccgacacctggggcaggttctccattcggatttgggcgtgggatgacaata

SEQ ID NO: 5850 - DNA, 593 bp, Gossypium hirsutum
gtacccaataaaatggaaagaacggaaacgacctacctgagaaacaaattcaaattcaaagtgacgcacatctttttcgtggcttgctctggtcaatgggaaatttttcacctgcaaaggaatattaaaacatcagggataagaagaaagatagaccaaatatcaccaaaattaatatttatgaacagtccaaagaccaaccatgggaagcaactgccaaaaaggttttaacaatcattaaacagtggataaatatgactccatgtgaaaactgtgccatcgtttagtataataccaaatgggcaagacagatgattgaacaagatggtcacgaaatatgaatttaaaatgaagaacattgaattaaataacatagattttatcataacatagaaaatatactactaccattttgagaaaggcatcaggcttgcttttctcatgaggaacttttccggaagacattgaacgagccctcccaatttgcatctgaaggtatttaaaatctgagaaagtacaagacaagagcatgttatcagaggagatacaaaaacagaaaagagaaaagaagatgacataactatatctagatc

SEQ ID NO: 5851 - DNA, 533 bp, Gossypium hirsutum
ttttggacggtaatgaaagggttgcctttttctcgtcagttacaggtagccagcccaactaatattaggtctattttttatattatccgatgttgtatttttaatcccttaattgttaattaaaattttacctataaaaaagctacgtattaataaataaatttaatgttgatcttataataaaattccaaattttaaaaaaatacaaaaaattagaaaataagaatttaaagaatttgattaaaaataaaacaatgcagattattggaaaggtgggggcagaattcaaaatattaaaaagaataaatcatccctacaattcctgaattaagagtttgtgctgcaaaatctacttgacattaattattataagttaatgaaacctttttctatttttggttttaaaatatatcaactaactctcaggtatttgatgattattctatgttctgtcatattataattaaggaagtccaattttttggattatgataatcatactagcatcaaaacattaaaataattcacctatc

SEQ ID NO: 5852 - DNA, 633 bp, Gossypium hirsutum
attcaagacttgggttcaagttctttagtattcttgaaaatattcttaataaaatgctacatatgtagcaaaacagatatgcccatgctacaaactaatatgcttttttgtactagctcgataatttactgaaaccataaatgtggttattcttaatcatgcagtttgccatgcattattcctggtctacagaggcacgtgcacgtcgggcgctggccaatgtttcagctttacttcgtccaggaggcaccttcattgggacaatgccagatgccaatgtcatggtcaaaaaacttagagaaggtttagtattgcaacttgcttttgtttttcctgtcttgaaacaatgctctaaaaaatcaatttttaaggtgaagctaataactgaaatttagagctaagaaacatccaatatgtaactaaaacacataatatgtttaaataggaaattctgtttatatctgaaatttgaaaatagatcttgacgtaaattgaccaaagctagccttggtaaacaaacgttgaatatttgtggggcatggcagactacttttgtcattcttgattagagatgctattttcaccgtgaatatgcagctgaaggattggcctttggcaacagcgtctactgga

SEQ ID NO: 5853 - DNA, 624 bp, Gossypium hirsutum
ctgcattgagcccagctaatacttcgtcaatgactgatgcccttaaagaggttcataagactgtttctagatgtctgatgtgaattgaatctgttgatgctacatatgttgaatgatcctatccctttttcttgataggcacttgcagagttgtatgttattaatgggcagtatgagaaagctttttcactgtatgctgatgtaagtatttaatgtatttgtgctcagactaatttattttttcaaacttaaaattatgtatgatacaaattgcttatggaaaataggttttcatccattctctagttggacatttctttgcttctttgttgatgtaacttgtctgtgatttcagctcatgaagccagatatatttgacttcattgaaaagcacaacttgcatgattctattcgtgaaaaggtattattatgggatactttgctttcttaaaagttattgttttttgtagagaatgtcaatacctgttcatatgaggccgatatggtaaattctgaaactgattctttacaaaattacaatatttcaccacttaggttgacacttttatttacattagatagatacatttcacaatgcaaccaaaattataggggcagaaatta

SEQ ID NO: 5854 - DNA, 614 bp, Gossypium hirsutum
  misc_feature (609)..(611): n is a, c, g, or t
taaaagtaaggggttttcctggccttatgttatacagttttatattttccaaaaaaaataatgtctcggatagtggctttctctaatatatatataaatactttatacatgcagggagatgttgaaactttgaaaaagtattgtagtcctgaagttattgacaggtgcaaagcggagcatattgcttatcagagccatggtatattttttgataacaaggtaagttgggatgatcgggttctaaatcttgtgttcacttagatacttgatatgaagcgctgttactaattcaggccttcactttttgttgcagattctacatatatcagatgtagaagttagagagaccaaaatgatggggacttcccctattatcatagtggcggttcgagtttttcttcttttgcttctttgatttcttaatcaatttgagtttcttaaaagtttttaaagctgatgctgatggccttttctcgttttgatgttcgcagtttcaaacgcaacaaatatattgtgtacgaaatagagagggcaaaataacagaaggtggaaaggtaaatgaaaagttgtttttccgcttgtcatacttttaattgaactagatggtcnnnaaa

SEQ ID NO: 5855 - DNA, 609 bp, Gossypium hirsutum
gctcctctctcggtgcagacacatcaccgctacttgctcctactccggttacgggatctccggactcagcaccattaatctcaccggtgatgcctgcttcgcctccggcgccaatcgcgccgtccccatcagatctggcagaaggagagtcatcgccttcaagttctcctgctccttcaccgggcgatgcgagtgatatcaaccacagcaacatcaatgcagaggaaagcgaaaacaagactggtggtggcggaggactgaacggaggaaaaaaagcaggaatcgtggtggcagtggtggcagcggcgtgtttggttggcttcggtggattgatttacaagaagagacaagacaatatcaggagatctcagtacggatatgccgcgaggagagaaatcctgtgaagaagattagacgattgcagatttataaaatgattataagcggttatacattattacatgcattcggttttaatttgtggtagaaatgattacttgacaattgaaatttattatctttgattctttgtaaggaattgtcgtccatttttgcaagaaatttagtgagtcgagtatgtaccctgcattaccatcaggtagccaacga

SEQ ID NO: 5856 - DNA, 508 bp, Gossypium hirsutum
cctgattcaacaatctgtcgatgtttacgctcaacaaggccattctgagctgacgtgtatggacaagtaagacgatgcatgatgccttgttggtttaaataacacttcaatgcctgaaactcccctcccccatctgtttgtaaagacttgagctttgtaccaagtgttctttcaacttggcgatgaaactgtgggaacacattgaagacatcagatttgttcttcaaaaaataaagccaagtataccgagaataggcatcagtaaaggccacataatatcgaaacccattagagacaatcggagctggtcctcaaacatcagccacaactagctgtagaggcgatgtatatgtagcagatgattttgaaaatggaagcttgcattccttaccaagatgacaagcagtacaatcaacaaatttattgctatcagaaaactgaacaatacatcgtataagtgctttagtaagctttgaacgacagggatgtcctaatcgatagtggccaa

SEQ ID NO: 5857 - DNA, 597 bp, Gossypium hirsutum
aaatagcaagggcattgaagcatgagctaacatggaaagccctgattcaacaatctgtcgatgtttacgctcaacaaggccattctgagctgacgtgtatggacaagtaagacgatgcatgatgccttgttggtttaaataacacttcaatgcctgaaactcccctcccccatctgtttgtaaagacttgagctttgtaccaagtgttctttcaacttggcgatgaaactgtgggaacacattgaagacatcagatttgttcttcaaaaaataaagccaagtataccgagaataggcatcagtaaaggccacataatatcgaaacccattagagacaatcggagctggtcctcaaacatcagccacaactagctgtagaggcgatgtatatgtagcagatgattttgaaaatggaagcttgcattccttaccaagatgacaagcagtacaatcaacaaatttattgctatcagaaaactgaacaatacatcgtataagtgctttagtaagctttgaacgacagggatgtcctaatcgatagtgccaaatactaaataaagaatcctgacactatatcttgaaaaatgtcaagatcct

SEQ ID NO: 5858 - DNA, 617 bp, Gossypium hirsutum
tttgtttcttttcttactgtaggtgattaaatgaaaatatgggttgatcttttatggaccttaaaaagtagtgttcattcatggaatctcatttgttcttggatatggggttcatttaagccttcggataatgaactttgtcataattcatagttggggattgaaactcatttcacaaattatgaagagttggcaagcaaattgattatttgggttgtctttggttcaacaaaattgaattttgaactgtggattgatgcttaaagttgccaggttttttttgttgggattgatttggtttaatagttctccatttttttcttcctttcaatgtgcggctgcatgtgcatgttgttgcttcatcgatatgcttgcttgtatggcaattgtttttcccagagtataaactaaggagattgagcttttaggatcttttttttttaaatgtttgatcttgtttaccatctttattctatgtttatctgatagggatgactttttgtggacaattgtaatggataaggtaggatgagatatgggggagaggggacaagtcgaggcctagggagttcggatagtgcatgaagtatgcaaggaccaaaaggataaacttgagg

SEQ ID NO: 5859 - DNA, 629 bp, Gossypium hirsutum
ggcacgaagaagggtcatccgatgaagatagtgtgaatcattagctatctctagtacctgatcagataacacccccaactttcacattaaacaaaactgtcaaacccaatgagaaaaggtgcagattagcagggcagctttcatgaaaccattctgcataaaattttattttttggccataaggatgctaataaaacagagcacagactgaaggactaggacagacatcagtttaaatttcagattacacttcttatttgctttcagtagtaaaagtaaacatgacttttttgcttttacttcttgctttttgggtgaagaagatcaattgtcaatattattggacagacctgtggaataatatgctgcatcgcccaatctgggccgaattcttcagcaagacgctttaaatttttagcagctgcatctcgaatagagtaaacctgtaataattacaatgcacaatagtgcttaagatagaaatcataccattgtttggaatcagggtataataattaacaacccaatgagaaaagcattcacatattaaatagagttctcagtttgtatgttactccctcctagctgcccttaaatatgttcctcttccaatttaccacaagacttga

SEQ ID NO: 5860 - DNA, 634 bp, Gossypium hirsutum
cacttttgtctggcgtgcagtcgagatcgtctataattctttcgatagcctccaaccagtattatgccacactaagggccaccccagaaactcccctgaaaatctctgctccatttgactagagtcgttctgcaaccgacccacagccttcagtaatgatattaggcccaacagacctagcaactctttctaaaatacgaagtatcgcctgagacagtgcgtcatccccagcagcttggtcaaaagaccctatctcagccatcggtgaagctggtgctcctctcgcctcgacattaggcatgtggcctgacgccgaagacccagccctagcacttcctcggcctcttgttccctttctatactcattaccactttgcataaagtctggattagaaattttatgtaatttagcttataattccaataattaagcagatgttttataaaagtagaaattatgagttgtttgtgcaattgtaggctcacaatagttttagtctcctacaggcttcaattttactctagctaagactcccagtatagtctatcctacaggcttcaattttactctagctaagactcccagtatagtctatcatctaaagtaatccccgtaactatctacagtatgtca

SEQ ID NO: 5861 - DNA, 604 bp, Gossypium hirsutum
  misc_feature (523)..(523): n is a, c, g, or t
  misc_feature (526)..(526): n is a, c, g, or t
cttttatttattacatcaaaaacctaagtgaggatgcatttagaaggacatattgtctcatgtttgtttatcacctgaggttgctgggggactaccaccattcaactcgcattgcttttgttgagtttgtaatggtaattgtttcttcctctctattcatgctattctttgaacatgcctgaacaaatatcctctggtttttgacggatatgaaaagggttttccaggtctttgtgtgaccttactttaagatcataaagatgtaagctagccagcaagaaagaagtttgtgttagctcaaaatattggggtttctgatcctttctatactaacattttgttcaaaagttcagggttctatggataggaagtaggggaaacaaaaaaaagggaaaggcaagatagtgaaatgaaactaaagactgtacaaataatttgtttcgtggaaaatggacaaaattttctttttttcctgtatcgtgaaaaaacttttacactccgtgttaaaggtcagagaaaaaanctnaaaaaatacgtggggtttggaacacctttttcttcctaaattttacctaaaaagaaaaaaacccgaaggaacctccat

SEQ ID NO: 5862 - DNA, 651 bp, Gossypium hirsutum
caggttcatcactctgttcaaatcaagatcaagtccaccagaagagcgaaagggtgccgaaccaaccaacccacatttgaaatcacgattatttgaaaggtctagtgcagaatctgtgccctggctagaactttgaaaagcaagatcctcaaggactctctcatcaggtacattcaaatcaatatccaatggaggacgacactgttttccggtagtggcatcaggaatggaagcattatttgtacccagaggcatatctagactttttctgggttcagctggccgaaacgcacttgtagcagctgatcccttccaaccgagtgcccctttagtcctcagcaggtcctgtgggggaacaaaggggcctttagcagcagcagcaatagtaatagaagcaggaaggctgctagacacggaagaaacagggaaaggcaatgagctaattaattggacaggagctgtcacattatttgattccacgaatttcccatcatctgcattgaagtcctcattcaagtcgaattctactttagcatctgtatcagcaacacctgtagcaggagtatctgtagtgatcgatgtgcattcttctgcttcatctgcttctacaccagtcactttagatgcccttggcctcttagtttgttatgt

SEQ ID NO: 5863 - DNA, 554 bp, Gossypium hirsutum
  misc_feature (539)..(539): n is a, c, g, or t
  misc_feature (541)..(543): n is a, c, g, or t
caattaggctaatgaaaaaagtagaaataggcaaaaattattgataggcaggcaaaaaggaacttgttattctgtagagttctaattagtgaagagttttccaagggaacacaagtctaaatgtagcccctttacatataaaatgaagcccaagaattttatttcaccttcattctagttgctatagtcggaagctatgttatctggactttcttttcctcaagtatttttgtttaatatctatgtttaaacatatatccgggcatgaaagtgaattttttctcaaaatatgaaaaataagtttgaagtattcagaatatccatatctgataggtccgatgtctctcaattttgattatgagcaaattagcccttttttttaaaaaaattggagaatttagtctttgtaaatttcgaagtaaacaattaaagacaattaatcatagtgttaatactttttattaattatatataattttgattggtataattcactagtttagctcacaatatttatatattgtgtgtaaacgttgacnannntatatacatat

SEQ ID NO: 5864 - DNA, 609 bp, Gossypium hirsutum
  misc_feature (580)..(581): n is a, c, g, or t
  misc_feature (588)..(589): n is a, c, g, or t
  misc_feature (599)..(605): n is a, c, g, or t
gttgatctgataggcagatgaggaaactggacgcaagcttaaagtttatgctgtagaaaaaaacccaaatgctgtggtcacacttcatgtgagttgcagattctagttattatgtttcaaattgtgatatttttcagttgctaagataatgcactgttaattccgctaaaataatctgctagcactgtataaagtatttgcatgttaatgcatagagttctttggatgacgctccttatttgcttttcttttttggattttcagcccatgctgattttagttagagttacactccacccttaacaaattttctgtcttcttttgattcttgtttattaaattcaggactaggaagtttatatgtaaaaaaaggcctttatagtggctttgtttaactgagaggtaaattggagaaattgctaatattaatttgtgcatcaatgttttacaattaatgggattcagttaattctcctatgatctagaaacttaaatgtgtcttcattctttagaagtactttttgcaagtattagtcaaatatagatcagtatcttcatttgattgtagaatttatgattnntagggannaaataggttnnnnnnnaaag

SEQ ID NO: 5865 - DNA, 645 bp, Gossypium hirsutum
gagaggatgtggcatgagcatgctgctttaaaagcacagttaaaagaattggggtatccgaagaagcataatagataaaattcttacatgtatagtctttttttacgaaggagtatttttcatagtaaatcatgaaaaatcagacatgcatttcatataattagtatatgtatgtagaagtctgtaattgaaatcatataaactgtttggttgataatgaatgaatgaaataggggttggaatttatttgtgattgtaatttttaatttgtcaaacttggggtcgttcttttgtttttgatatttatggaaaagccttcaattggtaattattatcattattcatattttttgaaatcataataaataatttagggtacttagttaacaaatttgtgcttttatatatatttctgattagaaacaaatattttaaaagaagaatgattaaataagattataattttaaaacaatgttttcttaatgcaaatttagattttaaattttttattttgaaatcaagtcgtattgaatttttaaatgaaagataaaagattttgttcacaaaatttaaatctgagatattaatcaactctaccccagattggtattttctatgtgtttttatgcactctctacagtgga

SEQ ID NO: 5866 - DNA, 644 bp, Gossypium hirsutum
cacggacattggactgctctagtggcccaagtctgcttattttccatatcacagaccttgcatggagagcacattgggccagcgacgatttgggccatctgctgaggttcagcgttcgcatggtgcaggccagtctgttgggccaactgggcctaataagtaggtcgctgttgggctaaattttaggcctgattctcttgggccatcagctcattatgttggacttgagggcccaactcctttgccaaatcataatctcggagtcccatggcggaccaaacctcatgtactttttattgattgtgactcttcgccgtgtattggtttcctccgtatctctgattttcatgcgtctgattattcgaccggtattaagtatgagtctaattttgataatattgattcttatgttcctatacctgttggaactttgtcttgatatccagattccggggtcactcatcatgtttgtcagaatgcctctagtttgaacaagtccactccatatttaggtactttcactcttttaatggagaatggggctttcactaaaatctcatctattgggaattttgttttgcctacaaagaataggatattacatctttctaatgtcttgtgtgtgctgagtatccgaaaaaaac

SEQ ID NO: 5867 - DNA, 607 bp, Gossypium hirsutum
caggtaagatcaagataataacttaaatatatttttcattgttgagatctttcttttatttggtttttctgtttaacggataggctgtagaattggttgtttcaaagctttgaggtacataatcaaattatttaagtcattattctgtggataacaattgtgaagaaagaatttccacaaggccctgcctaaaactgtgtccaaaaagagtacttaagaaaaactttttagactagaggtaagggggacaaacatattccagaaaataatttgatcatcctattgaactacatagccatcaaaaccctaatatctcagtatgtagttattgaatcaatggaattacttcaaatttggtatagaagtttcttttccctttttaaagtctgctgttatctaatggaataattttaacattttaccttttcatctgacaaaggaggtcaccaccagcttaattcctccggtatagaaaatgatattgatcctgttgagctagaagaatcaaatcacaatgaggcggtaaacttatccgaagagaaaagggaaaagaatatagaaatcccacacaataggaccgaagtagaaggagagaagatggaacacc

SEQ ID NO: 5868 - DNA, 630 bp, Gossypium hirsutum
agacaaagaaaaactcaatgtaagtagcaattctatgaaaacaataaagtaataacaattacttgaataaagattaaaccaaagacaacttaagcaatctaataaccaagcaataagcactataactattaataagctatagcaaagatacaacgcagatttggaaatgaaaaaggaagttctttattttgaattcaagttggcaagtgcagtttgccaagcacccatccagataatatatgaacctgacttaatgagcgttatcagttgtctacaaataagtaaagctaaaacttaggcacatagctgatagaacaaaaaagaacttcctgaactaataagaatgtgaacattgattataagcaccaaccacatctcagcacataaccatcagtccagaataaattttcttatagaaccaacagttctaataaatggttttactgcctaagatccttaccactagacttgtcttgccttatcatagaagaggccccctgatcattcaacttgttctggctctcatcaaccactgtattctctagatcaaccttttctgtctacaaaaaaagtacaaatagcagtttcttagcagaacattgaaaaaagaagcaaactttagtggtaagg

SEQ ID NO: 5869 - DNA, 605 bp, Gossypium hirsutum
tcagcaacagattcctctttgatattttgaattgtttttcaatctttatctggaaatttgtgattgaatttggactttgtttatcttgattttcttaaaatggatcagggaaaagcctagtttcctattatgatctgttgcattcttccagaaacaaaatgtagtattgcatgtatgcttgatgccttaaaactatcatcctatttctttcttaggtatttgttctaatattgagcctgttttctatacagctttgaaatcatcaattaagatagatggtgtcaagagtttcacttacacggaattggccacagcaacaaacaattttaacagttccactcaagttggccaaggtgggtacggaaaggtttatagaggcactttggctgatggcatggtagtagccatcaaacgtgcacaagagggatcattacagggtgaaagggagttccttactgaaattcaattattgtcaagattacaccatcggaaccttgtatctttgattggatattgtgatgaagaaggcgagcaggtactttctctcatcttctttcgatcatgtatactatacatatcctcagtggaatcccttgtaccctcaa

SEQ ID NO: 5870 - DNA, 658 bp, Gossypium hirsutum
tcctcaataagttcatctactgtctgttttacggcattcttattgcttcaccaatgtctacgagactttcctttccaaccgcaaccaactacaaatttcccaaatccttccactaattgctacttgactctttaccactatagtatgaagcttacataatgaatcaaatttatttcagcagaataagcagattaaactgaattttttatgctatacctcagtccaattactttcatctacaaaacaatataagatgcatatgaaaagaaaatcagtaagcaaccgaaaatcagtaagcaacctgataacacaatccctactgacagtttaagatctgtttctattactctatcatattgatactgattgatgtgagtgaaactatatcagtcatattacagacactaacatgcacacaaaagattaggcagcataagtattaagaatgactgaatccaactccccctggaaaataaagaaagacgaagaaaaaacagcaaatccacgttaacacttttggaatccaggatataaggctgacctgagaactattccgtagatcaatcctaaagaatttgacatttgaattatttgaaacacactccaacttatctgttgctttttgactagaaggtttccattttcatggagaagggaa

SEQ ID NO: 5871 - DNA, 658 bp, Gossypium hirsutum
gtttaccaatgattggctatacaacacagtcccctgaatatcttcatgaagacttcattgaccattacactttaatgctatttgaaattattgaccatattaacagtctcataactctttacatggaattaataaaccaagccaaacagacaagctttaatgtcgcaaaattgtccaagtccactttatccaagtaattcgcagttccttgctctgctttgtcttactcctcccaaaatcgtagcttactagaatcatctaagcctattggaggtgcataagtactgataatatttaaattttaaagtctttgctacctagtataagttaaagccaagatcctattgtcctcctaatgtcaacaacctcatcaaccaactggcagtctaagccaatgaagccttggctgactaaggtagaggcctagagaacttagtgatcctaggtttgagtctcaccttgtatatatgtgagttctggttagctagttagttaagttggttgagttagttattcagttcagtgcttataatgaatgtttctgatcaaaagataaagggcagtcttaaattatacctatccaattcctattcccatctcaacttgaattttataccataatttgcaaccctatttaccaatggatttaactttcttg

SEQ ID NO: 5872 - DNA, 559 bp, Gossypium hirsutum
gctgcagaagcagggaaattccataattcaaaagcagaactaagtagttttgaccaaagagatacacatcttttaacaaccaaagtaataaactacttatccatccatgatgaaacagaaaactcaactaaagggggtgagaaagagacattcatgtaaccatacaaagaatcaataaaaaatgcagggaatgacaccgcagttaagaataatagtccgcaggtcttactagaagctaaggaatcaagaaatgaaggaacagcccctatgaagaatgcttatgtaggcatacataagcgtgtacgtaagatcagggtttagaccagttggttcatacaaccacctttacgacgtggcatcttgcatgcttgaggttaattccagcactaacaaccagttctctatccccaggatacagcctccttgtaccaaaaaagggtaaggccatcacgatgattgcactttttgacaaggtattaaaccatttggttgaagcatatcagtcatcactcattattcgctttctagatagttcagtctgcttctaacgataaaccaa

SEQ ID NO: 5873 - DNA, 601 bp, Gossypium hirsutum
gtcaaattgcacaacaattacccgggaggacggacaatgagataaagaactattggagaaccagggtcctaaaacaggcaaaacagcttaaatgcgacgttaacagccaagaattcagggacaccatgcgttgcgtttggattcctcgtctgattgaacggatctgtgcttcatccggatccccctcggctcaaccctccaccgcctatgaaaagacgagtctcctgcccgcgttatcaggcacgtcatcagactcccaggacgccgaactctcctccgtttcagacctcacagattgttacaacccaccaagcaattcaaacaacccgaatagcttacagaacgggaggggtttatggtcggaaaatttaggcggcacttggaatatagaggatggggttgggtttcaagcgacggagggtggagagtcgatggagagtgtgtggaacgaagagaatatttggttcctaagacagcagctttatgatatgatatgaattagtttacgtgtgaggtatcaagttttatatgttgaactaatctgaaacagtagaataaaattcacccttcaaattaaacttattgaccacttaaatttctt

SEQ ID NO: 5874 - DNA, 620 bp, Gossypium hirsutum
gtgaacaaaacaaaaatgagactttgccattcttttcaaaatagcacttaaatagcgaaatttcaaggaaaaatttcacaaataatttaaatttatacatatatcgaattctttaccactaaatctcatcctaataaactgtgcatcattactaaatctcatcctaataaactgtgcatcattatctttacaaacttactagcaaaatgatcctggtttttagtttttatgcattgtttaaactcttaaatgcatttcaactgtgaacaacttgccatcactgccatgcattttggatgaatttattattgttcaatgaacaaatatttaatattcatacaaatacatttttcttattgcaagatatatgtgcaattctaacacacattactacaacttaaaagcgtgcaatcgtcttgctgagattaaaaccaccttacaaaaggaggtaatgagccttgaatttactccccaaagcatacatttgtaaaacgtgcaacttagtttgaaagaagaaagttccaataagggcaattgcattgtgaagcccactcgttaaacaagcaacagattaaaaatgattaaacatcattctttttcagtaggcaaagcacaacaag

SEQ ID NO: 5875 - DNA, 615 bp, Gossypium hirsutum
cctttaagatttttccacttgtgcgaccaaccaaggaaattttggatatgcatgtcgaaaactatctactgtacaagattgttccaaatggtaatatacctctttttttacattttattttcccttgtgattattttactctctttttatatctttctgtagcatctagtaattgaaattctaaaccttctgtagttgctcataatgttggagctcttatagcaatatgggctccaattatcttggtaagcatttaagaaccttgtaatgggaaatttgatgccatgatcataattcttgttgcttaatagcttgtttcattatctgagtgttttactcatgcataggtttattttatggatgctcaaatatggtatgccattttttctaccctttttggtggggttcttggagccttccgacacgtgggtgaggtatgcagtaatcttgtgctcaagctactagaaatatgataattaaaaactgagtatacgaatgtgtgcacatgtataaatgcatacactctgcgacctgtgcacatgtatgtatgcaagtatgattttgtggaaactctaaagtttgtatgcattgatttgcgaagttacattagggaga

SEQ ID NO: 5876 - DNA, 636 bp, Gossypium hirsutum
tactgtaccattatttactccacctcagacccacccagtaagtcaccaccctgcttctacatatgaggatgctgctattgaggcctctctacagtctgatgcttctggcctcaggtattatatgtgctaaaactgttatgttctggttgtggattagatagctgtctttgacttaaaacatgtttgacaggatgaggattttggaactattgcttcactgaatagtcccttagattgaaagaagaagacttgttttggctgtctgcaaaattgtcatgtttacttttatgttagatatatattgtaaattatgctaaataataatcattataatttgcattattatctcacaatttctattgcattttccttggaatatttcagtatatgtattttttatataaaatctacaataatgtataaatgaaatgtttgaatttattttctttaataaccctaaaaatgaagcagggcattttctgaaaacctttctttaaacccattttcttctttaatagttaagtaaattgttcaagataattggaagttagaaaatttactagattttaactcactgcgatgataaaaaagatcacttcaggttttacttctgatagattgttgtgaccagcttat

SEQ ID NO: 5877 - DNA, 457 bp, Gossypium hirsutum
  misc_feature (311)..(311): n is a, c, g, or t
  misc_feature (315)..(316): n is a, c, g, or t
  misc_feature (319)..(320): n is a, c, g, or t
  misc_feature (327)..(327): n is a, c, g, or t
  misc_feature (330)..(331): n is a, c, g, or t
  misc_feature (334)..(335): n is a, c, g, or t
  misc_feature (337)..(337): n is a, c, g, or t
  misc_feature (345)..(345): n is a, c, g, or t
  misc_feature (348)..(350): n is a, c, g, or t
  misc_feature (352)..(352): n is a, c, g, or t
  misc_feature (372)..(372): n is a, c, g, or t
  misc_feature (413)..(416): n is a, c, g, or t
  misc_feature (418)..(418): n is a, c, g, or t
ttactctacaccttcactataatacaaaagaaattgcaaataagaatatttgattaaacaggagatagttaaaagaaaaaggagcaataaaacagatccgaacaagatgaaatgggccttgaatcaaaatccaatcctcaaattcaaccgaatatgaccgtatgtgttctctatattttgcgtataacagctgaattttgcaaccaaaggaaccttattcgtctggcaatggcaagacagaactgggcagaaaaaaatatagcagacatctggggaaaagcagttcagaactagaggaatgactcatactntaanngtnngggaacntgnnggnnancgccaaanagnnncnggttcaatccttttcaaaanatttcatatcttgagggcgcactctatatcgaagttcttcnnnntngtcaagcataagtatttcaagaaaaatgtaaattcggaa

SEQ ID NO: 5878 - DNA, 557 bp, Gossypium hirsutum
  misc_feature (311)..(311): n is a, c, g, or t
  misc_feature (543)..(546): n is a, c, g, or t
  misc_feature (548)..(548): n is a, c, g, or t
gtttaacaaaggtaaaaataaatcagtaaccaaacatgtaacataaaagcgggaaccttcaatgtgtcatcatgggtgttgaatgagttcatcagaaccaacggaacattacatccgtatttagaattaagattctgagcaaaataccgataaaaaaaatgttagcttgatctgatcatacaaaaacaaaaaggaaaaaaaagaaaggagaggaaaggaaatcaacagcttatgacctcgatctgaataacaattaggtcaagaaaagtcaagccattgcgaacttcaatgacggatctgtgttttttttnggaaaaaaggagaggaaaaatcagttagatgaatttgtgcagaatgaaaaactatataatagagtaaaagtgaaggattaagaagcatacttgggaccagtacatcccatagtggttccaagacctccattaagctttaagacaacaagtttgtccaagagcttcttggtttcagcaggatctgcaattagatatagtgagagatcaatcgaatccaaaagatacttgattnnnncncggataaag

SEQ ID NO: 5879 - DNA, 578 bp, Gossypium hirsutum
  misc_feature (515)..(519): n is a, c, g, or t
  misc_feature (541)..(542): n is a, c, g, or t
  misc_feature (559)..(561): n is a, c, g, or t
gtgtctccattcgattcctgtggacagctttgagaaatactagtgacacatcatattaattacatgaacacaataccatcttgatgacactatatttaaaaattattgtgcttttttagtgaaaatataattttgcattgaagtaactagtatcagaaaaagaaagagaacctgaaatgttttacgcttcaaggatgggaactttggtgtttgtgtctcagctactcctactggaaggacaatgttagatgcatttcctctagtatccttgttttgctctaagtttcccaatgaattggtttccttctgagaactcatatgatccgtctttggtcctatactcctacatcgaaaagaggccaaccattactacaagaagttaaccgagaatccctcatataaagaccttaataaacattgagcttgctacatcaatgacacaccttgtgcttttaatgcaagagagagcaggtgctttcttggtaattttatgtgcttcagaatgaaacatcgannnnnggatggagtgcatttttggaanntgaagtttgggattcannngatttctggacactaga

SEQ ID NO: 5880 - DNA, 622 bp, Gossypium hirsutum
tgcttgtctgtaagaagataatgaatcgcttgtattgataataggctattggacgaaactgcaatatgttgcaatctttgaatctgggatggtgtgacaatgttggtgatctcggagtcatgagtttagcatacggatgccatgatctccgatgcctggacctgtgtggttgtgttcgtataacaggtatcccttccattggtgcttattagcatctcataatgcaatgtaacatacatgtacgatcctacttttttttcgtgaagcctcaatatcttggttaacacgaaagcccgtcttattttcccctaaaattttgtcaacctatccctggaccaagttttacagacacctaaagagtactcatgatctcaataacagtattatatgttgattcaataacaacactatgcatgttcactatatcaaagaagttgaaggtttaagcatggcattttataaagaacatttattggcttattggtgcagatgatagcgtgattgctttagcaaacgagtgtctccatttgaggtcgctcggactgtactattgccgtaacatcacagacagggcgatgtactcattggctcatagccgagagaagaacacaagttcgatgtg

SEQ ID NO: 5881 - DNA, 614 bp, Gossypium hirsutum
atgtataattcaacaaactatcgggaaaaacaattggcatcaatttgacatgaaaagagagaaaaacacaattccatcattttccttaccattcagacacatttcctattatagatgcaatacttctactaaacttgcttgtattttacaatataactagagaaagtatttcttctcttcttcagaagagttaacttttaatgaaggcttgacatgtagagaatttttgcagaatttgtgattcaatttttgatccttttttctttatcaggtacaggttttctctcattacccaagtgcacttccagatacttcatggaaaaggaacgcacagatggcaagctttatacttctgttgatacatgcacccttttccattaattgcaattctcaatacaatcaacccacattctaacatagccataatcccctcaatctctctaacttcaagccttaacccaccataaaaccttagtagacaagctttattatagttcatctgataaacgtccccctttatattatttgtggatatgagtccaatcaaacacatatcctacataaccaaaaaccctccaactcaaatttctaatgatgagaagatttcctgcagc

SEQ ID NO: 5882 - DNA, 628 bp, Gossypium hirsutum
tttagacttgttttttaagaaatagagccaagtataccttgtataggcatctgtaaaagcaacatagtagcaaaaattattagaagtaaccggggctggtctccagacatcagcaagcactagttgaagtggggcagtatactcagttgtagatttcgaaaatggctgcttgtgttatttgcctaagtgacaagcaatacaatgaaaggagcttttattgacaccaagaggaatgttacatttgcgtagagcctttgtaagtatgtttgtacaagggtgacctagcctacaatactatacatcaaaaggtaggtaggcaagtttgatgcaccagagtcggtcaaataaagtttgtacaaaccatgctgctccgaccctttaagaagaacctcccccgtgtgcatgtcccgaacctggcactatgaaggaagaaactcaaagattacttggttatctttggtaaaatttgagacagacaagagattctttatgatgccaggcacaagcaataaagagcgcatgaacaatggacgtgaatgagtgagtaaagagtattgaccaggggacatgacagagagaacattgccattgccaacatataccttacctagacccttgtatggagtgc

SEQ ID NO: 5883 - DNA, 620 bp, Gossypium hirsutum
ttggtcttcctgtggaatgcaccaaaccttctctttgaatttcaggctgctcgacaactgctagaagatgctgcactggtctctgatagtcatatggagtcaaatccccattgtccatacccaatttaatgccattgtctcccttcccaactgactgatatgaaacaacaatctttccatttggccccagcgggctgggcctatccctgagttttctatcccgaattccagacctaacctttcgtggggatgacactggcaaaacaccatttgaccatttatctgtatttggatgtgaccctatatgttgatgtccatcatcttctctagcaggagaagttttcgcagtttgtatcaaagatttcacgggagctgcttcaaaaactggtggtggagtcttagcctgacatgcattttttaacattgaacgtatcaactgattatgcagtggcagattctccctcccaagtaagcggtaacatgacttatcaaactcttttttactgagcttctgacttaaaaacctagtcaaatcataaaaatacctttttgacctctcaaccccaatcttcttcactatctgagatttcaattcagctaaatcaattctgaacccttgc

SEQ ID NO: 5884 - DNA, 626 bp, Gossypium hirsutum
ctctatataatttcggactcaatgtttatttattatattaatttgattattatttataataatttaatttttattatttacgcactctaatttaggtttagtttagatgggtggtgtgtttagctccgataaggttaaaaacagcggtggcggtgagattagttattgtagtagtgagattgaatactgtagcggtgagattagaaacagcggtagagtatgtgtttggattcaaatccagctgtggcagtaaagtgagaatagaaaatgacttttaagaacatcaaattagaattgatatatatcaaaagttttttaaattattttacttttataaaattattaaagcatgtgaatttataaattcacttaataaaatattaaaatgtatcttttgatattttatttattatcctataaattatcatatttgtatttatttaaatgatagttataaccttaaaacaccttaattgttatttacttattatcctataaattataatatttattaatttattatataatataagtatttatccaacctaatctagagataaattgcttgggcttttcaaatattaaaagggaaagaaaaggttaaaaacaatagaaatggccatggg

SEQ ID NO: 5885 - DNA, 612 bp, Gossypium hirsutum
ttctttttcttttaccatctttttttgccaaggactgttggtcaggcacaggccttttgtgtcaaggttttatcttttatttgaaaggcaatgggcacataaaactcatacctcagtatctcattggtttttttagtctctatatattttattagttgtgcttcaaatattcaaaaaatgacaatgctaactctcttcacaagagataaaatgggcaatgaagtccctgcacaactttttgtggaagatggagggttaaggaaacatagcttgtagaggattatgatttatagtgcattatgatgatacttgatctttgaatcacattcaagctatgtaaggagcaaattgttcaatgtttattaatagattatgcattttacatgtggctttgcgagaaatctgttgtatcttttccttctttagcagtacttcggtattgtgtataattcatttatatatgtaaaatatttagaaagagaacaaacttcatgcaattatttttatttaatcattgtttatattttctttctttccttttgtgtagtcatttatgcctaaagatgctttagttggcgcttggacaaagtctgctcacaggttgtgggtcaa

SEQ ID NO: 5886 - DNA, 624 bp, Gossypium hirsutum
gttgatgacacaggtaatccctgaaagccattatcccagaagtaaggtcagatttgcgttcctgcaaaacgaataacagaaaatgttaacattaaggacaaaatggtgaagcttttatggttgcaaatcattatgaacatagttgactcctttccaaagagaaagactttcaattttagtttattcatttagataaatgtccatgtaatttatgttccttgaaacagctgtaacttgtattggaagaaaataggaacagaagtataggtgaatcatatggataacataccagaatttttgaaaatataaaccctctaacttcttgattaagatcttcggtccgaggatcttctagagttacacctgaaactcatacatcaagcccttagatacctagaaatcaaagcaataaagcaagtgattattaaacaaacaagaaagcatactaacataaacaaaaaacccagaaatgtagcaaatattttcaagatatttgaatctgtaatagaacagcacacgggccttattatgctgtcatattacaactgaggactacaaagaaggagatgaattcttacaacacaatacctcagaatatatatataagactataaagataaaaga

SEQ ID NO: 5887 - DNA, 658 bp, Gossypium hirsutum
tttcttctttgtttttagtttttattccttatttgattttccatttaataaatttttcatgcattgtttttttctcattaggtttgacttagaacctggagccaaatctaagcttggatctggggacagagatgaagccctaagtggattgatagcaaatttgtcgttggaggggttaattcctcattggatcaggcctcttccacctaggttccctgtggatgaggaggtaaaacatttttcagggctattatttaataggttagtggagttcacatgttttacctgtcaagaatttttcagctagtgtggctcaatcctgataacaatcatgagcttcaatgggatcaaggaatgtgtgctgatactagtagaggagcagcagtgagagatttaattgcaaaagctttgaggggaccacttgcacctaaccaacaagaggtttatacccttcaatctaataattgctcatttagtaacaatgtgattttcatttatttatgcaaagctacatgacttgtttttattgagtgataagttcattgggactaataaacaccagttactttaaattttcatgaacccatggtatcgtaatagagcatacatactgaaaatgcttaaatgtatactgttgagtatatatttagtggctttg

SEQ ID NO: 5888 - DNA, 641 bp, Gossypium hirsutum
agctcggccgctttgtccgattgtgccatcctagagtaagcgcgggggctgaggatgaaatcagtgttgtcaccttcgccgtagtcggtcaccactatgttcactccattatcagtacaaagttgagggtttgtgcacctaacctgagagttaaaattaaaacaaattcaagtgtcattagttagcaataacatttagtggagtcgagtttgaatagtggtaaatttcagcttgaaatgaatttaaaacttgaattcgattgagtaccattcttaaattcaagatataattcaacttatttgattatttaagttttatatttgagttcgagcttgaattatgtttttgtttatacaattttgatattaattaaacttagtaaataatgaatatataatgataaattaaaaagctttacgcaacaaatctaaattttcattgtttttagaataagactagactagttggaagggtggattagttggaccaggaatcggtcaaggtactaatccgaaaaaatgtgttagactagttgacctgcaaatcggttgaataaatttttttactattttttaatataatttttaatagtttatttaattagaccgacaaatcaattaaattgattaaattggtcagac

SEQ ID NO: 5889 - DNA, 646 bp, Gossypium hirsutum
  misc_feature (640)..(641): n is a, c, g, or t
actaaataattatacattaaagaaaagattgtatgaaatacagatactatccattttcaatagtttaatgtcacatcaataattttatcttgaatttaagattttcattttgtttaaaataaaaatactgatataatattaaactattagaaaaaaggatataaatatcgtgatatcacttgttcttacaatccttttccaatatattattatcaattaaagcttcacatctttcttatttcatttttatttatatatttatgttatacattgtgttatagaagcagtctataccactataattatttaggaaagttcattagatttcatcttctttaatgatctcaactctaagaaagttatattcgacccactcaattcaccaactctcaagatgataataatggcctgtatcctaaattacatcattaagttcttaaatccttctctgcctacaaagaccatatttgtaggaagaataagagaaaaaacaaaaaaaagataatactctactcttttactacctcatctttctctaacaatctagtgaatcttcacgctacttcatgatgtctcatccaaatgacatgctgatgtgaatcacccatgataaccttcaaaatctggtgtagctgtagtnntatcg

SEQ ID NO: 5890 - DNA, 590 bp, Gossypium hirsutum
tggcacaaatagaagtcaggtattaacaaatccaaatacaatcagatgggaaaagcaacaaagaattaacaaggtaaaattttacctgaaggcgcaccactgcctgttgagctctctccttaaatgcaggatcagcatcaaatctctgcttggaagctttataaaatgcctaagaaagtaagagaatttcaaattaggattacaacaatcaattgattagttagtgggagaaacacaaagataaagaaaagaattactactaagctccaatatggtttaatccatctacaagtatatagtttataaaagttcaaaacaaataaaagagcacagttacaatagttattcaaaagatatttgcttaattatgtaacaatttccaaatgaaacatcattaaaagctaaccaaaataacatatgttgttgacaggtcctgtaaaaaagcatagcctctaaattttaaaaagcaaatcagcagttatttgctgggttcatgctaccgcctaccggtgcttagtaaattttgccttaaggttcaaattcaaaggaattagacagtattctctcacctgtagatctccaatgtgtgt

SEQ ID NO: 5891 - DNA, 638 bp, Gossypium hirsutum
aagctgatatggagctttatatcaaatcacacctgggatttagtacctctacctactggtcgatgtgctattggctgtaagtggatttttaaggttaagcgcaatgctaatggatcggtcgccagatacaaaggtcgtttggttgtcaaaggttatcttcaagaggctggattcaacttttatgaaaccttcagtcctgtggtcaaaccaacaacagttcgagtgatgttggcacttgctgtttctcgaggctggtcccttcggcaagtggacgtcaataacgctttcttgaatggggatttgcataaagaaatatacatgacacaaccacctaggtttgaacagcacaatggtgatgggcaaccacttgtttgcaggctacgaaaggcactctatggatttaaataagctcctcaagcttagtttcataagttgagggagtttttgttaaacactcggtttgtagcttctaaagctgatagctcacttttcatttgacaaacaggcattcagttcatctacgtgcttgtctatgtcgatgatattataatcacaggcactgactcgggtgagattgagaactttgtcaaaactctgcatgatactttctctttgaaagatttgggacaattgagcta

SEQ ID NO: 5892 - DNA, 621 bp, Gossypium hirsutum
tgtctatgcagttcggtttctctacatctacagagcttagctcagtgagatagtctactatctttaaactcaatacaacaggtgatttaagtcatatcacatcctgtttttaaactcaatataacaagtgatttaagtcctatcagatcctaatgtagcaacctcagtttggtactaaaaaaatctagatttcaccttttaagttttcctctgaaaaccacgggaaaacttaggttgtaaaccaaacaattaacttgtttcactctcaatgctctctcaaattcctcaaagaatagataagtgataaaaacacttgatacaaaacctatacaaatctcttcaaaaatataaacgtttgagacttgcgagcattttagatcaattacaatcaatccttctaaaaaactgtagctaaaatagaatacacaatataataataaagtctaagttaatgcaggaacgttggagataagtcgtcaatgcagtcttgatccaatctctttatttcatgggatccaattgctttgattcgattcgacccaattttcaagatatgttgcatcaaatggatcgttcttcatagaaggactatcatacttctacaacatcagcaagattctc

SEQ ID NO: 5893 - DNA, 582 bp, Gossypium hirsutum
agtgtttgcccaactaaatggggtcatatttacaaatgcttttttttttaattctctgttaatatgatatttttgctattttctttctctggggaaaaggcatctatgtagcatctttgtatttgaatttgaatagatagaaagcctttgacattgtagagtagactttcatttgtatctctaaaagaatcttatcagcacaaacaacgttttaaaatgccaaaatttgtttactttctaaaggtaataaaggagtgattgcttatgtaattcatcatgtttgctggcctatgttatttcagggtttgttggaaggggttagccattcatttacaaagaactttcatttcattgattcagtgaaagcatatctctcatatgctttgttgagggcttcagtttcgcagtcccctgtcatttttcaggttatcttgcatttatgtactctatttgtgggaagaatctgctacgagaatttgtctgactgtttatttctttgtggcagtatgctactgggatatttgctgtgcttttgttgcgattccgagagtgtcttaaagtatgattactattttgacagat

SEQ ID NO: 5894 - DNA, 654 bp, Gossypium hirsutum
  misc_feature (139)..(139): n is a, c, g, or t
  misc_feature (225)..(225): n is a, c, g, or t
ttggaggtttcatcgttattaatttagtcatttatattattttgtctataactgagaaacccaagggcttattaaaccactctgtaaacaccgttgccacgataatttgagggcaggcgggcaggcaaatggcatatanatgttgcccttatgtccccactccccggcatcaaatatacatattcaggtcaattcaattgaatcaaaaacctatacaaggaaggnaatcaaaaatggccatgaacctgataaattaatgagcaatttcccactttagttgtatcaaaaaatactaaaaaaattaaaaaaggttcctaaaagtattacttctcctaactctgtagctaactttacacgaaataggaaactatttttgtctacaaaactcgttaatggaatcctaaaaaggtactgaacaaaaagcattttcggcttagattctaacaacggggtacaatccaattccctctaccttttgaaatgtatggcatatacaagcatcaaaagcaatgttccaggacgattcttaaacgccaccggcggcagtagctgcattgctggctatccagggaaggtcaaagctcggctgaaaacgatcagaaaaacaattaccagagaccatgtcagcgattccttctaaaccctcaaaaaaaa

SEQ ID NO: 5895 - DNA, 577 bp, Gossypium hirsutum
tttttttttactttgtttatggtttatttatttttattatcattaatttttttaaaaataaagaaccttttttgcttttaaagacaaggggaaaattctccattatgaacggatcacctgtaaaaaatgtttggtagacatttctacatcttaggtaaggaaaaggataaaatttaaccaatagactcagtcaattgagtttaaccacacattattttgtgtttatttttgtctaaacatgtcatattttaacgtatttattaaatttatcttgttgcaaaattctcaaacagtctaagcattgttcaagaaccagaatcaagagcttgagacaagtaaatagactcaagctcaacttgaacctatcggagttcaatatttcggaagaaaccggccgaactacaaaggcattgatggacactatgtagctgttagataggacttaaaagatctgagtctctctctaaccagttctatggtttcggacctctcggctttccccatcaatcacacggtgacataatctattcacgttttcataacaatcgactaagtatgataatcaagctaacgcttg

SEQ ID NO: 5896 - DNA, 620 bp, Gossypium hirsutum
tggagttttctttttttcttgtcagtaaagattcgcatttggttttacacaggatttggcaaaccgaaagaggaaataataggggacaaagaataagattgcaaggtatgggttatcctgcccttcaactaaaatcgaatttggtccccctgcctctgactatacttttgataatgtgaccatcaacaagtaaataaactactatctaaatacgtttaggccgtccaaatactgaaattttcttaaaaaaatgacaaacccccatgggccatgaaacatgagccggagcaagggccatggccatgcctttaattgtgtgcttaatgctggcatcaaccttcaacccaaatctagaagctggatggcaccttgggcatgcagcaccaattgtatgaatgtaaataaaatcttattaaatcttcaaaaacttgccaactactctgttttaacacaagtaaactggtttacataacttattagaagctagggtggaaaaaacgagaataagctaaaaaaacggatttactgctaaatgtaacattttttttctttaacatacacacgaggtaacgcatctaaaccaagccaaagccgtcttcctctcggttcttcactgtccg

SEQ ID NO: 5897 - DNA, 610 bp, Gossypium hirsutum
tttcagtttgctggagttaattgtgaaggaaaaccgagcttttggctaagtgcagatggatattatcaggaagagggtcagaagaatgaaaagggacctatatggaagaaggtatatttgcatagggatatataaactttccccttatggcatatactagtaataacatggatgttgtacatgtaccttattttcagacaagaattaaacttttctgcgctctcttgtctttgccggttcctcctaatgtggtgaaccctgctggggaagatgtcagccagaggaccctggagcagcaagtgcttcttaaacttctactagttggctatcaaaaatcaggcacaagtacaatatataagcaggtaaatatatcaatggaggcaactcatttcaattagcctttcacccatttttgatggctgtaaacagaatctgttactgatgactactatggttctataacactagacatgcagataggatgtccaagtgaaacattaatttttgttacatatttcaggccaagattctgtataatgttcctttctcagaagatgaacgccaaaatatcaaattgaagatccaatgcaatttgtatggatatcttgct

SEQ ID NO: 5898 - DNA, 1233 bp, Gossypium hirsutum
  misc_feature (641)..(654): n is a, c, g, or t
  misc_feature (657)..(657): n is a, c, g, or t
  misc_feature (660)..(660): n is a, c, g, or t
  misc_feature (663)..(666): n is a, c, g, or t
  misc_feature (671)..(671): n is a, c, g, or t
  misc_feature (679)..(684): n is a, c, g, or t
  misc_feature (694)..(694): n is a, c, g, or t
  misc_feature (698)..(703): n is a, c, g, or t
  misc_feature (738)..(759): n is a, c, g, or t
  misc_feature (763)..(772): n is a, c, g, or t
  misc_feature (777)..(783): n is a, c, g, or t
  misc_feature (785)..(794): n is a, c, g, or t
  misc_feature (796)..(805): n is a, c, g, or t
  misc_feature (809)..(809): n is a, c, g, or t
  misc_feature (811)..(812): n is a, c, g, or t
  misc_feature (815)..(820): n is a, c, g, or t
  misc_feature (823)..(828): n is a, c, g, or t
  misc_feature (833)..(833): n is a, c, g, or t
  misc_feature (835)..(841): n is a, c, g, or t
  misc_feature (846)..(849): n is a, c, g, or t
  misc_feature (852)..(861): n is a, c, g, or t
  misc_feature (863)..(865): n is a, c, g, or t
  misc_feature (868)..(873): n is a, c, g, or t
  misc_feature (880)..(884): n is a, c, g, or t
  misc_feature (886)..(896): n is a, c, g, or t
  misc_feature (900)..(924): n is a, c, g, or t
  misc_feature (926)..(926): n is a, c, g, or t
  misc_feature (928)..(935): n is a, c, g, or t
  misc_feature (937)..(940): n is a, c, g, or t
  misc_feature (942)..(943): n is a, c, g, or t
  misc_feature (948)..(951): n is a, c, g, or t
  misc_feature (953)..(962): n is a, c, g, or t
  misc_feature (965)..(973): n is a, c, g, or t
  misc_feature (976)..(985): n is a, c, g, or t
  misc_feature (990)..(994): n is a, c, g, or t
  misc_feature (999)..(1001): n is a, c, g, or t
  misc_feature (1003)..(1014): n is a, c, g, or t
  misc_feature (1016)..(1024): n is a, c, g, or t
  misc_feature (1026)..(1026): n is a, c, g, or t
  misc_feature (1028)..(1032): n is a, c, g, or t
  misc_feature (1034)..(1047): n is a, c, g, or t
  misc_feature (1049)..(1053): n is a, c, g, or t
  misc_feature (1055)..(1055): n is a, c, g, or t
  misc_feature (1061)..(1071): n is a, c, g, or t
  misc_feature (1073)..(1077): n is a, c, g, or t
  misc_feature (1082)..(1082): n is a, c, g, or t
  misc_feature (1085)..(1086): n is a, c, g, or t
  misc_feature (1094)..(1099): n is a, c, g, or t
  misc_feature (1102)..(1103): n is a, c, g, or t
  misc_feature (1106)..(1109): n is a, c, g, or t
  misc_feature (1128)..(1134): n is a, c, g, or t
  misc_feature (1138)..(1138): n is a, c, g, or t
  misc_feature (1140)..(1140): n is a, c, g, or t
  misc_feature (1147)..(1148): n is a, c, g, or t
  misc_feature (1152)..(1170): n is a, c, g, or t
  misc_feature (1177)..(1177): n is a, c, g, or t
  misc_feature (1179)..(1180): n is a, c, g, or t
  misc_feature (1184)..(1192): n is a, c, g, or t
  misc_feature (1195)..(1211): n is a, c, g, or t
  misc_feature (1215)..(1216): n is a, c, g, or t
  misc_feature (1218)..(1225): n is a, c, g, or t
  misc_feature (1227)..(1230): n is a, c, g, or t
gttatttttcgtcgctaaatctcaaacttttattaaacaaaagttaaataataataataaaagatggtatcaagtatcaatacaattttaaaggaaaaaactgattcacctattcccaaacttgattttaaaaaatcacaaccactcttataaaatcgagatatattaagatctgatggatttaatatttttccactcttcttttcaaaaacatagcacaattactaacaacattttaaaaacaaacattgttaatcaaaaatcacagaatcacaagattaagaaattgatatatatattttatccataaaaattttatggtgaacatgttcacaacacaaaagggatacattcatgttctacaaaactaaatttattcaaatatataaaaacacacttttatatctacaaatatagtacaatcataagtacatgtccgaactggtcacttgtaaactgaaattataactaatatttattaatatataatttagcttaatgttatgaatgaaatcaaaacattggcattgaactcacatatgtatagcattttaatatatatatatatatgtatattgtaagtgtaatttaacaatgttttcttgaaacattaacgtagaaaccatctggaaatcccagannnnnnnnnnnnnntgnaanaannnnaattngaaatttnnnnnnacctcccttnttcnnnnnnccccctttttttctctccccactacctatttattnnnnnnnnnnnnnnnnnnnnnngttnnnnnnnnnnctccnnnnnnntnnnnnnnnnntnnnnnnnnnnccancnnttnnnnnnctnnnnnnttttncnnnnnnnacttnnnnatnnnnnnnnnntnnntcnnnnnnttctttnnnnntnnnnnnnnnnntttnnnnnnnnnnnnnnnnnnnnnnnnntntnnnnnnnnannnnanngacannnncnnnnnnnnnnaannnnnnnnnaannnnnnnnnnttaannnnnaaaannnannnnnnnnnnnntnnnnnnnnntntnnnnntnnnnnnnnnnnnnncnnnnntnttttcnnnnnnnnnnncnnnnnatgtnttnngtcttctnnnnnntannaannnnagaaaaaaaaaaaaaaaannnnnnnatantntattctnntttnnnnnnnnnnnnnnnnnnntgtttananngatnnnnnnnnngtnnnnnnnnnnnnnnnnncgcnncnnnnnnnntnnnnctc

SEQ ID NO: 5899 - DNA, 624 bp, Gossypium hirsutum
atacttttccctacaaatgttgcaaatcgtgtagctgaccaacactaaaatcatatgttgtagatattctgtatgatagctggtccccggctatgactgtcagttccatttgtatcagcatcctctccatgttatcaagctcaactgtgaaggtttgttgaaactcttattgtgttggccatttgtttttgttctcctagatcttgtcttatcaagtgaaagctgaaatactgaattcactttgtcataatgcagcaacggccaactgataatgatcgatacgttaagaactgtcggaatgggagatctcccaaggagacgagatggtggttccatgatgataaagtgtaatattttagaactgttatttatctcttataactgcgagggtttcatcaggagagatgggaaaaggatggccctccctaaatgctgtggtaatcttctaaatttgcctttgttgctgtgtatgaaattgtgaatcaaacatagatttaatttgaatgtggctgcctccttcaagcagcggagtcggaaatccaatataaacctgtttcctaatcatgttagacacccatttgtcaaatcatggtaggggtgcatgggaggaccgttaacgtaata

SEQ ID NO: 5900 - DNA, 646 bp, Gossypium hirsutum
ttctggtgtcaacaggaactaccctttgctattccactactgaattgattaatctttgctgttccagaaggttcagtcttggtttcaacttccaaacggaaagtgggagctggggaaaataatatcaagttcaggaactgagtctgttatttcatttcctgaaggaaaagtaagcggttgtaagaaagaaagaagtatgacttcttacattatgtagattctaaattcatttatttgcatctcaattataggttttaaaggtgaattctgatagtctgatacctgcaaatcctgatatcctcgatggcgtggatgatctcatgcaacttagttatttaaatgagccgtcagtcttgtataatctccaatatagatacaatcaagatatgatatatgtaagagcttgtacttgttttctattagttttgagcctacactcaagttaagtattttactaatgctgttataatctatattgaatttagacaaaagcaggaccggttttagttgctgtcaatcctttcaaagaagttcctttatatggaaatgactacattcaagcatacaagaataaatccattgagagcccccatgtatatgcgattgctgacaccgccatccgggaaatgtcacgaggtactttcag

SEQ ID NO: 5901 - DNA, 605 bp, Gossypium hirsutum
taaattaaaatgacatttttatttatgattgaaagtaaatatttacaacaaatcaaaatcacattcgtattcaaattgctctaaacacaaacaaatttacaatgcttgtattacttcaattcttgtatttaattttatccaatttaaatctcttataaagttgcaatgtttcatgacttaaaagaatgttttcattgaaccccatgtaatgacctaatagtcagggtgtttaccatctcaagtgtatcttggatttgagtcgcactagtcacatttattgttcgaactttatcctgttattataatttactaacaaaatcaaggttttcataagatttaccaatcacaaattatttaaagcataatacacttttagatttatttacagaattaatgataataatgcttagtatccaattaaaaaggaagccgcgtcggaaacagtggaattttcagtaaaaaagttctctttttcttttcaattattattaaaaaatttaaaaattgagtttggttaaattctacttttaatccttatattatactcagtttacctatttagttcataatttttaatttaattctaccgttactaatgtcctccc

SEQ ID NO: 5902 - DNA, 653 bp, Gossypium hirsutum
  misc_feature (20)..(20): n is a, c, g, or t
  misc_feature (648)..(648): n is a, c, g, or t
gtaatgtagtatcatatatntgaggagcatttccaaaagagttgcaccaattcaaactttgactttgctgatatacaaacatgcgcatatatccatgggaagatgagcaaagacatgtatattccgagttctatatatctaccttggccatctgaaattaatcagtaacctttgcagtaagatgaatgagaggttgcacgaggcaagccaccaatcagtccaaaagtaaatcagttcaccattgctccgcccactctccattggtttgcagccatcaatatctacttcaacagtgaatgagaataaatgcttgtgaaggaatagcaagaaaaggcctgatttgaaatttatctcaattagcaggctttttcttccctccgaaagaagatattagtattcaatatcaaagaattgtatccatacagataaaacaacctaagcgctttagccagaacctatgaccagtaaccctgtctaggttataacagcattagagtggagcgggcagcagcaagctattcaatacttgcacttgtgggcgcactgtttctctgttggaacttcatagcatcagccaactattgtttgtggttataagaagaatgcacaatattctatttctagtatttccttacgaaatgcatcttnctctc

SEQ ID NO: 5903 - DNA, 651 bp, Gossypium hirsutum
gactgaaactttggtttcacatggatacatttagagtaaacatgactactccatgttcacaaaaagtgtagaatccaaacaagtcatcatgttaatatatgttaattatctgttgactacaaaaaaatgacagtaaattgattagcaaattaaatggtatattgcacaacaatttcaaggtgaaggaccttggaagtctaaaatattttcttgggatcgaaatatcaaagttggataaaggcattgtgctaaatcagagaaaatatgctctcgaattaattggagatgtcgatttaaaaggagcaaaatcaacggtcactccattagagtagaatcaaaagcttacaacagtagaatttgatgaaacattgcagttgaaaaatggtggtgaaaaatgatggtgaagttttagcagatgcaacaatttatcaaagactaattaggagattgttatacttgacaaacactagaccagacattgcttatggtgtgcaacacttgattcagttcatgcataagcctaagaagtctcattatgcagctgcattgaggattgtgagatacattaaaagcaattcaagacaaggaattctgcttgcttccaatggagatccaatgttaattgcatactatgattcagattgggcatct

SEQ ID NO: 5904 - DNA, 642 bp, Gossypium hirsutum
tttattttctccccttggtggaccgccatgtgaaacgacaacgttttggaggacagagatgatggaagtgttttaccatatgtgtccctggggttagttcgaaactacgaaaaaacctaatacgccaacgggcggaagacaaagaagtggcgccaagcggttaccataaaactacaaaaaatatctttgaaaattcattaatacaacgaaaaatatccgaagaattttaatctcttccgtaaacactaaacacttggtgttggcgtgttttccgtctaatcaatggcttctttggttctctcttctctctgtttcacttctcaaaagccttgttcttttacgtcttcgctccgtttcagcttgggagctctgacgggatccagatccgccgctccgttaactgtcggattccgaccggtgaagaggagaaatggaagaattagggtttcggtttactccagagcttctcctcttgtgtttcgggacctcgacgctgatgatttccggcatccgctcgataaacaggtggggatttatgttgcaaatttaatttgagaatttattttaatcaattatttatttatttacttttggttgcagaatacgctgatcttgaaagcgattccagggcttaacgaacta

SEQ ID NO: 5905 - DNA, 660 bp, Gossypium hirsutum
attggttaggtataacaaccttcccaaaagtcgttgatatactgtaacatccgtaattaaatcatctccatcaacctttgtttgtacagactcatcatattcaaccgaggtaattttttgattctgctcaagcggtgtacacactgatttcacttctcctaatcccagatcagctaacaactccaaagcatatttttgttggttcaatacaattcctttgcttgatctcatcacctctattccaagaaaatacttcaacacacctaaatcatttatcttaaaattttggtgcagaacctgttttagttcatttatcatactagtgctacttcctgtaattaacagatcgtcaacataaattagcaaaatgactatgttaccttcgttcctttttgtgaataaggaataatcatacttgctttgtacataacctctctacgttaaggtttcagtgagttttaaattccactgccgagaggcttgcttcagaccatacagtgacttacgcagacgacatacttgagactccccctggctgcgaaaaccatccggaagttccatataaacttcttcacacaagtccccttgtaaaaacgcattgtaaacatccatctaaaaaagatgccattcataaattgttgccatactgaccacaatccg

SEQ ID NO: 5906 - DNA, 649 bp, Gossypium hirsutum
ttttgttgaacttggtagcagtaattctgatttccatccttaggctggatagttgatacttcttgcagatgcatgggattactagtttcgatatctaacctcttcattgctttcatctttttacagggtgattggccctgcaatgccctcagctgagttacttgctgcagcagccaaattaacagaagcccaggctgagctcaggtattctatgtaatgaagtttttttactcagtttttattggttccactttctgacattttgagtttcacatgttttcattttatacaagtctggtctgcataattgtcaaagtcatttcggatatccttattttgtatcagaaaattaatgttggcttttttaactttttctctggcatccttttcacaaattaatctagagaagctgagatagaggaagatgatgaactctttattggacctccaccacctgctctggttgctgaggctgaatcagcaaatgaagcagaacgttttgaagaggttccaaaatttaccccttatgtagcttattcagatttagctatatatcttttattggcaaggccataaaaattgcaaccttgagcttcttctgaaatgtggaaattttcccccgtgaccttttattgccctttggttcttc

SEQ ID NO: 5907 - DNA, 643 bp, Gossypium hirsutum
gcattccgagggaaatgcctcatcatgtccgatgaaaacttaccgataattgtaaaagatggcgtagtcaagcattgcaggtgtttctttttgtttcatggactgatgataatcccggagagtagtcggcttcttagctgtcttggagcttacaagttacaattgaaacaaaaatgggggaaaagagaaaaaatgtggcattctgatatatatatatatatgaagtggttggattttgaggattcaatgaactattagatcttgaattccctttataagtcctaatccttgacctgaacttaaaatgaatttcgttaaacttgaaatgatatgtagatgaaaaaatctgaatatcttgggtcgcttgaatgaatgaatcgtaaacaaatgtcggaaacagtggtttgcaaggcttttcaggtcccattcttctcttgtgtttaagttcaagcccagttaatcttaccctgagtgggctacatagtaatattataaaattcggacacaatttcaaatttcgatttaaccgtttaacttaaaatatctaaattttaaatatttgggtatttaataaattcattaaattacaagttataatgaagaactaataaataagaatttggcttaatggtaacgtttgagt

SEQ ID NO: 5908 - DNA, 799 bp, Gossypium hirsutum
  misc_feature (164)..(164): n is a, c, g, or t
  misc_feature (307)..(307): n is a, c, g, or t
  misc_feature (314)..(315): n is a, c, g, or t
  misc_feature (530)..(530): n is a, c, g, or t
acctttcagccattcgtattcggcttttccagttttgcatggcattgaatattgattttgccataagcattctctttaggaagggtatgagttgcaattccgagggaaatgcctcatcatgtccgatgaaaacttaccgataattgtaaaagatggcgtagtcnagcattgcaggtgtttctttttgtttcatggactgatgataatcccggagagtagtcggcttcttagctgtcttggagcttacaagttacaattgaaacaaaaatgggggaaaagagaaaaaatgtggcattctgatatatanatatatnngaagtggttggattttgaggattcaatgaactattagatcttgaattccctttataagtcctaatccttgacctgaacttaaaatgaatttcgttaaacttgaaatgatatgtagatgaaaaaatctgaatatcttgggtcgcttgaatgaatgaatcgtaaacaaatgtcggaaacagtggtttgcaaggcttttcaggtcccattcttctctngtgtttaagttcaagcccagttaatcttaccctgagtgggctacatagtaatattataaaattcggacacaatttcaaatttcgatttaaccgtttaacttaaaatatctaaattttaaatatttgggtatttaataaattcattaaattacaagttataatgaagaactaataaataagaatttggcttaatggtaacgttgagttctttggaattttatttaggtaatgcatgcttgattgcttgtagctcaagtagaggtgaacga

SEQ ID NO: 5909 - DNA, 787 bp, Gossypium hirsutum
  misc_feature (611)..(635): n is a, c, g, or t
  misc_feature (637)..(643): n is a, c, g, or t
  misc_feature (652)..(653): n is a, c, g, or t
  misc_feature (655)..(657): n is a, c, g, or t
  misc_feature (660)..(664): n is a, c, g, or t
  misc_feature (667)..(667): n is a, c, g, or t
  misc_feature (670)..(676): n is a, c, g, or t
  misc_feature (678)..(688): n is a, c, g, or t
  misc_feature (696)..(699): n is a, c, g, or t
  misc_feature (701)..(701): n is a, c, g, or t
  misc_feature (705)..(708): n is a, c, g, or t
  misc_feature (712)..(713): n is a, c, g, or t
  misc_feature (715)..(715): n is a, c, g, or t
  misc_feature (721)..(728): n is a, c, g, or t
  misc_feature (730)..(736): n is a, c, g, or t
  misc_feature (744)..(746): n is a, c, g, or t
  misc_feature (750)..(763): n is a, c, g, or t
  misc_feature (765)..(769): n is a, c, g, or t
  misc_feature (775)..(779): n is a, c, g, or t
  misc_feature (781)..(784): n is a, c, g, or t
tctacataaagtctacgcacatcaatctgaaaaatgcaacattgagaagcactttcgaggaaacctcaagactaggaaatcacctcttaagagaacacttccttggtttaaccaggtagatgatttttcttacccgaatgcagggattgatgaaacattaattaagcaatcgactaaaaggaataacaggatggaagacgcaagtccatactgtgtatatcattcttcgaggtctgttcagtatactgaaaatagcaaccaatgctcagttgctagctgtagtttcaatggtgttgctggtggccgactttctcctaaaccattggaaaacacatctgatcattccgatgccgagtcgtcattcccatctttgtgtggcaaaagagacttaccctcatcccctgttgaaaaagtcatcaatatccatgaactagagcttcgtgcttacaagtcgacagtagaggcattgtatgcttcgggtcctttaacttgggagcaggaggcattgttaacaaatctccgcctctcccttaacatttcagatgaggaacacctactccagttgagacaccttttgtctgctcacgttttatgatccggtcatgttgtcnnnnnnnnnnnnnnnnnnnnnnnnnannnnnnnaccaaacannannnggnnnnnctnggnnnnnnntnnnnnnnnnnnatggtaannnnanaggnnnnaatnngntaacannnnnnnngnnnnnnnaaaaaggnnnaaannnnnnnnnnnnnngnnnnnttttannnnnannnnttt

SEQ ID NO: 5910 - DNA, 1423 bp, Gossypium hirsutum
  misc_feature (7)..(7): n is a, c, g, or t
  misc_feature (434)..(438): n is a, c, g, or t
  misc_feature (445)..(446): n is a, c, g, or t
  misc_feature (461)..(462): n is a, c, g, or t
  misc_feature (465)..(466): n is a, c, g, or t
  misc_feature (476)..(476): n is a, c, g, or t
  misc_feature (478)..(485): n is a, c, g, or t
  misc_feature (487)..(499): n is a, c, g, or t
  misc_feature (507)..(509): n is a, c, g, or t
  misc_feature (512)..(512): n is a, c, g, or t
  misc_feature (514)..(515): n is a, c, g, or t
  misc_feature (521)..(522): n is a, c, g, or t
  misc_feature (546)..(551): n is a, c, g, or t
  misc_feature (600)..(600): n is a, c, g, or t
  misc_feature (606)..(610): n is a, c, g, or t
  misc_feature (612)..(614): n is a, c, g, or t
  misc_feature (616)..(622): n is a, c, g, or t
  misc_feature (624)..(625): n is a, c, g, or t
  misc_feature (631)..(631): n is a, c, g, or t
  misc_feature (633)..(633): n is a, c, g, or t
  misc_feature (644)..(645): n is a, c, g, or t
  misc_feature (648)..(648): n is a, c, g, or t
  misc_feature (652)..(653): n is a, c, g, or t
  misc_feature (666)..(670): n is a, c, g, or t
  misc_feature (682)..(684): n is a, c, g, or t
  misc_feature (688)..(688): n is a, c, g, or t
  misc_feature (696)..(699): n is a, c, g, or t
  misc_feature (715)..(723): n is a, c, g, or t
  misc_feature (728)..(738): n is a, c, g, or t
  misc_feature (740)..(747): n is a, c, g, or t
  misc_feature (762)..(762): n is a, c, g, or t
  misc_feature (770)..(770): n is a, c, g, or t
  misc_feature (777)..(777): n is a, c, g, or t
  misc_feature (779)..(779): n is a, c, g, or t
  misc_feature (781)..(781): n is a, c, g, or t
  misc_feature (795)..(795): n is a, c, g, or t
  misc_feature (815)..(816): n is a, c, g, or t
  misc_feature (818)..(822): n is a, c, g, or t
  misc_feature (825)..(830): n is a, c, g, or t
  misc_feature (832)..(840): n is a, c, g, or t
  misc_feature (843)..(846): n is a, c, g, or t
  misc_feature (848)..(862): n is a, c, g, or t
  misc_feature (865)..(873): n is a, c, g, or t
  misc_feature (876)..(884): n is a, c, g, or t
  misc_feature (886)..(893): n is a, c, g, or t
  misc_feature (897)..(903): n is a, c, g, or t
  misc_feature (909)..(912): n is a, c, g, or t
  misc_feature (914)..(914): n is a, c, g, or t
  misc_feature (918)..(939): n is a, c, g, or t
  misc_feature (941)..(962): n is a, c, g, or t
  misc_feature (965)..(992): n is a, c, g, or t
  misc_feature (996)..(1012): n is a, c, g, or t
  misc_feature (1014)..(1015): n is a, c, g, or t
  misc_feature (1021)..(1022): n is a, c, g, or t
  misc_feature (1024)..(1027): n is a, c, g, or t
  misc_feature (1029)..(1031): n is a, c, g, or t
  misc_feature (1033)..(1045): n is a, c, g, or t
  misc_feature (1050)..(1058): n is a, c, g, or t
  misc_feature (1062)..(1076): n is a, c, g, or t
  misc_feature (1078)..(1096): n is a, c, g, or t
  misc_feature (1101)..(1104): n is a, c, g, or t
  misc_feature (1109)..(1117): n is a, c, g, or t
  misc_feature (1120)..(1122): n is a, c, g, or t
  misc_feature (1124)..(1130): n is a, c, g, or t
  misc_feature (1135)..(1141): n is a, c, g, or t
  misc_feature (1149)..(1149): n is a, c, g, or t
  misc_feature (1153)..(1168): n is a, c, g, or t
  misc_feature (1170)..(1180): n is a, c, g, or t
  misc_feature (1184)..(1184): n is a, c, g, or t
  misc_feature (1186)..(1186): n is a, c, g, or t
  misc_feature (1190)..(1198): n is a, c, g, or t
  misc_feature (1202)..(1208): n is a, c, g, or t
  misc_feature (1210)..(1216): n is a, c, g, or t
  misc_feature (1219)..(1231): n is a, c, g, or t
  misc_feature (1240)..(1252): n is a, c, g, or t
  misc_feature (1261)..(1262): n is a, c, g, or t
  misc_feature (1264)..(1276): n is a, c, g, or t
  misc_feature (1278)..(1281): n is a, c, g, or t
  misc_feature (1296)..(1299): n is a, c, g, or t
  misc_feature (1301)..(1302): n is a, c, g, or t
  misc_feature (1310)..(1318): n is a, c, g, or t
  misc_feature (1326)..(1326): n is a, c, g, or t
  misc_feature (1335)..(1338): n is a, c, g, or t
  misc_feature (1340)..(1340): n is a, c, g, or t
  misc_feature (1343)..(1343): n is a, c, g, or t
  misc_feature (1347)..(1355): n is a, c, g, or t
  misc_feature (1358)..(1383): n is a, c, g, or t
  misc_feature (1387)..(1388): n is a, c, g, or t
  misc_feature (1390)..(1420): n is a, c, g, or t
ttgttcnaaataagatcaaagggaacaaacaataatgcaaacagtgagtttgtgtgtgagcattaatagaagagatcgagcccttttttttaagcagcaaaagacagccaatcactgaccggataattaaaaaaaaaagaaacagacaaaaacccacattgtattcgaggcgagtgagcggcactgtccaatcatagcccagaacccagtgggcccgattgcagctttcttgtcctaaaatgtgttaaataatcatttatgaccggaaaacgacacctctctccaccgcatctcgaagggaattcacgctttcatcgccgcgcgtgaaagtttctttccccccattcctacgctgacaacactcgctaaatttattgcttaaaaataaaataaaaacatatcctccactgttccagtccccccctaaaaaaaannnnngattttnnttttttttatttttnnagnnttaaatttancnnnnnnnntnnnnnnnnnnnnnggggaaannnacntnncacgcnncccctgaaaggcgtgaattccctnnnnnntgccgtgaaaaaaggcgccctttcccggccataaatgattattgccccngtttcnnnnncnnnannnnnnngnnggcccncntggtttcgggnntancatnngacagtgcccctnnnnnccctcaaaaaannngggngttttttnnnntttctttttttttttnnnnnnnnnccagnnnnnnnnnnncnnnnnnnnctaaaaaaaaaaggnctctatcnctttttntngngtgctcacacaaanactcacagattgcctttgtnntnnnnnccnnnnnnannnnnnnnnacnnnnannnnnnnnnnnnnnnaannnnnnnnncgnnnnnnnnncnnnnnnnnaaannnnnnncccccnnnncnaccnnnnnnnnnnnnnnnnnnnnnnannnnnnnnnnnnnnnnnnnnnnccnnnnnnnnnnnnnnnnnnnnnnnnnnnnccannnnnnnnnnnnnnnnncnnaaccgnncnnnncnnnannnnnnnnnnnnnccacnnnnnnnnntctnnnnnnnnnnnnnnnannnnnnnnnnnnnnnnnnnctctnnnntaccnnnnnnnnntannncnnnnnnnctatnnnnnnncccttatnaccnnnnnnnnnnnnnnnntnnnnnnnnnnnattnancctnnnnnnnnnccannnnnnncnnnnnnnctnnnnnnnnnnnnntcataaatnnnnnnnnnnnnnatcttccanntnnnnnnnnnnnnnannnncctcctatattctannnnannataacctnnnnnnnnnccctctantctcccccnnnntntcngatnnnnnnnnncannnnnnnnnnnnnnnnnnnnnnnnnncccnntnnnnnnnnnnnnnnnnnnnnnnnnnnnnnnntat

SEQ ID NO: 5911 - DNA, 635 bp, Gossypium hirsutum
tatggattgatataatttcaacctgtaagatagtttccattcgaaaagaaatattaaatgttaaaaattttgttacttataatacatatctatatgcttctgttgttcatgttggtgtatgcttctacatctgagtacagattttcctttacacagaacttattgtggcctttctctttaatgcatctaccagtatgaataaccttaagctctgaaggaaacagaacctaaatacaatagcaagatacctattttgcaacaaaatataccattaataaattaacatggagcaatagaaaactggatttttcttaccaatgaacatttatttgtttgcctgcattccttgtgatccttggagggaaaaccaccaacctataaaggatggaacttgtataagccaccttaggacatacattaacctatctcaacccttcattcactagttcataggtgttcttacagaatcaaatgctccatgactacagttcaagtatttactcagttccatttgtaactcttctacttccctgaagacaaaaacctttattgagattccatgcaacagagtaggaaatacttcttcaaagaaaagacaaatagaagccatattttaggccaccactcaattcata

SEQ ID NO: 5912 - DNA, 587 bp, Gossypium hirsutum
gagctatgtacttcgcaatgctattgatcggctggaatactcatcatactattaaaaggtacgtctcctagtgcatttgtagtttgatttatattgaattttgaataaatgttcactagagctgcaaatagatgaataaatgggcacatatatatacatatattccaggtaacatactaaagcatctattgaaaaatgatgtgtgctctattgtacttttgcagatggacaattgatgttggttggaccagtacttgggtgaggatagtgaacgaatggctagccgtctgtgtttactgtaagtgcttaactagaactagacttgtctggatttgagtacgtgtcatatacgagtatattcaactttttttaaagttcctttgcatattttaaataccatgccttgtacttttatccaaatatgtgtcgagtaacgtagatgttggctcgagttttggatgctttagtgatgattaaaagagtaagatgaatgtggttgcagtgtggatgctggtagctcctgttatattgaagtggagacaaacaagtgaaagtgcctgaaaaagctttggaaggtggtgtcaaat

SEQ ID NO: 5913 - DNA, 660 bp, Gossypium hirsutum
catcgacaagttggatcaaccactttgggctcttgtcagagacggtccatttgatgatgagaaaaagtgtggccaccttgggttcataaaatctctccccaaatttcgccactaaaacgtcaatggatgaattaattacatatattttacttcaatttctaaagcaactttttgtgcatattacagcaattttccatctttcataaattcgtttcaatttcaaccactttaatcttctaaaaaatagtgtattttgacataacgaaaattaaactttaaatattaaaagaaaataataaatgcatgattattcaattatgaaacactgttattagttggtgaaataataatggatgcttatgacaaatcaaattgttttgctgtttctattttgtttactataaattagattagactgtgagatccaacgataattagtatcaatagttacataaagtatcacaaacgagtaaagtaaatgcattttttgaggagctatttttatataaaaattattagtgaaattttgtaatcggttgtcatgtgatttttaattatattaaaccatttattaattatcttatattcatacttgtgttcttaacatctaaagatgatgaacttgataaccgatgggacatggtccactggaagacagaa

SEQ ID NO: 5914 - DNA, 611 bp, Gossypium hirsutum
ttctgaatatcaaatattagtttctcctcttaacaaactatattgtaaagcataccaaaaaatcataggacatttaaaaaaatagagtgagtaccaaaaccaaaatttattagggagtaaaaagaattataagggtatgctaaaaaaaaatagggagtaccaaaaattatgggagagtatatggtgtataaaaaattataaggaaatacaaaaaaaaaacatgagtaaaaattatgctttgggtggggcaactttccatctgagggtttgttgatcttgatagcatttctcctttttttttttttttttttttaaaaaaaacccaaaaacctttttaaaatttccccaaaaaaaaaattttttaaaaaaaaatttttttttcaaatttttttttcccttttaaagttttttttttttttaaaaaaaaaaaaatttaaatttttttttaaatttcccgggtagcctttttttttttttgtttgtttttttttcaaattttcactttaaaaaaaacccggggaaaaaaaagggaaaaggaaaaaagggcccaaaaattttggaaatttttcaaaaccatttgaaaaaatttaaaaaaatttttttggaacccc

SEQ ID NO: 5915 - DNA, 611 bp, Gossypium hirsutum
tgttttccatgtattgcttctcattccgcttcccttttcatttatgaaaatttcatgcgttacagtttattaaatttgttgttcgactttcattaagaaacaaatgtatcatcattcaaacgagcgtacaagactcaactctcatgtcattttcttatttcattattaaccaaatagttgggatttggatcccgtcaacaaattacatcttaacaatacaatttcagactcaagttttttttttatttaacaaattcgtccactggtattaaattaattaattgtaattactaaaaaataaaagataacaataataattttatttaaaataaataaatgcagataagaaactacccttgataaaaactaaaaactaaaccaactcaacaaataactttatttttttccctcagaccacaatttgtatttatttaatttatcgtatttttttctgtcactcgctaatttctgtgtcaaaatctagtagaactatataaaattctgatcataaagggtaatgtgtatgtatatatttcgagagagatacgtacataaaaaaagcgatttttattttattttaccccttcctctaatctcccatgtttacgggg

SEQ ID NO: 5916 - DNA, 658 bp, Gossypium hirsutum
taaattttaatagggctttagtacattggatagaagggagggggattcttagatgtgctagcataacattatggaattagtactgtcaattaagtttgaaatccttgaatttgatgtggtcacctagcaatggaagacatgaagacattgtactcctccggatcaaagcattagagtctggaagagttcaatactttgtacattaagtaatctgccgttgtttttatcaccccagtatgtcatttgccttttgatgaactactgaataagaaatatatttcgaatggttggttgtttatgtatttgcacactagagccttcacagtagaaactcattcttttaattctttttaatttcatctgtagtaaagtaacaattcccataccttctcctgtagcttagtgttttgaacatgccatggtgaaatgtattctatttttaccttttaggttttgacatgaattttgaatctaaaagcaaaataagtagagaatattgtggaagaatgttatgtctgcttaaagagatttataaagcctaaacatgcagaatacaaataatttgaaatagagttatactataccaaatttgtttgcattctacttcctaaagtgtgcattaaaaagattgtttttatctttgagcagcctcttagct

SEQ ID NO: 5917 - DNA, 608 bp, Gossypium hirsutum
tctcaattattttatgtaatcagcattccattaatagggaactgtaaagagattgagaagctgaaccttaaaagttcatgtgcggcgtggcgcaaacaatgccgggttttgggttttgagagtctagaaaaaatttgataattttaaaagttatttttttaaaaaaattagagtctaattaatttttttgtgaagttaataagaatttttaaaaattttaagagagattagtaaaaaatttcataaatttgagagaatctaattaaaattttttaaaatttcaagataaaatcaaaattttgacagcgtaaacccagaaggatttgtggtagggcgtgacaaatgttatcggccaattgaaaatggaggtctccgtctaataaaaataagagctaatatatgtctctgagtttggtcatttgtatttaactactacctaatttttaattccatcattctttgatgcttcaacataattaaaatatactaataattcatgacagcccatattttaacatgtcgcaaaaattagaaaaataaaaagtaatttttaaaaattataaaaaaattatattttttaagcgtaaggaatgaacctagacaaatgg

SEQ ID NO: 5918 - DNA, 605 bp, Gossypium hirsutum
taattttactgtgttgataagatatcatgcatataaaaaattgtacatacaatctagtttcacttagaataacagcttattcaaacaaggagaaacagaaataagcatcacacacccaacaatagatcagaaagaacaagagaaaaccaacctcaaaatcagaagcttccagtttcaacatctcttcaacatcagaaaattcctttaaggagcctttaaggtttagagtcgagccctcaaattgagatcttatctgcaccaaaaagcttgcaacctctctgaacattagcaaccctttcatataaacctagaggaaatatcaatatcaattcaaatatattatcatgagtgaatgtcaatggcgagaagacaaatatgtttcatcacagaataaacattatatcagaagataaagcacagtgaaaatggaatataaacatacattttcaaactcttccttcagccaatctgatctaattgacttactaaactccagctgttgtggaggcattgacatggtataagtagtaactgaggagcaactaaacattgcaaccataggacctgacctgcaattacattaacatgacaagaaatgtgaggaa

SEQ ID NO: 5919 - DNA, 645 bp, Gossypium hirsutum
ggtttcattttctatatctattctctgtctttgttgtctcttggttccctctgtttatattcttttcttaaagaacctcttttttgggttctgagtagaatatctatgttaatatttactttctttcacacagaggtttgtttgggaagcttgccaagatcttactttgatgattttggtggtagctgctgtagcttctctggctttgggtataaagacagaggtgagctcttctgtttatggtcaattagagttgctttttttataaaacaacactttatgaaagtaacgcaaatagaagggatcgtcttttgtttcctaaaatcttacaggaggatgacatgcgtaatgctggtcttttatcacatagttttatggattcaagttatcttggtcttcgatgtactaataggattttaaaactagaatgtcatatggattgaattatatgttcttaactagtaattaacatgaggtccagtagtattgctaaaacatttaccttgcagtgtataatagcttcatattcttggatgtgatgaataattatttaagataatttttttcttcaagtctttcttctgttctaagcatttaggcctctaaataataatttttagttttcacgtcctatgttgcatgttt

SEQ ID NO: 5920 - DNA, 605 bp, Gossypium hirsutum
atctttctttcccaacgcagctacaagagatagatatggaagacccgcggtatatagagcaacactggggaatcaatatgaaaggctaagatacctattcgtcaggaaagactgcgtcagttactcttcttctcttcaatccggtaccaagacctctattctatctgcaggtcagagccagtctcaatatctgtatccgcaggcagagatctaactagcagtaagctcattccctgtaagttggtctggtctattcttcgctcttagccttttaaaatttgaattagaaagataggttagccttgttcagcttgcaaggcaaagaaaaataaattgttataaaaaatatttccctttgttgagtttttcaatgtcggcggatccttagtttagtaaggagatttgatttgacccgaaccccattcttcttgtaattcattggcaaataacccgaaaagccttttgtttatgaattatgaacggaagaaagtgggcaaacccactgaaaattctaaaaaagagtctttcttatccttactctttcttatctaggccgggccttgctctttgttggcctcactcttatatcttatagttatgggtaa

SEQ ID NO: 5921 - DNA, 652 bp, Gossypium hirsutum
  misc_feature (645)..(647): n is a, c, g, or t
tggtagttgtaatcttagtcgtttttattttaatttattggtgaaaattcgggtttttaaatataagctttgtgggggagggggggtaccaagcaattctttcttcttttttttcgttttttccctttacaaacaaaatacacccatgtggttcaggtatttttattgaaaataatcacatggttttagagggagaaaatgaattagaaaatactgtttttgttttttgttcattgaattttatgtaataagggaaccttttttatttttctaatttaagtacaaaaataatatttgttgaagctatcaatgcgtatattcttcttgattagttcttttattctgtacataaattgattctgccgagatgctgcaataatattttatttgttgaatcggatcattttagttttgatcgcttcgagttggggatgtttcaaattcaaattatttttgatttaggttgtttgagttttgggtcggtatgagtttgtattagtttaggtttgaatttactagctttctaatttgtaccaaattaagttgagtctgagtttgaaatttttaataaaaaaattttcattaatgaaaaaggaatgacatagcggtgccccaataaacttgatttatacaatggtgatatgnnnggttg

SEQ ID NO: 5922 - DNA, 670 bp, Gossypium hirsutum
atggtccagtcaagatgttaactcagtgagctaatcagttttgtcatttggaattattactacaaacattttttcttcctttctctgaattgtttctctctgtctctcttatggtaaacccatgacttcagaaaagttgtctatggttgcaactcagttgttaaattgtggtacttaactatagaattctttctctgcacgaacccggtatctcttgtttaaaagatagacattgtcacttaaccatcattcttgcttgatttgacagtttctgagcgcacttgttgacagcagttctgtcataagatccatgacaaggaaaatactcaaattagccaagttgccacaattcaagttgtttaaattgtgtattgatggccttcttggaaatttggagatatatccacaggttgttcccttttatcagtttgcattccaagtggctttccaggctgcgtctttcatattttcaaattgtgtgttacttgagacccagcagctataaccatctcaatctgttattgcttcttgtctctgcttatttggttaagttgcttccaggatgaagctgatgtgttttctgctctgtttcattttgggagaaatcatgggaagttcacagttcacattattgaggaagttgctccagaggttagctgggtgaaatgat

SEQ ID NO: 5923 - DNA, 644 bp, Gossypium hirsutum
tctgaatatcgctgtgattagtacatgcatctggtgttgacttgtctttgccaggtcaatctagctcgtgaaacccttaaaggcctattggctcattggatgactaaaagaaggcaaagacttggctcccaggcttcagttaatggagatgttttatcaggaaaagatattactacaaaaagtcttactcattcaagaattgaggtagatgttaatgctgaaaatgattccatggtctatccttcttttgagttttctacagtttcccctccctcaattatcactgagggttcccaaggaggtccttggagaaagaaaattactgaattggatggaaccgaggatgagaaggatttccctggttgggttttggactgtgtgttgagtaacaagcttccacctcgcgagaacaccaagtaacttctgtgacctcattaaactttcctctgcttcttgcagaattttttttttcctttactcaattaaatcttaaggttttcaaggaacgccacatacattgaactgcttattggttgacctgcttgtttatatgcttgctatgacttaaagaaaccacacttctttgacatcattgtactttattcagaaccattgatacttattaattttacttcttgggtatt

SEQ ID NO: 5924 - DNA, 647 bp, Gossypium hirsutum
tagatatatctggtggcaatgcattgtacagaaggccatggagatcagcccaatgtgctgctctaaaattgcattcctcatctcttgtcagtgtccaactcacctttgtagaactatcagttgcttggttctgttaataacacatttccacaaaaaatggcacaatatagtaacaaaactagcaaccaatcatgtaatgtaaagattaccgactgataaaactacccggcaaagtagtcatgtagatgtcaaattaatacgagaaaccacaagattcaatctagataggcccaattattaagaaactgcatagctaatgtgagtgaaaatctggtaaagggaaagtaaaaagatttgacatttacttgatcaattgtgaggggcaaggtggggtgctgaagaaggtggggattagcaatccatgaagtaatgagcatttgagccaaagggtccagccccagtccagcaccggttgggctaccggttgggggagcggcagatttctcgatcaccacaacttgccatcctattgaagtaagcgcatgggcgcatgagacccctgctatgctccctcctacgatgattacttttgatttcttcttcttctgcttctcagccatttctagagctctctcgctctagtttag

SEQ ID NO: 5925 - DNA, 632 bp, Gossypium hirsutum
tatacttttcttagcatcttaatcttgcttcttcattgttcaaatgtccttggttcattcttggatttgttacatgtaggttttcttcctactcgtcctgctcctgatggatcttctccttatgaaatgttggcacttgactgtgaaatggtaaatcctgtgtgtcagcttatgactagatcatgatgactttttgcttctttattgtgaaataagataaaatcatgtaaactattagttggagaatgtacagtgacaagatattgttgctttcttctgaagaagttagataaaatcctacataaagcttaagagctttgcctagaatttccttggtacactaattttgtctccagacccacctgtggcttaaaacgttcatctctgatctgaatttatgtgattgtttgctcaagtagaaaataaattattatatactctggacaattgtgcttcttaccttctgctctggctattaagttttcttgtgtttatgtagttaattctgtgtgctcatcatgatggactttgttttttttctcttattttttgtctgcttacgttcatgcagtgtataacaagtgagggttttgagcttacaagagtgaccctggttgatattaaaggacagg

SEQ ID NO: 5926 - DNA, 640 bp, Gossypium hirsutum
ctacatctctaaactatgccaaaagcgatggtcttgacccttgaaatattcttaatcaaggtgcctgagctgattgctcgccatttcatgcaatccatttggaaactttaatgttcattggtcaagcagatacaggcttaaaatttgtaatatgatttttgttcaagattgtcataccttccttcacagcaacattaggtcttgctttttcatggatttctacacacatttagcttgcaacttttcaagttgaaattcctgttggtctggagctccgacatcatatccactgaaatcggaaaaaaggagtactaattaatgctgcaattgaagttcaattggaaaaaaaatagtgtagtatagttacatttatccactaacctgagagaataaggaatgcaccgaggactgaacttaatgttaacagtacaatgcacaggcggagaaatcgatattatcctttagctccaaggagagggacacggaatggaagaagcaaaggcaagtacagcaaaattaaaccaacttgtagcatcaaatgatgttttgggctagaatacccgagtgtcacttagaggataaaaaggaagatgtcattaattaaatttattcaaaagtgcgtacaaaacaaatctccctg

SEQ ID NO: 5927 - DNA, 568 bp, Gossypium hirsutum
  misc_feature (13)..(13): n is a, c, g, or t
taaaaattagttnatggctcaaaaataaaaaaattcaagatgcagtataagcgaaagaaataaagaaattcatgataacttcctaagaaatcaattgggaatcttcaatcttaacagaaatctacttcaatagtgtttttcgagttgttcttgaatattctctaacggctccctcttatctttttatttttgtcatatatacctcttcgaatgcccaaaaaacctaaaaatcatgatttttcgctgttcaatgcataatcccatgaaatcgacatggtctaccacatgcccttgtgactcacacaattgtgttatctggccgtgtgaaaaggtgtagcccgtgtggctccttcaacttgctccggcgcgccaaatttcgctccttttgttctcaattgttctattaagcattaaaatatgaatttaaaggattaggagtataaaatttacaattaacatcgaataatcaccaaaaaacacattaataatgaggttaaaacatgttatttttagcacttatcaagacttgaaagtcaataatgtgtcattggataagttatcagtgtga

SEQ ID NO: 5928 - DNA, 661 bp, Gossypium hirsutum
  misc_feature (650)..(658): n is a, c, g, or t
acagatcttagaaattaatgcagccaaaaagagaaagaaaataagataataaatatagacaaaccttcttcaattttgcttacattttatcatagagaaccgactaatttggttggggattaacactgtctaaactaggaagcatctggtgcatctataccccctctacaaagatttgagttgaaatccctaattccaccaatcaaaatgagattctaaatatggcatagacaatgcaaacgccaaatgatcattaagaatcatttcagggccaattttatttatgaacctttaaagtagacaagggatttacagaattatcctaataagaattagtccaaaaactttatcgcagaggtaagagtacacaaaatatctcaaacaatagctaactataacattttgacatttccctcagactgatttgggtatgggttttaatttcaacaataatgttataaattgtatcatgcatgcttttctaccaacctttgagtaactatctgcaaaagctcgtgcccggttggacttgccaagataaatcaaatcagccttctcaagcttcccatcaacaaaactcaatcctccatcaccaatagcaaaccgtaaaaggttccctgtatgcagccctgactgtgtatttgaaaaannnnnnnnnaaa

SEQ ID NO: 5929 - DNA, 635 bp, Gossypium hirsutum
taaaccaaaatctttgtccagaagaaaattttgccacaaaccatgattttgccatcttctgaaaactgttttattactttttcgcgttgctgttgattcaaagtcccatcgagtctaagaaacggaatgttattcctggacattaataaagcataagcatatgctactacgtgcaatactttcaatggcataacaagagaagtgggatggagaggaagagaaaaaaaagctaataaaagcacgcagtgtcatttttaacttggatcaaaattatttgcacaaaatcaacttgaaatgtgcctttacatcacatttacatcacatttgatcagtaacaaaactgtgttgaataggattttggcctcagttttgtcaatatggtaaacgagttgtttaaaagccactccagcaaggttttcaaaactggactggaccaatggttgaaccaatcaaaccactggttcccagttcaaccagttcagttgaataaaatatttaaaaaatgaagaaatccagttcgaccgccagttcaacctgtccaactagtggtctgaccagttcaacaggttcacgggtcaatcaatctgaccccttattccagaccgataccttggccggttctcggtccaactgat

SEQ ID NO: 5930 - DNA, 552 bp, Gossypium hirsutum
acatacaaaaaacacttcgttatagatgcttcttttaaggaatgagctgggataaatttccattaaaactgatcagtacctggtcggaaaatccagcaccacgagacataacaactgcccatctgctaccagaagtggccattgaggtgacataaaaaccctctctccattttttgttaatccacttaaaaggaaaagattcgctcactttgtacgactgctgcaaatacgatgtacctgaatgcggtgaatcaaaaccaagtaaatgaaaccaaccagatttgaccaatgaaaatcagatactggaaccttaccctttgacattactactaaggagcctccatctgtagcccctgcaattgcactgatataatagttcttctcccactgctccattatccattccttcagacagcaaaacatcaaatcaatcactggtagaatctaaattcataagcatcttctaactagaggaatactaaaggcatacaagagagtaaaatagaacacattaaaactggagaactgctcaacaccaacagaatacaccaa

SEQ ID NO: 5931 - DNA, 675 bp, Gossypium hirsutum
tattgttatgtctggtaattgtttcttcacaagtttttgttgttctgcaatctctttggtttctcgccttgctgaatttgaggctgtttcctatggtgccgccctttccgccagtgatccttgtgtttctggtgttgtatcgactagattttaagggaacatcagcctgagatctttttatatcagaaccctgctggttgtactcgctcgattcgtctgctaaaagaagttccgggtggggattggatgttttaacggttggtaagatacttctgcaagatcttaacaaggagagtagcatatccatacttagttcctgctgaactacatccttattctgttcacagccataacaggccgcaagaagcgtccctgccaatgctggcatcaattctgggtcactgaagaacacgaatggcagatcacacacctgtacccttccacctcaacagttagtatctcgagaaatgtttaaagataaagagggaaaaaactgtgaagatcactgaccttgtgaaggatagtggggctcttaccccatcgaagaacagcttgattcccagagtggaacaatgcgaaataaccaagaagcagcagggattcaaggagaagcaaaccaatctaagacaaatttgatagcatatgtcaagaatatgatttttgaaactcaaactg

SEQ ID NO: 5932 - DNA, 646 bp, Gossypium hirsutum
atgctctattctgcttcttcaatttccttttttctatagaaaagatttgacattttaagatagataagagtcgaattccgacatggataataattttataaatttaaattacatcgattcaaataattattttttattgaaatattgatatgaaagaactaatatttttttgaacaataattcaaacctatcactggacatacatacagctaataaaatctttgcactagaagtggttccagcctttataaccctttgttgaagaaaatgacaatggacctggaatcctagattcatttaaaaagtagaaactaagaagaggcccagtgtgagcggtgtataatcagtgatggctcataactgcaaaactatggggttggaatcctagactttaagatgcataatactcgttcttctccactgaattcatggattttctgttatttaccttaacaactttgagataaaacgtaaaagaaaaaaaaacgaaattttaattagaaactataaagaaatgggcaagtatagaggtaaacaaatcaaagcgaaagatgaagcaacaagtagcgcttgcagcagtgaccacgacggctgcaacagttatggcggtggtagctcttgtgagacaatataggaaagctaaaca

SEQ ID NO: 5933 - DNA, 643 bp, Gossypium hirsutum
aaatcatctttctgtccatctccaatagctccaaagttaatcacattaaatgtattgtcgatatttatgttggtgttcttcaactgacgagaagagccagtgaatacaatgcattggatcaaaagaagtaacaacaagattttcgaagttgccatagtactgatttgatgcgtatatggaagagaagatacatacgtatagagggtatgtattgatatagtacattgttttcataattcaacaatgaaaaggagttgttaagagttagaatacttatgatagaattagtccttttcatactgcaactatacaactacatataaatatgaatttttattattgaagtaattaaaagtgaaataaaagagtaaaagaaagttgtttagtagaagtaggaatcatgagttaaatccatccatccatgtaaagataaaactccatagcagtttcattatgccaccatttaagctaaattccggaactccccctcacataaacagctaattcaatcctatccaccctaatcactaatgataaaatcccccccagcattgataaaaccaccagtaaaaagaaatcaaaaacaatttcgcaaaaataataaagaagcacgcaccaggccgtggctgtatttccagaagtg

SEQ ID NO: 5934 - DNA, 551 bp, Gossypium hirsutum
  misc_feature (302)..(302): n is a, c, g, or t
  misc_feature (462)..(462): n is a, c, g, or t
  misc_feature (469)..(469): n is a, c, g, or t
  misc_feature (475)..(479): n is a, c, g, or t
  misc_feature (484)..(485): n is a, c, g, or t
  misc_feature (487)..(493): n is a, c, g, or t
  misc_feature (495)..(495): n is a, c, g, or t
  misc_feature (497)..(506): n is a, c, g, or t
  misc_feature (510)..(511): n is a, c, g, or t
  misc_feature (514)..(522): n is a, c, g, or t
  misc_feature (526)..(526): n is a, c, g, or t
  misc_feature (533)..(543): n is a, c, g, or t
aacttggtacaccttggttagcaaacttcatttcatctagagagtggtcgggctcccgaaagcttaagggttttcctatcggtgacactcttgctggagaggctaagttaatcggaacactagaacttcgatgagtttcagcaaatgtactcacaggtgcaacaacctgagtagacccattatccatgcagccagatgcagtcaatcctggagaaactgtcagaatgagtatatgaagcaacagaaacatttgctctgaaacaacagtttataatgaattgatcagatggcagaaatttaangggaaatcataccacagtttcccgatgataactcatcaaaagggcttttgcataggttaggttcatcttgctctgactcaggctgttgcgtaaagctgcaaaaggaattctgatgtattattacttgtagaggccacagaaaacaagaactttttttttnctaaaanaaaaannnnnaaggnncnnnnnnnancnnnnnnnnnnaaanngcnnnnnnnnnatcncaaaagnnnnnnnnnnngatttacc

SEQ ID NO: 5935 - DNA, 616 bp, Gossypium hirsutum
tcttattagcataattgttgaatggaaaaactaagctcaagatgcaagaacatatataaacactgaaaataataaattaataaaagtataaaaccattttctttcgtttttatatcttgttctctttctcctttcatcatttaaatgaccaagtcttataactggctcccctttgtgtctctctcaacccacccccaatattccatcctaggcagccttgaaaagacagcaacatgtttcctctgaccaacagattcacaaggttgtcttattactaatgttggcaaagagttactttgccttgtaccacatgtttttcttcatatatcctttttcttttcttctcaatttgcaatgaggcaaaaccatgggcttcatcaggttgggtcctaaaagaatatggcttgagcacattatcatatagaaactctatagagcccaaattatgcaacatctgtaagctcagtgaagaaccttgtgacataaatatgtccttttccccatacttctacttctatttttcgtctattaaccttcgttatcattcctgaatggtttctgtaggttctagtactgtttaacctttgagtagctgtgtagcaggaccttcattgtt

SEQ ID NO: 5936 - DNA, 665 bp, Gossypium hirsutum
gaactgaagtctgaatcaaaagcttctctagctggggctgcaatgcaacgttgccttgctgggtttgagagactcatggtgtctttaacccccaacatcaaaggaaaaagaaaagaagctatatatatatagatatatatatacacacatatatatactgttggatcaattcgcattgatattattatgtgcttaaaatcctgtaccattttaactttaatttttcttttttagaatttttcataattatgattgctgctatttaatttctatccattctttacatcaaatacaaagaaatgctagttcgccacttccatgtttcagttgtatgtaacaggttaatcaagatataaaatgtttatcatgttagtacccctcagaatttattagtcataatacttaaataactctttcagctccgatcaattaaattaatattagatataattataaaataatgaccaggttataaatgtttcgaagtctatttaatatgaaattttaatgcattgaaatttgtcagtaatttttaaacgttaaattatattaatgtaatataatttaaacagttttaatgttgttaatgatcggaaagtatagaaacttaatttacgtgaatgaacgacaataaagtaagtaaattcagcagatggtagagggct

SEQ ID NO: 5937 - DNA, 1209 bp, Gossypium hirsutum
  misc_feature (643)..(663): n is a, c, g, or t
  misc_feature (666)..(672): n is a, c, g, or t
  misc_feature (676)..(682): n is a, c, g, or t
  misc_feature (687)..(695): n is a, c, g, or t
  misc_feature (697)..(698): n is a, c, g, or t
  misc_feature (700)..(701): n is a, c, g, or t
  misc_feature (703)..(715): n is a, c, g, or t
  misc_feature (718)..(720): n is a, c, g, or t
  misc_feature (723)..(727): n is a, c, g, or t
  misc_feature (729)..(731): n is a, c, g, or t
  misc_feature (734)..(745): n is a, c, g, or t
  misc_feature (747)..(747): n is a, c, g, or t
  misc_feature (749)..(750): n is a, c, g, or t
  misc_feature (754)..(756): n is a, c, g, or t
  misc_feature (758)..(758): n is a, c, g, or t
  misc_feature (761)..(762): n is a, c, g, or t
  misc_feature (764)..(766): n is a, c, g, or t
  misc_feature (769)..(769): n is a, c, g, or t
  misc_feature (771)..(778): n is a, c, g, or t
  misc_feature (780)..(781): n is a, c, g, or t
  misc_feature (784)..(785): n is a, c, g, or t
  misc_feature (796)..(796): n is a, c, g, or t
  misc_feature (798)..(811): n is a, c, g, or t
  misc_feature (814)..(820): n is a, c, g, or t
  misc_feature (825)..(831): n is a, c, g, or t
  misc_feature (837)..(837): n is a, c, g, or t
  misc_feature (839)..(841): n is a, c, g, or t
  misc_feature (845)..(845): n is a, c, g, or t
  misc_feature (854)..(857): n is a, c, g, or t
  misc_feature (861)..(861): n is a, c, g, or t
  misc_feature (865)..(865): n is a, c, g, or t
  misc_feature (870)..(874): n is a, c, g, or t
  misc_feature (878)..(879): n is a, c, g, or t
  misc_feature (887)..(893): n is a, c, g, or t
  misc_feature (898)..(911): n is a, c, g, or t
  misc_feature (913)..(913): n is a, c, g, or t
  misc_feature (918)..(924): n is a, c, g, or t
  misc_feature (930)..(932): n is a, c, g, or t
  misc_feature (934)..(935): n is a, c, g, or t
  misc_feature (941)..(948): n is a, c, g, or t
  misc_feature (950)..(955): n is a, c, g, or t
  misc_feature (957)..(960): n is a, c, g, or t
  misc_feature (963)..(977): n is a, c, g, or t
  misc_feature (982)..(992): n is a, c, g, or t
  misc_feature (996)..(997): n is a, c, g, or t
  misc_feature (999)..(1002): n is a, c, g, or t
  misc_feature (1004)..(1005): n is a, c, g, or t
  misc_feature (1009)..(1010): n is a, c, g, or t
  misc_feature (1013)..(1018): n is a, c, g, or t
  misc_feature (1027)..(1035): n is a, c, g, or t
  misc_feature (1039)..(1052): n is a, c, g, or t
  misc_feature (1054)..(1054): n is a, c, g, or t
  misc_feature (1057)..(1060): n is a, c, g, or t
  misc_feature (1062)..(1068): n is a, c, g, or t
  misc_feature (1072)..(1077): n is a, c, g, or t
  misc_feature (1081)..(1083): n is a, c, g, or t
  misc_feature (1085)..(1090): n is a, c, g, or t
  misc_feature (1093)..(1093): n is a, c, g, or t
  misc_feature (1096)..(1097): n is a, c, g, or t
  misc_feature (1108)..(1109): n is a, c, g, or t
  misc_feature (1111)..(1116): n is a, c, g, or t
  misc_feature (1118)..(1120): n is a, c, g, or t
  misc_feature (1122)..(1127): n is a, c, g, or t
  misc_feature (1135)..(1135): n is a, c, g, or t
  misc_feature (1143)..(1146): n is a, c, g, or t
  misc_feature (1150)..(1151): n is a, c, g, or t
  misc_feature (1159)..(1159): n is a, c, g, or t
  misc_feature (1168)..(1168): n is a, c, g, or t
  misc_feature (1170)..(1170): n is a, c, g, or t
  misc_feature (1173)..(1174): n is a, c, g, or t
  misc_feature (1177)..(1188): n is a, c, g, or t
  misc_feature (1190)..(1192): n is a, c, g, or t
  misc_feature (1194)..(1194): n is a, c, g, or t
  misc_feature (1197)..(1203): n is a, c, g, or t
acctatgatagtcgattgatatctgctaatattatgtgtaattttcatgaatgttggggttgaagatatgggtaatttgcagggcaaaatatggtgtagatgagatgtgtagggatcaatggaagtgggcgagcagcaatccatggggataccagtcaaaaaagcgttaaaagctttgcttaagattttctcatgttacaccaacatcaacagcatgtttaagcaaaagttatccccttagtgttcaaacaacttatagatttcttatgtgttaattgtcaattcgagttgatgtttttatttcaagtaattatatatatttatataaatttttaacacgttgataattcttatttatacacatttttatatgattatttatttgattcaggttgatgttagcttttatatatgtttaaattctactatttcataaagttatggatttaatcattataatataatttgattaattttagtatttatacatttttatttttgaaattttagtcatgacttcaataataatagttaaatttgtttggttcaattcaattattagtcttgtactctgcatacatttatagttttttggtgaattataagaataaggtaagtctgaacaacaagcatgactggtaannnnnnnnnnnnnnnnnnnnnttnnnnnnntatnnnnnnncctcnnnnnnnnncnntnnannnnnnnnnnnnnccnnntannnnncnnnctnnnnnnnnnnnntntnnttannnantcnnannnttncnnnnnnnncnntcnnttttttttttntnnnnnnnnnnnnnnatnnnnnnntcttnnnnnnntaccancnnnttanccccccttnnnntccntttntttannnnnttanntttttttnnnnnnntttannnnnnnnnnnnnntnccctnnnnnnnccatannntnnttcatnnnnnnnnannnnnncnnnnccnnnnnnnnnnnnnnnctatnnnnnnnnnnnatcnnannnncnnccannccnnnnnntttccctannnnnnnnntatnnnnnnnnnnnnnnantcnnnncnnnnnnncttnnnnnntatnnntnnnnnnttnttnntccccccctannannnnnncnnncnnnnnnataaaacntatataannnntacnntaaatatnacacccccnantannatnnnnnnnnnnnntnnnancannnnnnnactata

SEQ ID NO: 5938 - DNA, 637 bp, Gossypium hirsutum
  misc_feature (601)..(603): n is a, c, g, or t
  misc_feature (612)..(615): n is a, c, g, or t
gtgtattctagagccatttgttaacttagtttgtttatagaaaactgttgcattcatttctacacttgttctcatggttggtgcagggtattgtctatgttgttgatagtggcttctcaaaacaacgattctacaatccggtatcttcatttccacattctttattatggtaaagcaggtgtatatttaggattttccatgtgaactttatctggtaatggccacatcttgcctggcattatttccaaaagaatccatatcaatacatatcttttatgcttttttttacttgaaaattagctgataattcatcactttgtggtggtcagcctttgcccgtcttatgctaaaagaaaatatttaaatttttatctttccctaattttggattgaagcatgcaaattttattaattttgtataattttcaatttatcacaatagtcaccaggtttattagttctttctgattcttgtgactaatttttaaacctctttctagaggttttagtggaagccttctatctctaaatggattgccttgtcaacattccggtttagttgttaatcatgttattcttatttctccagatctcggatatnnnaaatcttgnnnnggcacccatatccaaggcatct

SEQ ID NO: 5939 - DNA, 652 bp, Gossypium hirsutum
  misc_feature (533)..(533): n is a, c, g, or t
  misc_feature (646)..(648): n is a, c, g, or t
tagtgggggatttctgcttagctttactattatcagatccctcaatgccattctctaaagaaacctcaattgaacacctatgtttctccaagaattcaggggaatctccataggcttttgacggaatatcaggtgatccagcgcatataacaaggtctggtgatgttagagaaaatcccagcatagatcggcctgaaaccaaattcttattaaaaattacatccttaaaacgctagctgtcatgactcaccaacagcaacaggtaaggtactaccactttcgtgagcacaagccggtattgtaggcatccactgaccccttaagctttgtcactttaatgtgcagctctccggctttgaatacattactgtccttttcacaaccatgatatctggtctagcttagatcaaatggtatcatgattgcaaaaaggacctggatttgaatctattgaggagatagagagcattcaaaaagggtaccggtttatggacatggtgccggcgcagtgcgacccagaaaagtggtagtantctacggactcatatgacacttgaattcatttctaaacaaagggtttttaccatcaaattctctaataggcgtactaattacatttgggctctgggattgccgaggatcaacnnncatc

SEQ ID NO: 5940 - DNA, 595 bp, Gossypium hirsutum
  misc_feature (61)..(62): n is a, c, g, or t
  misc_feature (359)..(359): n is a, c, g, or t
  misc_feature (407)..(407): n is a, c, g, or t
  misc_feature (409)..(409): n is a, c, g, or t
  misc_feature (528)..(528): n is a, c, g, or t
  misc_feature (535)..(535): n is a, c, g, or t
  misc_feature (584)..(587): n is a, c, g, or t
ttcagcaccaaggctctaaatcatcatcactgcaactggacatgagtttgacaagattacnntgaccaactttggtcagtaaattagattcaacctgaaaactcctcattcctctttctagattcaaattgaaaacctttatggcaacattcttctcctctttcattgttcctttgtaaacggaaccataacttccagtgccaaggaggttactttcgctaaatccatctgttgctagctcaatttcctggtacagaattgttcgatttgttgttaagaggggatcattttccttttccaggcagtgttttatcgcccagtgttgaatcaccctgtatatcagtgatagggtacaaatntgatgcaatttcgggtaaaagaatctttgtaagaagcgttttccatgntntgttaccagtcctgcaatgccgaacttgcaatcgtgctgcaccgcaaagtgctttgttcatcaaatatgattgggctgtgaagttagcaaaggatcccgcaccgggtatctccccttcnagttgantaaaagacacattaaaatatgtaaggtaatggagtttttccaaggattnnnnaatacgcc

SEQ ID NO: 5941 - DNA, 650 bp, Gossypium hirsutum
  misc_feature (645)..(645): n is a, c, g, or t
tatgtcgttatattttccttttatgttgaagtaggaggggagtccagccgagggatgggcaaaaagatatttgttggcagacttcctcaggaggccactgctgatgatctgcgtctgtattttggtagatttggccgtataatagacgtttatgttcctaaggtaatgtgatgaatatcatatataaatgagagttgaattggagtcagcttatgaaggtcttaatgctcctttaatgtaggaccccaagagatctggccacagaggttttggttttgtgacttttgctgaagatggagttgcagatagagtatctcgtaggtctcacgagatttgtggacaacaggtaacaaaaacaaacttttatgttcttgcctcatacctgagtgtcttacttctgaggttgatatttgatagattaccttttcctcgtggttatgggtttatgcttgatagaatgttaaaaaggccaagttcttggatgctatgtttatttatccaaccataataaccattattttggttaggaggattaactccaataggtgatgctctacaaacttttaggactctcaattatgattttctgccatgaatggttggcaaactgtgattttattattttactgctgtgaattcatgtgngtaac

SEQ ID NO: 5942 - DNA, 409 bp, Gossypium hirsutum
tagtaagctccaccccactggttactgtaatcaggcctaaactgcaatatcacaaaataataggttaggaataattcaccatagctttcttaaggtgaatgtacttgagagggccttcaatttgtactactaaaaagaatcgaataagaccaaactggaataaaattaacatttactgtttcaaaaaatataatttattgtttaacagagagtatttttaaagtttttatagttctataaataaaatcttctatttgcaattgtttgcaattgaaaaaaaatttcaagatattttctaaacaataaatgttagctttgatacaatttgcaattatttgattatttttaatagtatagagactacattaatccatttaataataaagagactaatttgatccaatcccaa

SEQ ID NO: 5943 - DNA, 642 bp, Gossypium hirsutum
acctcatgaattaggcgtgattgttctgaaggtgtctgaagcagttgcattttatacatgtactcggagagcgtaaaaacaggttaagggtaatattatcttcttctcaagatatgcataatactttcggcttttcgatggaaaagcacatagagcacatatatgcatataacaaacttgtattttgtcgaaatttggcactaaaaagtgtataacaaacggatgatgtgaatcaaacacattgttgttgttacctacggaaatactcgattaattatcgagagtttcgtatatatcttagtactataaacttgtgaaactttatcaaaaggatattctctcctccatcctttctcgtttgcccggttgatctgacttcgtaataaatccaactctttcgtaatccactggcacattattcttaatcaacatatttaagatccatctaaaaggcattgcattatgcattctaacaatatcgaattcagaatacgtacatgttttgttatatcctcgtgtaagcttctagctttctgctcaagttccagctggtccaacaaggcattcgggttagtaatagtgcatgaaaaaatgctttcacttctaaaagaaacatggtaaaagtaatagaccgataagttt

SEQ ID NO: 5944 - DNA, 512 bp, Gossypium hirsutum
tgcctgagaagaaggagatatgcggcgaactaaggaaaatgggaaaaaatataagaagttgaagaacggaagaatgagagaaattttacctggatgaaggagatggaaaatgtcttactgaaaagaaatcggtaagacattttccccaaattgcaagtcattttacccgtgtcttggaatccattttccaagtataaattattttcaagctgccaaacactgtaaaaccaataaaacatttttcagaaaatattttcgtggcttccaaacggagacttaatagcaatgaattgaagagttgaaataattatttccccctaatatgcaattaccggtagtgatgctgtgacattaagtcaggttattaatccggaattgacaatttataggcttctcccaaagtcactatgctcaatcctataactaatttaacatatgtctatggcaaattaatatcaacaatacaattgcaagcatcattcctaaaggattatgcacggtaagaatgtatg

SEQ ID NO: 5945 - DNA, 424 bp, Gossypium hirsutum
atgtaaaagtagttttctttgccctttttaagcacctaaggaggatgaaaggagtgttgttgggttctgaaagtgaagcttgtaaatgggttgaaatgaaagatgggttgcaaatgagactattccaggtcttacaaaccgacctgcatttcaccaatgactttattgggagtcttttaaggatttcaaggatcacttctacaggcaaataatcagacatctttttcttttttgctcagtttttgaagaaatgaaatcgaaatgtatataaggggaagaagaagaagaagaagaagaagagactaataattgctttgtcaatgacaaccataatattttaagaattttttttatttttcttctgtaatctaaaagctttcactttactttatgagataagataagggtgggttactttgaaaca

SEQ ID NO: 5946 - DNA, 623 bp, Gossypium hirsutum
gagggtatcttttgagtggttcacaagaccataagatatgcctttgggacttgtcttcttggcctcaagataaggttcttgatgcaacccatgtttatgaggtatttataggactttgctcttttgtttcataggaaatgctcggattttttgaccttgaaaacatttattacttgattgtgagtatctgtgaatgtacttgtaggcccatgagagtgtggttgaagatgtgtcatggcatttgaagaatgagaatatatttggttcttctggtgatgattgtatgttaatgatctgggacttgcgcaccaaccaaaccgaacatcgtgttaaagctcacgacagagaggtgaattaacaaattttaccctaatattacagtctttgtgtagtattatgtttccatttccatttgatcatcggataagaaatgttcgttttttggtctcagatcaattatttgtcattcaatccttataatgagtgggttctggctacagcatcgtccgactccaccgtaggtttgtttgatgtacgaaagctgactgtacctttgcatgttttaagcagccacaggtgagtttactgcctcttagatcgatccctgtgtttatatgccaaag

SEQ ID NO: 5947 - DNA, 509 bp, Gossypium hirsutum
  misc_feature (460)..(462): n is a, c, g, or t
  misc_feature (472)..(473): n is a, c, g, or t
  misc_feature (484)..(490): n is a, c, g, or t
  misc_feature (492)..(497): n is a, c, g, or t
atcgtctgaagttgatgaacagacagatgcggccctggttattgaatcgatcaggcgagatgagtttggtctggatccaagtctttcaagtgtggagagtagcttgttgaagaagcaacatgctcgcttggggagagcactccattgtctttctcaggagttgtactctcaggactcacattttcttcttgagcttgtaagtttgttttttgtttttcatttgtgcaaagtaggactgctcaaataatgtttaaatggattaagtgtctgtccacacagttgattatggaacttaaatttctatactagaaagaaggaacaattctactccatatatgcttagaaatatgtttagaggacaaatttatcttcagatattccacctggcgtatctgtattcttgaacgtgtttattattttccatgctatctaccaatgagattgttttcttcttgttttnnntggaaagganntgttattcttnnnnnnntnnnnnngtacattctcct

SEQ ID NO: 5948 - DNA, 652 bp, Gossypium hirsutum
  misc_feature (547)..(547): n is a, c, g, or t
attgtatttctttaatgtgtttggttgacaaagtgtaattgcattaaaattctccgtatcatgtttgatactataaattgtaattatatagttacataattatatttttagaaagattaattattataaaaaaagtattaatatggtaaaaataatttctaaacaagtaataaaaattaaaattaaataattatatgtattctgctagtttaaaaatgtagatgataatatgagtgttaataaaaatagcaaaaaaaaaatgtaattttatttatttattttagtgtttatttgttgagttattccatttttaatatttaacatgtactttttatcattatttgttagtctttgatcaagttaatttgaaattttgttagtctttgatcaagttaatttgaaatgaatttacatcattaagataaataaaacttccttttatatactctagaagtacatgattatatcattttcacctatgactgaagttataaaatatattacatgctagtatgatatatcattttttttatgctatacttacaanatgttaatatgagaaataattttttggaaatcaaatttcttttcaaccatgttttcaaaatcctgaatttgtcatattaaatagttcatgaggggtctatgatgc

SEQ ID NO: 5949 - DNA, 618 bp, Gossypium hirsutum
tttggctctctttctcaaaacagtgttccagtagttcttgatttcgttatctgttcgccccggtaaccttccagctattaacgaccacctgcacagcatcacacaatgagcagtaaggaactcagtacctcttaatttcgattcccattgtaaaaaagaaggggagagagagattaacaacctgtttccaagaagattatggagtctgataatgagttcttcttcatcacgggagatgttgcctcttttgatatctggtctaagataattcagccatctaagtctgcaacttttgccacatcttttcaaaccttcattttgggggataataaaccatcaaaaggcatcaattgaaaagcttaattacaataatttcactttggggttttatatatatataccagctctcctgtagaggtcgctccatttgccttccccatgagctttaatatatgatgcaagtaatttatcctccaatgcagtccaagctcctttgttgagtccttccttggggcaagatggactcctccccatatcgctcttttgtctctctctccctctaccttaaaaccattttaatggaagaggacctttccccttttatagcccatagtcttt

SEQ ID NO: 5950 - DNA, 212 bp, Gossypium hirsutum
  misc_feature (134)..(134): n is a, c, g, or t
caaggctggccttcttgtttcctcattctacttctgagttgcctttggttgctcctgaattgtcttctataccaccaaaactcattcttccaccaaaaagtaagttctcaaaagttcctttctttttgtttgcnatttcttgagtatgcaatgattgattttaattaatcgccatttcttcaatatttggtgtttgtttgtttgtatgtatt

SEQ ID NO: 5951 - DNA, 410 bp, Gossypium hirsutum
  misc_feature (333)..(333): n is a, c, g, or t
  misc_feature (385)..(385): n is a, c, g, or t
agatgtatgcagagcttcaactgccaacaacattgggtaccaacaagatatttcgagtttttgcgatatgggaaagagataatggatggaatttacataattgttgatgtctcgagccgttattccgatccttttgcaaagcgtaatagtgaaagaagaccatcaggggtcataatcagggaacatggacctgaagattgtgaggttttactcttttgtgacttgctttttaaccttactgttgcttcaatcattgtaatggaaatgctttttaccttaaacagattatatggattgagaatgtggaagtggatgaaaaccaaaaaaacttgnactccacaataatccggtccaacttgggataagggggacaccggtggggaanccccctggtatggaatccaaagcgg

SEQ ID NO: 5952 - DNA, 624 bp, Gossypium hirsutum
atgaaattagaccaagaaagttttgataacaccagtacctagcagcagctggaggaacagaaaaattctgaggttcatagtcatacacatgtgcaccaccacccttcagaatagcataaagaatacttttagctatttaaccaaatcataagacatcttgaaaatccaaagcttgaaaacatgcaccaaggaaaactatcctcttgacaaatcaacattctcaacaaagtactaaaaaacaggaaataatgtctttcatcagattttaaatttttaaataaataagaatctgacctgtaatagaactcaatggaaggcccaaccccaagaaagattagaaatcatcaattaaatgtattaaactaaactataaaacccatgaaagggtatgattactttcaaacttgtaagaccaaacaaacaataagaagccaaataaaactagggcagatcataagaacttacataatatataggttactctaaagtttgaattccatttatctattgaataaaactcatatcctaaattagaagttttaataagtatagtgatgtcttagaattatctaccaagaaccaaacaaatataaataaaagctaggggtcttaattttttttttt

SEQ ID NO: 5953 - DNA, 609 bp, Gossypium hirsutum
agcaaaggaacagcaggaataattagtcaccagaaatactagttatagaaggtccaaggaaagcatattcttctagtgcaactatagcatacattcctaacttctctaattaaaatttatttagatgaatttaacaataaactatgatggtttccaccatgatactattatccttcacagattaggaaaccaacttgactatatatattttctactgcatgacaacaaaagcctactataaggttatctgcatagacttgacttctagaccttaagcaaatcaattgcaaaacatttaactgcccataagcaactggcctttacacacacaaggtaaagagtccagggaaaaaaaaaatgcttactatggtagaaaggggatcaaacagctatttggatatgcaaggtatatttactgatgcaacacaaataacagcatgtatgtaagctttacccagttcaagggcaaatcctttttcataggtttttagcagaccagtgtggcagaaacaatgaagggatatgcactacaaattttacggtaaaaaatgtatgcaacttttaagggtaactaacatatggagctgtggaactcaaacaggaacaaaa

SEQ ID NO: 5954 - DNA, 589 bp, Gossypium hirsutum
  misc_feature (476)..(476): n is a, c, g, or t
  misc_feature (483)..(484): n is a, c, g, or t
  misc_feature (486)..(486): n is a, c, g, or t
  misc_feature (508)..(510): n is a, c, g, or t
  misc_feature (512)..(512): n is a, c, g, or t
  misc_feature (547)..(549): n is a, c, g, or t
  misc_feature (552)..(572): n is a, c, g, or t
  misc_feature (574)..(579): n is a, c, g, or t
  misc_feature (584)..(584): n is a, c, g, or t
tgtagagtcctttgttggtatcaccattggcagaaggatggggaagctttgcaattgcattctcatctgcatattcaatgccaatatttggtttttgagaacgatctctgattttaacaatcaatggaggttcagaaacattgtcagatggcaacttcttgaatggagaaacatctaaagatagtttgcccatataataggtatcttcaagcaatatctttggtgacccagcaatcaacctctgaacctgtgattcaaatgaatgcaaaattcaaatttgttttctccaatcaaagaaacaaagaaaccagtgcaaggtaatttagttttttattttacacggatggggtaagaaaccaaaaaaaaaaaaaaaaaattttggaaaaagcccaaaaaagccaaaaaaaatttgttttttttccttttttaaattttgccaccccaaaaatttggggggaaaaatttttttttgggtnaaaaaanngngaatttcccccaaaaaaaaaannntntctttaaaaaaaaaaaaaatttaaccccaaaaatnnnttnnnnnnnnnnnnnnnnnnnnntnnnnnnctttnaaaaa

SEQ ID NO: 5955 - DNA, 633 bp, Gossypium hirsutum
  misc_feature (563)..(563): n is a, c, g, or t
agattttatcagaacaaacataaattatttggcacggatttaagaccgaaatgatacgtactggctagtaccacggtatcaatacggactgccttgctttaaatatcgaaaacagaaaaaaataatcccaccaaaataagaaaaaaacaagatgcctaacaaatataatggataaaaaaataaaaaaaaatatgtatttaacttatagttaaattgtttaccataaaaatatccaataaaaaatctatgagcaatgaaaacccgaaaatcgattttttattatttttattggttcaaaggttttcttatttatgcatcatatagatttcgttagtttgatccctaaatcccatccgatttaatttagagctaaccccaaattgtggccatcagtctggcgtttttttttttttttttttaaatttgatagggttgaaaccaaaagggaaaggggggggcgggggggaattttttttcggccaggggttttaaccccccccaaaattttttttttgaaaaatcaaagcccaaaaaggtttttttttttaaaaaaatttttttgntaaacccaaaacccctttttttcctttcttttttttccaaaaaaaaaaaaataaacccggccttcaaaaa

SEQ ID NO: 5956 - DNA, 610 bp, Gossypium hirsutum
tagttatttatgtgtgtgttttatatccttttggaatgtttatgttagtatgaatatggcttgaatgtggttttaataagtaaaaagggttgagtttgatgagtggttgaattggacgttgttgggaggaaaaatgtggtcatttgtatatggtggtagtctgtgaaatggtatagatgtcacttgaatggtaaatttggtagttaatttacatgactaaattggtgggattgaatagaaatgcaaataagaatgatttgaaatttacaagttaagtggtatatttgagatttacaagttaaatggtatgtttggatatttttatgaagtatatatgtttggtttattggataattgttggtattgtggtgttttcgtatattttgaattggtataggtagattggtaatgtgttataagtacaaatgaaggttatattatgtttggacatgaaaaaggatcaaatgcaggatttttgactttttaacattgaagtatcgatattttgcatcttttaattaattttccaacaaacagaatgccagaatggtattgataccaaggtaaggtatcggtacctataagggagtatcgataccttaagccaagt

SEQ ID NO: 5957 - DNA, 574 bp, Gossypium hirsutum
  misc_feature (548)..(549): n is a, c, g, or t
  misc_feature (566)..(570): n is a, c, g, or t
ttcactttctgatgtggattgccaacttggaaccagatctttctgttttcaaaagtttatttatgcatgtaatctaatggttttgagcacttactttcctgatggaaataccatgggaatcgaatggaaccagtaaacccaaattcttaattgatgcttgagatttattgcgtgtaatcgtagttcttgatcatgttcatttattcttctggtacatttcaacgtttgtatcgataaatttgactacattaagttatgaactaggtctgttcttcatgttgcattccaagttaggtaactagattggtatattcttttattgtttcataatgctgtcatcaggtccatgacttttattatttgttctaccattcccagattgtttaggtaggcggttaggaccgaggcttcttggtagagttgatgattcaggggtaaatatcctttctctccattctggaaccaattttcctatttttcttgtggtcaacaatttatttatgatttttaaattgagttggtcttttatgacgatgggcagcagaganntagttaaggactttatnnnnnatca

SEQ ID NO: 5958 - DNA, 629 bp, Gossypium hirsutum
  misc_feature (621)..(621): n is a, c, g, or t
  misc_feature (623)..(624): n is a, c, g, or t
acgagaaagaagagtgctctggtgttttatacttttcaagttccgtttaatgcagagcacaatatttccgtaagatttagcagaaacaagaatgctaacaaggttccggagcaggtgagagcaagagaaaaaagattcccatgtgctctgttcaagttttgaagtaggtgagagcaaaaccggagaatgtaattcattaacatctccatgagaatgtaaatattttttacttaagctcatctttgaaattcaaagaagagaatagtattctgaaatcttatcttataattcaaagaaggtaatcttatattatattatattattatttcatcaaataataagaacaatatttcaacaatcatgcaagagtggaacagagatggacaaagaaatcagtcctccattttcattcctattttcaagcaaacaaaactataatatctttcatcaataataataataatgataaggaataatataattttttgcctttgaagttggcaactagatccacttttgtacctgtactactttttttttttttccctttggggcccaaatttgaaaactaaatcccttttggcccccggcccggattccctcaaaattggaaaaaaatgngnntggaa

SEQ ID NO: 5959 - DNA, 645 bp, Gossypium hirsutum
tccaatagcaagagtctgaatataattacctcactgctagcaattcatataacaatatcaatgaggaaatcaaattgaattattttcaaaaatttcaatcttccataacacagttgcaagccctaatattcagcagtgaatttcctcttcttctttttttctctgatcaaaattcaataacccaaacaattttcgaaatcaaaagaatcaatcttataaatcgtgcagcccggaacacaaaaattttgagaattaaacaaaaaacatatgaatgcaaatatttgtcatatgccaatagtatggcagaagcaactgaatatgagagaaaagacagcaaatcgtagaaagggagactaaatgaccttttctgagcagcctcggcggctttggcacgagcttcggcagaggccaatctgtcttgctcctgtcgctcttctttgtttcctccgtcgaagcccgagaaacaccccgagaaacaccccattttctttcctctttttttctttctctagtctttgatctttgacttgcgttgcccgttgctttatagattgcggtcacgtttacttgtttacctcccatttgaaccaatagaaaagcgccacgtcataaataagaggacatttttgtctttacgagagctta

SEQ ID NO: 5960 - DNA, 618 bp, Gossypium hirsutum
ttttgagcaaaagtcaagaggtcacaaatagtgctgtgacatctggtccatcaaatcaaactccagcttcttctactggtgagtttgatcatttaatgaaagctgaagcactgatgacgtttgcagttgaatatggagctgtagaaactcctgcaagtgattcatcatcagtttttagaaacccttatctcccgaagtctcgtaaagtggagagttctaattcaatccaaagtaattacaaatatgctgcaacgcctccttctttcccttgctttggtggattggatgagaagactggtatgcctatgaatctgaaggcccaccctggagggcatgattcaaacgccatgctccaactgaagaaatattacactcatgtggaaactagggaagagagatatagcaggaggttgctcacacataatgatagcaatgctacaaacgagatgtcaggaacatctcagtttggtaatttgtattcaatcaattcagataagtcggcaagcaggaaaatgacgcaaggtgtatttggtggggagcgtatccttcaatctatgaagaccgtgcttggaactgaagtggaatgttccatgttccaagcttccatgttaaggatga

SEQ ID NO: 5961 - DNA, 611 bp, Gossypium hirsutum
agaacttctaatcctaaatgatcttgtaattaggacactacattctcagtgattctctattttgtttattttaataatccatccttctaggtcagagttcagaagcatgcttcatttctgcattacttgaaatattagattcttcatttatttgtctctttttactcaagtttttccccccaaaggatttgtggtacatgtttcaatgacatgtaaattccatggtagaggaacttcaaccattatttattcacattcttttacttcgctagtaaaattgcacttgcctcctcaagcagattatacaaggtccagtggttatgttcccttatatcctgtggatcccatggctgtccctggccaatcacatccccaacagtccccgttgagccgtagtgaatctagtgaacctcagcaactgcatccaaagacaagccattgccggcctcagtcatcccagctgcgagataatttagatattggtaccatctatatgctatttctttgtcactctatgaaccatctacttcccgtgtatttatataacattatacggttggctttatcttctatccagtttgacaatttaaccatctgtacctgcataacat

SEQ ID NO: 5962 - DNA, 611 bp, Gossypium hirsutum
tggtttcactataaatatcttactaattacctactggatgaatttcatttccttgtgtaaaaaaatatatgaaatattaataaactaattttccttcttttttttcataggagaatagcaaaagaattacatactttagagaaaaggtgctgtgatcatcatgaatctgttttacgatcgaccagaacattgacgaggctctctggatcggatttgattgctggcgggatgtctacgagcatatggggaggggcgaagtacatatgtagtgacatcatacaaacaatgattcccaagaaaagctgcaatgacgccgagaaaacaaaaatatatgatccaaggttagagaaatggtgaaaatgtggcaagcaagtttttgtatgtttcaagagctatataaaatgattaaaacagaaagggttaacaggtagattacccaacaagttgatcaaatattctggactacatgtgtgtttgtgtgggtgtttaacactttttgttaacaatgaaaggaaacatccaggtttggaacgcgaattacgaattacgacacacttacgtattaagggtggttaaaatacctgagaggtccttgtatcatagggattgga

SEQ ID NO: 5963 - DNA, 538 bp, Gossypium hirsutum
  misc_feature (522)..(522): n is a, c, g, or t
  misc_feature (524)..(524): n is a, c, g, or t
aattcttacttcatcctccctcctttaaccaacattggatatggtagcaacatttttttatatggttctggtttgtctaccagcatccttcgctttgtaagtaacttctcggatacttttggtttgtcttaatactgtgtactcatttcagaaaaaggacttctttggaaagtggggattctgtatttggtgattgcaatagcaatagtaaatcaaaatcttcaagaagcatgatgcaggattatggagattgtaagcaaggtgatgttcatgagaaggattgttcattgcatgaggcggaagctcctgctccgagttcaaggaatcctgcatcttatgatctatcaatccacaaggttcatgaaaatccctgaatttctttgtcaaaaattggattattatgcaatttgctaccagcacattgctacttgtcaacccagtttggttactggaagttgagaattattgaatcactggactatgctaacacttatcttgcttaggcagtaaggctctatgttngncttagtgttgagta

SEQ ID NO: 5964 - DNA, 559 bp, Gossypium hirsutum
tgtttgagagagtgttttcttaaggagaaagatgaaagcttggtaaatgccaccacaggtggcttctcgtatttgatacgagagattgcatcaccaatctggggttttgttaggttgtttcatatgatcaaccttaaaaatgatatatagtaaatcatacattttttaatgtatttatgtattcatattcataatataaattactatgaggatagacaacatttgttaaccttattaatatcagtgatttggtaaatacaatgagaaaacggaagatcccaacttatcttgggaataagattttagggttaatattcccttacttgtgtcttatgtttacgtacaaaatatgtctcaaaattattccaaaatgcactttttttcttcttctgaaaagacaagacaagtggttggcatattcttccagattttttgcaaagtgaccaaaattctcaaattggaagactgtttggcaaacacaagtttcatgatgataaaaacttgtagctattaatcaatttctgccataaattttaaatatatatatttacttgttgat

SEQ ID NO: 5965 - DNA, 654 bp, Gossypium hirsutum
gctcacttgtccgtggactgctttccacatctagtataaaaaagggagaaaaaaaccataattgttcaagaaagagtaaactaaagcttaaaatatgctatcaatccctatactcttcccaaatttaaaatttaattcctccatttttcaaatttcaaaatccaagtccaattataaatacttttataatttattcattcagtttgttggtgccacatcttgaattaaaaaatactcactcagatgaactaaattccaaatttgggaagagtggcatatttgaacctaaaataaaatcactataatacaaaacaagcatgctatgggtaaattataaatccgtgtcaaattatatgttgccctcactcttcattttttccccaaaaaacccgtgcctacagatgtattgaaaagctaagatgatcttagacatacccaaactaggcacataactgtttccgagtctcatcccgagtacaagtaacatagatcaattataccaaatacaaggaatgcaaaaggcacattatattaataacatgcatgcaaccatgtatgtggaaatgccatttgattatgcaaatagaatcacgaaaaatatacctgctgtactgccgttagaccagctggagggagcagcagctcgattgtcat

SEQ ID NO: 5966 - DNA, 665 bp, Gossypium hirsutum
cctctatcttttattttatttttatttcttttcatggtgtggaaaatcagattaatttgaaaaattagtattcgaaaatagtaaaatggacataatatatatattaattttaaaaaaaagttacaaaatgtggctcaaagttgccaaccaactgaactcgattttacacacttttaaaaaaccgacctatttgaccaattatttctttttggtatatatggctaactgtttagcagggagggtttaattatgatcttaattatctattttagtttttcttttccgtaataaataataaaattttcaaagttatcaaggctaaatatccgtgtgattcctccaattctcaacccttcttttatttcactttgactcactaattaaaataaatattaaaacatgtacatatgtgattacaagtaataacactcaaatttaattataagtgattccctaaacacaccttaagctagggttacttagaccctcgacctcacttcttgctggtattttctttgattttttatttttaaggttttgatatttttatatttaaaaggataaaagctttattttagcgactgatatgaatataactagaacaagtctcacgatttgtattaggaatgaatataactagtacgagtctcacgatttgtattagg

SEQ ID NO: 5967 - DNA, 606 bp, Gossypium hirsutum
  misc_feature (11)..(12): n is a, c, g, or t
  misc_feature (599)..(601): n is a, c, g, or t
gaatatagggnnttttatttatttatttgattaaaactacgtataatcaatgttggatttgaataaatttttagttgacatcattaattgagaatctatgacacattgatatttgaaagttatccataaaagtaggatagagatcatatatgttctatgtttatgtaattttagtgatgatctgagttcttgaaaagggaaaataaaaagcctttgaaggtgttaaaagaaagcctcatagagagattaggttagggcaaaattgtatatgggtcaggctatttagttcggtctaaagatttacttgaaaagtaggagggtttatgtaaaaatataggtctaaaaaaatagatttggataaaaaataaggttcatttagaaaataggttgggcatcaaataaggcttttttggcctaggcctggcccgaatatgaaaaaaaaaacctactatttttttattattttcttgttgttttctcactattttgctacaatttcactattatgttgttactattttgttgttattgtttgaatattgtataactcttgttttattgttaattttgatactattttaaaaacttttgcttgttannntgcaa

SEQ ID NO: 5968 - DNA, 567 bp, Gossypium hirsutum
gtaaagaagcagaattgttaaggcataaataaccttggatttaaactcagcgtagtcactgtctgattcaccaggcaattgttgagtaactggtgctttacctctagtaaacaaagtaacctgccaaaagaattataattatatttatatatatagcccttccattaggttccaaccacaagaatagatgcaaaattagtacctgatgaccctcttttacaaggagtcttgataaaaacacaccaatgaacctagtgcctcccattatgagaatcttcttggtgctggatgctgcaatatgcaatgcaccttttggctgatatacctttctcttgtactgcaaccaggtgtagaaaaagacagagcaattgcaaaaaaaaaagttttaaactttccctaattgcaaccccaaaggaaccaactttacaatagagatagagagagagggacctggatttggcagagcttggtgccattgaagtgggaaagagaggaagagaggagggagatgggaggctgctttgtgggctgcaacaccaccagctttgacatggcttttttgccttt

SEQ ID NO: 5969 - DNA, 612 bp, Gossypium hirsutum
atttgattactcccgaaagggcatactgaaacatataaaatgtgggattttaagacatcagcggccaatgtagtattggatggaatttgggtgaaaggcgccctggtaccatttaagcgtatttcgagacccttggcaacgtaatgagccaacctctcagttccatcaccatagggcgaagaatagtacctgatcttaccaagtagctcagttgcagctctttggtcatagacggcaacagcttgtgcgcattgagttaggagactcccaaaatccaccatttcctttccattgccgacttgtttctttgcaggtattcttttactattatttcttttcaaccctccattatcttccaacttgctgttggctgttctattctgatatgcttcataaagaggacatgacatggacacaccattcccagtcttaacaaggaaaacctcgtcgaacatgtgttcttcagacaaaccttctacggccattgctaaatgcttgtttttcctcctttcttccaacgaatcaaagtagccgtgtggatcattactccaggttgatttgtttgggacttgtaaattgtgatggaaatgaggaggtgaagagggatacttc

SEQ ID NO: 5970 - DNA, 515 bp, Gossypium hirsutum
tgttttgtggaggtcatccagagggatgatagaatttcgctattcctgaaacctagaatctctctacttatcaaattgtgatcacttagaatctttcttgtgatgcttggcatttttttggggacccatcttcccctcaagatgaaatctttagtgttttaaaatgaactggtccagtggtccctcatatatctaatataatctaattcactgtcatgtacctttttaaagttgttagctgatcgctattgtatagaaaatggtttcttatataggtggtatctgtaggtgtaggggttctttgtaaagtctaaataatacgtactttgttacagaagattttttatctcaacaagaaggaaaaaataagcttttgtacttagacaaatgtgcttggaacgtacacttatctattgttgacagttgcagtgtttggttgtggaaatatatgtgcaattgctttgttatagcaatgaactcataaactctactgtatatcgccttcatatttatca

SEQ ID NO: 5971 - DNA, 612 bp, Gossypium hirsutum
  misc_feature (606)..(607): n is a, c, g, or t
gcaaatagaataggaacggggggaagggggaaggtcaatggtggcagcatcgtggaaagggcgagtcaacggaagagagagaaagaaaaaatggtatttaatggtaagttttttattttttaattttcaaaattctacctcatctcactctggcttctttttgccttttctttacttttgggtcccgctttggccgtgaattaggtgtcttctgggagttttaggtaacaaagcatttcctgttactattacggtttacggaccgccgattaaaaataaaaattagtgtgattttagatgaatggtacttcgatatgaggtaaaagatttcaccgtagtacaatcaccgtggatccaaagccaatattccacgcacctgatttggtaggcaaaataacataataaagcctttataatctgtaataaattaaaagcaagaaaataaattatattctacattttagggggaaaaaaccgagcacaagcaagcaaggtagggcaacggtgaccggtgtgtttgcttgtacttcactgtatgcttctcaaactcaaaaaaatggtggattgttgaattttgaatgcgttgccaccattagttcattcganngctgt

SEQ ID NO: 5972 - DNA, 645 bp, Gossypium hirsutum
gatggggatgctgagctagatgcagttccagatcttcaagatcaggtgtcaatttgcatttcacttttcatgaacaattcattattcaatgttgcattttgtctgtgtgtggatgatcttggtaccttatccagtagaatatacccacttgcacgaccacttacatattttcatagtaaatcagaaatatgtttatattttgaataatctgatgtattctgattttaggagagtttttctaattccatatattaggccctacaatacatataatggtactggatttaacacaagatattgcctaaaaaggagcttcagaaggatttatgttaccaatcacatttggttgaaatgtgtgttttgttagttgaataattatttattgacaagacttcatgcatatgttagattgtggcatgagctctctttttagcatctaatttttagagtcttataggacctaatttcaaattgatcttgaagttcatatcagaactattattttgccatgtttcataaactttcaataacaaaaatctatttatctaccccgtgtggatttgttgtgctattttcgtatgcattgaaactttccaccttggttaatataagctatgctaatatcttgtggatttataggcactg

SEQ ID NO: 5973 - DNA, 609 bp, Gossypium hirsutum
tcttctttgaagtcttgaagaagattgaattcgaagaaacctaggctgatcccggttcctgaaggctgatagaatttttgagccaatcctttctggaatggaatggtcttaggcatataaatttcaggatacattggcatgaaattgcagttaagtccttccttggcaaagtaaaatatggtgatgctgtcataaaaatgaccaaaacaaatcaatcaaaagcaaatatagtgctacaattcttctaaagtaaaattgacatatatttggacatgacacacacacacacacatatctataaacaaagtatgcgatctctatgaattacttactttcaacttagaacttacctcattctaaaccatcatggtgaacactgatgtgtaaggcatagataaaaatcagatgtagtaatctatttaattaataaaacattcaaaatagtagagggtttcaatacgaaaaaagctcatatgtaaatgcatatatctgacctgccatcaacaagagcatcaaaagtgaaagaaagcaagagagaatccaagtgattatgatcaaggaaaagtgaaatggtgtccttgtgaatgttgacatcactcttgatcttct

SEQ ID NO: 5974 - DNA, 666 bp, Gossypium hirsutum
gtaaagctctgggaatatcaaggtatgtatttttatatatataaacacttacttctgcatgccatttgcctataaaaatatgtaaaaactgagtgcattttcttcacgtttcacttgttggttctgagtttgaggattaagttctcaggtatttttcattttgtaggtttggtataaacaaacatgtgcccaggaagtgatcttgaatctcgggaaagtactttaaacggtgatcaccagaaccagcttttgaagagctacaatgaggaaacaggtgatggggataaattcattcatgggtttttgcggaagattcaagtcagacaactactcagcaggttgccattgaacgagacaagagaacctctgaaccaggcaagccttccaccctctctcgctctttctctctctctctatgttttctgtttttattcagattagtgtgagaatttaattaatttctattcagattggttgttattctttttcagttcaactttgaatgtcttttggctgtaaaatcacttttgtttgaattccttttttggggtttcatatgaaagagatgtttagcctttatatagaaaccatttacgtacaatataaacagcaattgcatttttcagacttttgatttgagtgtgtactgtacaatcaaagtgacca

SEQ ID NO: 5975 - DNA, 632 bp, Gossypium hirsutum
ttacatttcttcctgcggtcttcggtggttttggcagccgcgtccagagttttaatacccgtacagcaacttggagccactgtccctccaaaaaccccatagctaatgcatggaataaggaggtatgtgacctgttcgcatgttatggctgcacctacacgatgacgaggcaacaacatggaaactgtaagcaacagcatcatcaatcccacctttgccttcccagacctgcccatccttccctaagtttgtgtttactaactacttttgctgcttaatttgttatgttatgcagatccgtacttactggacctctactgctctaacctttatatagagaaagcgtacttggatttgggctgggctattttttttcttcttttgtcgcatgcgtcaaattgaaggcgatgaggagcaagattttccggttacaaacaagcatatattgttggcattagcggtaagaatattcaaactggcattatcggtaagaatattcaaactggaatatatctcttttacgtaagttcttatatgatgattgatggaattagctgaaaatcaaatcacaagacttcttctatttatcttggataatatatcatgtgctggaatagcgagagtgttcatct

SEQ ID NO: 5976 - DNA, 648 bp, Gossypium hirsutum
acgtgcttttgtttgatttgcttgaattaagcatttccctgatcttctttgggtttgattttttatggataggctggtgagctcatgaagtttgagtaccaaaggaaggttgccactctaaataaactaaagaaacgaggtaccaattctgaggcactcgaaaaggcaaaagcagcagtaagtcatctacacaccagatatattgtcgacatgcaatccatggattctacagtttcagagataaatcgattacgagatgagcagctctatccaaaactcgttgacctcgtcgagaagtaagttgcagttcatctttttaactctatgactttctcagaaaaaaggcctatgacttgatccaagagaggatttgaatggcaatgcagttcccctttttctgtaaaaacagagtattaacaatcactcttagatacttgtaaccttacacagtttttgtcttctgcctttgtgttttctccaacgaggcttaagtattgtcatcaatttactgtatttgcatagggtgtatctaagatgttttaaaatttgatgaaatcattgaattttcttttcttgtttcaagtttggatgatgtgggttgcaatgtgtcaatttgcaggatggtgataatgtgggaacccatgagag

SEQ ID NO: 5977 - DNA, 582 bp, Gossypium hirsutum
  misc_feature (528)..(528): n is a, c, g, or t
  misc_feature (530)..(531): n is a, c, g, or t
  misc_feature (579)..(579): n is a, c, g, or t
agaagtcagaatggcacattataatcgtttggtcatatttaagagaattttttcttctttttttaaataaaatttcgcttcaagtgttaagtgttgacatctgaaattccctttttctgttaacctaaaaaaaggagcaagcaggcttactaatattgaaaaagaagtatgatgctaatggccatacctgtatggcaatgacagaggagttcgccttttattgcgtctgaactccaaaactttctccatttcatataaacagaagatagctggaatctagaattctggtaatgtagaactaggaggcaatactcggctaagaatctaaattacgttctaacattgatggttttcttctgaaaatcactacattaggaggcaccacttagcatatgatctcctgagtaaaacagcagccatttctttaggatcaaagatgatcaaacctgcaatctataaccaaacagattcatcatgcatgtgatatttgcgagaactagtaaggggaaatgttactattatcattcncnngacaacaaaccgagagagacaatgtcctaacaagaaggttacagtggnaca

SEQ ID NO: 5978 - DNA, 652 bp, Gossypium hirsutum
ctgctaaattaatctttacaaaaatttgtatatataaaatattttttataatttttttcacattttaattttttatatacattttagatttttttttataatttgtgaagttttttagttttgcactcttccaaaatgaatctagacaaatgattgtccagatttatttgtatctggacaaccatttttcatataacttcatatggacattttaattatttttgaaaaaaaattattttcttaaaaaaattttgaaaaaaatatttttttgctgatgtggccatccatgtcagcatactaacacatggtaatttttaatagtcatgtcaacgaagttaatagttaaactaacggtttctgttaacgcaaaggatcaatttttttttttggatcactgaaagctcaagtaaatatatattttttgtaacgggtcaactgattatttatttatttattactgaaggcattttttaccctaaagccttatgtaataatacaatactatacaaccatatataataagaggtgacctctactgaatttaatttaagttttgaatttatattttgtgtaaaatattcgtatacaacacaagccacgtacgtgctttttgggttaccaactttatggattcttgttaagtccaaccaca

SEQ ID NO: 5979 - DNA, 625 bp, Gossypium hirsutum
tacctgaatttattggaagtaactggactaggcttgaatcattgtatgttttctaaataagagaattgcatatgagaaataaccttgaatatagatttttcttgttttactttcctgactaatctatcaatctataggagactcgaaggaaactcttttgaaggtcctataccatccaatattgggaaattatcttctctcaccattttgtgagtaaattaaatcttttgtattccatgttattctcgcaccctcccaataatccccccaaacctcgcttctcaacatgctcacgcatcaataaacgtaaatgtcttctgatacatatgtattggtttggtccttgtgtataatcatatatataggcgaattacaggtatatacaatgggagctcttcgattgatgttattaggaatttaaagaacatatcagacttgtgagttaagcataccatttaacatcttgatcttatatctttctttttcctttctttttccatttagtttcatcatggttttacctaaatttacggaataaccaactttacttttgtttcttttttcctgtattgtagagttctaagaaacgttttactcactggtagcattccctctgacatctcag

SEQ ID NO: 5980 - DNA, 554 bp, Gossypium hirsutum
  misc_feature (538)..(540): n is a, c, g, or t
tgcttccctttctttctcaaaatctgggcttccagatcatgtgcttttgaacatagttcttaaaaaagtattgattgtttgagaagccaagatgtgagacaactcatatctgaagcaattgatgcacatcttaagttgtcgctcttctctctttcctgtgcgcgctacccataatagaataaggaatcgactccttttcctttctcttgtgaagctgtctgttgtttagcgaaagtcttcttttgctgcctatggatctgtcttctcttgcaagagccgatttgttcacagacgatctctgaacactttagaaaacttttttagattcgagctatgccctgagtgaggtataaaggttgaaaaccgttagcaaggcttaagcttagagaccaaggcaggacctagacgaatcaagatacttagccgatccgatgccataaattgttaagaataggttattccagaataagttgtgggaaaataggttgtttttttttcatcaaaagtcgaaggaatatgcccagaaagggatgtcctnnncctgtagcacaaat

SEQ ID NO: 5981 - DNA, 452 bp, Gossypium hirsutum
  misc_feature (425)..(426): n is a, c, g, or t
ttttctttttatgttttggattccaagcaatttgcgtcttcttccactgaaaactatacagggttcataagattgtttgattcggaaaaaaaaacattttaataaattttaaaaactattaaaatatgaaaagttacaaaaatttaaaaaatgtgttatttactatttgaataataataaaatttcaaaagtttgaattattattgaaagtatttttatttaaatttaattataaaatatatcaaaaaaattaaatttaaattataaatttaaaaatgtgtaaattatgacttttctaattacttattatttgattgcctatgagatatttttctctaataatttttaaaaaactgtgtataattattacataaacagaaatatgatcacaatttattatgttgggagagccatcatcatcaccnnaatccgcatttcagagaatgaagatg

SEQ ID NO: 5982 - DNA, 624 bp, Gossypium hirsutum
tggtggtatatgcttcctattattggtttgttctaccattggttgtctttcttaacgttaatgcttattgtgggctttctgttacatcaacaatctgcatgtgcaatggatcacaaaaatgaaaatgccacccttgttaattcttttatcgttatcagctgactgaattcctttttatgtgcaaaaatatcattgatggaactttgcatatgcttttgactttggctttaaaattattcaagcacaacattcaaagtttcctcaagtatgattacctagattttgcggtcaacctgtttttctgaaactaagtctttgctttgtaaaatggaaagaaaattgaaaatatgaaaaattgaacaggtagaaagaaagtattttttccacagtagtgtgcttcgtaggaaagatgaaaaaattgaaagcaaaagtaattttatttcgtttcattgattggtagagttcaaaaatgagagaaaagaaaatgaagcttttgaaaaatgcataattttgaattaacatacattcctctctcattgtcttcctatcattcctatgatttgttttcatgcatgaggatggaaaatgatgatctctcttcttttctaccagtcacctcgatgg

SEQ ID NO: 5983 - DNA, 643 bp, Gossypium hirsutum
tggggacagtgctgatgttgcgctagaacaaaaaaatggtcactaaattcaattgttaatcatctttaagacttgattacaccacatcttgcccaattaggagatgtttatggaataaatgaaaacaatagctagattttcgttagagtgtggcagagaaatatgggaaacaaataaactctcacggtctcatcagcaaaaagagagtgatggcatgagtcattaaaaatgtataactgcactcttcctagagaccataaaacctgagaagctatcattaaaaaaaagtcataaaactgctaaaacaagaatagttaaaaaattaggtaacaaaaacacagagtttccacttgtagcagaaagcaaaatttctgcacacaactgtaacatgcacaagacataagttttcaagtaaaactttttgagtatgttcgtgaccacaaagttccaacatgcaagctcatgatatcttatctaagtattagtgtcccgttcacatggtgatatgcaagcagaaattatcattcaagtccattagaaactgaagttcctacatcaagggttcataatgtgtgataaactctcactacacagtgatctacatgtttcagacagtaatgaaaatatctgtcccaggaaagat

SEQ ID NO: 5984 - DNA, 637 bp, Gossypium hirsutum
  misc_feature (615)..(615): n is a, c, g, or t
gcacacttaagttcatttttggatgaaaccgaataccacccctacatggacccaatgcctggttaaagtgcaccctgaagcctcgattgacatgtgtttcacctctatcatccacccatggaactcgaaaaataatcatacgttctggttctaacaagcgctccatgatgttgacataactgaagaaaaatggagcacgatgagacccatagcacatttgactgattcttcagttcatataatgaagggtaaatcatatataatttaaactctattggcaaactcactggggatttttcgcaatcactctctctaaagcatgaacagcttcttggacagattgtatgaactcagcctcatgggggtcccttttcagtgcagcttcaataattgatccagccgttttggacataagggcttcaattgaggaaattttttccaaggaatagacaaaatgaatttaaaggtcagacaattaatccttctctaagagggaaaaagaaactaaaaccatcattagcagtgatcaatgtgttaaaacatttgtgtcccggcttccgatgattaaaacaatcattcaaaacaaaattttataccaaaggtatttagttcagnaaaccaggagaataagttcaaa

SEQ ID NO: 5985 - DNA, 638 bp, Gossypium hirsutum
aaaaaccataacaagaatagaactttagtaaacagataaaaagaaccgtgataatttatgagatttttaacatacctgatttgcttttatgaagatgatgatgctgggctggggttttttttgcagagattgaaatacagaggcaaaggtaaggatggtaaatgagaggaaaaagggcgaagaaaataaaggggatatagtgtttacgtaagaaagaaaaaaaaatagttaatatattatataattataaatttataatgggctaagaaagtaaaaacaaattatagaagtataaaaatagagagaataagtataataaaaattgttaaacccaagcccaaccccatattaattttgactggtgagcagtgctgccggtggaggtggtggtgagttaggaattttgattccggaattgagaataagggcaggaaggcacgaaagtgaaagtgaaagtaaagttaaaaatttaaaataaattaaaatattcattatataattcgggccgggcccggacaaaaaatattcacataaaactcggctctttttttaaagaggcctcatttttatctaagcctatttttcgggtttatattttcacccaaatcctcttattttttgaacgaaccttcaaactg

SEQ ID NO: 5986 - DNA, 586 bp, Gossypium hirsutum
ctgcttctttcgaagtccttccattatttcttgcataaagaatatcggcagtaatgctgacattcccttttgcctcgtaataggcagtagctatttcctcgagagaaaacttcgaaccaaaggcatcaagcagctctttgagagccgcttcactgggatttgaagagattacaactcctttcattctgaaaataggggaaaaggaaaaacaatataaaagttttgataaacacacaggacttagaaggaagacaaatacaatggtgtattataaacaaagcatgttaaatggttgagaaataaatactcaaaaaaacaagcaaaaaacagctaatttagccgaaaacctaaaattaataaaagcgatgatatccatgccagatttgcaattccttttcaggttttgaaccaactatttctttcctttactgcccattttgttctattgtattgaaatcattaaaaagaaatgatataacatacaacttttaccttatgaggtcgaaacggcagttcatctcagttcacattccgcatcacataagaacaacaatcggggacccatgacccatgaccactattgcag

SEQ ID NO: 5987 - DNA, 548 bp, Gossypium hirsutum
acgtattaatgggtattaatgattagacgaaaattttaaataaggaaaagtagtacttctaaatttaacttttctaatcgggctggctgaaatttgtatgtagatttcaaaacccatgtttgaaggaggtttataaacttgattggtgctatgaaatagtgggctttcaaggctcaattagcttaatatgattttgggttcataggttaacagaagttcatcttcaccaaaggattaatccggggtttaacttgggaatgcttcttatataggaaataaatctaaacaattgcaagttggattctcttaaataaatgcataatctaataatttcatcatttcctattcaatctttctccaaatctatctgataatggcttcaattcctaatcatggtctgcttaaacctaccgatcagtaataaggtgactaccaaagcggcaccctccatcatctcatcatgtctctgcaactaaaatccctgttcttcatcttacaacttttagctttactgatttcaatctcatcatcagacccaaacccacaat

SEQ ID NO: 5988 - DNA, 629 bp, Gossypium hirsutum
tgggccgttcatttgttcggtttagtttgacccaatatatataaaagataaagtataggcctaattacgaatttcatcccttaaattatcaaaatttggtcctcctactttaggaaaaatgttaatacggtatttggtaattaagtttcactttaatgttcaatttgatttgacgcatgagtttgacttaaatattcaatttagtacatgagttttttttctcgtttaaatgttcaatttggtcctcctacttcaggaaaaatgttaatatagtatttggtaattaagtttcactttaatgtttgatgcacgagtttgacttaaatgttcaatgtagtacctaagtttttttctctcgttagtacctaagtttagttcaatattcaattaggtatccgggtttttttttccaattatgtacctatgtggctatttttttattatttaactattgcatacctttcaaacattcattggaccaaattgtgtcattcgatttgtgtatcaatttaaaaattgaagctaaactcatgtaccaagttgaacgtcgatgctaaactctagtatcaaatgatatattaacgcttattgagtaaccatgttaaaccgtactattgagtcattgtcct

SEQ ID NO: 5989 - DNA, 655 bp, Gossypium hirsutum
cacaaggttctcctcgccagattaccaaaatgcggcaccagattattaacaagtctccaaatgtgtattttgattttatcgggaatacttaatgaccataaatcattgtaaaaatctgtgtaaatctcatcaatagcaggcatgtaaatagtacgctgtagatgatctacaatcagtacccgatacccactcttgactgtatactccccagagccttcatgtttccagaccaacctatcctctggccgactttcagatatgggaatagcaagaattcggtccactgtactctcatcaacaatctttagaagcagcgctctatcccaggtacacgtttctgcatcgattaattgattaaccgtagaccatgaaggcctaatttcctgtgcttgaatatggttgttctctctaccaggaatatttttatacattttcaattcttaaacattgcgaattgagaaagatatcattatcctgaaagcgaatagaaaactcttaaccacatacttgtttaagagttagctttgacatttttttatttatttaataggctaagcccaagatgttccttacaaatcctaagaaataaacaaacaacttttacaagcatttctaagaaaagattttattcatttaatacccagccttccaagaa

SEQ ID NO: 5990 - DNA, 636 bp, Gossypium hirsutum
aacttcttttgtttgatataaacccaaagaagctatatgtatgtgtggatgtatatattcttttgcaaataaattggtgttgatcttgcctttttcttcttgaaaaattgaagaggctatgtttggaaagaaaataaaaaagggaaggctgatagaggatatggagagagagagagaggttaatagatttctcacctattgaaattccatattcatgttcatttaaaatgtaatatatggaaaagtattatggaagtttttatattaggagtaagattgtatttaacatatttagaaataggtaaattagtcgggtacattacattaaagagtaaattggttattttggttaaaatttttatttatttttattgttaaaaactagtgtgactgataaaataatcaaatagttacatgcgacatactatatatatatacctcatattaatatatatagataagtttttaacagtgaaaatagatagactttttaacagaatgactaatttacgaaaaaagaaaatgcaatataagatattttgtccttattcatttcgcagcttaatagaattatgactataacatgggataggaaagaaaaggcctttttgctttcatttcttttggccttagagt

SEQ ID NO: 5991 - DNA, 625 bp, Gossypium hirsutum
gcggataattctcatggcttgtcatgttagaattttagaatttttttatattttaaaaattaatttttatattttttaattttaaagagtttattttttataaatttattttaaaaaatatgatttttatttttttaaatataaattttaaaattttatgttttttatttaaaatatgaaaatttaatttttaaaatttattaaaaaaattatgttcttttaaaggggaagaccaaattgacaaaagttgtaaacattaaggactaaaaagttattttacttttaacatcattaacttgaacaacaaaaaaatggagggatcaaggattttaaataaaaaatgtacaaggactcaatgtctcaaaattaaaagtataataactaaattttaatttttaaaagaatagaaggatctttgtcagcttataaattgtacgcaccagataatggatcaaatataaattcaaataattaaacaatgtatcaagtagctaaaaatggattaaaatggcatataaatgtattaaaaaatcataaaaacttaaaagcaagtagtgagtacttattgtgaatagagattagagattagaaaatggaaatacaaccatatcagatggaattcgag

SEQ ID NO: 5992 - DNA, 623 bp, Gossypium hirsutum
aaagtaaaattgcaaggaagttcaagttggtcttaagttcttgcccttaagggcaacccatccaggttattctaattctagaatctcttcaattgcagtagaatcttacatagaaaagaagacaacaatcaaaatgaaatccaaattgtttctgagaattcagagttcaaatcaacagtcaacaatctgattatttacaagttaaattctaaacaatagccaattactcatttgatcaaaagatataaatttccactaaataccaataaaattctaaacagaaattattagtcaaacgaaatgtacagtagatagatatctttttcactacgttaacaaaggcaaacttcttattaactccaagaacaccaatttcgtgaagagtatccatgagtagcttacgttcaggcaataatcaactaaatttcaagccaaaacaaacaaaacccagattttcagtaacaatgaaatctcggttaatcaaaagaaacaggaaaatgagtaatcactaaatttcaataattactccaacattcgacaaaatcaatctataaaaaagaacacaataacttatagcgcataagaaaaaataataaaatgaccttgccaagagtatgagcaag

SEQ ID NO: 5993 - DNA, 666 bp, Gossypium hirsutum
actttatttgatcccccacctccaaagaaagaaaacctagatgccaacattgcctctaaactgttttcatttattttttttatgaaattcattaacaaagtaattagcctgcaaaatgcatagaacataagaaattagaaattactttgccgagcagacgaactccgtaacaaagagaaacaacaatctaagacccaaaagcaactaatttgctactttgtttggtgtacaaattttaagaaaggcaaatgaaattgtttcccgttccatttcatcgggaacagaacagaaactaaataactctgcaaatgtaatgagaagaattccagaataaaacaaattatgactgatatacagagaggtccattttaaagatccgatcaggaacaaaacttagatcgcatttaaattgatatcgctatgaaaagaaaccggatgtggtaagataacgaacggatcaaacatacctgatagaattacgatgaaatgaattggaaaaaaaaaggagctctaagcttaatctctaatcacccaggccacatttgaaaccctaattcccttgctgtttggttggtgaaataaaatggaagtaaaaagccttctttaattgaaatccacttgactgattacttatcagaggccatagaagtagtagcactgcatgat

SEQ ID NO: 5994 - DNA, 652 bp, Gossypium hirsutum
gcacgaagtacatcagcaagctgaatccatctcgcaatcctattaagaaatagaagacgagactcgatgatatggagatgaggaacaggaatgggatgctggacagaagttggccgaacaaaaagactaaagctcctgaatgctggtttgactcctcgctcgcataaatctgcaaattgaatagcagcgattatgctactttcaaaattgggggggcggaaatgaaaagaattgatcaatcaaaattcagaaaacaaggggatcaccttgacttctttgagtagtgcaggtactcccgcgatgcttaaaagtgaagtaaatgacacaaatacaaaaattgcagcgactcttttctgagatgagaaaagataaaaagtcagaaaaacgcccatgcttcatgagtgaatcaattatattaatcagaaacaaaaagttcaaaaaataagttgaacttcaaaagcaggacagagaagaacttacaccatgcatccgagaggagtaataattaatgatgaatatcacatgcgtgttaatcaaactacttctatttgcttatcacaagaaggtctcataatataatttactgaaaacattcccaagaaatgcatctataggactattgcttcatccactggataaagcggtgtattga

SEQ ID NO: 5995 - DNA, 588 bp, Gossypium hirsutum
  misc_feature (537)..(540): n is a, c, g, or t
aaatgtaaattaatgataattaattaaaaataaataaaatttctattattatttaaaaatttgaatttaatttaaaagtaataatacaaaagaagcccccacttttttcagcctcctccacagctttattgtttaaaaaggttttggattttatgttattttaaaaatataaaaataccttcccatccttgctttattattataatgataatggaatgataggtttgagattattatattatatatgaatggggcaggccaggctggcgcaggtggaattattgagtgagggggaggcggaggcggaggccgaaggcggagggaggaaagcaagcgtgcttcgctacaaacagaagcggcatacgcgcctcctctctaccaaaatcaggtatcaagtccgaaaagtcaacgctgatcgacgccccagaatcaaggttcctttctcacttccctttcttatatataaattggatggaattgatggtttgttgatgataatagtaataatgttgcagggacgatttgtaagaagaccannnncttctaccgtgagtgaagaaaggtgagaacattggacagccaagcaaa

SEQ ID NO: 5996 - DNA, 631 bp, Gossypium hirsutum
aggggagaaaaaccaagcgatcaaagcagagatggaccttatcggcgaactcgaactcgtctgacattactgccaagtccaagtgcgaactcgacgttggagctcctcactagcacaagttgggaaccaaagtaacaaaaacaaaaaccggtttctggtaatcaaacgaattcggatattcatttggcagtttaatggatccaactgataattggactttgaacccagatagtaacattgcccagtgaattgggtaaaatccagtgagttttatgggacttggagggttacttttacttttattgtttttaggattatttatcatggcagagtacctattacaaataaaaagatgtttatttaatcaaacataataattttctaaacccacacatttacaaaattattttataattatttttatttaattaagttcatcttactgtttcaattattctagtaatatataaattattgcttttacatcaaaatatctcatcgttattttaagccataatgatcttattttataaaaaaattattttaagtttctatttttttcgtattttttagctcttaaaacttgacaacccaaaaattatgaaaaagttgacgtttgtgcattatgcta

SEQ ID NO: 5997 - DNA, 511 bp, Gossypium hirsutum
acttaatttgccctttcccctttttattcttttataatgttgatgctggtggaactcctttgcatcatgctttcattattaagcatgatttcaatggacattaacaattattatactttatcccttaattgaatgatagttgagttgtttcttcaatcctctgcttatgtgctattgcttctagttgattgtcaccagttagtatgatcttctgaacgttaatgaacttggaaagaggaattatatatttagacatggattgaataacaaatgtcccaaactcatttattttggtagataagaatataattacatctgatgtataaccaacattaaagtctaagcttaagaattttctcttaattacaatagaaatataatgagttagttaagggaatatatatgaagagccttataattgatttcaaactcttgcttaacatcgtcattaatcaggagaaacaagtaaaaaagtgatttaatgaactgttaaaggaagctgaattcctag

SEQ ID NO: 5998 - DNA, 617 bp, Gossypium hirsutum
gagtatcaggtcagtgtctctttcactctgctgtcaacattattcgatatttgcataaaaacactaattctttataacctacaaactgagaaaatgggatataagaattggatttgaatcgtatccattgcaatagtgaacacaatctatttattttccggatatcttagcatttatccattatttgtggtgagaaggcacttaatatatagcatatagactcttgtggaagattaaccaaatccctaagccaaggtgactccaagatgaaaattttgcaatcatgaattcaggttggacttaaaggggaagattcgggtctaccaagtggaagttcatcggaatgggtttcacaacccgcattgccaaagaatcaacccctaatatggtacaaggtaatgcttaactttaaattagatgcgagttttgaatttacttattgcagttaaaggaaattaaatattcgataaggtatttcaactatgtttcttgcatttacttctatataattaattttccattttttgcctgaatgtatatatttttaaggtttaaaccttctatggtcttttattatttgtaaaattattgtggtggatttcacagtagactcaaaa

SEQ ID NO: 5999 - DNA, 626 bp, Gossypium hirsutum
  misc_feature (5)..(5): n is a, c, g, or t
ttttntcaatcaacaaccattagatttgcacagatccgacttgctcatagcccctctttgacatgtgttccaggctggctgtaccctttgcctgtaatgggtgaaaatccaataatattacccagaatcaaagattatccacatgtaatcagtaatctaacaccattttaacaccaacgtttttcaatctttaagcaaagcattgtgtcatgtccatccaagtcaaccaacattaagtttgctttttggacatgcatggcccattgatacaagaaagctcttcgagcccacattttattacataaaaaaaaataacaggaatcttttcctacttttaagtttaaaactatatggtaataataaaaggttcaattttgaagaattttttaaatttcacctccatttgtttagtcaattatacacgtaaaaataaaaatattttttttaaaatccgaatttacttttttaatttttatggacacatgtcaacattttattagctcacaacataaatgctaacagcatcaaccaatttagagaaagggtgcaaataagcggttaaaaggaaattctcactgcttaatgactaatcatctcaaacaaaacaatacaaagttgtacttcag

SEQ ID NO: 6000 - DNA, 273 bp, Gossypium hirsutum
ttgatggagtacctctgcatggtgctaagtttgcggcagtaaggtctgatttggcttcctagtcctaggacttgattagtaaactaatggcttttagattcagtggaacttcaattacaatgataattcaactgcctatatattcatccaattcttttgacaacaatactaaaattcaactcctaattcttagttcaatctaagcaaacctagttggcaatttctaagccataatctcacaatttccccacacacaccaaaaaaaaaaaaaaa

SEQ ID NO: 6001 - DNA, 644 bp, Gossypium hirsutum
ctgcaagaaaatggatactattgaagaaaaattacattaatgacttccatttgaagagctttttgcagtttttagggttttttttagttcaaccagttattaggattaattgctttaaatgtctccaaactttcaaactttctaattgagtatatttaaagcatatgaattaaattataaatacatggaacctaccacgtcaaatataagctgactatgtaatagatacatatacgtgcttataattttatctgagtattttaaatacgcttcatgtcaaattttagctgacatttaacacgattgctaacggatcaaagtacctgagcaacaatggttatatgaagagcacaactcccaaatgtcattgcattgctgttgatgactgttaggtgacatttctatattccagaaatgattttctcgagaaaccctttctttttctcacagtgaatgcttatgagaacactttggtcacaacaccttgcttcaatttctggtaatggctcatcaaatggggcactgaaatgttcatcccagcttgaaaaatcacctttactgtcaatcaagagttggtgtttcttcacacaagccacatattccattggtttctgcctggcctgctcttcaggtgtcttcacttt

SEQ ID NO: 6002 - DNA, 630 bp, Gossypium hirsutum
tgcaggtggttcatcagaatcaattatcgacctcattgaacttgttttggcttgtttgctgttagagcaattattttattttcctttttatttttttacttctgtacattcggttgaatgttggatgtgttcatttcaacttttgtagtgaatattcaacctttattttaattttaattttaattttaattttatattttatctttttagttgtatttaaagcataatttctatccttattcattgaaaatgtttatgaaaatatattaatattgaaataataaaaaatataaaaaaatagccttagatgtgtctatcccaacattttataaggatgacttagacctatttatctcaacctatataaggttgccttaggcatgtttatcccaaccttttaaaggttgccttagacgggtatatctcaaccttttaaaagttgtcttagacggatctatcctaacctttttaaatcacctttaacatggacatgagccaactctttaaagggtttacatatttatgctttattccgacatttttttcgttgtctatttccacctatgccaacattttctaaatgtcgactttgactaggtttttgccaacccttcaataaggtcggcttat

SEQ ID NO: 6003 - DNA, 627 bp, Gossypium hirsutum
tagcagctgcgacaggcttacttctttcgagcatacatcctagttgtaagtacattagctacttatcatgcatccacttgaatcacaatggcgactgaaaacatcagtgctgctcgatattcagggtccaaatagtttactcccgtcccatcagcacgtgtgaaaactgacaatatccctgacaactatcaattatactcatgcgtacagctagctagacaaatgtggtagcagcatcctcttgtttgatatatgtagatattggagtttcagattactatatatccagcttctgccaccctacatataaaataagtatataaccgaagcttgagcttcccatctatgtatatctctttctgacaaagtaacattcctataagaaaatctttcacttcgagtagctgaaaacacaaggcccctgttatgggtgtacttcgagctttctgttcaaaatatagaggtggggggaatgggtgactgaacaagttcaaacttagggttttatcgcacatattaatttgaagaatgtcttgatatgtgagagagtggaaattaaggaaaatgagagctaaagctactcttacagttacttaaaaaaaaaaaaataccccccccttaatttaa

SEQ ID NO: 6004 - DNA, 617 bp, Gossypium hirsutum
tttttttctcaatacagcaaaatgatatgtccttttagattttggcttaaaattagctaattcaaagtctatgttaatgcagggaaagataaccacagcagatgttggtgcaccagttcaaccatcagacgctgaatgtaattctattcaagttgattctctgcggtttgaggtaaacaaactatacctgattgtagattctggtttattttgcatcaagcaaaactctagttgttttctcaccctgcaccgcagatgaaaattttctccatttcaaattgttcctttaagtagtctttgtggtagacatgtaaagagatgttaacatggtgacttctttcttcttaatttcacactttagtacagagattatccatacaagatttagatgagcttcaagttatttgatagaaaattctttcagaatgtatgctataaatattatagcattttcagagaatgtttcattcaacatttcaagcaaggaagcaagccaagctggacttacaaattagttgccaaaacccagccaaaaaataattataatgatagcaagtagttggctgctaattatattagtctacaaaatatatcaaaaaactgtcaaatccttccag

SEQ ID NO: 6005 - DNA, 680 bp, Gossypium hirsutum
ttccatcaaaggtaaggagggtgttataaatttccctttctttcggtgttttgctgttgtttaagattttctgtttgcattggtgaatatatgatataattttatattttttaatattggttatgattttgaggttattccaaagtaacttacttgatctgcaaaaggaaaatcattaaaagctgagcggtcaatggtgacatataatttatatttgcaggaccaaatcctatgttcgggggattaaagtcaaccaaatctatatttggggagtcaagtcctctgtggattgaaggtgaaggactgctccacgctttgtatttcagtaaaaacattaatgggaactggactgttgtttacaataacagacatgtcgaaactgacacattcaagctcgaaaaacttcgaaacaaaccctcttttcttccggtcatccaaggggatcctcttgctgtttgcacttctttcttgctcaatttggttggtttgcaattgcttatccaaactcctaattatatatatataatttttaggtttgatatattgacagtgaacgtctcattaatgcaggtgagatttggaaaaccattaaaaaatacaagtaataccaacgttttcgagcatttggggaagttgtattccattacagaaaatgacttgcctcaggagattgacatctt

SEQ ID NO: 6006 - DNA, 535 bp, Gossypium hirsutum
  misc_feature (316)..(317): n is a, c, g, or t
  misc_feature (392)..(393): n is a, c, g, or t
  misc_feature (481)..(482): n is a, c, g, or t
  misc_feature (487)..(491): n is a, c, g, or t
  misc_feature (493)..(496): n is a, c, g, or t
  misc_feature (507)..(508): n is a, c, g, or t
  misc_feature (521)..(523): n is a, c, g, or t
  misc_feature (525)..(530): n is a, c, g, or t
ttgaaaaaagaatttaagcatacacacctgtgtatccatatctatcactcacttgtgagtctgagtgatatagatatggattagaagtattaaggaaacatttcttcaataaaggagaaaataggagaatatctgattctcactctttatttggtctttcaaaggacaaaagattcaatagtttgcaactatttggcatttttaaattggtattcatttttcttttgttctgtttctaagaaccgaggattaagtaaaaacgtgagagtctcttttcacaatagtgttatatctcttttttttgtgctttttccanngcgtgtgtaatcactttttattgtgtctgtgttgtgcgcatatactcctggtgtatatgagatttttcgggtgtnnttatctcctggggtgagaaaaaaatgtgagacccctcctttatatgtgcccttctcccccccttccccgtgataaacagtggagatanngagannnnnannnntgtggtgtgtnnctctgagactttnnntnnnnnntgcag

SEQ ID NO: 6007 - DNA, 656 bp, Gossypium hirsutum
aagatatcatgtaacagtctctagacaatttaagatagacattctttcttttatattcccctatagattattggggcattcatcattccttcaaaagtattatagtttcctgtggtgtttgcttaaatgataaggaaaagacctattagttctttacaattaagaagggaagaaaaggaatagagtacttgtgtttttgtatatcatcttaatccattagctgtctaggacgctaaggatggtgtagttatttttccttgttctccctgattatttttccctttaatctcatccaatccttagattttttatcgtttaaaattttcttataaaataagttatggaggtcagctgtgtctatttgttgtggctgctttcagatctgaagctgaataaaaaagagtaaatcaaaagaagaaaaataaaatttgagctagaagacaaaccttaggtgtcgtttcataaggctgaaatcacaaaaccacagagaaaataagctgggcaaatgtttggaatttgtggtagtatgcgagtgtaacacatgttcttgtgtgaaaattattttgttcttcttttcttccttcaggagtacgataactcgggagaagtttgaagagctttgtggggacctttgggataaatctcctatgcctgag

SEQ ID NO: 6008 - DNA, 606 bp, Gossypium hirsutum
ttgcaattttctacaagaaactctttaaattaacatctgattgatacttcaaaacatagtatccaattccataaaatttcttctttagggattcaattttttgtgtttttttagatatgctgcaccagagcaatatatcatgagtacacaaactccttctgcaccttctgctccagtggcaactgcactttcccctgttttgtggcaggtttgcccccagcagattctcccaagtctattttcaccttttgctttcattgacacatatttctgttgttgttatttactaacagatgaatctgccggatcgatttgacatctacagtgctggtctcattttccttcaaatggtgagtggcagataatgctcaagtagtcatctttattgttgttttgttttcctcttgaaaaccttttaactttttttgctaaattgatgcaaaagatgatgatgaaagctgttagaagtcaaacttatctaaattaacatcacttttgatattaaatttttaagtgacaaatcaaagagatagtttgcgaaaagcagcattggtgggtttgtgctggtaaacttcaaaaaattaacggatttctccaagtgaagtt

SEQ ID NO: 6009 - DNA, 628 bp, Gossypium hirsutum
caagtgaacagaatcaggtagtttgagactaaccacacggaaccaacgcctctttggtggcgctgggggtatagaaactttaacgaaaaagtcatgagcattgaatgccagatagatttctccaccacctttgtcatgaagcctgcaagaaaagaaatcaatcatgcacacacataaaggcacatcggagcccccaagaatatttacagtcatgggatggataaagcgcatgataaagcaaacaaaattgtagtttctgaacaacataatctgtcgatgaagccaaatgtggatatacaaggaacgtggtgagtaatgtcaacacattacttaaattacaaatgactagggaacatcaacaacctattaagagacatgtaaatttcttacgtaaatgcgaggaatttgctgtctggtttgtcccagttatcctcatgccaagtcacatcactctgcacacataaagcacccattgagcttcagaggatgtcaaagcacaacgtagtttcaccaagacaagtgtaaagaaaaatactctgtcgagaaaattctcatgggaaaatactcgatgcttttgccgatagtgtatcacctcagagaaaaacctgaagtggtcactcttccttgc

SEQ ID NO: 6010 - DNA, 605 bp, Gossypium hirsutum
tgaggtttctcagactctgcattgactgaggcttccaagtctatctcagatgccaatagttgcataattagtgttagaaaatttgcttctctagatagcttgttattcactagtatttcaaaaccagattttccagatgaggccacaaaagcaagcaaggtgattgcatttttgcgtagttccaaggcctgaaaagttattagcttcagcaatcatattccattacttaaaaaaaaaaaaaaaaaaacacccttcttggaaaacctggaaaaatttttatttattttttttttccccaaaaaggattaactccagaaaaaaaaaaaaaaaaaaattttttttttgaacccacctaggggaaaacaaagaaaaatttttcttcttttttttttttcccacccaggctttacttcataaaaaaaaaaaaaaaaaaaatttttttttttaacccaactttaaaagggtccccaaacaaaataaaaaatccccccaacccccccaaaaaaaaaggaaatttttttttaccaccggggttttttttcccttaaaaaaaaaaaaacaaaccccccctggggggggcaaagaaaaaggggcccccccttttt

SEQ ID NO: 6011 - DNA, 625 bp, Gossypium hirsutum
tcttgggaaatccagcccagcaactacaaccacaaaatcagctttctttgcactaagaattgcatcattaaacccagcatcagaatcacaaggcacatctgagcaaccagatgcataagatgccttctctacatagcctagcagtccctcataaaagctctttgggtcacatgggaaacctgtcatatgaagaataccaaacaaccatattatacaacttcaatatcaggcaatttctacaaaatgaagaaacccagtgacagattgaggttagcaaaacttcagtcagcatctgggtggttcacattcaatatgactcaatacagatattacaagacaaacatggtaaggcccaaagctgtcttaggtaacttgccatattaggatgcttcgtgtagaagactatgcaagccgatataatttataaacccccaacaattacatattattgcaagaaccatacctgtgtagtcaccacccatattacttatgttgttagccattggaccaatgatagctatggaagaaacaacatttctattcaaaggcaggaacttcttctcattcttcagaagaacaattccctgccttgctgcttcaagtgccagcatcttgtgctctgtgg

SEQ ID NO: 6012 - DNA, 620 bp, Gossypium hirsutum
aattgtttttaaaattgctgatatggtattcctcgttgcaatgaagtcatccaatacatatactcctggaattgttggtggtgatatgaatttgttttatcataaaggtgttactgatttaatggagtgttggtttaggattcaaagttgcttttgatacctttttttatctgccattctgcgagcttctatgtgatttatctccctggaagtgttttgtatccgacactgataatctttctttactgttcaggcccagttgtcatggacatgtcagggtttacagaaaagggatttaagaggaaacttgccgtgcagggcctttttgggaaggttttatatctatctgaggtgtgttgttgaatggatagctttatatcctctttactagtgccatcttctctctggattttgtgtgctttatatcatcagttatttgtgtctttgataatattttatttgttttgcaattgataatagccacttcagtccttttaaaaacattttgatgaatttttttgtagttttgcaggcttatagacaataggttttatatctatctgacacttttggactctttaaatgtataaaaaaagatagaagaaaaaccgaatatgcct

SEQ ID NO: 6013 - DNA, 644 bp, Gossypium hirsutum
tggaacaacttagctaggtccttgacatacagaatgctcttggcagtccatcaatgtggtcacactccatggaaaattcgagaagatgacttattatcttgcttcatttttctcaatagctttatggattcatatatggagtagttttttcctattaaatactagttattcttggcttaaaacacagagaaaccaatgactgtaacattttgaaaattgaaatcattgcttttgatatcagaatatggattctgacaattacaacttagtaaattaagatttggcattcctctaactgatttttgacgcagttgaattatgttttttcgagattgtgatataatggattagtctgtcaaagggtgactgtgacacagttgaaacaaattaagatttgacatgcctctaaatagtttgttctatctagcatcttgagttgaactgtacagcttctgtaacctaatttcagttgctcttgattgtatagaaagatcgctgacaaggttgcagatgctgggttctatgcggtggttcctgacttctttaatggagaaccctatgaccctaataatcctgatagacctaaagatgcttggatgaaggatcattcaccggttagtggccttctgaacagtacttgaaaa

SEQ ID NO: 6014 - DNA, 630 bp, Gossypium hirsutum
  misc_feature (601)..(618): n is a, c, g, or t
attgattatatacatttttatgtaggccggtgctttgatgattgttggattactagcaaataaagtggcattggctcctaaacttgtaaatagtttgattcgaacagttgctgaggttgctagggaagatgtaaaagagtcaactgatttgcaatggtttcggttggcccttatggctttgataaatcttgttcaggtaacaacatcctgctcttgccaaatatgtaatttgcaaaaaacaatttcatcctgaaatcctgttctttatgagttaataatttcaatcattctctgttggtgtggttttggcattttttgtttgaggttcacatgcatatcatttgtgaatttgatttccatatttttactatgtttacatgtttgacaagggagctttgtgtcagtttcaaccatttacatgtttcaagtttcaaccatttacatgtaaaaaatatattagcttgatctatattttcattcggtcggtgttttagccatactatctctgttaaattactaacttgagatgacgcttattacctactcttttcttttaatggatccttttatatgattaaagggccgttttgaatatgtgctnnnnnnnnnnnnnnnnnnggggcgttttga

SEQ ID NO: 6015 - DNA, 638 bp, Gossypium hirsutum
tttctggtgcaaatttggaatgaaatgaagatacatggtgcactgtagatgtgtatttatcttttactgggttagaaaaaaggaatgaatacaaatgggtaaactaacttgatagtccgattggttattttggtcattcaattttaaaaatttttaattttattatcaacgtttttaaatcttaaaattttagcttaataataaatttaaccctttagtatttacacattttataaaattgatattaaatttaaaattttaataatttagcctataatgtttataaaatttgtcatttaattttaattttaaatagttttaaaaaatttagctttaaatatttataaaatttgccattttaattttaaatttaaaagttttgaaaaggaaaaatatttaaaaaattgggcaaaaaatgataaaaataaaatttaaaaattttaaaaaacataagtaaaatacgaataaaatttgaaattttttaaattaagttacgataataaaatagaatttttcaattcaaaatttttttactcaatttgatttaacgctcacctctactgatataattttgagctttaaaataagatacggagataatgtgagctatagttgatgacatactgtgccctgtatcg

SEQ ID NO: 6016 - DNA, 641 bp, Gossypium hirsutum
gtttgttctctctaggtattttaaacctactctgaggtgtatcatagacaagcaaatgggggtttgcaccctccatctacccaagagttcccctatacgaactgtttgtgttaagggtaactttaaaagcctaaagcagaaggcatgctttgaagcatgcaagcaactccatcaaattggtgctttgacagataatcttgtgcctgatattgttgtggaagaaaatgatgttgaagaaattggtaataataatggatgactttactttctttatcttcaatgacttatgtatgtaatttcaagatatttaaagttgttaaaacaagtatatgattttcctctattttatttaattatttgatttgtaggaaaggaatcctataatgatgatcaaccgattttttttccacctgaactggtgaatcaagattcacaggagtccatgacaaaatactactgctacttaatggagttgaagcagaactttggttatgagtttcctgttcaaaacatcatactccttgtcaggagtcagcttgaaatggaagcaaaaagtgtgggtattgagttagaagttgataggggcactctgacagttaacttgaaatatattggactgatacgtcttagttctgaccagg

SEQ ID NO: 6017 - DNA, 632 bp, Gossypium hirsutum
gtgactgcaactggatttcagcaatatgtctacatccatcttcaatttccgcaaacaacttccttagcgaccatgggcgaaaatttctatatttcaaccaattcaattagcttatttgacttgtatttaagatataatgaaactacttgatttcaagttaaaataattacatatgaattgttattaattacataaaattataacatcttaacttgtttgcataaaacaaccatgtcaataaagtttcatctacatctataggataaatttttatcataaatcaactataactttacaatatcttaaatttgattcctttgaacaatgttgtccagcaagcataagaacctccttttccaaaagcttcacagtataggtatatttctttattaaatttgattgttgagtttatgttacttgttcttatcatatgtattataattttattttagtttatgctcaaaacataactatatatatacatatgactttatccatacacatatatcatttgcttcttcaataacagttactttgataacaaaatctctcggaaagagatttaaaaacctagctaattggatagaacagacaaattggcataaaattcattaaaagtttcattcaccagt

SEQ ID NO: 6018 - DNA, 627 bp, Gossypium hirsutum
ataatcaataccataatcatacacacaaaacactatgactgcaacttcgatgattaccatcatagggttttttttcaaagaaatatattaattaattaattacgaaaataacttaaaaagaaaaattaaatataaaaatgacctaagttttatagtattcattagtatcgcctgatatatcgatagcatcgttccttcatgacgatccaataatcaattttttttataaaaatacttttttgtgtcgccactatatcagacgataccgatatatattttttgaaatactcatgaaaaacacgagtattcaaaatgaaaaaaaaggaaaaagtattttttttaaaaactaattttttttgtattgtcggtgtgttaggtaattcttgtattcttggcttgccaatgtcaccatgagtgaattgaaaattttaagaaaagaagactaaacacacaaataaaagctggataaaaagtattttgaagaatttaagaaagaaaatatgaaaaaaaaagtttaaataactatttattaaaaaataataatatgaaatataaagttcaaatcttaatttaaaatattaaatttcattttatatttatgttctttttccatttttgactttccct

SEQ ID NO: 6019 - DNA, 593 bp, Gossypium hirsutum
ggtgtctcacaggttgaggatgatgtaaagctattactaatcaaactctagaagcagttcatggatgacactcaagcacttaataactccagagtaggaaattgttgcagccatgcatgtatataacttaaagtaggtttcaaaactgatcttcttcaggattttaggcatatgaagaaaggtagaaaggttcacatcatacaataatactgtgaggaaacctggttgcaaaagctgttggaaaatcggaagcagtaaagatgccttgcaataaactgccgttgtttgttggatagggatcataattacatcgattaaccttttcatgcttaatgatgattcgcttattttcgtagcaatgtaagattaatggtaattgctacaatggtgccataatgatttgcagaagtcttcatattaattgatatagaattctttcattcactgatcaattgttgtgaatcttaaacgcgttgcttatttgttttggtgttatactttaaattattccaaattaacaaatttattgacaataaaatactctttcgccatttccatatgatagataatgtgaagtgcataccgtaaataag

SEQ ID NO: 6020 - DNA, 622 bp, Gossypium hirsutum
ccttctaaaacttgaatttgctgataaaaaatcatagcttcacacaattcataaccacctaggaagcatgtacattgacatgtaaatacaggtactgcatgacatcggcatgcgacataataaattttaaaaaattaagacattttatatgatagcatacaataaaatgtaaaaacgatacttctcaaataaatattaacatgcaaatagcttttcaattttaaaaatttgctattgattttagaaacatgaacctttaaaaatacattagaacatttcatatttagggggggaaaaccgtcatggtgtgtccagctgtgctcaaacatgctaagttgtgtcttgactatgttttgactgtgtcaggaaattttttttatttttattttttgacatgaactcacatgcccagcgtgtagtctgcggtgtctaactcttggacactcccttgctagaagtgtccgcttcatagataacctcaagttgcaataacctcaagttgcaacagagttcaattcagttaaatttctattttcttatttctctatatctcacacaaataattacttcaccaaagcaatttgatgcaggatgcttaattagagatccagcttccaagcag

SEQ ID NO: 6021 - DNA, 225 bp, Gossypium hirsutum
gggttggcagcttctgcgactttctttcttgtgattctaacagtactatcgtccaaggtatccggaactcctgatgttcacacacaaagtccttatcaatgtcattctttgagcatgtctttaatcaaacagctagagggtcgtcttctcctgtataagggaaagttgttatgaaagccatcaagagggaaatcaacaattgcccaataagttccataatataca

SEQ ID NO: 6022 - DNA, 624 bp, Gossypium hirsutum
ctcccttcttcagccgatgactctaaccagtggtccgttcacgccaaaccctgctgctccatcccatggtgagcttttgacctctgctgctgctgatcagaagccgttacctgttgaaacaccgaactcaaattccaatggagttgccaatggtggcagtgtgaaggggaataatggtccaggcgcaataaaaccatcataccccagctcatttaataccaataattcttatggaaggggacctccacctggaagtgtcccaacctccggatatcaggatccaagatacagttttgatgggtttcgatctcctatcccatggcttgatggctctatgttttcagatgggcagcacaggcccgtctcaagccctgcaatgaactctttggtttcaaaagcaaatggttttccatcttcaaggaatcaaaacttcagatcgaattctaattacatggtatgcatgatttggcttttcaaagaatttcctttgtattgttatgttatgcgatcttcttagttctcttggtgttatattcttttgaatttttgcttctaatcatcatacttttgaatttaaagggactgcaccaccctgggacaatgtccggcatgggcacagctcat

SEQ ID NO: 6023 - DNA, 622 bp, Gossypium hirsutum
gtcctgtatcaatatgttcttgaatctccccgcatctctcagccggcggactgcttttcttgcctgcaaaataaattgtaatacaaaatctgtataagtaaattatgttactcacacccgagtactagtaccagcgtctaatgcacgaatttaattatgtgtatcaagtaaaaatattaaattatttaacttatatgtcaatagatctcttaaaaatgctaaaaaattaactaagtctttgtattaaattcgcattcaattaaacttttaccattaataaaaaaatcaaaatgtgacacgtagtagttttcggtttaatctaatattttttcataaaaataaattagaaaaatataaaaattatttaaaatgtcaaaaaaatattaaattaatataaacctataaaattaataaaaattaataaaaacttataaatattataaaagatatttaaaattttataagaacctataaaaattcttaataacttatttaaaacttaatttaaaagacaagaagtattttgaaactcaaagagctatttcaaagtcttcatacatgttttcggtatcttttatatgatattcgagttttcttacctggcgatacatgagtttaagtt

SEQ ID NO: 6024 - DNA, 602 bp, Gossypium hirsutum
tgcttaaagaatgaaagaaccgataattttaggcatgcatacctgagtggctaagcatgttgaaagatgaatagactggatgccattgcagttttgttctgatacctcacgctatcttgtttactttgatcactgctggtatctgttgcatgtatcatctacttatattccaatgaaaattttgattgctctgatctgtgttttactttcttggatctcccttgtcgtttttgagaaatttttcgatggcctagcaatattgcgactcctgactacttaatttgctcttggcatggcattgagttagacttccacagtattaagtgcttaagtagttttgaattttaacttgtggttgccctgttttagctgagggttctggcttgaacttatactttgtgttatgttggtgtgcatgaatttttgtttgtcattgaatgaaatagcagacattttctgtgaggggacggaattgaagacaaattagatttcagtggatgagtaaattttcgcccatcagatgtttcttcctggtgattgtgaggtggaacttgctctgctgcattgctggatgctttcggatctgacactaacctgatttc

SEQ ID NO: 6025 - DNA, 521 bp, Gossypium hirsutum
tattttgtgttttctcttcatttatgaatgccatatactaatatatccatacaaagataaatctcatatgtttatgtactcaccacaaaattgtgataaattgctgctttggagggccccggaattcatcatttcttctatgctcaagtatccacacaactgatcccacaatgaggaaaaatgcagctgtgactgcccacatcaatggagtaaatggtcgtgcgaaggaccaagcactcgaacttatctttttcactggagctaccacaaccagccctgattctatatatggcagagagaaatcaactattcttgttcggtttgtcacaatggcaatatcacccaccacgccatcaaagacctacagaaacacaatatcagaactgaagaaaaaaaataattaatcaatcattttatcttttaagaaaacagatgcagttttcattgtagtctacttactccggacttaattttattgacaagctcataatagcttggattcttatggccatctccaaatg

SEQ ID NO: 6026 - DNA, 575 bp, Gossypium hirsutum
  misc_feature (562)..(563): n is a, c, g, or t
gggccccttgtcaccaagtaggatcctttcacacattcgaactattaattgccaaatgggcgatggaagtcaggaagatgcacatgagttcttgaggtctatagaattcactagccaatatccctcagcacccttcattttccctcatttatgtgtctagatttgttagtttcagtttaaattttgacgcttttacttactgcaagaatggaaatttcatcaccttgcctctttgagagttcaattttgtctttttccaaactcttggtggcttctatgcaaccaaaaggctggaaaaaataaggggggaaacaaaaggttgaccccaggtggcagaaaacaacttttattcaccttatttttgaagggggcctttggtcaaaggggtttatccctattttactttgttttactttttaagtcatctcacaaaatatttttaaggtgctccgttttccctttccttgattcatatatatatatatgtttacttttttgttgcctatattgaatatccatgtaacccgggaaaagtgtttacgatgttctcacgagtcagaannattgaaaatttt

SEQ ID NO: 6027 - DNA, 495 bp, Gossypium hirsutum
tatcatctggtttacctaggaacaattgttctagggcaataatgagattgggaattccaacagttggtgtggcatacagcagagagctcacatggtattcattccagcattttttgtgatcttattggaaaattttactatttcctagtaatggctttttaatcatttcaagcatctaaacattttccctctatccattatcagttctcaggtacagtcaaggagaggatttgcatcagatgcaggtatagattattgctttaaatgtcataggttgtactggtatcttctactttgtattctctgaaggagcctattttttaaattgtgaaaagatgtgcactgactagtgattacaacaagaatgtgtgtttaacttatgaacctactaacttcatgccaaatgctaatttgtgactttattgatgagctgtaatattatattattcttaattccttctgtggcttgttcaatacccttctttatgggacagc

SEQ ID NO: 6028 - DNA, 460 bp, Gossypium hirsutum
ctagtttcaacatgcaggatggcaaatttctctggtaccaaaccaactgatgatgctctggttctcttcaagtttggtgatttaaagagtgcaacaaagaatttttccgaaaaattaggtgaaggaggctttggttctgtttataaaggaatgcttccgaattcggctgtcatagcagtaaagagtctcaaaggccaagaccatgaagacaagcagttccgcgctgaagtgagcaccatagggacaatccatcatgttaatctagttcaccttctcgggttttgttggaaggggacgaagaggtttctcgtatacgaatacatgccaaatggttctttagacagtcacctgttttataaggattcaaagatcctagactggaaaacaagacatcatattgcactgggagtagctcgaggattagcttatctccatgagaagtgcagagtacgcctcatac

SEQ ID NO: 6029 - DNA, 602 bp, Gossypium hirsutum
aaaggtcataagcgtctgtgaagaaacccattccagcaatcacaattgctgtgaaatggtaccattgtgtctttgctgcatccaatgcattaagaactccaagttggtttgccatttctgtctttttttacctgaccaaatcaagtaggaaattaacaaaacataggaattttgagttttctttgaataaacaatcgcatgtcaaataaaaatagaaaaagctccaagttaaacaaaagctggttcagccattaaaacaaactgttttggcttttcattctaagatgttaactggaacatcattttttcacatgctgcagtttttgcaattcatcttattacataaatttgtcgacaaccacttgattttaagtcttagaacataaatttgtcagtgaaaaaaatatacctggaccttctattaaatcctcttttgtttttataagtaaataaaaaattttgatgataataactttcttagttaactgaaaaagaaaactaaaataaaggggaaaataaacggttttttaactaaaatttagagtttaaaatttttaattaattaaatttatttaattaaaatctaattggactgtcacgta

SEQ ID NO: 6030 - DNA, 589 bp, Gossypium hirsutum
caggggagagatcgatgctgtttttctagaaaagggttgctctgttgctgaacaaaatggtgaaattttctacagatgttctattttccataaagaagggtaaaaactcaatcgaatcacaaatgtcagtcatgttgaggaatacctgtggccaacaacaagcggatgcataaaaaatgctgatcttggtgtatcaaaactgctcctggtgaacctttgatttataggcggatttgaaggttgatcagaactgcctattcggctgctaaatgtggagaatggagtggactgatgctcccaactatgataatggagatccatcgcaggaaaagcataagatgtaggcatctcactaggcactgatggaccattccagtgaccgttgaaactagaactatctgaaacacttccaccggaatttgaggatgagggatgaaccgttggtccaaagtaagctacatacggacatggatgaccagcagatgctgaatgttcagcaaagatggcttgctgtcccagtaactcatgatctgcattccagggtaacttataatcagcatatcaggccccactaaaacccacaacaaac

SEQ ID NO: 6031 - DNA, 549 bp, Gossypium hirsutum
  misc_feature (478)..(479): n is a, c, g, or t
  misc_feature (531)..(533): n is a, c, g, or t
  misc_feature (535)..(537): n is a, c, g, or t
  misc_feature (539)..(546): n is a, c, g, or t
tgtcagaatgagaccccatgtttgaactgaaatgatagttggagggtgttttgatgaatttgggctgacttccttgtgctcttgaacttgatgcagagatacatggattcagagattcgggctataatggcacaatacatgccattggataatcaaccaaacaacgttcatcatccagacatctgaagtgcctcttccgattgggttggttatatattagtaggttttatatttttgggtcacgtaacttatttggcttctcttcgacattgtaattctaaataaagaacaattttcataattatgtggcttttacatttatcttccggctggatttatttttgaaaaattgagttcagggtgggtcggaaaatagttgggtaaatttgcccgatattaagtttttaaaataaataaaatttggatccggatgcttcgttctgtcgtcatctctattgttagtttaagcttgtagaannggcaggcgtgggctttttgcagtgctgcatcaaaaaagtaggctcttagttnnnannntnnnnnnnnttt

SEQ ID NO: 6032 - DNA, 623 bp, Gossypium hirsutum
gctgtatggaagcagtatggaaggtggagttataccaccattcggcaagtggtaaccacttcacccaatcttgtggccgttctccagacatgcacgttaagtaactctcaagacatctgttcaacacctcggtttgtccatcagtttcaggatggtaagcagttgtaagatgaagtcttgcaccagccctttggaaaaggtcctgccagaagttgctgatgaatatcttgtccctatcagatacgattgagtctggcattccatgtaacttgtagacattatccaagaatacctgagctactgatagagcagtaaaagggtgagataaggcaataaaatgaccatatttagtcaaacgatctaccaccaccagtatgacaattttttccattgaacttggaatgccttctataaaatccatagagattgatgaccaagacctcactggcattagacgaggttgcagtaagcctggaggtgcaacattttctgacttgtatttttgacaggtggaacattcttttgtccaacgcttaatgtcatttgacagtcccttccaatacaatagacttcccattctccttttggtagcatggataccagagtgccctcccaaagcactt

SEQ ID NO: 6033 - DNA, 654 bp, Gossypium hirsutum
aatgaaaacatgggcagaagctgtatggagtaaccgtcgaatgtcactcactgatgtattggacatctcagagccttcaagtaaggtgccagttatagatgcacgaatcagccgagtgctgtagatcatcttgtgttttctcaaatgcagtaattaattatgctttggttatgcattgacaaataagtattcgaaatttctgagatgctggaacaggaatgttagattgcactatagtttcttcatctggttatttttgtcagaatatccttagcaataagttaatattcagcagattgtcggatgatgattgtgtgcaatagaagagaaacatctataaactgctatacctaagtttaatgcgatatgaccttttctttcttgtagggtatacaaacatgtcaaaagcttatgatttcaaaaattagattgtactttcaaaactgagaatttgaagcttgaacacggcaaacatgaagtacttcatatgatagtcaaaagtgttacagaattaagatatggaatacataatgtgttgtgatttttaatacaacaaaaatatgtttacttgttcacaataaagcgccatttagatagagctatcgtgcttgtttccttgggttgaatctttacagaggaatgtcgagacctttg

SEQ ID NO: 6034 - DNA, 654 bp, Gossypium hirsutum
agttatcaaagtgaagtgggggagttccagcttgtgggatgtttcttaacagcaagtgttattcattttccagccatgaaaaccactatggcaaatttgtggcaccctatttatggggtccaaattagagatctgggtgaaaaaaggtatttgttccaattttatcataatatggatatggaaagggttctaaaaggtctaccatggacttttaataaccatctactattattgaataagttggggagaggcgaagatccattaaaagtgccgctaatatttactcctttctgggttcaaatccatgatgtcccaattggattattctctaaaaagttagcaatccaactgggtaattttttaggtgttttcctggaatatgatacttcaaatctaggaaaggaaaatcgtaattatatgagggtaagagtacagattgatgttaggaagcctctgaaaaagaagaaacaggttttatgcattggggttaggtcatatgtcaagtttaagtatgaacggttattgcttttttgtttctactgtggaagattggggcataatgattcattctgtgagataaaaatgatgacaggggcagatacagaagaattaggctgggatttatcattgcgagcgcaatctcgaagagccctt

SEQ ID NO: 6035 - DNA, 658 bp, Gossypium hirsutum
cagcgaatattaacttgaaaacactaagagggttctccagcaattccattgcaactcaatcgaaatgcttgaaagatcattttctcaaagatcatctttagaagtctgaatttgcactgaaccagtagaagctgcaaaggaggtcttaggcttttgggaaattaaagcttttaagatagaactcctttttaagtaaggatggagattatcctcttataataataacaataccgatgttaatccaactgctttgatacttcttttaaatttaataaataataatgtgttgtaaagtaattgtatactttggcttctgtaggaacataaagggaaagtggacccttaattttataaatatgtttcaccattcgtggcaaattatgcaaaataattaaattccatgggattgtcactgtaacttacatattttatttattcaagtaattagattttatttttaaaatataatttatttatttattaacaaatatttgccattcaattatacaatgtgtattaaataattgttttcaaaaaaaaattgtaggggtgaacgttcgattgaattgagtgaaaaaattttaagttgatgagtctcattttattatcctaattcgatttggaattttttcgaatcgaatcgagtgaaatgagattc

SEQ ID NO: 6036 - DNA, 581 bp, Gossypium hirsutum
gtcaattttataaaaaaaatatttttaatatttttaattgttttaaattagtttttttttaaagatgatttgattaaaaagattgaaatgaaaaactaaaataattattttaaagttgaaaagtgaaataagtaattatgttaatataataatataaatgcatagtacacaataaaaatgtaagcagtagaaagttaaaagttaacaggtgataatgtgagaaactagtagagtctagtgtagtgggacagtaaggagtagggactagctctatagctggctctgcactaccttacctttgtttgctaccaaatgcttcctatcccatggagttgaaaataaagtaaataaatatgtcattgttatttggatcaatggttttctttttttttgagaaaattcaactagatttataaaataagaaaacaaaacaaaattttgcttgtcacttggcctaaaactcaaaacaaacaagccctaacgccacacaaataaatcaaataaaaggaaaacagacccaaaagcagtaaaaggaccacgggccactaaaataactaacaaaataaaataaaacaggaaac

SEQ ID NO: 6037 - DNA, 610 bp, Gossypium hirsutum
agatcaggcaatccgtttgtcttgtcagggctctttccctaatttttacctcttcctcacaaatgacctatgctgaacaagtggaactcttcaaagggaattccaaaaaattagagagaacaattgaggcattcgtaaaaaaatggtttaatctgacttcattttttttgctatcaattgtcctcttaaatagaagttacacagatttacttatttgaataatagacttataagctaagaaaaccaaaataaagactctaaataaagaaagactcctaatatctctctaaaatacttttaattgaaagaaagatcttctaaagatataaaatactcataaataaaatctcctaataaaataataataaactaatctaataataattaattgacatgtaacaacttactaaggctaaaacagatgttattgaagatgtgttagattttaaagaagctatgtctagaaggggtgatcagtataggagatttttggtgaaatggttgggaaagccagctagtgaaaatactgggatagcggaagaaaagctacagagagctaaagtggtgaaagttttcctttcgatgttgagttttccaagccagaatgata

SEQ ID NO: 6038 - DNA, 663 bp, Gossypium hirsutum
tttccatgcgaaaggttcaaaatacttaaaatttaaccggtgtgttttaatatgcttcacatcatatatattcaagttagtatttatcgtccaaattgatagaatgacctaattaatatgatactaataatctaaaacctgaaccatagtttagaagagaggtatagtggaattaaccctaactaaaaagagaccgaggaaaaatagtatagaattgagtttgataatatgagcgtgagaaaagaaagacgagagcgacatagcagcaaaaacttggtcatgtatgtagttggatctacccgacccaaaaaaaaagggatcctgatatttagccggtattcggcgctaagccgtacccgccgtcccagtaaggcctgtgggtgcaggtcacgcctcaactttgctactttttattctttcctttcactacaaagcaactgctgccaccttgtcttgcctttaggtgaacatctgatccttgcctcacagtaactctcgttcttttataccatgcatatatatatacatactctgcaactctactgttttacgcaattaatgcaatgttatacggtaaaaacaactcaagttaattgtgtacttgagatggtcccccccccaattccctctccaccctttcactgttgctccctttgatttctt

SEQ ID NO: 6039 - DNA, 618 bp, Gossypium hirsutum
gctgatggcgaccttgtagtaaacaacactgaacctgttttcttgtttctctttgtatcagctttggtcttttcttttttgaatattagcattggttatactcttatataatagtggcttaagattcatatatgatcaaattaatcaatttttaattgatttcccttagtgtgatagatcatgtacgttttacttagcgtttttaaaaattaccacatttaaaaaataaattaattttttctctaaataaaaaataaattagttttttattaaaattttattcatttttaaaactaaaaattagtttttttattaaagtttcatttatttttacaataaaattgacatgattaatggaataattagacaattgcatatggtatatgtgtactttattttgatctgatagtaaaattagatggaatttattacatcatagtatttttacctattatattatttttcatttcctattttagcaaaaataaaataaaaaataaaaatcgattctaggttatttgttaatttttgagttcaatgaataattaaagttgatatcccaaaatagttttaatttttttcgtacaaaaattattagtgatcagccttcctagcaca

SEQ ID NO: 6040 - DNA, 652 bp, Gossypium hirsutum
tctttgaccatcatctttgtcctctggatgatgctttgcaccaccccatttgatctcttttgctgtgtgtgaccggaaccagaatagaaaatcccttttagtaatataagcaacagccatcccacaaactgcatccccaagtgaggttgccgcagggtaaccagcatcagacaaactatcggtgcttaaaccagtcgaatctccatggaatgccaacaaccactcgacaatatcttttatctgggcctcagatggcgtcacacctaatgggtaatacttaccttggtaataaagggcagccccatcacatttcacaagatccataatgctgggactttgcgtgacaatgccagatggagagtcacgaagaagcatatcacacaaaagagtttgagtcctcaaaacacgtttctccgacatttgagctgccaattgcaattccatattcagttgaagtgcaaatgcttgcattaggaactcacaagcatatcgaagtggaaatggaatacaacgtgcagaagtatgatgacaaacaacaagaccccaaagcctcattgtatttcttcccccagtagcttcatcgtcatttccattgataataactgccatcgccaaagaagcaattgaccccatgttagccatatactgagca

SEQ ID NO: 6041 - DNA, 613 bp, Gossypium hirsutum
  misc_feature (593)..(594): n is a, c, g, or t
cacatgtaaaagctggtattatgatgctaagctttaagagaaaatgacttgaaaatgtgatgtggggatatgcccaccattgctccactgaactatcatgctagagtaggctctccaagcaggtgattatagcattctgttttattcatctggataagtttagctagtttgcacaaataatgaatgatttgaaatagttttctgcttgaattggtttgatttgaaatgaagttctgtaaatgattttagctttttatgtgcttcaaaataatgctttttcctggttatcatttttgcagccaaagattaagaaacaagcgaaggatgcattttgctcttgggtccgtgcatacacagcacatcgcggagacctgaaacagattttcatggtgaagaagcttcatttagggcatgttgcaaaaagttttgcattaagagagcagccatcattggttggaaagacattccaaaaccaatcgaaaaagaggaagagggatatgaagcagaagcagaaaggtctatttaagaagaggaaagttgccagtaaaacatgaatttagaatcaggtgctaaggtagtaagttttagtaacnnaaacaaatggtcgaattat

SEQ ID NO: 6042 - DNA, 637 bp, Gossypium hirsutum
  misc_feature (631)..(631): n is a, c, g, or t
gaatattacacaatttcatcataactacttgtgtagttgttgtattaatgataaatagatgcattacactctattagtagttcaagtcttgattgagctaaattttttattggtaaaaatttattaaattattaataaatttcagttttgatcactcatcttcgaaaaattataaaatggttattcaaaaatttccattttaaattattgaactgttaaaatcgttactgtatgatcttctctagatgcatagcctacactaattgagagctctccgtctctttttctactgctcaattttttttcataaaatagctttgaacatcatgaatctgcaaaccaaaatatgaacaactttcttcttcgacctttgatactgattgttagatggacttagatctaagggatattcttttactcatcgacaggtactgatctaccataccgatcgtcaaatcctctcgtggagctcgctaattgaattttttttttaaaaaaaacttaatagtttagtcactttagtgacttaaataaaaacttttaaataattctgtgaccattttgttatcttttgaagttgagtgaccaaaatataaacttactaatagtttaatgaccttgagtgtagctnactcta

SEQ ID NO: 6043 - DNA, 621 bp, Gossypium hirsutum
cgacacaggagccctcaccatgacttagaccactctcttaccgcattctcatctcatatatcatctcaactcgtcgaacaagtcttgaaacgttgtaagaatctcgggttttccgcccacagattctttctttgggctgcaaaaattccgggttttcaacacagtgatacaagctatcgtattttggttgatgtattaggaagtaaccaacagtttgctattttatgggatttcttggtagaaattagagatagtaaacaatttgagtcaaacccggaaattttctggcttgtttttaaagcttattgtagagcaaaattgcctggtgatgcgatcagggcttttgataggatggtggagtttggaatcaaacctagtgttgatgatgtcgataaacttttgcttttgttatgtaaaaagaaatttgtaaaacacgcccaagggttttttgatagagccaagcacgagtttgagcttagtgcaaaaagttacagcattttgttgaggggatggggagatattggtgaagctggtcaggcacgtaaggtgtttgatgaaatgctccaacgaggctgttcaatcgatgttcttgcttataatagcttgttggaagccttatgc

SEQ ID NO: 6044 - DNA, 601 bp, Gossypium hirsutum
acaggaagatggaaagatgccctgaaggtcagaacaatgataaaagagaagcgtctgccaaagagacctggaagtagctggattgaggtaggttctagaatgtatatgttccatgctacgcagtccgaattaggtaagattcaagacattttggaaaagctattgttggggatgaggaatgaaggatatatgcctgatccaagtttctcatctgatgatcttcagtatgacgttaatgatttgacaaattttgatgctagctgaaattgttaacaattatttattcaagtgaagaactctcaagcaaaaactgctagaaaatgaagtttttattctaccccttgtggtaatgtacaaaaggaaaataaataaataaaaaaagttgcaatatcttgcaaaccattaccagggtgaatttttcttgggtaactacatgttctgacagtcttcagtgccttgatttagaaaagtggcttctcattctttgaatcacactggattttgagccgtttagctcttctaacatataatctgtcacagcttggtaaatcacatttctgatgataaaaggggccttccatggatgatctcattccgtaac

SEQ ID NO: 6045 - DNA, 655 bp, Gossypium hirsutum
atgatttttatagttttattatatttaagattttttatttttttaaattattgttaagaaattttaaaaaattaaaatagctttcagctataattcaaagactaaattagtaattaatcatttaaaataacattccacgtcatcatttaagagataaaatttagtggaaagactaatttacatgcttcgaaatatattaagattaatttatacattttttaatagaaagatcgaaacacaaattactattaaatacatatgcttctttgatacttttacctaattttaccattccaacccaaacaataaaaaggcaaagcccaaacaataaacatgactagcgcaactcaaactcaggtcatacctaaggcgttgaacactcttgaccgtcagatcatcatatgaaattcgaaattatattattgagtatgttatagtgaaattgttgtattttaagatttgaaattgaaattacgatatacttcattattacacctaacactataaaaataaaagacacaatatactttattactacaatctcagctgtgaacagactaacactaaaagacgtttaagttatgaaaatccaaatacaaagctacaacattgacaatgcagatggaaagcatggaccaccacttgattccaacca

SEQ ID NO: 6046 - DNA, 595 bp, Gossypium hirsutum
tcaacatcgtggaggccattagagaagccaagcttacaacttcccaccacagttttctcaaatttaggcatgaaagtcggctttctacgtgatcggttcaaggctctgtttcaagaaatggccgatgcacctcggtgacactggccacttaatagcttttgtaatggaacatgttccattggtgatggcaaaccttttgcaaatatctcaagcacaacaacagatagtattttgtgaagaagatagtgtatcaagtgtatatcttcatgaattccatgtcataggcttttgaattgcctctatgttgtacaaggaagttaacagagtttgatctcaggtcattgagattcaacagtaatatcgggttaggatctctttcattattttcctttatctataactatataatacaaccttttttaatataaaagaggaatgaatataatttttggcttatgaatttttcggtacttgtatttttttgttggtcctctttggtactaaaatttgagaactagttctgttttggtccctaaacttagatttcgtcatgatttgatgatatgaccagagtttttggaacatgactggattg

SEQ ID NO: 6047 - DNA, 596 bp, Gossypium hirsutum
aaaatttgggttgccatatcatttctattacatggcattgttgttacccatgtgtatgtctcatgtctgtgtagtttaaaattttcaaaacttatattttagagggtaatttcaggaatttaaaataaatggcctgtgaatagatgtttaaatcctcacctatcatgggaagttgaataaataacaactatacagtagaaagtgtagaagataaatcagtttatctcagtaattatgcgatgggattctttacagagaagctgtggggtgtatgctcaaaaactagctttaagatggagaagaaaaagaattgtggttgatttctttttcaaatgccagcttcgccacatagttacatgatgtatacatgcatatgcacgcatgaactcacatatattaaagctaaatcccactgtgtccatggtctaatctaatcccttttaaattgtggtgttcctgtctccatatgtggttatattttttttctatgatctttttttaaaattggactaggctgcaggtatgactggtagttttcatcgttccagtttttattttaaatatttactgattcttgagatttgaaattgttgatc

SEQ ID NO: 6048 - DNA, 602 bp, Gossypium hirsutum
gcaaggaaacaaaggagaaagaagctcgaccagttagttattcctattcattcttccacctgatctttgccttggcaagcatgtactctgctatgcttctttccggatggaccagctcatctgacagctcagatcttgtagatgttggctggacatcagtctgggtacgaatctgcaccgaatgggtcactgctgcactctacgtttggacccttgtggcacctttgattatccctgaccgtgagttcttctagacttttatttcagcaacatatctagctattctagaagctattagcatctaaatagtatataaagctactcatttcttagaactatcaaatgttctgttgactttccttccttttgttggaaagcaatggttgtagatagtgaagctaggtttatttgtttgtttgttgtatcctgcatacaaaatcagcatgatgaatgtataaatacaaaattgttattgtagattagattcctctcttttagctattctttttaatcaaatttgctctcaattggtttggacagtggtaaaaaaaccggtctcatctactgaattggttgaatcaagaatcggtagcttatttagt

SEQ ID NO: 6049 - DNA, 599 bp, Gossypium hirsutum
gggaagttagaaaccaatggcattggacttccaacctcaccctcatcgtcagatgttcagagccgagtgttgcaggctgctgcaaagcatgaatctaaaccatccgattcagaagatccatctggcgacgcaatggcttcaaggaatgagaaagccgatctctctgaagcataggtgtagtacatttttcttgcaataaaatatctcaattgatcatcagattggtgaatgcaagttgacctggctcactcagatatagtaaacaaagagtttacataaagactgacctgtctaaacgctaaaaacaagtcctctacattaagttagatcagtggagttctataataatcatcaaacaaatcatatcaaccacaaccaataaagaagtttggtaattatttccagatttccaagttggttttggttagaaataggtgcagtcatatgtcatttttttgttatggattaattttcacattgtgaactatcaatgaacaacatgctattactatgtggttatttatcattttcctgcaaaactggaatattagggtatgcagtctttatgcataagagattgaagcattctgtttatctgc

SEQ ID NO: 6050 - DNA, 788 bp, Gossypium hirsutum
  misc_feature (488)..(489): n is a, c, g, or t
  misc_feature (514)..(515): n is a, c, g, or t
  misc_feature (535)..(536): n is a, c, g, or t
  misc_feature (539)..(539): n is a, c, g, or t
  misc_feature (564)..(566): n is a, c, g, or t
  misc_feature (596)..(614): n is a, c, g, or t
  misc_feature (616)..(640): n is a, c, g, or t
  misc_feature (642)..(785): n is a, c, g, or t
aaacacattttgtccaataggaaatgctgatggctaatgctgcaccttggtttcctagtccagacttaaacactaaaccccaacaaagaagcacatggaaacaaagactagaacaggaacttacaagcaatggcataatcaaactttgtgtctgaaagaaccgtgtaataggttgaagtgttgcatacgcatagagagcaggaattaggcatataatcaatttcccagcctcctctgaaataacaggatcttggcctatcagaatgaataatttacccatataaacccaaagggcagtcaaagggagacaagctacgataagggagagtatagctgtataagtatgagttcctagttttccatattgttgagctccataagcttgcccacacaaagtttcaagtgcacccgacattccaaactggttttttttttttttttgggttggaaaaaaaaatggtttttcacccaaaaaaatttaaaaaaannaaaggggggggggaaggggaaaagnnttttaaaaaacctttaaccnnggngcccccccaaaggaaacggttttgnnnttgttggaaaaaaaaatttggccaaggggnnnnnnnnnnnnnnnnnnnannnnnnnnnnnnnnnnnnnnnnnnntnnnnnnnnnnnnnnnnnnnnnnnnnnnnnnnnnnnnnnnnnnnnnnnnnnnnnnnnnnnnnnnnnnnnnnnnnnnnnnnnnnnnnnnnnnnnnnnnnnnnnnnnnnnnnnnnnnnnnnnnnnnnnnnnnnnnnnnnnnnnnnnnggg

SEQ ID NO: 6051 - DNA, 643 bp, Gossypium hirsutum
aaagttgtggaagcaaagcaatcaaatggtgctgttacttcatttggctttgcctctacaaatgttggtgaggtttcatcagttactggatcttcaggtattaagcttgccacaagttcagaccaaaaaccagagaacttaagcaggttggtatattcactattcaacctctcttgcttggaaggttgtttacttttgtcttctgttctcctttctttcttgtctatgcctccagtgcaggccttatttgtagaattacttctagtgggttaaatgttgtagactagtgattaattgattgaaaggaagtaaaaggtttaaaatgtataccctactctgtttagttcttataaaaggatggaaggggttggggattttggagctgaatctaacccttgtgcatagggtcactaatatctggttgaatggagtaggctagtagctagttaattggcagagtgtaaaaggatacctgatcaggagttcttataaaatgatgagagaggattttggagatagatctaacccttgccacctcccttataacatgtctattaaattctgtaaatcctgactaagatgtagttaacatgaactgattttattgagctcgttattaaaatttgtagatcctccatctccc

SEQ ID NO: 6052 - DNA, 594 bp, Gossypium hirsutum
  misc_feature (541)..(541): n is a, c, g, or t
  misc_feature (546)..(546): n is a, c, g, or t
  misc_feature (548)..(548): n is a, c, g, or t
  misc_feature (559)..(560): n is a, c, g, or t
  misc_feature (564)..(564): n is a, c, g, or t
  misc_feature (566)..(566): n is a, c, g, or t
  misc_feature (568)..(568): n is a, c, g, or t
  misc_feature (582)..(582): n is a, c, g, or t
gaatatccattattaccctcaaagccctgcatgaaattattgatttctattactgatgctaaatccactcacaactgttcaccaatttccttcttttttttttaaatattcacaacaaaacacagccatcatcatgatggcagcagcagtttccttattcaacatttttacttgattctcatcaactaacacttcagacaaaatctgcaataatcaggtaaggaaaatgcagcaaagtctccaactttctgaaataaaatattgaattccccctcttgttagactggctactgccaacatgaagttgagtgcttcaaaaaaattggaagaaggtccagcgtgattaaagggcattttatgagatggatcatttctccacagacttttggattacattattaaatatgtacatagaaacacacacaccacattcctaaacatacaaaacagaggggaaacacacacgcacacatccctagacatacaaaacatatttactacaggtgggagtttattgtagactactaattaagtaaaaaanagcananttccggggaanntaantncncccagggggcatcngggccacccccc

SEQ ID NO: 6053 - DNA, 606 bp, Gossypium hirsutum
aaaccaatgattaattaaataagattttgggaagtgggatgccgaaattaaagagtattgggtaggtcttcatcgattgatggagcttgaccctttgttagatgttagaaaatggaaaatctcatctgtctaatcaagaatatagtgatgggcggacgagatcatgatttcaagcaaatttctgaaacctcaaatcttctcttagctactaatttcaatttttatatatatatattatccatgttgtttaaatttatttttaattgttaatatgataattatatgaatataaggattagtcataattataattataattagacttgttcataggtagggttgagttaacccttaacagaattttaagtttaggtctgacttgaaaaatgagtctaaatttttgtccaagttcggcctagattatagatgttaaatttggactcagtccgtattaatttttttattttatttttatataaaaaaatttgaaaaatacaatatatcaaaaatactaatagtgaaattatagcaaaaacaacaacaagacagtgagaaaataatagcaaaacaacaatttttttttacaaattcaagtcgagccaggta

SEQ ID NO: 6054 - DNA, 447 bp, Gossypium hirsutum
  misc_feature (420)..(420): n is a, c, g, or t
  misc_feature (423)..(423): n is a, c, g, or t
gccgctgcgcacctcctcctcttactacagcatcgtcgagggttatgtgagtttttgcaatcaaaatttgtgatttttttttcttttagtctgttatattcttttggtgtttgctttgtggattaattctttcaataaaattaactctctttttacttcttttcctttttggagagaaagaacagaagggacgccccgaaccatttccccccccggtttaatttttactggcttcaaaataactccttaattttcatttttcttttgaaccaaacccgggaaaatttcctggatttttggaaggccttggtttaaaaaaatttagggaaatttatttatttgcacccaaattcttttttttatcattttttttttgtgtttcaaaaacccaaaatccccaaaaaaaaaccaaaaaccctnagnaataaaaaggggcacccaaaaaaa

SEQ ID NO: 6055 - DNA, 604 bp, Gossypium hirsutum
  misc_feature (511)..(516): n is a, c, g, or t
  misc_feature (519)..(524): n is a, c, g, or t
  misc_feature (598)..(598): n is a, c, g, or t
tatgtacattttagcagctgctctgtagcttacttacgtaagcaacattcagaagaaagacccgtggctcatatttttccactcaagcacacaaccttatgcacacagatatggttatctttatatttgtgtttctttgtatgtagtttgcatcatcttgcagttaatgttagatggcttttgtgagtattaatatccaaaaggtctaaccttcaaggagtaatgtttatttgtttgtttgtttaatgataattatgtacagattacagaatgattttttggtaatattttggctgttccttttatttatatgccattcttatgatttttgtttcttgaactcataaaatgcaggttggagaatatcaaggtgcatacaaggttagcatttcttgctacatataatacaggccatagaagcattgctacaagtatctgaagagcaaagattgatttttatttccctttttgtgtagataacctagggacttttggagaatatggacctgannnnnntcnnnnnnagcaaagattgatttttatttccctttttttgtagataaccaagggacttttggagaagtatggacctgaaagngttctt

SEQ ID NO: 6056 - DNA, 584 bp, Gossypium hirsutum
tgccctgcctcttgaataatatgggttaaaatattctaacacccaatattttagcctatattgctggttaatcacaggattaaggtctcagtattgcttgtagtgggtgtgtattgagccaggtttaattgtcacatttgaaagattaagacaaacttctttaatcactgttttgctatggagaataaagctatcatattgtagcatgaccaaaatgtgtgcattggcatatgacatataagattactcggtgtgtctttcccaggttcatgatgccaaaatttgaagcagcaaaacttgatgaaaatgtttttatattgtaggccaccatggataatcagctgacagcagattatccaggaaccccaggatgggatgataatgcagccacatttgaaatgacaattgtagctaataacttgcatggagattatcagcttgcaaatggatatggacataataaggcaaaacaggttcttgaggtaacataaacactttttctattctttttttctctttttttcatgggagggggtggagacacagctaaaacgtattacattctccatcactctgaatcatgt

SEQ ID NO: 6057 - DNA, 614 bp, Gossypium hirsutum
  misc_feature (557)..(558): n is a, c, g, or t
  misc_feature (607)..(608): n is a, c, g, or t
cattgatgagcaacgtcactgctgctgcagcttggttgacgaagcttcattttcccatttaactttgagcaaaagaacttcgactctgaccgcaaccttgggtgatcaaacttcaagcattgctaccttccatccagaaattcctagtgttcctgcaactgtgggtgaagaaacttgtagcattcccgcaccctcggctgaagaaactcgtattcttcctaacttggatgcagaaactcctatccatcctgtgaccttggcagaggaaacccctagtatttctagaaccttgggcgaagatactccatctgtccctgcagcctccaatgaagaagctccggtaggtactctgatcttcagtggaggaactcacacccttcctggaaaattggttcccacaaccttgtgtgaggaaacaaccatgcctgcaacgttaggtcaagaaactcctacccttcctgcagcattgggtgaagaagctcatagtattccctcaacctcgagtgacgaaaatcgtggcattccaactaacttggatgaagaaactcctactgatnntgtgaccttggcagaggaaagccccagtattcctgaaacctggagaagnnctccat

SEQ ID NO: 6058 - DNA, 594 bp, Gossypium hirsutum
tgcatgttacttgcatggtgaactttggtcttttacatattcagaagagaggatgcctcttgattcgtcttctggaattgactctacaaaacacagctgtatagcagctaggtggaaagcaaatgaaaacggtagcatttcttgccccccaaaagatttgggcggttgtggtagtgctcttttagagttgagatctatgtttaaagaaaatgctgtcgttgaattggtagaaaagtcagaggcaatagctaaagatctcagtcttgagaccgtgctgaagtatcctaaacagcagtgcctttgttacacctcaattgatgaaattgagtttgccaataataaaccaaggaaagcagcttctcgagaagattccactgataactatttatattgtccaaaagctaaagatgttcagaacaggaatttaaagcatttccaaaggcactggactaaaggggagcctgttattgttactaatgtgcttgagaatacacctggtttgagctgggaaccgtttgttttgtggcgtgtcttatgtcggattaaaagcaacaagtttgaacagcatgtgaaggctattgattgcttagattg

SEQ ID NO: 6059 - DNA, 599 bp, Gossypium hirsutum
tcggacaaagataattagatgcagaaaaaacaattcaccttgaagagaacatgaaagaaacaagtcttggggttggcataattttcaacaggaggctgcacaagaacaaaaacatttaaaatcaatatataagcaatcaaaccagtaccccaagtacaaaataaacagctggatctgaaattagtaacatttctatctaattttcatgttccgaacaagtatacaatggccatataagcaaatgggaactctattttgttcaatttcatcatctttcttcaaccaaaacattgaggaaaacataaagttgaaatctttaccggctaaagttggatcttgggatctaatttgaataacccagagttgactattgaaattgtgtttagaaatggttagttttcatctgttttatcaaaaaccaatcaaaagggtaccgttcaaaatcgaaatctctcacaaaaaactcagatctaccagtcaaacagtccaatacgtagaacaaatagttacaaatttgataaaccagcaaaaggaaactgaagggaaggagaaacagagagagggatcaactcacctgactaaaatccattacgggaaga

SEQ ID NO: 6060 - DNA, 662 bp, Gossypium hirsutum
tccctactaaaaaattgggtaaattaatccttgtatattagatcaaagagcaaactgacttttatgttaaaaatttcatccatttttacagttaaaaattggtctttatatatcaacatgaggggtacatggcacatcacatgtcattatttggttatacgtcagtttttaatagtacaaatggatgaaattttagaccgaaaggaacaatttgctatttgatttaacatacaataactaatttgtctattttttgagtaaattgtgtaaaatgtgatctggttccttgcataggcctacttgatatttttacccacaaaaagttcattagttggtaagtcatggtcacgaagttcaactttttaaggtagcggttgtaaaatgaaaatcaaggccctgattgatgtctttgaccttaatttttaaaaatttcatacagaactactcttcaatcatttcactccatccggagatcatcaacggaagaccggggacattagtgatcgaatcctttgtggtggatgtccctgaagggaacacacaagacgagacatgctactttgttgaagctttgatcaagtgcaatctcaaatcactcgcggacatctcggaggggctagccatccaagaccggactgaacccattgatctatgaaaagttg

SEQ ID NO: 6061 - DNA, 974 bp, Gossypium hirsutum
  misc_feature (113)..(113): n is a, c, g, or t
  misc_feature (271)..(271): n is a, c, g, or t
  misc_feature (390)..(390): n is a, c, g, or t
  misc_feature (871)..(871): n is a, c, g, or t
  misc_feature (923)..(923): n is a, c, g, or t
ttgaatgtttggtacaaaagttgtaaaagtaccatgaaggccctgtattaggagtcagattgtattttactccactactaaaaaaattgggtaaattaatccttgtaaattanatcaaagagcaaactgacttttatgttaaaaatttcatccatttttacagttaaaaattggtctttatatatcaacatgaggggtacatggcacatcacatgtcattatttggttatacgtcagtttttaatagtacaaatggatgaaattttagacngaaaggaacaatttgctatttgatttaacatacaataactaatttgtctattttttgagtaaattgtgtaaaatgtgatctggttccttgcataggcctacttgatatttttacccacnaaaagttcattagttggtaagtcatggtcacgaagttcaactttttaaggtagcggttgtaaaatgaaaatcaaggccctgattgatgtctttgaccttaatttttaaaaatttcatacagaactactcttcaatcatttcactccatccggagatcatcaacggaagaccggggacattagtgatcgaatcctttgtggtggatgtccctgaagggaacacacaagacgagacatgctactttgttgaagctttgatcaagtgcaatctcaaatcactcgcggacatctcggaggggctagccatccaagaccggactgaacccattgatctatgaaagttgggaacggaggagatataaaaataaggtggtggctgtaattgccatggatgaagcttcaaaggctttttcatatacggaagggctttaaggatggactggcaattgtgggtgttcccatcttctacactattaactcanagctgcatcattgtaccgtgtcattgggtctgtcatgttttatttgaacttnaatgtgtgggattcctgtctgtagtagatgaaccacatttgttataaactt

SEQ ID NO: 6062 - DNA, 635 bp, Gossypium hirsutum
gacgatctctcctattcacctatagaagcttcattatagtcagtaacagttgtttcccaccattcatcaggaatttccatatatgattgtggcatttcattcgcttccaggaccctttgaggatccatgcaataatggtcgtctgcggtacccgtaatttgtgcatctgaacctaaggagtcaacttcaaactcttgagaagatgaggatctcgcatcatctccatgtttctgagacgaaggattgaacctactgcacagaccatttgacttttggtctccattagaaacagcaagtccatcggattcttggggcaaaagcaacgggatgtcttcgaagggcgatggtgaggaaaaagattcttgtctgctgagttctctctgattgacatctcccttacattcaatgtcaatctcactatttcccatgtaatgagggaggaccatgtggtgttgaggcataagtaatggaattttttgctcatgtacggctttatttctctgaaaacaaacaacttacatgcgtcggaaacgtaaactttggccaagacaagaaacatgtgctcaaagagcccgaagtgaagaaagagtaaccttggcatgattccaacgttgaacaaagtgcctagcaacatc

SEQ ID NO: 6063 - DNA, 625 bp, Gossypium hirsutum
gccaccgactcggatttgtggaaggaagaaaaggaaagttcttaccttcggtacaagctgctagatatacaaaaaagttagtgttaatgtcgtattttcatagctttatataagatttagggttaatatcaaaattgatcccttcacttttacccaatgtgcaatataatacatatacaaagcaaatgtcaaagttaatacctgtattattccttcatgtcttttcttcattgatcaagtatgaagtatgtaagccccatcatctcctgaagaaatgaacaagacataatgggtatgtctaagttaaagacatttatcttcgatctagtatgaagttttgtttaagtactcgtatttattgcaattaactattttcgatattcacaattacgataatatttctctttttcttctctcacgagtttaggttattgcaaaaatttgatttaacccaagtttggcctaggataagttcccaataagatttttaagatttgtactccaacgattgcttccattttgaaagtcaaacgatccaacctcttatttcaaatcaatatcccgatccaactatttggttcagttttgaaaacaatggttcccagcagctagcctttgcaatcta

SEQ ID NO: 6064 - DNA, 594 bp, Gossypium hirsutum
ggatggctcgtgtggccacacaaggtttttcctagtagcatccacttccttggcacccaatgcactaccgtgaacgctgtacgagtttgccttgtttggagatccataaccaatagtggttgtcacctgcaaagaacaagaggaagacagttttcacgagcctaattccaactatgaactcaacaagcatctagataatatctgaccttgatcaaagtgggcttgtctttgacagcctttgcttccttaatagcagcacgaatctcatcgtaaccagtattcccattcttgacccaaataacatgccacccaagccccttaaaacgttcctcgacattctcagtaaaggcaatttcagtgtcaccatcgatcgaaatgtgattatcatcgtagaaagctataagctttccaagtccccagtgtccggcaagcgaacaagcttcgttcgcaacaccctccatttgacaaccatcacctaaaatagcatacctacaaaaacaaagatcaatttattatatatcataacacaaggaaccgaaaaaactcgagaagtaatcatacgtgtagtgatcaacaatctcattgtcaggcttg

SEQ ID NO: 6065 - DNA, 625 bp, Gossypium hirsutum
tgtgacatattggattgaagagggaaatgcaatgtcttgaattttttgggttctgggctttagtattgtttgtattctttcactttaaaactttcaggtaagctttttcgtttattgttctttcaattgaacaataataaatataccaatggcttgaaatcaatatatatggtttctcaacattttctagatttacctactctataattaattcccatattctgtctccctagttttagaacataggctttgtagctgaggcttctgtctacttttcgcttcagtcatctataattgttcttacaagttggcactaatacccatattttgcgtaactagctagagaacaaatgccttgtgcctgtggcttcaatctaatttttcatttcaaaaattccttctaatcactcttgcatcttagcatttgaccacttgcttgaatttgacctagctaattactctgatgctcacagaggcaacttttgaagttctccccagacttaatgaaatcaaatttgggagcggagtgattgatgagcttctgtttttggatttgcctcgtgaatgtagatttccttctggaataatgatgctggaatatggaaaagcagttcaggagagtgta

SEQ ID NO: 6066 - DNA, 608 bp, Gossypium hirsutum
tgtctaaggttacaaacctccaactgttgttgatcagtcaagggctcaatgtgtgacatcacaacctatgcaaacacaaaccactcttcaaaaaattcatgaacacaaaaggtttttatacgttgatgcattggaactacagtagttggtcttcaaaacaagttattgacctcaataggcagctcatatgtggggcatttccaggaacagactaaagggtctcaagatgatgaagtgaagcttatctaaagaaattgatgacattaaaactttgtaacgaaattgagttgcatctttcttaatgcctgtgtcccacacattgggtataatatggcttcctccgattatccaaatacaaggaaaaactttgaaaaattttactattcctacggtggacacaggtctctatatctgacactcacatctgagttgcaagtgacagttaaacaccattggtatggcctaaccttattcagcagccaggaccatacagatccctgttcatgcagttacaatctatgtttactcttaatttttctttaaatactcatatttgacactcatgtccaacacatatttgaatgagtacgaggatatggccctttaaa

SEQ ID NO: 6067 - DNA, 636 bp, Gossypium hirsutum
tccctagcaaattagctacataaacagaatatcatcaagatatgatacacacatatagaaactacttacattttgcaatatcgataacaaaaaacgcataaaatatataccttagtgaggagttcccaagcccaatcaattgcttccttcttgaaataatccccaaaagaccaatttcctaacatctcaaagaaggtatggtgataagtgtcttttcctacatcatcgagatcgttatgcttcccgccagctcgaatgcatttttgagtgttgcacgccctggtgagcttgctcatagcagtgttcggatccacagtccccaaaaagatcggtttgtactggttcatacctgtccagtcacaacaaaatacatatatagtcaaatcaaaatattttaaacataaatttagtggacttctatagtattataaaaaagaaagtaaattatgaacaagaagctcagtatcacggagttgggaattgggaaatgatacttctttgcacgcaaatcaacaaaaaaaatttaacaaaaaaaattaaaaaaaatttaaccagcggtcgattcgtctgtttaaagtcgtaactacaactaaattaaaaatagaaaaaaaaagcgtaccggcattagcgaacaag

SEQ ID NO: 6068 - DNA, 1199 bp, Gossypium hirsutum
  misc_feature (673)..(673): n is a, c, g, or t
  misc_feature (688)..(689): n is a, c, g, or t
  misc_feature (710)..(710): n is a, c, g, or t
  misc_feature (712)..(712): n is a, c, g, or t
  misc_feature (715)..(718): n is a, c, g, or t
  misc_feature (724)..(731): n is a, c, g, or t
  misc_feature (733)..(746): n is a, c, g, or t
  misc_feature (748)..(760): n is a, c, g, or t
  misc_feature (765)..(766): n is a, c, g, or t
  misc_feature (772)..(779): n is a, c, g, or t
  misc_feature (792)..(797): n is a, c, g, or t
  misc_feature (803)..(803): n is a, c, g, or t
  misc_feature (806)..(811): n is a, c, g, or t
  misc_feature (824)..(835): n is a, c, g, or t
  misc_feature (846)..(848): n is a, c, g, or t
  misc_feature (862)..(868): n is a, c, g, or t
  misc_feature (880)..(881): n is a, c, g, or t
  misc_feature (883)..(888): n is a, c, g, or t
  misc_feature (891)..(893): n is a, c, g, or t
  misc_feature (899)..(901): n is a, c, g, or t
  misc_feature (914)..(926): n is a, c, g, or t
  misc_feature (935)..(935): n is a, c, g, or t
  misc_feature (937)..(946): n is a, c, g, or t
  misc_feature (954)..(956): n is a, c, g, or t
  misc_feature (960)..(964): n is a, c, g, or t
  misc_feature (970)..(984): n is a, c, g, or t
  misc_feature (993)..(993): n is a, c, g, or t
  misc_feature (995)..(998): n is a, c, g, or t
  misc_feature (1000)..(1001): n is a, c, g, or t
  misc_feature (1015)..(1021): n is a, c, g, or t
  misc_feature (1023)..(1025): n is a, c, g, or t
  misc_feature (1027)..(1028): n is a, c, g, or t
  misc_feature (1032)..(1032): n is a, c, g, or t
  misc_feature (1035)..(1037): n is a, c, g, or t
  misc_feature (1046)..(1049): n is a, c, g, or t
  misc_feature (1052)..(1060): n is a, c, g, or t
  misc_feature (1064)..(1073): n is a, c, g, or t
  misc_feature (1075)..(1082): n is a, c, g, or t
  misc_feature (1086)..(1099): n is a, c, g, or t
  misc_feature (1104)..(1105): n is a, c, g, or t
  misc_feature (1111)..(1118): n is a, c, g, or t
  misc_feature (1120)..(1123): n is a, c, g, or t
  misc_feature (1125)..(1134): n is a, c, g, or t
  misc_feature (1137)..(1141): n is a, c, g, or t
  misc_feature (1143)..(1143): n is a, c, g, or t
  misc_feature (1145)..(1145): n is a, c, g, or t
  misc_feature (1150)..(1152): n is a, c, g, or t
  misc_feature (1154)..(1156): n is a, c, g, or t
  misc_feature (1159)..(1168): n is a, c, g, or t
  misc_feature (1170)..(1176): n is a, c, g, or t
  misc_feature (1180)..(1190): n is a, c, g, or t
  misc_feature (1194)..(1196): n is a, c, g, or t
tttggtttcaaatacaagatagaatgggccgaatgcatagatttacatctggtatgttactatttctactcataagctaggcacctccatgaatatatggtcttttcttttgcatgaggttcttatgcaagtgttgcttgtcttttcacccgtcaaaatatgcaacctaaacaaaacatttcttggcaagttaatttgttaatgacactaacttcatgaaaataattgatcgttcgtttttctttttttcaagttatggtttttgtctctgtacaaatattaacttgtaaatttagttctttatactttaatttggcataatttgattatcctactattattaatgttttgtctttttccaaaccactaacactcttaaaagattccattattcggttatgaagttttctttaaaaatccaaatcatgagattgagttagaattttttaaatgacaaattagtaaaaagtaaatattttgataaccataatttcacattttaaatggataaggaatttttggtttttttttttacttatgcatcagtcaactaatgaaatttttaatggggttagtgatttgaattaaagcataatattaataatagggggagggctgaattatgtaaaattaaggtttaaggaactaattttacaggttattttttgtacgnggacaaaaaaccatnncttgaaaaaaagaaaaaacgnanatnnnnacactnnnnnnnntnnnnnnnnnnnnnnannnnnnnnnnnnnaaaannaaaaannnnnnnnaaatttttttttnnnnnnacaaanaannnnnngaaaaaaaaaaannnnnnnnnnnnaaaaaaccccnnnaaaaaaaaaaaaannnnnnnattctaggggcnncnnnnnnaannnaaaaannnaaaaaaaaaaaannnnnnnnnnnnntcccccctntnnnnnnnnnntttaaaannncatnnnnnaaaaannnnnnnnnnnnnnngggggggcncnnnntnntttttttttccctnnnnnnnannntnncttntannnccgcctcannnnccnnnnnnnnnaaannnnnnnnnncnnnnnnnntaannnnnnnnnnnnnntaatnnatctannnnnnnnannnnannnnnnnnnntcnnnnntnanctatnnnannnaannnnnnnnnntnnnnnnntctnnnnnnnnnnntttnnnttt

SEQ ID NO: 6069 - DNA, 621 bp, Gossypium hirsutum
  misc_feature (455)..(455): n is a, c, g, or t
  misc_feature (458)..(459): n is a, c, g, or t
  misc_feature (544)..(545): n is a, c, g, or t
  misc_feature (547)..(548): n is a, c, g, or t
  misc_feature (569)..(570): n is a, c, g, or t
  misc_feature (583)..(583): n is a, c, g, or t
  misc_feature (586)..(587): n is a, c, g, or t
  misc_feature (593)..(595): n is a, c, g, or t
  misc_feature (612)..(613): n is a, c, g, or t
ttaactcgtgcttcagcatctctatcctcagggttatcctacacagaaaacagacttatatcatcagaaatccccacataaggctgtaaatgaactgagccaatccaagcatcagcttgttcaaactctgacaaaatttaaacaagcacaaacaaaatcattctccgtgctcagattatttatcttattgaacttttaacaaattcaagctcttgtaattaatcactacaaaagattttaatcccaaatattaagacttggactcggctcagcctagcaatcaatgcagccaacctaaaaactatatgccatttatgaaggagccaaatggcccttatggtaaaatcaaattggatcaagtttggatttgggaggatcaggcagttatttgggtttaggttagatttgataggcccagatgaaccttaactaaactactttaagatactttaaanaanntatccgttcacttacactcttgcatcctcatgtcttcatacaacaaacttattcaaagtgataacttatacctcctttgcactcnntnngccaagattcgcaatcacatnnttccactgactanccnngattannnaaggaataacacccaannacattgca

SEQ ID NO: 6070 - DNA, 644 bp, Gossypium hirsutum
atgctttttctgaaccatttttgtcagttgagtgacaaaaatgtctccttaatttctgtatgctttcaggcctctctcgataatgccattaatgatgttgtactcagggtataaaagcagtcattgccaagagctttgagcaaattcaccgtagtaatttggtgggcatgggcatcattccactatgcttcaaacctggagacgatgctgatacacttgggttgacgggccatgagcgctatactatcaatcttcccaacagcgttagtgaaattagacctggtcaagatgtcaccgtggctacagacaccagcaagtcattcagctgtactgtacggtttgatacagaggtaataaaacacaatttagtcatttctcgctttgttcagttattcttataagcgctttcagcagctcctggaatttcctgcccaactgaggctttgttttcttaaatgtaggtggaactggcttatttcaaccatggaggcattttacagtacgtcatcaggaacttgattggaccaaaacaatgacttgacaacagattatttgtctagaaagcaggatatgcatcttttacaacatttcttccttgccaggtttgcaaatttaattgattcgcttgtgaagtataattgtgg

SEQ ID NO: 6071 - DNA, 627 bp, Gossypium hirsutum
  misc_feature (53)..(54): n is a, c, g, or t
agtccgttcggcatgcatcattgcttctcttgcttgagctttcaagaggtcanntctttgggtgaaaaaattgggtcagcaactggagccattttgattctgatcagaatcaaatataaccatcaggtcgatcactttgcttcacaaaaagcagatgaaattttaaagaacctggagagatttcgagacaacataaagcagatggcagagtatgggttcttggaccctcttttgaatcatctaaccgtaggtaatttacctttctttatgattgaccttcttccatataataaatttagagcattagttagctgataccaacatttcaagggaactatttagaaactgcacattaaatggcagttagattaactgaagaatgttcaagtttgatcataaaagtcaaacgagttttgaagtctaagacaagtatgctgatgtgtaaataagcaggttccaaggaggtgcaaatggaaatggcaagctacttaggggaaatcatacttggtaatgacagcaaaacttatgtggccgagagggcttctcctagtctctttaaaatggtgcaaagtggtaacaccattatcagaaaggcagcatttaaggctttagcacaaatctcatctc

SEQ ID NO: 6072 - DNA, 553 bp, Gossypium hirsutum
tgatggttaccggagaagtcgattttgtttgtatatcatgtattttatttatatttattctgcagttattttgagttttatgagatttttttttgttgtaattggttaaattgtagaatttggcttgataagcgaacagaactcaaattgttattttgaatcaatccaatcatctacaactattatattttagcagttgatggtaggttatttgttttgttttgcttaatcttgtgtggtattatggaatctatatttttccagatttaagcatgtttgagacattgtttaaggaccaatttgtgtttaaagcatagattcttgcattcaatgtgcactttaattatttaaatatttgatttattagcaaaagtaaatttgatggtgatttgaaactgaattgaattgaattaatttccacaacatgccttctatagtttcttaaaatttgaggtaattattgtttgtgtattaccataaaaaaattgtttactataacatgtttgaaagttgaaatcctctaatcctattttggaggtgcggtgggaatgga

SEQ ID NO: 6073 - DNA, 611 bp, Gossypium hirsutum
ttaacgtttcctctaattcaattcattaatttgtaattttatggcgaattttaagaatcaaggggattatggatggtttagtttaatttgaccagaaattttttaaatttgtatagaatcttctgtcttaatactatgtatgacatctttttttgtttttgttattattattttctgaattagttaataataaagattgtactgataactttttaacagtcggagttaatgctattaccggaagttggtgcagccgtatcagtcttgcttggtgttgccccaactgtaacgctttcagcttctggttcatctaaggtcactcttttagttatcagttccggatagttcttttttaatattccatatatatatatgtgtgtgtatatattgtagaagacttggtttaaagatattcatgctttttgcagctgaatgaggttctcattcctaatccatttgatagacctcgagccgtttttatgtttgaagtcggaggaattgatggtaccttcactttttcccgtatatttttctcttttttcttattagttcttcccctactccctcctctgctttttgattaaacgaatgctcttttgtcttcagatcct

SEQ ID NO: 6074 - DNA, 623 bp, Gossypium hirsutum
attttgattttgacttaggctgaggaatgttttatatgttaggaacttgaggtactaatactatatatataattgatagcttggaaaattatcagaaacatttgggaagtaaaagtatcatgaaagccctttacgaggagttcattttgcacccctttactaaaaaacaagaagcaaattagtctttctacattagatcaaagagcaaattagtcttttctgttagaatttttatacatttctattgttaaaaactggtatggctagcagaatagtcagatcattgtgaagtatagggatcaggtttttaccaatagaaatggacaaaatttttaacagaacgaccaattttgatctaatatacagggactagtttgcccattttttgagtagaggggaaaaacgcaattcaactcttagtattacggtctccatggtacttttaccatatgttgttatattagcttttgaaatttttgcaatgtgtcaattaatcatgttttcagctttgttctttataatttgctatggttatttggatttgcctagtcctttttgtttataaatattgagtacttgtagatgattacttgttgattgttatgtttttatacaggcacttc

SEQ ID NO: 6075 - DNA, 603 bp, Gossypium hirsutum
gataatatcaaagatgctgtgctaaaatagagcttaaattaatctgaaaacaatgattacttcaaacaagctatacttagcaaacttccataacgttgtatgttgcccatgctttgccttctttccactgattgatcggtgcctgacacagtaggttgcttaccctggtgacttagccattcagagaaatgttcttgctccctctattccctttgcagaaaaggaatctattgttttttctagtgtgtcaacaattattgcgtttagtgatcccatgaattatggcttctgacaggttgaattactcgtaggatgtttgtgtcttgcactgttagatagattaacctcttcaaagtatcttaaagtctgaaatcatatgtgagataatcacagcctagacttcttattttggttatggacatattattcattctttcaatcttttattttattttatgggcctgtgtttcaggatgcttctcatattcatgtaaggatagagaagctgatgcaaggatgctgtactgttattatccttcttcccttcccccccccccccccttttttattttggaccctacccccgggtctttttaaaaaaaa

SEQ ID NO: 6076 - DNA, 626 bp, Gossypium hirsutum
catttttacttatttcctaattaccattcaactcctagtctgaatcctgatttctcagcagccaaataagttggaatgcaacatgagggtcatagggaaggtaatggagtggaaggagccgggatccttttatccatctctatctcgggtttgtagtgaagtttaaaagggataatataatttttggtccctgaatttagcaactagatctgttttagtacctttacttttgttttaatccattttgatccttgaacttggatcatgtcaagatttgatgatgtgatcaatgttactagaacaagaccgaatcggccgtccgagatttaatcaatgtaacggttcgaacaaagaggtcgaaccgtttgactcgaaaattgcttgaaattagtaaaaatcaaaaactgattaaatcaaggatcaatagtttaatctgttcaatcactagttcggttattaaaacacggaatgcgatatctaagattgtaccacataatcacttgaatatttatataaatttttaaattttcaagtgatgatatggtacaatctcaaagtgtcacatcatcaaacttttatatttttcaagttcaaatatcaaaatgaatctaattagcaagttcaag

SEQ ID NO: 6077 - DNA, 657 bp, Gossypium hirsutum
  misc_feature (585)..(585): n is a, c, g, or t
aaaatttttgttttttatactatgactatctcagtatttgtaaactttcctgtgcaccttcacttcaggagggaggatttgacttagatttgtcatacatcactgagaatataattgctatggggttccctgctggtgacatgagctctgggttttttggatatgttgaggtagctaaactaatcaatagttgaatttggctatcctcttatatttagcctaagaattctataattgtgatacaggggttctatcgaaatcacatggaagaagtgattcagttttttgaaacgcatcacaaggtaatgacatgtctattgattatttgatttataaatctgccacacgccgcatcttttttcttttcgggttttctcctatataggggggggggggggggacttgtatttttttacataaaaagttgaagaaaaaaaatcatgggctaatttgttttatgttggtctatttgtgatatacatcttagcaaagaaaaaagctagcatgctcccaaagcagcttattgaaatactggtttactgaatttgattgatattgggggagggagactattcctgcccctanttttaatatgttctctattctttgaacatgataactggcttagcctttagtcttctctgcgctatacctgct

SEQ ID NO: 6078 - DNA, 585 bp, Gossypium hirsutum
tggaatgcatccgacttctatatttccaataaggtggaaaacaacttcggtattatattaaactttgtttaccatagatgccacatataattcaacattctttcagttgtctatgatacatccattaaacttcgaaaaatttaaattatattgagcatgaacaacttgatgttgcttctattttaaataacacaaaaatatttaatttcacagaattttagatttttttttgcaaaaagttgcaaaaaaaaatatatatatatattgagttgtaattttttaccatattaacgacatgtgttcttcaaccttcaagtgataagttttctcttaaaaaataaaataaatccaaattttaatagagttgacatttattgaataaaaaatacattgaattttttttttcagtttcaattgtatttcgaacaaaaattttcatttacaaaactataacaactttaaaaatattaattttattaaacaataagtgctaaacctgtttcgatttgataatatttgattcattttaatagtatatgaactaaattgatctatttaataatatagagactaattgatagaaat

SEQ ID NO: 6079 - DNA, 615 bp, Gossypium hirsutum
atagacatctcactattgcatgtttcttttttacgtttatacttaagatgataatgatcttagttataaatattaaatttccatttttttatgtcaaaccctttttttcatgcttatcgcgaagctgacccaacaataggttaatatgcatacatttacatgacccaaagagcccaatatattaacagaggacggattcctgtaaattagaagccgtacaacagacaaggcctgtccagttgttactaaacttaccatgtttgtaccagatcattagtagaagaacaatgagagtagaagccttggatcttatatgaaaaaaagaaagtataatctgaggtatgatgctaggttttcattcactcttattgtactcattttcattgtactcgagcctttttcatccttacatctttattccattgttatttagattcttaattaacttaagcatcggagaatatcaaatctgtgagagaaatttaattaaatgtaacaataataggtttctctcttcttctttttttctctttaatattaattcatgattaatgctgagaatgaaaagagagtgagcaaaagtgaagtggtattgagtatgttagcaggcgagca

SEQ ID NO: 6080 - DNA, 621 bp, Gossypium hirsutum
ctttccccaatatttagctgtcttgtttcttttacttaagctggtacattatgaaatattctcctgaggtttcattagaagaatatggaaaaaattcattaatttgagaatattaaggccttgttcttgggtaataattgctatgataaaagtcaaatgttttttatctgtagaagacttgtttaactgaggtttaaaatgttaataaattgcttgagtaataattgcaatggtatagtaaatgttctttataggtggaagagttgtttagctgaggtttaaactgttaatagattgcttcacagttcacattcacacctttttaaatgcatacttcttctaacaagttgagtttgtgagaaggccacagggggtggggcatacaagtttgcagacctctttaaagaaaggcttggggtcagtatcgacaaagaagatgaaatggattgtcttgtggcaggagcaaatttcttactaaaggtcaattcttcgtcataatctcatttgcatcttttataaactagtacataatgccacttttttaagcagaaaaatggatgatggtagtatattcttgatctggtcaagtttactttcaggagactattatatataaacagt

SEQ ID NO: 6081 - DNA, 898 bp, Gossypium hirsutum
  misc_feature (631)..(631): n is a, c, g, or t
  misc_feature (633)..(654): n is a, c, g, or t
  misc_feature (657)..(690): n is a, c, g, or t
  misc_feature (693)..(710): n is a, c, g, or t
  misc_feature (714)..(722): n is a, c, g, or t
  misc_feature (728)..(732): n is a, c, g, or t
  misc_feature (737)..(740): n is a, c, g, or t
  misc_feature (743)..(745): n is a, c, g, or t
  misc_feature (749)..(751): n is a, c, g, or t
  misc_feature (755)..(758): n is a, c, g, or t
  misc_feature (760)..(762): n is a, c, g, or t
  misc_feature (764)..(780): n is a, c, g, or t
  misc_feature (784)..(807): n is a, c, g, or t
  misc_feature (810)..(811): n is a, c, g, or t
  misc_feature (815)..(818): n is a, c, g, or t
  misc_feature (821)..(826): n is a, c, g, or t
  misc_feature (830)..(832): n is a, c, g, or t
  misc_feature (834)..(838): n is a, c, g, or t
  misc_feature (842)..(843): n is a, c, g, or t
  misc_feature (847)..(849): n is a, c, g, or t
  misc_feature (851)..(853): n is a, c, g, or t
  misc_feature (856)..(859): n is a, c, g, or t
  misc_feature (861)..(865): n is a, c, g, or t
  misc_feature (870)..(872): n is a, c, g, or t
  misc_feature (874)..(882): n is a, c, g, or t
  misc_feature (884)..(884): n is a, c, g, or t
  misc_feature (890)..(891): n is a, c, g, or t
catattcttccagccatttttacaagtcttgagaggtaggcatatcagcgaagcttggtccagcatcttaggcgattgacattgactagcatatcttccttcaaataacatttatttctctgcaaggctttacagttccacctgcaagttcttcgggccttacgagaagaagcatcactagctcctttgctctcgtgtcactaaatataacatgcttgtttggtgcaacctctgtgattttgtcaactgccctaccgtgcacttaagaaatggatcaatgtcactccagttgttccattaatattgaatatatttgagaggaacttctcctgaatctaggactcatttgatgcactgcatgcatcctctgtaattggtctttatggctttttgtgcggctgatgattactgacaatgggaaggatcaaattttgaatgaaatgcaaaccgaaaaattaaaaccttatcaaaagcattttataattaattaaaaaaaaagagagacaatgttggggcctgaaactggaatcaccgtccagatattgataaatggaaggtacacgcgcatgtatctacttctctattatttccaaggcgaaaatacatgcattccctgtacctaaagtacttnannnnnnnnnnnnnnnnnnnnnncannnnnnnnnnnnnnnnnnnnnnnnnnnnnnnnnngcnnnnnnnnnnnnnnnnnncccnnnnnnnnncccccnnnnnccccnnnnccnnncccnnncccnnnncnnncnnnnnnnnnnnnnnnnncccnnnnnnnnnnnnnnnnnnnnnnnnccnncccnnnnccnnnnnncccnnncnnnnncccnncccnnncnnnccnnnngnnnnnccccnnncnnnnnnnnncncccttnnccccccc

SEQ ID NO: 6082 - DNA, 519 bp, Gossypium hirsutum
agaaggaagatctgccaggcaacatgggacataaggataatgatgctgagcaactgaataagagcaaatgcgagtccggctaatcggtaaggaatgtctgtatctaatgtgctttgatccgttgaagactgtaataaccaaaaagagagtatgatgagctgaccattaggcaatattatgaactttttgttgcaaacaagaaactaaccctgttgaggattcgacttgagggtgttgagtcaaagaacgaaatgggtgcacgaaaaactgatgttatcattccgaggaagagacgttgagctgtttcgatcgcaatagttgccaacaaaactgcccttcccagtatgaagatagagcttccaccagacaacataacaaatatgcctattaactgttctcttgataccttgtgattttcctcggttgcccacgcgatccagtaattgcttcctatttgtagtccctgaaagagaacttgacataagagaacgaccggaacgagagctcccttataagcta

SEQ ID NO: 6083 - DNA, 652 bp, Gossypium hirsutum
agaatgaaccaccatgactacaaaatcactataattcacgtttcatttgcctaaatactaaggaaataactaatccctcaccaaacccacaacagatatataaaacaagtcataaagaaaggaattatgaagcaataagaataacaaagagacatgtagataaattgcaaacacacaccaacctggcttgtggaagtaggaggaaccaaactttttgaattacttgtgttaagaggcaagaggccagggttaaacctctgtgagggaatactcagctgctcataaagggccatcttattccttggaggagccctcggccctcctttttctgtatcattaacatgaagcctagggaacataggctccatattcttctcatcatctttccctcttttcatttatcttgttttcgatatcaaaatttcaacccaaataaaaataacacaattaccaaagcccacttttgcataaaattcacaagatacctaatgaactacatcaccaaaattagaacccaccactaaaagctcaaaatttaacaaacccataaagcaataacttaaatcggtcggtacccagacttcaaaatgcacctttgactcggattgaacagtctttacaataacgcagagaataaccagatcggacaaat

SEQ ID NO: 6084 - DNA, 619 bp, Gossypium hirsutum
aatattaattacctgaacattcattctatatagtaaaagaaattaagattaaaaagtaagggggagggggataaagatcagagagtcagagtgataattagtaattacagtgaaaaagatgcctagagagagtctctttaggcatgaactcagcaactaacaatctctcatttccttcacagcaacaaccaatcaaattcgccaatcactcgcgaccaactgctctggcttcctcctaaaataaccccatagaaagattaaagggaaaataaaatcaataattacaaatcaactgaaaatgaaattgcattaaaaataagtaaatgtatatgcaaggaactgtcgaggatcaggccaagctgatctattgaagcgtttaacggcgatgaaacgatcctcgtcgagcttccctctgtaaactacattgggagctttctctccatgctccgatacaatgttgtccgtacagaagcctgatgtggcagctcttaattggtccaagctgtactcgcggaatccagcaggtaacgcttccttctcattctctaacgcttacaaaccgaaataaaatttgaaataaatatagaaatttgagtacaattttctcgagaaagtgacg

SEQ ID NO: 6085 - DNA, 615 bp, Gossypium hirsutum
  misc_feature (597)..(597): n is a, c, g, or t
  misc_feature (602)..(602): n is a, c, g, or t
gctgcatgcacatgcagatgaggaagaggacattaacaaaatccttaggttagtatctcgttggacatttttagaatgtatttgctttattgagagcttcaagaaacaaatcctttcacattaatgagtaaaatatgttaaactgggactatagtatgataaacggatggaagttcttcccatttttctcttctgaatggatgtaaacaattcaacatggtgaaagcttgggtttattatgttttcacgtcatgaataactaatgctataaatattgaaccttttttttgcttccttttgtaggtacttctcatatgaacatttctatgttatatactgcaagttttgggagttggacacggaccatgatttcttcatcgacagagaaaatctcattagatatggcaatcatgcccttacctacaggattgttgatagaatattttcacaggttagtttgccttgatcctcaatcccctcttaatttctgaatcaattagtttttattttcatttacaataaacaatttcatatacttgaagtgtactttaggctgtgaatccatgaatttcatctctaggctccacgaaaattacntaggnaggtgaaggaaga

SEQ ID NO: 6086 - DNA, 637 bp, Gossypium hirsutum
agcttaaatgtttccgagataccagtggacaagcaaaagcttgctgctccataaaatctgctgttgacaagtttcaacttctccctgagtttttaaaggtgatttttttgttaatttggtatttatttttatgtgaagatgttttcattcttgaactgaattatgggttttgggcatttttgtttcttattataggttagagggttagtgaagcagcacttggattcatttaattatttcgttaataccggaataaagaagattgttcgtgccaatgaccgggttgtatccgatgttgaccctagtatttacctcaggtttgaaagcatttttgtttatgttttggtgatgattgctataaaatatatttttccatcttgccgatataggctccatttaaatgtttttatttttaaaaaagaatttttttagaagaagcagaatgtaatctttttgaacaattaaaaataaataaaaaaacgttcttttggaatgattacatactacttatttaattttttgtatttgttaatttcagatgtgttttggcttaactatttgctcgtttctaataaaatttgaggaattttctttttagtaacatttgagggagcataaagcaggtggtgggttagtg

SEQ ID NO: 6087 - DNA, 569 bp, Gossypium hirsutum
ctgagcgctatagctcttagaactccgagcatcgcaacatataatatctcatttttcagtggtgttgaaaatgttactttcaaaaccataatttcgatgtataatttcgatgtgtgagtccgtaaatattatttatttaatatttaagaggtcattatagtgtcatattaaaatttggtccgataattttgacgtttagttagttaattaaataaaaaagactaaatcataaaaactgcaaaagccaattactattagtttaaagagactacttgagtgcaaaagcatatttaaatagtctaatatggtaatttagtcataattattaatagtggatggtttgcctatgcatgattatattatttagttgttaactaaggctagttttgtaatttgataattggtttaagaaaaccaaatgtaaaaatgccatcacctttctcccttgatcaaaatggaaagaaaggaagcttttacaatctaattttgaatgctaagtttcggctaagttataattcatgcatgattaagaaccagtagataattgtataaaagggaaagtgctaata

SEQ ID NO: 6088 - DNA, 456 bp, Gossypium hirsutum
  misc_feature (430)..(432): n is a, c, g, or t
  misc_feature (435)..(439): n is a, c, g, or t
tatgttgtggtgcctgaaatgccattgaggtactgtgcacaaaatttgctccgagctgagcctactcctttgtacaaatttgagtggcatcctcaatctaaagccttcctgcatgtcatgtgtaaagctagtggaaaagtagtaagttcccattttttttcttttaatctttctttgttttgaacggatttcaacacgaatcctttatgaacggttcaaatcttgaaggtgacgagtgtggaagtgccgttattcgtgacctttcatttcatcaatgcatacgaagaggaagatgaagatgggagagtgacttctattatcgctgattgttgtgaacaccacgtcgacacctccattttagatcagcttaggcttaaaaacctccggttcttcaagggggaggatgttctaccagatgcaaggtaaagannnttnnnnnactctctaaaattcttc

SEQ ID NO: 6089 - DNA, 605 bp, Gossypium hirsutum
atgaattgaattgaaagtgagtgatgaggtgaaatttttggcttgatggaatcaagatttgtagcggtggaacagaagtaaacgtacaagttatggttcatgagcttcttggctagctctaagaaggatgaaatatggctatgagctaaccatgggaacattaacacacgaattctcttttgctttgtatccatctcgctctttctacctctcttttgccttctatgtttgatggatttataaatagatgaaagtgcagaataccaattattacgcacataaaaatttcaaacaaatgtatatgatatgaaagagacaaaaatggacccaccccacgagcagggtcagggaaacttcctttatagcatggatccaccttaatcatgttcatacaaacgtgaagcatggggcgttgaaaatctgaatttccagctggagtaacgtcaatgaactatttaaaattgtatttcatgaataatttatttaattttctttaaaagaatattttcaacacttcaggtaaatttcatttatatgtcaattaaatgcaaaagagcatgaaaggatgcaatattaaataggggaaaaacaagcacgattgttgt

SEQ ID NO: 6090 - DNA, 605 bp, Gossypium hirsutum
  misc_feature (583)..(583): n is a, c, g, or t
gatgattcattaaagtctaatgattagttgtattgaaggaaaatagtctattgagaacccaacaaagtacatacaacaaaatatcaaattttataaaaattctctacaatagttttttttataaaataatatatcatctgtatttgcgcttcttctttttttccttttttttctctaaccttggattccttgtttcgaatattaatgtccatctctgtgtctctctcatgtgtagtgtgcgttgaggaggaggagcactatgagaatgtccatggggagatatctctttggctaaagttaaagccttcttgactcttgtatgagtctgatgagtaaatgtttttacaattcaaacttctctaagcttttataaaaattaatttcatggcagtaatttttttttttaaattgactttatagcatttttagttcatattaagcagtacgcatgctcaatcactttgctcccctcatccttcgacacttcttgattactgtctatgccctttcttgcattcgctcggtccaccttgagttgaatcaaacgtaaatgttcaaggtaggtatttcttgcttcttagtntcacttctctacatgcaatgac

SEQ ID NO: 6091 - DNA, 606 bp, Gossypium hirsutum
atttgagctcctcttgaggcatttcaggttcaccaagtttctgtttctcctcaactaacttcctctgtgcatactgccgagaaggtgaaggcttttgaggttcaaatgcttttgatattccaccaacaaatgaccacacagcatctctattttctatggtccacaaaagttttaggccgtaaacaaaaattcgctgacaattatcggctataaccacattgtaaccatcgtcatcactaggatctgaccgagcatgctcatcactctcactcccattctcaaattcagatctgacatatgtcatttcaagattttttcttccagcctcctgccatgccaataaccttgcaggatcagcctttggggcctgcctcctgatagtaaaataatcagatgacaacaaaaatccttcatcacgatgcttctctgtgcaagcattcacatatttacttttttcactaggaactcgttccatggatgcagactgagaagttttcctcattattttaactactttcgtgacactagtgcagtcttctttgtttaaataaaccttaggcacatgaaggtcaagcccctggtacacaagatcaagaggatcatgct

SEQ ID NO: 6092 - DNA, 616 bp, Gossypium hirsutum
gcacggttaattttaaataattttattatttaggtttatttactcggaacttttgtgcacaatggataaaatgggcaaattatgtattcttttcattaatttttgcttatgctacttgcatgaactaatttccttaataatatcagtagtaaaggtatacagtgagaggaaaaaagaaaaagaaactcgctctgaatatctaagaacaaccaaaataaattaaaaggatggtagcatgtttcgaatgattgcaccccatgctattaccttaatagggatgttctaaaagacaaaagaccttgaagatctgaaaccattgagttcccagcaccagcagtagggggtccaaaaacgtcccaaaatcgaagggtctcatctgccccagcagatatcacagttattccatcagggctctacaacaaacaaacatggaaaacatataactttctcgtggtgttgtgcatgagattttttttttactaccttctcctcttataaaagtcagaataggtaaaacctggaatatgctgaaaattcgggacttgtgatcccctacctcgcccactgtgggctttgaccggaacctccatatgctcagattgtcccgatcccccat

SEQ ID NO: 6093 - DNA, 616 bp, Gossypium hirsutum
ccagaatcagattacacccttatggttatattcaaaggagagacttctcagacaccaaaattctcaacagcaatgactctcttcttcctgttctgatcgttggtgcagggcctgttggcctcgttctctctgtccttctcaccaaatttggtatcttctttaacctaaaagtttctttcttttttcattataaaccaaagtaaatagagcacattttcaacttttatgaggttcatttacatggaacttgtctaattggttatagtgcttttttacgttaattcaccttttccatttgttaatcgatttttaggtcgatcaatgcaactcattacgaattttttttttccttttaatatgtttaaagtatgtagctagtgattagtgatgccttgtagggataaaatgcacggttttggagaaaaacaaggggttttcaaagcacccacaagctcattttatcaataatcgaactatggaggttggttttatttctctatggaagatttgagtgtaatatgtttagtggaggtatattgagcttaatagtaactgttcattgttaggtgtttcggaaattggatggattagcaaaggaaattcaaaggtcacaacc

SEQ ID NO: 6094 - DNA, 639 bp, Gossypium hirsutum
gttccatgtgctatgttaagcatctacaaccatgagttctattgcctggaggaacaaggtaaaaagaacgccgaagtgtcaaaagtctattgcatttactatttgtacacaccctgtagcatttactgttaaaaagttcagattaaaaagctccaaatacgccaaaactaacattttgaagttgtggacaaaacagagtaattgcagtttggtacctttactttagcatgcgtataaaccgttctatgtaaatcagctcgagtagcaaataacttgtggacagtcagatctgtcagaaacatatatattagttgaagattaattgttagatgaagataataaatttggacaaatactaacaatccttggcccggtaacatatctcatcacccatcactctcattgtttccagtaacctgcaagttaaaatgaacatgaaaaatatgcacaactacaaaatatgttcaataaactagaaagatctgcgcttttgcagatgcagaaatgttgaaatagcttgaaacttaacatcccaccagagtatgtattaaacaaaatgatcatatgatcattatacattgatccctacctttgaaactgaaaattgcagccaaggccacaagcacgagagtcacgtac

SEQ ID NO: 6095 - DNA, 433 bp, Gossypium hirsutum
tcctccaaattcatttcccccatctagttaccaagatgcagttctgactaaatgtgaatcggattgccattccatatgataagcatcaagcatagtgatgatgattagagtaaacaaaattaaaatctaacaaaagaagaatagaaagacaactcactgtcataatggaagcataagggtgctttcttcgggcatgatggcattcatcaattatcaaaaccttaatcatgtttatcttgaagaagccatgcctcaatccattaagtaaaatttgaggtgtcatcacaagcacctggtaagaaagaaatgttattgctagactcatgtaccatatctaagaaggaagaaagaaacacagttatttgacttgaaactatagtaccagtcaacaaaagaagcctgtgccagtgaatgagcaaaccatttttttttt

SEQ ID NO: 6096 - DNA, 660 bp, Gossypium hirsutum
ttccaaaaggcaatggatttttggcagcaagataagtggagcggaagcttccctgtcaagtggcacatcattaaagatgttccaaatagccactttagacacatcatagtagagaataatgaaaacaagcctgtgactaatagcagggatacgcaagaggtatgtttatttcaggattatatataatcttgataaaatctgcatattattttgtcttataaaatgtcttctcaactccagataatgttcaagcaaggtgtggagatgctgaaggtattcaaaaatcatacaatgaagacttctttacttgatgacttcatgtactatgaaaatcgtcagcgaatcatgcaagaagagaaggccaggctactaattagaagctttcagagcccagtccaagcatcgacattggatgctgccactaagctaaagtttgagctacatctgaatggcaatgagaaagctaccaagcaaagcgatcctgacatgctgaagagaactgttccttcttctagtcaacaggtttcttttggttctgatataactaatgcaagaaacatgaatgataatatagatcaaatctcagttgaagccaacaacgatgcttctactttaaagattggcttgctcactaaaaatccaaagcaggacgagtctaaa

SEQ ID NO: 6097 - DNA, 679 bp, Gossypium hirsutum
tcctcagtgcaagaaatttgagactttgcagttggcccaatggtggaagactcttacaattgatgcaattgtttaattccaactccatcaaattgtcaagaatcagtgaaccaatattagatccatgaacaggtcttgacatccaagatgggagcttttctcctccataattccaaataattaagctttgcaaacctgagtggggttggagaccttccagcacttcctcacaggtatcattgctaaaatttgtccattcaaatattaccttggtcaattttgttttaagccgtaaatttgctttgcgagcctcttccttgtctctaacactttgaagatcgcatatcttcaattgtccaccaagttcgttgaggcatcctagagcatcaagatgaagttcgttatccctaacaaaaaacattggcaatgtttggagagaaattaggtgtcgaagctcaattggttgagaacttcgctggtcaaaatggatgtgcttcaagcttatcaaatttctcaatccatctggaaatgcgagcttcctacaacccatgaaccttaatgtttgtaacatgtaaagtttggttatggacagaggcagcactttgatagaagtcttcgagatgtccatatacctcaagtgcttcaattcgccgagggaagcaggcaactcaagaatatc

SEQ ID NO: 6098 - DNA, 1216 bp, Gossypium hirsutum
  misc_feature (396)..(399): n is a, c, g, or t
  misc_feature (411)..(421): n is a, c, g, or t
  misc_feature (433)..(435): n is a, c, g, or t
  misc_feature (437)..(439): n is a, c, g, or t
  misc_feature (441)..(443): n is a, c, g, or t
  misc_feature (446)..(459): n is a, c, g, or t
  misc_feature (472)..(483): n is a, c, g, or t
  misc_feature (494)..(495): n is a, c, g, or t
  misc_feature (500)..(500): n is a, c, g, or t
  misc_feature (505)..(507): n is a, c, g, or t
  misc_feature (509)..(517): n is a, c, g, or t
  misc_feature (520)..(521): n is a, c, g, or t
  misc_feature (523)..(524): n is a, c, g, or t
  misc_feature (528)..(530): n is a, c, g, or t
  misc_feature (532)..(537): n is a, c, g, or t
  misc_feature (539)..(545): n is a, c, g, or t
  misc_feature (551)..(552): n is a, c, g, or t
  misc_feature (556)..(566): n is a, c, g, or t
  misc_feature (569)..(581): n is a, c, g, or t
  misc_feature (583)..(583): n is a, c, g, or t
  misc_feature (590)..(594): n is a, c, g, or t
  misc_feature (596)..(596): n is a, c, g, or t
  misc_feature (599)..(599): n is a, c, g, or t
  misc_feature (602)..(622): n is a, c, g, or t
  misc_feature (624)..(628): n is a, c, g, or t
  misc_feature (632)..(648): n is a, c, g, or t
  misc_feature (652)..(654): n is a, c, g, or t
  misc_feature (657)..(672): n is a, c, g, or t
  misc_feature (676)..(676): n is a, c, g, or t
  misc_feature (685)..(689): n is a, c, g, or t
  misc_feature (691)..(693): n is a, c, g, or t
  misc_feature (708)..(720): n is a, c, g, or t
  misc_feature (727)..(732): n is a, c, g, or t
  misc_feature (734)..(753): n is a, c, g, or t
  misc_feature (766)..(772): n is a, c, g, or t
  misc_feature (775)..(788): n is a, c, g, or t
  misc_feature (792)..(792): n is a, c, g, or t
  misc_feature (794)..(794): n is a, c, g, or t
  misc_feature (797)..(802): n is a, c, g, or t
  misc_feature (805)..(805): n is a, c, g, or t
  misc_feature (807)..(814): n is a, c, g, or t
  misc_feature (817)..(819): n is a, c, g, or t
  misc_feature (824)..(829): n is a, c, g, or t
  misc_feature (835)..(835): n is a, c, g, or t
  misc_feature (842)..(855): n is a, c, g, or t
  misc_feature (858)..(858): n is a, c, g, or t
  misc_feature (864)..(865): n is a, c, g, or t
  misc_feature (867)..(870): n is a, c, g, or t
  misc_feature (872)..(872): n is a, c, g, or t
  misc_feature (877)..(885): n is a, c, g, or t
  misc_feature (888)..(896): n is a, c, g, or t
  misc_feature (898)..(902): n is a, c, g, or t
  misc_feature (910)..(927): n is a, c, g, or t
  misc_feature (929)..(931): n is a, c, g, or t
  misc_feature (934)..(936): n is a, c, g, or t
  misc_feature (938)..(941): n is a, c, g, or t
  misc_feature (947)..(958): n is a, c, g, or t
  misc_feature (960)..(962): n is a, c, g, or t
  misc_feature (966)..(968): n is a, c, g, or t
  misc_feature (973)..(982): n is a, c, g, or t
  misc_feature (988)..(1001): n is a, c, g, or t
  misc_feature (1003)..(1015): n is a, c, g, or t
  misc_feature (1017)..(1019): n is a, c, g, or t
  misc_feature (1022)..(1035): n is a, c, g, or t
  misc_feature (1038)..(1043): n is a, c, g, or t
  misc_feature (1047)..(1054): n is a, c, g, or t
  misc_feature (1057)..(1064): n is a, c, g, or t
  misc_feature (1077)..(1077): n is a, c, g, or t
  misc_feature (1082)..(1094): n is a, c, g, or t
  misc_feature (1096)..(1108): n is a, c, g, or t
  misc_feature (1117)..(1122): n is a, c, g, or t
  misc_feature (1124)..(1124): n is a, c, g, or t
  misc_feature (1126)..(1143): n is a, c, g, or t
  misc_feature (1150)..(1151): n is a, c, g, or t
  misc_feature (1153)..(1163): n is a, c, g, or t
  misc_feature (1169)..(1178): n is a, c, g, or t
  misc_feature (1182)..(1186): n is a, c, g, or t
  misc_feature (1190)..(1191): n is a, c, g, or t
  misc_feature (1195)..(1205): n is a, c, g, or t
  misc_feature (1207)..(1211): n is a, c, g, or t
ttatttagacacaaacataaaactatgaatttcatattaatgaaaagagagcaaggtcataaatagaaaaaaaaaagaatcaagggtttaataaagttaaatgaaaatgaattcttttatggttgcaaataatatcaaagtaagatgacatgatttggtgaatatcttcacttgaagcaagtggagaaagaaggtaagttctccaactagattttaaaatacatagcgtagctgaaccaacttcatagaattctatatctcagttacgagcaaaatataaaatgaatattgaaacatgaaggggttcaacacacctcttcagcttatgtttctcatggcctaatcctactaaacatagttgaatattctaagcccattaagttgtgatgttcagtnnnngcccctaacggnnnnnnnnnnnctccaaatggtnnntnnntnnntcnnnnnnnnnnnnnnaatttcattatgnnnnnnnnnnnnaaggagaattnntactnctagnnntnnnnnnnnnctnntnntgtnnngnnnnnnannnnnnnagcaannaaannnnnnnnnnnaannnnnnnnnnnnntnaaaaggnnnnntnagncannnnnnnnnnnnnnnnnnnnncnnnnngccnnnnnnnnnnnnnnnnnccannnagnnnnnnnnnnnnnnnnactntaaaaattnnnnntnnntaaattttttaaaannnnnnnnnnnnnttttttnnnnnncnnnnnnnnnnnnnnnnnnnnaaaaaaaaaaaannnnnnnaannnnnnnnnnnnnnctcnanaannnnnnacncnnnnnnnntcnnntccgnnnnnngaaccnacaaaannnnnnnnnnnnnnttncaaatnngnnnncncttannnnnnnnnaannnnnnnnnannnnntttttttnnnnnnnnnnnnnnnnnncnnnccnnntnnnnctttcnnnnnnnnnnnnannnggcnnnccttnnnnnnnnnnaaaaannnnnnnnnnnnnngnnnnnnnnnnnnntnnnttnnnnnnnnnnnnnntcnnnnnntccnnnnnnnnaannnnnnnngagaccgccctcntcttnnnnnnnnnnnnnannnnnnnnnnnnnatcttcccnnnnnntntnnnnnnnnnnnnnnnnnnttttctnntnnnnnnnnnnncccccnnnnnnnnnntccnnnnncaanntatnnnnnnnnnnntnnnnnacccg

SEQ ID NO: 6099 - DNA, 656 bp, Gossypium hirsutum
atgagatacaatacagatgattccacaaccttttgggcgatagggccagactcgagtgtaatagccaggcattctgaattttgtggcaaagctgttgaaatggttcttccatttgaaggtgtcaatataggggaggtatgacgcaacgtgcttttttctgtttcttactctctcagtaaacctatttcttgattgccgtaattggaaggtaaaaggatagaattcataatgatgatgtgttatactagttaaaatatgttataagtccccgtactcttcaaaaatttggaatttagtccttctacttttattttcattaagttagctcatttactttcagatttcaaattcaggttcaactgttaacactgtaaaattttttttgttaaatttattggcgtgacattttaacaatgttaacctgaatttagcaaaaatattttaacagtgctggacttgaattttgaaatctgaaaaaacagagggaataaatttatgaaaataaaagtaaaggaactaaattccaaaattttgaaaactacatagacttatggcatattataacctgttatatttgataaaaagatgttgcttatatcctaaattaattgtgcaatgtgggtatgttggatgcgcttagggtccaagaaatcatt

SEQ ID NO: 6100 - DNA, 617 bp, Gossypium hirsutum
gggcaagagttgtaggtgaattaaagaattgggatgttggtgtcaagagaagattagagggagaacaagcgtaaaaaagggttgaagatctaattaggagagaaggtgtcttgatctatttgcctggggtttgaaagcttttaaggaggggcttttttctaatagttctctaagtatcatatgtcctcaaattggttctaaactacctccaagttagtttatctattaacttttttttggtataaattatcttaaacaggtgttaatgtctagactatcatatttagagaatgaatatatgtgacccacgaaatcaaagacatgagttataagtattttcagtcatatatatatgttcatcaaagatttacatcaatatatgcaaatggagcaattttagaagaggccctacattatgaactcttgtgactctacaaagacatccaatctcaacaattttgtatgtatttgtagtccatagatatttatgttattcataattgaaataagcttaatataaatatttttatggtataaatacaaataacataggaatcagtagaatatggtactgaacttactttccgtttttatcccatgtgggactcattaattta

SEQ ID NO: 6101 - DNA, 786 bp, Gossypium hirsutum
  misc_feature (646)..(685): n is a, c, g, or t
  misc_feature (687)..(692): n is a, c, g, or t
  misc_feature (694)..(714): n is a, c, g, or t
  misc_feature (717)..(725): n is a, c, g, or t
  misc_feature (727)..(727): n is a, c, g, or t
  misc_feature (729)..(735): n is a, c, g, or t
  misc_feature (738)..(755): n is a, c, g, or t
  misc_feature (759)..(778): n is a, c, g, or t
gcccccttgaaatttttagatttttgagttttgtatataaaatattatgtattttaaatttggtatccacattatataacattcgtcccttggccaaattgtatttcatataattcccctttatgctataagattattctttatattaagaaagtattttttagtttttaattatataactttaataataatcaaatattaatgtatgatgcaattggtgtcatcaactaaaacgtttatccagaaattcagagaacatgggtatgatcctttctttaagaaaatgaagttattttgtaaagatcatgagataagtccccaatttaagtgcttcgtacaaagttggtcgaggttggtctcgtatccagagagataacctcataattgagcatcattattggtttgatatattcattactggtatcaattcattgctaacagaaatgaattctcgctttaatgatgaggtagtggagttacttgttcttaactccgctttagatccacacgataattacaaaacttttcacgtagaagatatctgcaagcttatgaatgatttttatccggacgattttacaaagcatgtaacacccctaacccgtatccgtcgccggaacagggtttaagagcattacaaaaaaannnnnnnnnnnnnnnnnnnnnnnnnnnnnnnnnnnnnnnntnnnnnntnnnnnnnnnnnnnnnnnnnnnttnnnnnnnnntntnnnnnnnttnnnnnnnnnnnnnnnnnntttnnnnnnnnnnnnnnnnnnnntttatttt

SEQ ID NO: 6102 - DNA, 615 bp, Gossypium hirsutum
tttaatacatttacaatgattttcaaggttgcttgtaatgcccatgccttaaacttgttacaagtccaattatgagagcataattgggagtttgagtaggctttatcttttgttgttgagacctcgcttcatgtttttcctttttctttttggtcaaataatcctagctttaagttcacttgtgttaaaactgaaggtttttttttatttcattccttcttctagctttttatgtgggaagaaaattttcatgactctctaagagtcttattttgggcgtccccttacattattggattatatgaatagtttaggtaccatcattttaagtcacatttgttaatttgttaaatggttagcttcctaattagactctggagtatttgctaaagtcataattgtactaagtgtcctagttcttatttgaacatgagtgctgtgattctataaaagaaatctccattggaaggtagaactacttgagaaaatttccagcattattgctcggtttatcattagagaaaataaacctatggtgtgattcctaaggtcaagcccatatgatttcttattattactttcaaaaattaagaaccagctccaagctacttcacc

SEQ ID NO: 6103 - DNA, 739 bp, Gossypium hirsutum
  misc_feature (630)..(643): n is a, c, g, or t
  misc_feature (645)..(659): n is a, c, g, or t
  misc_feature (664)..(666): n is a, c, g, or t
  misc_feature (669)..(670): n is a, c, g, or t
  misc_feature (673)..(675): n is a, c, g, or t
  misc_feature (677)..(679): n is a, c, g, or t
  misc_feature (681)..(687): n is a, c, g, or t
  misc_feature (692)..(695): n is a, c, g, or t
  misc_feature (699)..(700): n is a, c, g, or t
  misc_feature (715)..(715): n is a, c, g, or t
  misc_feature (717)..(721): n is a, c, g, or t
actcaccccgaagacgaagctgttgcctttgacccgccaacacccccagaagggttcatccctccacctgctttcgacgatggccccgaggaaaccgaggacgaagtcgccgctgcctatgaggaactctacggcccagcctacagtggggtctccgttctaggcaacgatgtttatgtaatggactctaaagtgaagaaaacgagtgcgtttgggaaagttacgaaagaaaaggtgagggatgggtttgaggaaagagtggttcaagttagaagagtgactaaagtggttaaaggtgggaaacaacttcatttcagggccattgttgtggttggtgataagcaagggcaagttggggttggagttgggaaagctaaggaagtcattgctgccgttcagaaatcggctgtgaatgctcggaggaatctcattactatacctatgacaaagtacttgactttcccacaccggtaaggaagtttagttcttgcttgggaatgttgtgtaatttttcattttaactgatgcaatgggtctttctctttggggttgttatagtgaaagagagaacttttttttcttgggggtacaaaaaggatttccttatgtttaattaaggttcctttgatnnnnnnnnnnnnnnannnnnnnnnnnnnnntttannntannccnnnannnannnnnnnttttnnnncccnncaaaaaaaaaaaatntnnnnntttccctataaaaaaaac

SEQ ID NO: 6104 - DNA, 605 bp, Gossypium hirsutum
  misc_feature (230)..(230): n is a, c, g, or t
  misc_feature (248)..(248): n is a, c, g, or t
  misc_feature (251)..(251): n is a, c, g, or t
  misc_feature (266)..(266): n is a, c, g, or t
  misc_feature (271)..(271): n is a, c, g, or t
  misc_feature (274)..(277): n is a, c, g, or t
  misc_feature (294)..(294): n is a, c, g, or t
  misc_feature (297)..(297): n is a, c, g, or t
  misc_feature (299)..(299): n is a, c, g, or t
  misc_feature (303)..(303): n is a, c, g, or t
  misc_feature (318)..(318): n is a, c, g, or t
  misc_feature (320)..(320): n is a, c, g, or t
  misc_feature (322)..(322): n is a, c, g, or t
  misc_feature (324)..(324): n is a, c, g, or t
  misc_feature (338)..(338): n is a, c, g, or t
  misc_feature (340)..(340): n is a, c, g, or t
  misc_feature (352)..(352): n is a, c, g, or t
  misc_feature (365)..(365): n is a, c, g, or t
  misc_feature (391)..(391): n is a, c, g, or t
  misc_feature (400)..(400): n is a, c, g, or t
  misc_feature (402)..(402): n is a, c, g, or t
  misc_feature (420)..(420): n is a, c, g, or t
  misc_feature (428)..(428): n is a, c, g, or t
  misc_feature (431)..(432): n is a, c, g, or t
  misc_feature (441)..(441): n is a, c, g, or t
  misc_feature (445)..(445): n is a, c, g, or t
  misc_feature (454)..(455): n is a, c, g, or t
  misc_feature (466)..(466): n is a, c, g, or t
  misc_feature (519)..(519): n is a, c, g, or t
  misc_feature (585)..(587): n is a, c, g, or t
  misc_feature (599)..(601): n is a, c, g, or t
tatgagtaggttttggatcccaactccagctcagatcctcgttggccccatgcagtttgcttgctccatttgtagcaagactttcaataggtacaataacatgcaggtcagtagagttcttcatcatttccatactttagattttatcaagtaaatcaccgtataaacccaaatttactgggttttctttgatacaaaagtaaaaaataaaaaaataaaaaataaattcntccttttgccatgggaantcntttttttttttttcngaaanttnnnngagttaaaagttcaaantcntnttcnttttccaaaggaaantngntntcaaaccaatgcancntccatggaaagnggaaaaatggatngaattgtttttatttgttcatgtaantcaaaggancntaaccaggaaggaatccntggaaatntanngataaaaantagncaatgccgnngaaaaagattnaattgttttaagggcaaactgtgatagtaatttcattcttttttatttaatanaaaagtagaggttttattttcttctattggaaacattttcacactggatataattcaaaaccaaannncatctataattnnnatac

SEQ ID NO: 6105 - DNA, 422 bp, Gossypium hirsutum
aaaagggtgattataatgatgattgatgcccacttcttgtcatgagaatcccaatcaaaagaaaaatacaattaaatcatgtttttttttcattgttatagtaataataatatcaattaaactaaagctcaattatagtgtatatttttaaacttctaaaaattaggttgtacatatccaaaactaagaggaagttgttatgatacagttgaagcaatttgtcgcaactacatccaacttactccgtcaattcgtgtattattgtgtggtttattttaggtagattgatagtaggattaaaattttactacagtggtttttaaaatatatatttgataataaaattaaaaaacctccaccgcatataataatcacttttataatatgcacttcctactgcaacttttttttacaaaaaaaaa

SEQ ID NO: 6106 - DNA, 504 bp, Gossypium hirsutum
tctttttatttctttttccttgtataactcacttcagtgtttttattgtgatcttcttttaattacccttttaggtctaccgtgggtgtacactggatggttctgatgttgctgtgaaagtgcaacgtcctaatttgcgccatgtggtagtgcgagatgtttatattttacgtcttggggtatgtattgacatctctatcagcatctccctatgtggttgagaattcaatttctatttaaacttggtaattgatattcttttttcagctcgggcttttgcaaaagattgcaaagagaaaaagtgatcctcgtctatatgctgatgagcttggcaaaggtttagttggggaacttgattacacttcggaggctgctaatgcttctcagtttctggtaatgataatattggaacttccacaaaaagttgcatattgccaccataatgagcttagttattatagttggccaaaattgtcttctgtctgatatcatcagcctactgag

SEQ ID NO: 6107 - DNA, 685 bp, Gossypium hirsutum
  misc_feature (674)..(674): n is a, c, g, or t
tcagccgaaaccaaattagatgaggtcatctacatggaattttcttcctactatcctcaaatgattgatattaatgagtttgaaatgaactacaagcagtaagatatctttcaataagttcagattcaggtgctttaagaaaaacgaagggttggagcgatattgagatcattgattttaatttttatgtgttttggaatttatcagggaaactcattccaactattaatagttttaacatggtgatgcacatatcgaataagtaatttactttcaaacttacaacaccttatatcttgttctttaggtaacatccccttttgggaacaatcttcaccacaatgaaaatgcaactcatggtcagtttgcatttacaaccagtgagtcaggcaattatctagcttgtttctggaaggatggcagtttccaaaaggattccgaactaactttgggagttgactggaaaactggaattgctgccaaggattgggaatcggttgcaaagaaagagaaaatagaggtgagatccttgatgtcctttcagttgaagtttcacatgggacttaaatctccatacccatccaaatttcttatgcattattatattgctttccatagggtgttgaacttgttcttaggagacttcaaggaatagtggaaaccattcgcggaancctatctaaaa

SEQ ID NO: 6108 - DNA, 621 bp, Gossypium hirsutum
  misc_feature (55)..(57): n is a, c, g, or t
ccataacgttgatgaaaatcaagaacattataatgaagaaaactatcaaggttcnnnaagacagaccttcaaggttctcatataatggccaagatcacgcaatagaccatccttctgatctctcctaaaacttgggtcagaatggatagcacaatcataacttaagaggcgttccttagttattccattctcagctagagtcttccagtagatgctaatgtcaaagtcacttttaatatagtcgatcagtgcctgcaagcatattttcttttagctggagccctcttggtgaattttcactgaacacacatctcatacctgacagattacaacgtcatctggactagtattattatgcaacttctggtgccattcctccatcatccctcccttgcagtcattgttcctctgaaatagatagataaaaccccatgtaaatataatgttaaattgaaaaaaaaaaaaaccggttttcaaaaatggccgggaagaacaaaattttttccccaattttttggcccccccccccttccccccccccaacaaaaaaaaaaaaaaacctggccaaaaacccccgaaggtgggggagaaaaaggggatttttccggaacaagtccaggg

SEQ ID NO: 6109 - DNA, 622 bp, Gossypium hirsutum
ttatgtagctgttattaataagtaaaattccacaaaatttctgcaaaaatttaatatatcatatctacagttcaatatcatggtaattaaatttatgtaatctctttgtcacttactttgatcaagttcggtaggatggttcggagcatgtcaaactgttggctgatccgctttcttcgatgcctctcagccattttatgtttcagggcattggctatgttggcctcagccttaggtttagtcacctttttcaaacttttgaagctgaaatcaatggtggaaattgaatcacggtaacgtctgagatgctgttgtatatcctgttctaactataggtacgaaccagaagatacaaacagatgattataagaagattgcccgactaaggaatgagaaaatgggaaaaacagtaaacagttacctgtttaagacgaaccatgggggagctcagatttttctccagtagaacttgttcagtagaaagaaagattgtagatcggaagagagattttgatccaagattgaacaaggtaattcctttttactgcttattagcgagatggcatatgcacgcaaaagagaataagagatatagaagctaataaatgagagttaatgtgtc

SEQ ID NO: 6110 - DNA, 612 bp, Gossypium hirsutum
cagattccataatctgttctttcatacatgcagacaaggaagaaatagtctctgctttgcattggtcaccttcgaagaaatatcgagagatacgatcaccatggcctaaaaggcctgctaaagacacacaaaagatttcagctaaagttacccctgccatgccccgccaatggttcatcttatttatatcacaatcattataattcccagaaccatcatctactttatcactatttttgcaagaaggcactgttgatgccataggaacatgacggatcagctgcaatgatttcccagcagaaacaatggactttgctatgtccttaataaataaaggacacactataaggtctctactgttttgttcttttcctttcacagaaccagatgtagaaacaaactccttttcagtagtttcctttttgttactcatcccatgtacataatcatggctataatttggggcagaggggtcaacttttagattgtaattttgcattatccttggtaaacaactcttttcccagaactcaggctcatcaactgagattgctttattagcatacaagaacatctgccacaagagacaaaagacaataactgggaattcat

SEQ ID NO: 6111 - DNA, 614 bp, Gossypium hirsutum
ttaattttggggtccaaagtcgattttgtagtggaaagtggaatgcatgtgctgacaagcaggacggatgcagcagtatcaaaggcaactcagctttgcttactctctttttctatctcatttttccatattatatatattatatggtattgctaacctaagtgggtctctctcttttatgcaatatataaatatagtaagtaaattaacattatggtatatttaccctaaaaatgatcaacaaacgacccctttatctttcgagtgcagtgcacaccaacaaaatctagacataatcatttcgattttgtaaccttgaagcctacacaatcttacaacctttttaattaataacgtagctcaaacagactcttttattaacatgaaatcagccaagtgaaagtatgtgatgtagtaattacatggttgaggaattaatgtaaaaggacaaaagaggccttgtagtatgaaatgatttaagtatataaaaagcatgggcaaatgtggaattgtggagaagcaaactggtggctctaaagtgaggctgagagagaagaaaggaagcttttgcagtgaatttcaatccctcaaaacccagaagagagtgaggtttt

SEQ ID NO: 6112 - DNA, 652 bp, Gossypium hirsutum
ctcttccttttgacagcagaaaacaaaaagttggatcacagttttatggggatttgaacccgacgtgaatcgaacacgcaaccttctgatctggagtcagacgcgctaccattgcgccacggatcctgctgtactcttttgaaatatatcattttagttgattccatagtagtaaatcattggtagctctgaatcaaaaggaagaggctccatcaggtattttccttaacagcttatatacttgatgacatatgcacatcgacggttggttagtggctgccaccacaacagtaggttctaccattgcatatggagaaagagagcagagttgatgagttcctagggtgtgtgagcatatagctgtagatgtggaagaaaggaaaaccggatgtggagccaaaggaggttagtggttgcttgtaaaaggcctgctccatcttgcaataaaagcgacagaaacaattaagcaagacaagataattgtgagaatgcaccacaattctactcacaagcaaaggaatatgacattactaccgcttcactttaggaacatacatgcaataaagtaactaatgctgcatgagactaaagtttcataggtactacatacaatcaagattttatattgtttacaattaaccttggtgccatg

SEQ ID NO: 6113 - DNA, 645 bp, Gossypium hirsutum
tttgaagaaaacttcagtgataagatggattaataaggatggtctgcaataacacctcagcacctctgttgtctgttaatttgattttatgtgggacgacttcaagcctgctccatccttactgcttatacttacattcttagagtttgtcttggctaaggctgttgttattttgattttataactgccttcccttttgttttttctgtttattttcttcaaacatgaagtttattcattctgcaaattattacttctaattaactatgtgtttcattggaaacagcacaaatgcttcattgttgctacatgtgatcgggacttgaagagaaggattcgtaaagtatgtatgattagttagtcgagctggcattgcatttgaactgaactctgatggataaaacttatttattggcaggttcctggtgtgccaattatgtatatcactcagcacaagtactcaattgaacgacttcctgaagcaaccattggtggaggtaagctacataatattgttattattattgttttctttgttcttttcttatctgttgctcattttgaattattttattttatcttatttgcagctccaagattttgacatgcaagtattgatatttcagtagcagtgatctctgggta

SEQ ID NO: 6114 - DNA, 556 bp, Gossypium hirsutum
  misc_feature (298)..(298): n is a, c, g, or t
  misc_feature (337)..(337): n is a, c, g, or t
  misc_feature (500)..(503): n is a, c, g, or t
gcccctcatagcagctgtataattccctctcttagtttatgttctttgagcttggtttttcatcaacctttctgaaaattagattcggctttctcaagtatactggttctgtaggtagtagcttcacaagactggcctgaagtgacaaaatatgctggactagtatgtgctcaagctcatagacaggaacttatacaggacttgtacaaaacatggcaggaccctgtacgtggcacagttagtggtggcatgatcaggtaaattgttgtcaattcctctaaaacaagtgcatttaagnctcaagttgtatgtattttcatttctaattatgatttcntgtgtagggatcttctggtatcctttaggaaggcaacagggcagaagcccctgaggattatattttacaggtttgtgatgcagatttcgttggtaaaagtttatactattattttccatttccagataccacaccttagttaaaattcaacttgcaataggtnnnngatcccaacgatttagtgggacaagaagagttgtcatggtttttatgcatttt

SEQ ID NO: 6115 - DNA, 601 bp, Gossypium hirsutum
  misc_feature (474)..(474): n is a, c, g, or t
tagaacatactctgaatcatccttcttcgtggttatttgagcaccaaaaggaatcctggtgacttcacctgtcagacaatataacaagtatgttttgtagaggtccatacggtctctttcggagaggtcatctttgagtgttatctctgtttggcctggcttgcccaactttgcattaagttccttgttaggttttattttcctaagtgtctgaagggattcccattcatcatcctcgtcaacttcttttacttcctctttagcaggttcttctgatggaatatcagaagattcccccttgatgtctgccaccaattctgtgacaaccaaggtgttaaaggcaatcaactttttaagttctcttgcagattccgtccgattatccgccgatcgagaccgtttcacataattcaagaaaaccttacggacctgagcacatgcatgatgattccaggagagagaaagaagttaaanccaaagctccaatttaacaaaatggataacccttgggaccaaataactggaatggggactccccggcctggtcggcaatgaaataactggctttccaagtaaaccgcaaacctggggagcttttctc

SEQ ID NO: 6116 - DNA, 544 bp, Gossypium hirsutum
  misc_feature (540)..(540): n is a, c, g, or t
gttatgtataatttgctttcccacaaacacttgaatatgtgatagaatttttccctctataacatttagttcttaaacataaatttgatatttttacttaactttatctttctaacattttcttattcaacttagactctattaaagattaattacatgacactaaaaaattatataaaatgtaaaattacaaaaagatttaaaataatagttaaattataactctcttttttttttaataatgatgtagcataatctgataatatcacgtcatcatattttaacaaaattcaaatttagagatcaaattaaaaaaaactaccaaaacaactattccattatccctaaaagttaaaaaaaaatcaaaatgtaatattcctttgctgagtcaccattagcatgtttttgcctaggaagcttgctagaaggattcctgatctctttttttgttgaaagggtgaaagaatgcttatggaaatagaaacagaaatgaattttaaactgaagatgtatttatatacaaataaaacaactagttanaaaa

SEQ ID NO: 6117 - DNA, 617 bp, Gossypium hirsutum
tgtcatgttttattgctctcaactggattccataattccagacactgttgataaaaaacaatcatattaataaagagaaacaatgatgtattagttgttaagattgcaaaaggatggcaaaaagtgtgtagatggggccaagacaacttcagcctattggacttagccaaccttgtgttttccacgtaacaactaatgttattcttatatttttcttaacaccccttcctccacaagaggttcactttaaattcttatgtatatgtcgacacatgaagacatgataacatgtctaaaaccctcttacaagctaactagtgatgtagttgcaaacttatgagaaacaaacagtatttgctataatattctgtataattgtctttacctggtaaccaccaatgaccaagagttgtgagtaccctggatgaaatgtgcaggactggaacttgttgcctgttgaccgcaattcatgcaagcattctccaccagagactgaccacattcgtgcactgtcttcactgatggaggcaaaatacttgccactaggatcccagcaaattgaaagaacctctttgttatgcccctgaaagaatataacattcgttcagataggcaag

SEQ ID NO: 6118 - DNA, 524 bp, Gossypium hirsutum
tctctctgctgtcttttccaacagattatcattttcataaaagtgtttcactttgtttattggaattgccttttgcaaaaagtatgaagacatgcatactgattagattaaggacagtttcatatgagtcagctgtagggttctaagcttgatagctagccttcaaatgtgctgaaatagctatgcttttttgttccaatttttgcattactttgtgttgcacttttattaatagagaatatttctgttgctataggattttgatgtgcgagaatatgcaatatcagtggctgggagattgtcagagaaaaatccggcatatgttcttccagcacttcgtcgtcatctcatacaattattgacatacttagggcaaaggtaaagataaaagaacttctgtcctctctatgctgcattaaatattgacttctcctgcattgtgagcagtgcagataacaaatgcagggaagagagtgccaagttgctcggttgtttaatacgcaactgtgaacgactaatactcc

SEQ ID NO: 6119 - DNA, 619 bp, Gossypium hirsutum
taaaacatcactgaatttttatgacttttatatagaggtaatttccttttaattactactataatgttttgcccgctttcgcggggtttgaatttttaagtataattataattatttattaaatgtttattaaattgtaatatatatttattaaaataactaaatcttaattttaacaaagtagagagatgaatactaaagttttacaattattttatagggcaaagaaaagaaaagcgacctgtgtgatgacaaaatccctttagacttagagcttccttttatatatttattaagtacaacgaggagtgtaggagtattgtcaccaggtatgtgaggagtgggagaccatcatcactaggaccaggcgctggaatgattataagactatggacttgacgttcatggagactgtctggtgggtttttgctcagctttacaaaaaaggacttgtctataaaggcttcaaggtctgtttacagttacgttccattttttattgccacaacgaatgcgaatggggttattgctttcttctaatattcttccttgagaaactgttgtgttgcaggtcatgccatacagcacctggtgcaagacccctctgtctaactttgaa

SEQ ID NO: 6120 - DNA, 655 bp, Gossypium hirsutum
aggtggaaggaaaattcggcgtaatagaagggcgcaacgggatcaaaggaccaaaaatcaagggcaggggatcataggatctagattcttgacattatcaaatgttaacgatggcattgaagaagttgatgaaaatggaaaggtgattaggaatggtctaaagggtctttaggggtttctttggagaacaattagaggtctcaagttagggctaaagtagggagcaagagcttaaaagctattgaagcaagttcttctttagtaaatgggtcagggattataaactcgaatgatgagagggtaccagctaagaatgggtcgatggatttgggtattgaaagggtgggaaaggcaattggaaaaaagcctattaatgaggctgggtcgattgtatctgggctaattaatgtggaaagccttaaggataattcaggtggtgttaaaggaattgatttgtcgtctcttattccacaacagggatgcaaatgtataggccatattggggattcaaatttcagcttggggaatcggttactgctggtgttattaataatttttttaccacttctggtaaggtacctacaggtactctgttgtgtcttaaccccatatttgacgatacgcttgaaaaggaagtggttactagcccgagagt

SEQ ID NO: 6121 - DNA, 614 bp, Gossypium hirsutum
tattattatattttggtaggtattcagtccagttttgtttctttataattgttctttgtattattgtataatactaggatcttatcgacttctacacattccttttatatatcgagttttatgccttatgaatgtcgttttagttttattttgaatgctctttcattcatattttatttacaccatttaatcatattgatcttaaaaattatttttattttgatattataaaaacgtattacatacttagttcatatataaaagaaaatatattattgataggggagatatctttatatgcataattaatattttaacaatttacaagtaattttttgaattgattatatgttgaagttggatatttccaactttttatatgtatactttttatgaatcggttataattatattcatgaccaaagaacaaaaggaatagatatagtggagagctaaagtctcttttctatataagattttgtatgatagatattttaatttattccttaattaagtatataattttcttttacgccactcgatagatatttgtgtcaaatgttgtattcgactttatcttcgttcttagtaactaatggtgaatttggataggt

SEQ ID NO: 6122 - DNA, 607 bp, Gossypium hirsutum
  misc_feature (590)..(591): n is a, c, g, or t
tcagtatccaattttcaataatgataaatgttaaagcagatatagaatgtggcatagagacatgatgaatgccttccttaaccaaaaatatatatatatcaaccagatgcatcgaaactagtacaatcacataacctattaggcatgccaatagacaagagtggtactgaatctgagaatatttttggagcaatgaaagcaaaacctaggaatggtactgaagcaacaacataccttctcacagaagaatccttgaatcgggcaagcatttgaaccattgcatcagtagtcaactgttcagaaaacatttgatgaaagtaagagtttgcttctgcctcaatatcatctccatatccatcagaggttgaagactctgtggacccaccattttgcaactttggagtagaatccattattgtcacatgcaacctttccatttcctcgagaagctgagtagaggctatcaccccagtattagctttaagaacctgcacaggatacatacacaggaaaagcagttagtttccaaaaaaaaatataccagatgtggattacaagaataaccaattaacagtagtaccttgataatnntagaactagctccaaa

SEQ ID NO: 6123 - DNA, 619 bp, Gossypium hirsutum
ttgtctcttccggtgatgacggaactatgcctcaacagctgcacgtgatcttgagtgcttacaggtaagaatctcccgcaatgttctctttttttatctctctgatgatatggaggcagtgacactaaaatatgttgttattcccttcaggtcctatctagaagaatacattacggaaaacttgtggctgaagtcaaattcagagatgaatggaagcattatgaacctgcaattcgtgctcgggcactttcatttcatagctattatgccaccaatgatgcatatatgaaatcagtagtatactttttttggcgaaaataatacttctgaattctcttgcatggaattttaggataaaaaaactctgatggatttattgacggctccggctgtggaaaaagcagtaaagaagagggtggcgaagaaggcaaggatatttgggcaggaagtgaaggtgggtgatgatagtgatgagaataaagggaagtacaagatggatccagctgttgtttccagattctatggagactgggtcattcccctaacaaaggatgttgaagtccagtacctcctccatcgccttgactgaaaccttggttatgtatcagttccagtcaag

SEQ ID NO: 6124 - DNA, 594 bp, Gossypium hirsutum
ttgcagcccccctttgcctattttattaccagcaggaagtggacagggtttgcaaatcagtgcacaattagttcgacaggatggtcaaatattttacagtttactgtttgagaataacacacagatcacactcgatggatttatgattcagtttaacaagaattcattcggtctggcagctgctggacctcttcaggtaatcacaacttgcgtagtattgatgctttatttagcttcttgttgcatttctaggatttaatgggtactgtctattaggttcccccattggcaccgggagcatcagcaggaacaatgctgcccatggtattgttccagaatatgtccactggtcctccaaacactcttctgcaggttgctgttaaaaatagtcagcaaccagtctggtacttcaatgacaaaatcttgttgcatgtgttctttaccgaggatgggagaatggagcgaactagttttctcgaggtaggaagtttgttctgtattactttggttttttaatggtacaaaaggatgatcctagcaatggaaatggaatgatttcttcccattatacagacatggaggtcactacccgat

SEQ ID NO: 6125 - DNA, 655 bp, Gossypium hirsutum
  misc_feature (649)..(649): n is a, c, g, or t
tattacctgtatgactacttcttatatgaggcatttgttagatttgaaactaatgatgctcccaaatcttactgttttggtatacatagaagaaacagtttaatatacctcatgtcctcaaattaaaggttagcatgagcaaaggtaagtggatgacagagtgtagctggctgacatatatttaccttgtatcttagcattgttcatgcatgacttcctcaaagttttgtggtggctataggctagcctttgcaattttcattcacttttgtttcattccacaggaagggccacttctcaagagcaagggcaaagctagcaatgcgacacgaattgcagtattgacttggagatcattattaatcatgtcaagggaattcaaatactactggcttcgtctaattctttatatgcttcttacattgtgtatcggaactatattttctggcttgggccattctttgtcctcagttgtggtgagtaaatccaatgtataagattcaaaatatctttgctgttatgtttttggtaaatttgacaagcatttgtacggatattatgcacatatttataattgttatagttgcatcttgtttattctcttaggatatttcttcttattgttatatgcttactttgtctatggttnggcttg

SEQ ID NO: 6126 - DNA, 595 bp, Gossypium hirsutum
tcctctgcgctcttaccaccttacagcatacaattaattaactgcaaaaaccagagaccaatatataaataaaaaccttcaaatgcaccaacatgggagacaagttaagctgctgttcaaagaaacaacaatcaaactttcataaagaacaaggaaaagaagcaacaaaacaatcaacgctttttaccagtaatggcctatgttatccatttttttttcatttttcctaaattatccatatcatatatatatatatatagattgaactatatatttaagttcgatcttgacaagtcctaccccttaataaatgaaatatggatatagaatattctccagatatataaaagcgaacttcaccaactacaggatcacattcaaatagttaaaacggatttcaacagaactcatgccgggcagtcactcctatctaacacggtaccataactaatggctaatcactagaagataaattttatagcacagacatatgtggattttacatgaatgcgaatgaggatttgcagtccctctgcccaaacaaacactttcaaaacagaaaaaagaaaaggaaatcaagattaaaaagcagaat

SEQ ID NO: 6127 - DNA, 633 bp, Gossypium hirsutum
tctccactgtatatggtgaagcgttggtaaaagggtgcaggtccaagaacatttccatctcttcctcagttaattttatgtcttctatcttgtcaacattacctaagcctttctttgcaaactcatctgctgagaaatgtctgaaggcatcagcacctattcgaacaggggtgcgcaagaaaactctcttctttagcagtgtaataagatgagcacggaggattaaaccatacaaaactggggattcagaatgcggaggttcgtcgataaccggaaacccttgatgatttgtggtcttgaggatgtgtacgatattcccaaccttctcgtttccatgacagacttgaagagggccagtgacaacatctgcaaccgtgagttgtctcatataaggttcgacatgagcttctaagtaagggaaaccctttgctttcataataaggtcataaatgttgccgttaaaagcatcagctacagtcttggaaacaagaagaacaatcattatcattggcaacagtaacaggttattggtcaattccaggattatgacacacaaggagactgtcatcctcatagacccaccaaggaatgaagctgccccaagcacagcaaaaagaccgtgattaagattgg

SEQ ID NO: 6128 - DNA, 505 bp, Gossypium hirsutum
gttgtactcacagggttccgcttaagctcttcctcattcatacccattccaactacccgttcttgcttgtatccttttggaaaatgactgacctaaacataaaatcgagaacagcatcatgagaatgcgatagaggaagagggtgatctcaacatcaagaatgtcttacccaactactgcacatatccaagatgctcactccaggagtattgctgggagggaaaacctctgagtagtatttagtaagtgcggcaatggctgcatcatcaatatgtgtaacaaagcgtggagcttcatagaacaatgaatctggtgttctgaaaggtgaattaaagctatgaaaatctgaaactcatcaatatgcttaacattgaggataaaacttggaaattgttgaagcaaagtgcaaactttcagctaaatgatatctgctagattgaaccactcgctgaagcattaaatcctttaatcagtataatattggatgatttatgcaaggataaga

SEQ ID NO: 6129 - DNA, 582 bp, Gossypium hirsutum
gcttgggttttaaaacccaaaaatttttatatcaaactttttttcagcttaaaaaatatatatatattattaaaaatgatagagtgccacctaatatatcagtgacaccaataaataatatttttttatgcgtatactatttaaaaaacacatattttaaatttcaaatactttgaaatacaggtgtcgccgactgatcctgcacctaaaaagaaattcctttttaaagaggaaaggggtgtcgtcgattggctaggcgacactagttatttacggtagtatttacctagtttcgtgaatattaatgctcttatcttattctagtatttatttatttattttatattatttatgtaaaaccccttcatttaatattaagaatatcatatatttaattttaaataaatttgtttcaatattattaactaaagtcaagatggagtatatactttctaatttgttttaatatttattaatcattttatatatttatatttcctaatgtattaaacaatgatgttttcacacttaatgataaacttaaagaaatttgaaatcttgagtttgagatacacgtggaaa

SEQ ID NO: 6130 - DNA, 628 bp, Gossypium hirsutum
gaagcagtatttctggactggacatggtaaaaaaccaaacaagattgtcttttgagccagacattatgttgatgtccgcaagagaaagagaaagtattaccatctcagggctaagtggagaagcaaatgcttggccagttatttcaccttcagtaaagattgtaagttgttgatcgtttcttaggtgcatggggatctgtcttttgatgagtagcagccaacgaaactatttgttcctgtaggctactggagcaaccgttccggttctaaagaaaccaagccatggctttgggtcacttctggggaatgctgcctcaaagaagaaatctgatgttgataaaatggtgagtcaagttatttagctccaattttgttcaatgtaatatcttagggaagtcgatctccttctctttcactcttgatacatgctggctttcgattctttgtgactcaaattcgtaaaaaccctcagttgcatttctgtctcatgataattatttgtagttttagggcaagcaattccttatccttgctaaacttgtttattgttacatagaaggaaaaaggcaagttggagcagatcagatcatcagtggatctttcatttcactcctattcgggtaccaaa

SEQ ID NO: 6131 - DNA, 675 bp, Gossypium hirsutum
cgaaggctgtcaaggtcttaattttagttcattttctttccaaaatttatattctgatatgttaagcgtcttttgatttgatttaaattaagcatcttttagtcttattattaatatgcagagaaaagaaacttctgctccagtacatgggaaacgtgtggaacatctaaagtcggttatcaagttatgtgggatgaggtttcactttgaccgactcttttatgaactttgatttccattgaagttgaccatgagtttattcttattacttattttatttacagtgttcctccctcaatctacaagagagtcaaacaggtgcctgagaataaacgtgaagcccaattaataaaggaactagaggatattctttctaaagaagggttgtctgcaaatccttcagaaaaaggtcaggattctagcctgcggactactgttttaccattcatttatggagttgaccttgtttcagaaagctctttgttagtgataaaagtgggattaaagaagctctttaatgctttgaaaatatttgggatagggagaaattttattaactaattttgtcatctcatagatgccttcaccatccatgagcagggatgatgataaaactttccattaactgagaattaatacctatgtaagaataaagcatgtcccttcttgatcata

SEQ ID NO: 6132 - DNA, 618 bp, Gossypium hirsutum
aaccccacaagatctaagctggcagcagtcgtaaaatacaggccatattctacagtattttgaagatatcgaaaattcgcttgacggctttaaagtgctgatcaagaggccgatgcatgaactggcacactctatttacagcatatgtaatgtcaggccgagttataaagacatactaaagagcacctacaatgctcctatactcagattcattttcaatggcactcccttcatgttgagacaaccgtgttgaagtagtcatgggcgtaggagacctcttcgcacagtccatttgagctctcttcaaaagatccaaaacgtattttcgttgactcaagaataacccatttgtagtaggcagcacttcaatacccagaaaataattaagagagcctaaatccttcaaagagaacttttcatctagagcaagaacaaagtcatcaatactacgttgatgactacccgtgaatattatgccatcaacatagaccaggacatatagcaacgcactctcagctttcttgacaaacaacgacccatctgattttgctaacacaaactgagaagagattaaaaattctttaagcttggaaaaccaggctcgtggtgcctgcttaa

SEQ ID NO: 6133 - DNA, 611 bp, Gossypium hirsutum
  misc_feature (594)..(597): n is a, c, g, or t
  misc_feature (603)..(603): n is a, c, g, or t
  misc_feature (605)..(607): n is a, c, g, or t
tgattacctaacataacacacaatacaagctaaacaattagaactcaaaacatggtttttatcggtaaaagtgtatcatgaggcccttgtactagaagtcaaattgtattttattatttctattaaaaaatgagtgccttaaatcaaatagcaaatcaataatttctattaaaaatttcatacattttaactgttaaaactaatgtagctaacgaaataattaaacaatgacaagtgacgtgccacgtgtacctcatactgatatacaataaccaatatttaacagtaaaaatggatagaattattaacaaaatgatcaatttgctctttgatctaatgtatagggactaatttgtccatttttttaagtagatgaacaaaatacaatctaattattagtgcaagagcttccatggtacttttacaggtttttatcatacatacctggttcgggcaaaatggtttatttttcccaagctctaaagcttttgccccattccaattctttctcctgataaataaaataaaatttgactattatatttcttgcaatctaagaacacagtaaacactaaagtttgggtttactaaaannnncgccancnnnattg

SEQ ID NO: 6134 - DNA, 616 bp, Gossypium hirsutum
ttaagtctttaaagtaaaattacttactttttattttacgttacttttgcttcaagttcagtttattttaagctatttttaattaaagttgttttatttccttctagaaacatctttttatgtaactagtccctatttaaggacctattggagaataaaaacataagtaaagttgctatctatttttcaagagatctaggtctctatctaaatgagtcctaaagctaatcatcaatcaccgtaggtcattctgggaatagtgataaagggaaggcaatcatgttcaacgtttccattaatcgcccagtgactagatcctattcccacgttctcaataatttggcataaaggcctctcagaatgggcaatgaaatccaaacatatgcagattttgtggtgacagcaaaattatcgatttgcaaaagtcaaataaacaagcaatttcaacaaatacaagattggataaaagccctatttctgattgccaccaatcgctgcgggaggtgcaacgccaccaccaccgagtggggcgactttgacaactagaggatctattcctcagtatgcaaaaagggatttccctactttcaatggatcaaagaccccttgatttggt

SEQ ID NO: 6135 - DNA, 650 bp, Gossypium hirsutum
tgctttccttcgacatacacacatctcataagttcctacttccatggcaagatagtgacctatgtatgaaccatcactgttatccacaaacatccagtttgagaaacctggcttgttaaccgaagtaagcactagacttagcttcgaattttcggacatgacagggttggaaaatgaatccagcagccgtactactatttcatttctaaccagctttggtgccttgggagaaaatttcactactcctgagactgatatattaacctcacctgtcacaaagtataaaaccattcgtcaccaagaaaattgtaccattagtcacctcaccttgtggtaatttttcaagttcgggtctttttggattcggatcagtgacataaactcaaaaattgtacctggttttacttcctttgtgaatggagtaccaccatttaggattatatttccgcagaatatatgaattttatagatccctctcttctgaggagtatacgtgacattgaatgcagttgcccaaacattcaagcttccaggaggaggctgattttagaatcaaactgtcattaaaatctcaaacataaaattcataaatacatgcatgcatttacagacagaagcagctcttacagtgttctttaggcccataaatg

SEQ ID NO: 6136 - DNA, 614 bp, Gossypium hirsutum
gaggcaatgtgttaagtagtattaagaagtttttctatgaatcatgttgatgtgctgatagaggaggcgatggaagacacttggtaacgatttattggcttctatggacatccggtggagagccaaatgtattattcgtgggatttgttaagaaatcttgcctttgataatgggaatctgtggttagttatgggggatttcaacaagattatgtattcctatgggaaaaaaggtggaaggttaaaggaggaacagtctatggaggcttttcgctcggctcttgatgattgtgacttgtagaaagtgggttatgaagggcaatggtttacttgggaaaatgggagattatcgagtaacaatattcggaaacgatcagatagaagggtgtctattccgggatggaatgatttatttcccacttatagcctaaagcattgcggtcattcaatttcggatcattgtcctctattacttaatacctgtagcggaatggcaagtcaagggaatttgtattgaggttttaaatttgaagctgcatggatacttgaggaggcctgcgggggtgaggtgtgacgactatgggagaatgttgagggatcggttcttgacagact

SEQ ID NO: 6137 - DNA, 424 bp, Gossypium hirsutum
tacatacgtacatgcatatatacatacatacatacatacatacatactgactgactgatgaggttgatgctggttttaggaacaatacaatatgcacatatcatgatgagagacttatttgcagtgttacatcaaagggtttcaaagcattttctcatatatggaggagtttgatggtggcattaccattggcttccattttacaaattttattttagtaattcaatttgtaccattttgaactctaaatggatgctatgctttgtccttttatttattttatttttacggatttttttggtcatctggaaaaaaaaaacataatgactaaaaatgatctgattggagaacatgtgttaaacttgtaaatttacacatagaataaaactaattgcaaaaattaacccaatggatttaactgtaa

SEQ ID NO: 6138 - DNA, 638 bp, Gossypium hirsutum
gcatttaaatccctggtttatagttttatcagttctaataacttccttagacataagatttcaaatgttgatgttgcttaagttcaacttgctgctatagtgcacatgtttttggaagctatgtttctagctaattgctaatggctgtgcagtctgtcaacttctaactaaaggatggcaaatattttctccatttgggctgtatatcgcctagttttgacattttgatcattagttggttagggaacatgcatttgtctctaaggccaaatatttttgaaattttgaaccacaaaagttttgtgcacttaatcatttcaagcatgagtattgttaaaatatgtggtctggtatccttcacaagttgattaagagccctgctgattttgtgaggttttggttgcatcatttgtgttcaattctcaaccaatttctgacttcatatgctaaccttgatttctcttgattgctgtatttcgcatttggattttgttcaagtgatctaaaagacgaaaacctttgctaggctagaaaataataatttctgctttagcagctttatcactttgatgcctaaagctgttggggttcacttgtaggcttagattggttatatatttctttgaacttcttcatga

SEQ ID NO: 6139 - DNA, 616 bp, Gossypium hirsutum
agcactgataagaatgtttctaagagaaaagtttctgcagttgaaaaagcaactcacaagcctcaaccgaaacctctgaacttgattttcaataatgactacgatgacgaacaaggttagtctcatattccacttctacattatgtgttttggtgctgatgtgttgtttcttgtattgttttccttcaattatatatataggcaatgatgagataactagaaattgtggaaggaaagacatttctaaaatgagtgccaagaaacaagatgtaaagaaaagggttacttcaaacaatgtagaagccagtacaacaagaataaaacattcccctaggaactcttgggatgatacaaaagccagagttagaggaaagattaaagaattcatcaaaattttcaaccaagatgcttcattgaaacctagaccggacaccgcactaccagagaatcatggctctagtcggaaggaaagaggtacagtccagccagagattgaaccaagtattagcatgaataaaaggattgagaaaattcacttgaacaatgtgctaaagaagaaatcatattcagatattcctgctgtgaatcacatgtgtaaaggtgcatccgataagaa

SEQ ID NO: 6140 - DNA, 615 bp, Gossypium hirsutum
cttgaagtataagttcttgcattaagtagacatttgattcatttacttgcattccaattgtaggttttaaaggtaaattctgatagtttgatacctgcaaatcctgatatccttgatggcgtggatgatctcatgcaacttagttatttaaacgagccatcagtcttgtttgatctccaatatagatacaatcgagatatgatatatgtaagagctcatacttatttctattaattttgaaccagcactgaagtttggtgttcactaaggctgttattgttataatcatatttattttagacgaaggcaggaccagttttggttgctatcaatccttttaaaaaggttcctttatatggaaataactacattgaagcatacaagaataaatccattgagagcccacatgtctatgcaattgcagacacagctatccgagaaatgacacaaggtactttcaatttcttgaagttgttatattggtttttatttttattaattttgatattataataatttgcggttgtaatatgtttcttttttttcttttctgcagatgaagtaaatcagtctatcatcataaggttgctatttgttcaccttccttctctgagt

SEQ ID NO: 6141 - DNA, 634 bp, Gossypium hirsutum
cgtattctccaagaagagagggagcaacttcgggtatgtaattattgtttcaagcaatgggagcagggcataaatgctatcaatgatgaagtgcaagagctcgatgaggatattagctcttcaccgtcagccgctagctttatgagcactaaatctaattatagcagtagctatagtctcggctcggttccatatctggctcattcgagatctattcccagccctcgtcaactgtcttcaatgaatcgaagcatggatagatccagcaagagaataacaatgacaagtgatgatcttatgatggatgtagaagatccatcttcaaactatgaacttttgtcagacaggtatggaatcttaccttcttaattgcatttcttaaaaattttcaggtttttctatcgatcaaacagaacttaaatctgtatagacatctgagttttcatgtgtttgtgcatcactctgtaatctgtcattttttatctgtgttgtctatcgaatagaatacaggaaaccagaaaccagtagccaatagaatttattggagagttgagtaaaacaaggtcttagtgttctattccaatcacttattgttgcttactttttgtttgcatcaggagtgattatgatgatg

SEQ ID NO: 6142 - DNA, 615 bp, Gossypium hirsutum
aattcgagtttatggtaaacttgtatcgttgatttccttggcttatttgaaagatttcagggttcatgaatgaattttgtgtttgagtgactgttggatgcttttcgagtccgagtttcacatatttcactaacatagatatcatatttttgcgagaagaattctttaccattcaacagatatgcatatttgacaacacataattcctttgccaacgaagtggagccgcttcacactggaattcgacttacctttttaaatcaagaagacaatgtaacacaacagttaaatgtaaggctttttaaatcatgttccgtgtattacgaaattcacctctagctgattgatttctcttttacagaatggagttcgagcactgatgctggatacatatgatttcaagggagatatatggttgtgccattcttttgggggaagatgccatgacttcactgcatttgtatgcaattcagatcccaattcccattgtttttatttcgttttgcgtcttcttgaaaaagaaactgaaagcccttggattttctttacagtggcttgctattgacactttaaaggaagtagaggcatttttatctgcaaatccatcagaaattg

SEQ ID NO: 6143 - DNA, 547 bp, Gossypium hirsutum
  misc_feature (487)..(489): n is a, c, g, or t
ctactattttgtgatatattttaagagtatggaagtcaaaacttgtccaaagggaatataagaaaaagatagtatttcctagaaggatagactgcacatatatgcatgtgtatgtgagtattccaagtttaagcacaataatcaagcgtattactaatatcccaagcaccacactactcgcttatagtgtacccataagtcataacaagcatcgcctgctccagccaatgttaatccatattgcaccaatatattttttgaaaatagaatagcacaaagattgacatgaatgcttaatgcactgaataatataaaatacatacctgtatcatggcccctggaagatcatttgtccaatggagccctaggcaactgattaccaaatctactgaactttacatcaacaaatacaatcagttagaatttgaaagaaaatttcaacaataacatatgaagtctcgatattctcattgtctttctttgatgnnnagaatatccacatcaccaaccacatatgaagtctcaatattttcattgtcagaatccc

SEQ ID NO: 6144 - DNA, 516 bp, Gossypium hirsutum
  misc_feature (374)..(374): n is a, c, g, or t
  misc_feature (492)..(493): n is a, c, g, or t
acccttcaactataaattaatgtgtaattcatgtttaatttttttataatttttttaataattttattacaaatttattgtatctgttttttttaatataatacttagaactattcgtaattattctttaactcataaatacaaagataatttattttaatacattcgaactcatattttcttatattgacaacaatattgatttaaggacagttaatgagctattaatttagtttaaatactattttattgaagattgaaaattgatggataggatgattaattggaatattttttgaatgccaaaataaatatccactagtgaatatttggttagtgggaaatgttgtgaactccacatactgtagattgangggagatgcgatgagctatttaacttcaaattgtggcagaccaaaaacgtgtatcttgaatatttcggatatagttgagctttacatatttggaatgttggatggttaaatacccaanngaatgttggatggttaaataccc

SEQ ID NO: 6145 - DNA, 618 bp, Gossypium hirsutum
tgaagatgaaggaatggatttcacggttgtcgaaaatgggcgcagctgacgagctaacggaacagcaagctaggcaactccactttgacttggaatcttcatacaattcctttatggctgctttgcctagtgccggtacttgaatcgatccaatatacccttttcttgtatctctggaaactggtgtattctctgtgttgttttaggattattaagttggtagcagtgtataaatttagcgaattatcagattgttgaactcaaagatgcctattaatgtgctgaacatggagaaaatgtttatgttgtcaatctatgataatatatttgtgctttgatctagtttttttaaatatgcattggcctatttttctttttctaccatggtaaatgttatgttatgcagtttcatggtatcatccatgtaaaacatgtcattaagggccagaaactcagcactaaatactaatttccaagtcaataatgttacaaagaagagaaaaaacagagaaatttcattaaaaacagccactgaaacatggtcaaaaccaaacaaaaaatctcttaccaaactgattggttcctaactttgttggattccaacatgattggaaagaa

SEQ ID NO: 6146 - DNA, 628 bp, Gossypium hirsutum
  misc_feature (571)..(577): n is a, c, g, or t
  misc_feature (612)..(614): n is a, c, g, or t
  misc_feature (616)..(616): n is a, c, g, or t
ttaaaatttttatattccgatttaatgacgaagttaccctcctggaatgtactttttcctgttattaaaatacggataaattacatcataggtcactcaatattgtctttttttttctactcaattattaatttgcttcaatttgatcactactttttttttcacccaattatcaattttttaatttgatcacttaattaatctagattatttttttgtctattttttatttagtactgttaaatttttagcagtaagataaggtaacagtttaaacataaatataataataaatttaatctttaatttcacatattatatcgatttattaaaattttaaaaaaaaattaatctttaaaaatttacgaagtctcaatttaaatttatctccttcttcctcttctcccactgccactagcattgttgcctccaccttcacgctaaatatcatgaacaaaagatacaacaaacctgcacgccaacatctacagtttcatcatcatcaatatcaccaatggcttcagcaatattgttgttggatttaacaataactttggtggcttccaaaacnnnnnnngcatcgctgccatcttcaggttccttttttacacnnncntccttctgctca

SEQ ID NO: 6147 - DNA, 664 bp, Gossypium hirsutum
taacggacctttttcttattgacaaaaggaacatttatatacctttcatgtctcatctatcaatggtgtaatgttaatgtttgtaattgtatatgttgcttccatgaatactttttgatattgtccgagacaagtaaatcttaaatcatactccaataaacgagtataaatggttaggtcatggagtaaatgggtgagggaaagcttttatttattcaattccttcttgtcaattttgtatcttctggaaatctatccttttagccgatatatgtttgatttgagttgaactttcagagaaaaagacaatactagtctttcaccccatattcacaattgtcaaaggatcttaactctccatcagatgatgatgctgataatgatgctgctgctgctgatgatgatgatgataataataataataataataataataagtcaggtcatggtgcttaagcttgatccaccgtgacgaaaacattagccagcacagcgagatcagactcaatcacaacttgattttcagacacatttctcagggcatggctaggaaatgagctgcccctgcttgagcttagtgaatactgaacatgcttaatcaggttaggaaataaaagaacaggattaaaatcaaccgtccaggagctgctattcccttcaacag

SEQ ID NO: 6148 - DNA, 614 bp, Gossypium hirsutum
gaaactctatttctcccttctcttctataatttagttttttttccatgaaacaactttagatattacgaatctacgaaccaatattcaaacagcttttttctctgatctctaacactaactgtcaaatcgactttgatcaatgtatgttcttctagttgttgataggtattaattcacggttgtcgaatcgtcgcttagaacccacgaacggaactttaaaaaagaactttacagtttagtaacttaaataaaaaatttaaataatttaatgacttaaatgaaaatttttgaatagttcaatggcaaaaaatttataacttttttagttaaatgaccaaaacaaaaatttactcatagtttacaaactaatggtgtagtttactctaattttattatttaatatttgtttttttcatttttataacattatcttttttatttctgattttgatttagcccttggccagtttgcgctcggtttctatttaggcttggattaaaattgggtatgagtttgggtttaatttgtaaatggattatgggattttgggtatattatatttaataaatacattaggtagattaattcggttaaatcgatcaaacctcatcg

SEQ ID NO: 6149 - DNA, 609 bp, Gossypium hirsutum
atagatcttactttttgatcctaagaccctgcttttctttttcagattaatttaagctaccatgttttatctgcattaattggtgtatcttttgtacttttgcttttacagccacaagaagttggcatagaaacccacgagtactgcaagggctcgaaagattctgagcttgttaataaaaaggtttcgcaggagatgttcgaaagcatcatccgtgaagttgttgaggaaattggagtgccagctacatccttggtaagcgaagtcactttgttgttggtgctgcttccttttgttaatggttgtgaaattgggggtagtttgaattgtccaaaatatctagaatacagagctctgtttgtcatttttttgataaaggacacaggtcgaagaaaataaatatttaaacctcataactctttaggtttgagattcggaataggcgatttattatctggtccttggtatgagagccttcttttagatgatatacattttgttacccagatttgaggtgagtgttggatatgaggatgtgtattacacaagttttaaattttcagttataatttgtaccccatacccatatacggatttggttactctagg

SEQ ID NO: 6150 - DNA, 638 bp, Gossypium hirsutum
cactgaccacacttaatacctatgcaagcactaaattgttaataccaatgtcatgtaattagctattagtggtgagtcgatttggtcaggtttttaagctaactgacttttaactaaacaatttttttgaagtcaattataaccaagagtcccacagcgggcagccttggttcattcttttacacacgagttttaatttggttaaaatatgttatatagtattctgcgttctttgtaaattagaaatttaatctaggaatttatttcttttatttttaacttttaaaatttaggtgtaacagttaacattattaaaattattttaataaatttaaattcgttacaatgaatctttttatttaaatagttattgagtgagtattttcttattttaaaaaatagagttaataattagattgtattttgaaatctgaattgaaatttgaaaaataaaaagactaaagtttttgaaaacaaaaatataaggattaaattttaaatttataaaaagtaaataaatttatgtttatattttaaccttttgattttaactttggggtagaagttaggatgactatatagaacgctgcgtttagattcaagaaaagtgaaaacggggataggcaaccttgtgctat

SEQ ID NO: 6151 - DNA, 622 bp, Gossypium hirsutum
caagcttgaattcaaggtatggtgaaaataataatagtaactgtttttctttcattaatgagacttcttgttgtattgtggtagagtaccttctttttaagatagactacatttttgtggtattttagcattatctgtagacacacaacaaacatacaaacacgtgcagtccatagaaatagaaaaatgtggatacgttaataatcttatatgaactacatttaacaatttatgatatcaggttgacacattctttgcagtgggatcacctctgggagtgttccttgcccttcgcaatatccgtattggacttggtaattctcaaatcttagatgttcttgtgcttttatattggcacatcacatagaagttctttcagcatatttctgatttcccccttactttgaacagtttttttttttacatttttcatttttaatatggatggattccattggctggtgaaaattatagtttttgcatatgttatggagtctcagaaagttatgacaatggtttaactttattttggttgttgccatttaacttcaagctatgcctggttcttatataaatgatctcacattttattttattgttgcttacttcactttattcttca

SEQ ID NO: 6152 - DNA, 567 bp, Gossypium hirsutum
ttttgctttcttcttttcttttctttttttatgtttgtaaggagtcgcagatacttacaatgacttattttccctgccattagtagctgaggagatttatttgcttaggcacgatattgtcccgaaaagccaaaattcaagatgaatttttccattcattcctgggcctggtcaaagacataatttaagtcatgttctatttttttaaaaaaaagcctacatttaactcttttttcaactctattttcgccaacgttaatgcaagcagatcaaattatgaattagaaaacattgctgttcaataatttccagagagctgacactaaatatttccctcaactcgtgcgactaagtgacaaatctttagatggtgttgaatctaacagaaagcgaattagcaaacttaacatagtgatgccttacacatttttacataggggtcgaacaatttagcaaaaccaaatgttgcatcaagttttcttgcatatactcaagattacacagtaggatgacgagtctaaatatttaaatataactttttgaaaaaaaaaaaaaaaaggggggggg

SEQ ID NO: 6153 - DNA, 637 bp, Gossypium hirsutum
aggtttgcacatgtgttcttcttaagagtgcgatgtgcattaccactacccctaacacttgttggtgacttcctttaagctggttatagcagacctatgaactatgctactacttagagttttcattataaattacccatgtccacataatggtatccaaatttacccttgagcatgggtaacatagcctacgaagatattacatcactttctcccattagtacggaacagcaaatgggaaacttcacgttttgtttgttttttggttagaacaaagttcattattggaatgcagtaaaggtaaaacaatatggaactcaggttagcatgcagttttattttgatttaacctcatttatacatggcattcatttcattggttccttaatgcttgtaaagaaaagttctgaggaggaatgtagatgccctagacacagccgtcaacaagctcgtacgacttccatgaattattaggacaatgagtacagctcaaattaagaagaaaatcgatgtttttttagtcttatgcacatttatgtcaatgcaaaaattctggtacttgtacatcatatttttgcctctgctattataaaagcacaattgaatcttccactggtggagttcttagaaagttgca

SEQ ID NO: 6154 - DNA, 651 bp, Gossypium hirsutum
aattgaacattatcaatcaaggccaaaatttggaccctttttgttaggttaagattggattgagggaatctagagaaatagaaaaatgaagctcattgtgggcgtaattgaagcaaggaacataccagccatggatgtaaacggcttcagtgatccctacgtcaagcttcagcttgggaaacagaggcacaaaaccaaagtggtgaagaagacgttgaacccaagttggggagaggaatttagtttcaaggtcgaggatttgaatgaggagcttcttatcaccgtcttggatgaggataagtatttcaatgatgactttgtgggtcagcttaaagtctccgtttcccaggttttcgatgctcataataaatctcttggcactgtttggtattcccttcaccctaggaataagaagttgaagaacaaggagtgtggtatgttctgtttttagctttctattatttgcatctttcatttctcaatctctgcatatttggagttgcctgatcattactcatgtgctgtttgcatctcctttttacttggaatattcaactaggatttttgtgccttttaggcctcaaaaaggagcttatttaagtagtttggatctaggattcaaagattccagcctttgactacatgcttcta

SEQ ID NO: 6155 - DNA, 600 bp, Gossypium hirsutum
  misc_feature (428)..(429): n is a, c, g, or t
  misc_feature (486)..(487): n is a, c, g, or t
  misc_feature (525)..(526): n is a, c, g, or t
  misc_feature (528)..(529): n is a, c, g, or t
  misc_feature (549)..(553): n is a, c, g, or t
  misc_feature (559)..(561): n is a, c, g, or t
  misc_feature (581)..(582): n is a, c, g, or t
  misc_feature (584)..(584): n is a, c, g, or t
tcaaggggaaattggcacctgagaccggatggagggatgctttggtaagtctttaatggtttactagctgttctatgttctaacggttcaaagggtgaggttaccatttaggggtcttgcataacttttgttggcaacacatgttttctggtagcagagtaaaggtcagcttaggttaatggcttttgaccaagaagacttatggaaaaatgctaatgagcgtatcccttggcatgagaaattggagggagaagaggcaattcagaaccgtatacacgagtgagttcacaacctttatgttacttcattgctacggttaaatgttgatcggtgaagtcgctgcaattacactagcaattgtaatacgcatttttcttgaagtactcaagtgtcctacaccaatgtcccacacatagctagggtatggnnatacaaggagaccctccaaatacataaaaaactaaacaaactcaaatatgctcgtgnnggacacataaccatgtccacatgtctgacacagaactnngnntaacttgtatgcctcgtgannnnncatgtnnnccacactagtaaccataacnngnatgcgtcatgaacagt

SEQ ID NO: 6156 - DNA, 654 bp, Gossypium hirsutum
tcaacctgattttttaacaatagttagatgattcgtgaaggttgtttttgaatgattcaattattcatctaattagtacaattttccaccacgatttaaattaaagtttatttaaaaaataaaatagaataaatttttttattcccctattttcataatgacacttagtaaaataaagaacgaaccaacaagaatttagacacgtattagcaattggtcctttgttttatcattcataaccagccacccatgagccccgcttaaactaattgagaagttccgttgcaagcaacccagttctagccatttattacggatcactcaagagaactattgaggcatgataatctcgtacattctcatgaaggagaatgttagagtaagaccacatagtattatacatgatgacaattaacatgcaatagacctgccacctagctgaccacccaagcaggcctaccatatttattgttagtgacatgacattattagctagagacccttctctctctttaaatatatcttgaagtgtgaggagtaaaggataaatccttcttcctccttaagaaaaccctagtactatccttacaccattttcatgttttccctgcttttcttatttagtttcttactccagctcttcacctatcacag

SEQ ID NO: 6157 - DNA, 557 bp, Gossypium hirsutum
tttgattattaaacgtgctttttctttatttgttctgtttaagctttaaaggattggtacatcttaaaattttagttaaggagctacctttattgctacaagtgcgtatctttttacattttgtttcttgctgcttgcatttctttgttttttttttctttgaggatgctttgtagttgtagatgtaaaaagtttatctgagtcttgcctcaccttgccctttcatatttggtgctgcttcccttactttgacttaaaatttcaaacctagcagatcagtgattccttctgagacactttatgatttatctaagctgtctttcttttggttattagattttgttgacatcaaatcatagctttttggggcaataaaatgctacttttctgtttgtttttagtgtaacaaagttcttacatatctggcttttccttttctgttgggcaacttggtttagtatgggttttgatgggcggcgcgtttacctgctgttagtgtaaaaacagcggtggtggtgagattagatactgtagtgatactgtagcgtgagacaaaa

SEQ ID NO: 6158 - DNA, 606 bp, Gossypium hirsutum
aatgctataaccttgtagctctccaactaatttttatccaatctccacaaactacttgatgaagaatatgtttgaggagataaaatagaaagaaaatggaggataagtagagaaataaagtgaaacaagcaaggggggaaaaaagatggaacactttactaaggttgtaaatgaatagaacattcagtgaacagtttgatttatgttgattatcaagctaaataaacaagcattaataagattgtagattttgaggtttgtttattaaacgaacagaacataaacaaagcttgtttagttcatttatattcataaacaagctctttatgttcatttaaaactcatctaataaattatttaaagcttgtatagacctcgttaattgttcaattattagataattaataatatgattgtttgtgagcttattttatttatttataatataattattaatattaatattttgattattttatatctaagtcataagatatatgattatttattgtttgtttgtttattatttatgaacatattttttatttgttcacgaacatgttccctagtcaatggcaattggaatgcaagtagcagagaaagtct

SEQ ID NO: 6159 - DNA, 642 bp, Gossypium hirsutum
ctcgccgacgagatcgtgaaagagttcaggcaagctttacggagagggaaacaaaacgggaggaaagtaagattggctgtcatcgaccacgtcacttccatgcctaccgtggtcatccccgttaaagaattagtcaccatttgtagggaagaaggcgttgaccaagtgtttgttgatgcagctcatggtatcgggtgcgttgacgttgatatgaaacaaataggagctgacttttacactagcaacttgcacaagtggttcttttgcccaccatctgttgcctttttgtactgtaaaaagtccacaaacaactccgatttgcaccatcccgtcgtttcccatgaatatggcaatggtttagccatagaaagtgcttggatagggaccagggattacagttcttacttagtggttccaaaggttttggaattcatcaataggtttgaaggtgggattgaagggatcaagaaaaggaaccatgaatatgttgttgagatggggcagatgttggtcaaagcatggggaactcgtcttggttgtcccccagagatgtgttcaagcatggtcatggttggtttacctgcttgtttggggatttcaagtgatcatgatgctttggaaatgaggacttgtttaagggaa

SEQ ID NO: 6160 - DNA, 628 bp, Gossypium hirsutum
gatctaaacaaaactcccaggcggtctgggtttgtttcaaactctgcagagtttcgcattccgaggatgcctacatcaagggcatggccatggacactaggagctgtctttcttatgtggctctttggatcctctttacttgtcggagctcaggatggcatcacgcacccagatgaaggtgattttgcttacacttggaaggcaccatcttttactcaaacttttgcccctggattggatttggatgtattaaatgatcttagttttggacttttggccttgagttttctttctgtttgtcgcctccaatttctaacagcatctcttaggagatgtataacagcatgaccacttctgaaacttaacttatttcccttttctccttccatgctggacggaaagtccttaattgttaatgttgaatcattgatcaccatttccatttgcatcaatttgcagtcagggcattacgagccatctggagaactttgattgatcctaataggaatttgagtaattggaatcgaggagacccatgcacatcccgttggacaggggtgttgtgctttaatggaactcaggatgatggctatctacatgttagagaactgtgagtgttcagcacaaa

SEQ ID NO: 6161 - DNA, 603 bp, Gossypium hirsutum
gatacagatagattagtcatcagttacatgaagcaaaactatcaagagaaaggcaatgcaatgcagatacttctttcgctgttagtgcgtctacattctaatctcaaatgcacgttctgagagaataatcattgtatccaaaatcaccatctgttggtttccctttatcatggtcctgcatcataaacaaagataataccccaattttatacttaaatggtcaaaatcgtatatgcatctttgacgcagatattgttattgatgaccaatattcaacagaaaataacaagagatttacttaaaactgctaaaagatgaagaccaagaacttcctttctaaatttaaaaaatgagagaatttatcaggaaaccatgtaataaaatgatagggtggaataaatgaaactgttaaaaccatgacagacatttggagtaactataaagctaatagtatagacgttaataaacatcctgatattacaggaaggattgatgatgagtttaaggaaaagatcaactctcgatttaagaaacattacattagaagagatcttttctactcattcaccaatgtataatgttagtgtaaaatgaatgtccatc

SEQ ID NO: 6162 - DNA, 650 bp, Gossypium hirsutum
atgtaaacgcagttcctggcttgcccccctctttgtcttccataagtataacagcaaagtgaagaaaaatcaaaggattcaaagcatggaagcagaatctaaaagaaacgcggaaagggaaagaagagctagggttttggggttggagaatgcgtgagttttagtgttgggaaagcacgcgtggattttgaaaagctttctttttgtcccatcaatccaaagagagagagggggatcgaataaagggggaaaaaaattaaaagttagaaaaatattggcgtcaaccgagaaacagtgacgggaggctaatatttaaagctccgggtatggaggaaggaagtggaaaggacgacagtttttagcaacgagttaggttagttgttctctctccagattttattcacttttaactttcattatttgtaattgtgtaagctcatttacattttttcatagatttatattctcgattgtcaatcccttaattattataattatatcaattttataattataattataatttcgtttattcattctattaattaattttaattgtaattatacgattttattaattataattataactaaaaaatgcatgccaaaagatgaaaggcctgtttttcattgcttaaaaaaagtacgtc

SEQ ID NO: 6163 - DNA, 602 bp, Gossypium hirsutum
ctcttctaaagacaatagacctacgttacttggcctcaggtgtgaatgttgaatcacgggtgtcagacaaaggtacttcaagcaaactgaaaagtcgaagcaaaatagcattagactataggataggtcgaaaggattaatatgaatagagcaatgactcaaagggagacggattgtcttgggatcagcatataatcgatctgtgtaggatgaaaagttatatgcaggcagaccagcctaaacctgccccatcccaaaaccatgtcagggcataacaaataagactgtacttgccatggacaattagttatcagacaaaagtagtagtctgaaggtgtaggccagccaatagacccactcatgcaggagcatttttccattcatttatcttatcttctcgtatgttttgatgtcatgttccaatcataactctgatatttattcctaaacatcagttttcgcattttgcatctccttttgatttccactctgctaagtttagtagcaagaacatgtgattatttttgtcaatgaagtgaccaaaaagaaaataacagtggttcaaatataagaatgtggaaggcaattgtatcaagcacttg

SEQ ID NO: 6164 - DNA, 603 bp, Gossypium hirsutum
ttattatagtgttaaatcttttagccaaaactgacttttccctattaccaaaactagcagtagaattcaattccttgttgctctaacgttttgatgtattagtatatttgcatgggaaactaaattcatgctttgcaaaatctccatttattaggttggcttactctatgcccaaagggatccttctttctttcgtcccatctctaaaggtattcagaggtgtcttgcaagatggtaagtgagtgaatgtacaccttcccaaaaagaagaactgggagtgtattgtttatgagtgtcttatgctcacatgtccaaatctcggatcacaggcttgtccaggagcgcatgcagttgagttaccaaaacttgcttcagtatctttggcagcggattatgcgtggtcgtagctatcgtcatttgatgctgcaagttggctatgataaatactagaaaattagagaggatgaagcatatatcaaaccaagtactaatctctgttttaacaaagcttgaatctattaggagttgtgatttagttctcaggtcatgaaataaggaattattataatattttcaggattctcttggcgtggatgtagttca

SEQ ID NO: 6165 - DNA, 584 bp, Gossypium hirsutum
tggtgtaaaggtacgctccatttatttccattcttgtctttgcctaatcttgcagagttggaccttagcaccaatgaactttatggcataatcccacctaaaatcagtcagctctccaaactcacctacctcgatttatcctttaaccagttctctgggaaaatcccacctgaaattagccaccttgtacatcttcagaccctccaccttgctggaaatcagttgaacggctcaattcctcgagaaatcagtcagctcaaatttctcactgaccttgccttgtgtagcaacaagctaaatggttgcattcctgcttctctcggtaaactaagtcgacttgtttccttgcttctctataataattccctttctggtcccattcctccagaattgggaaaccttaggaatttagttgaagtttacctggacaccaaccgtctaactgctcccatcccttccacatttggaaacttgaaaaaactgagggtgcttcaaatgtttaacaatggtctttcaggtcccatcccctctgagttagggaatatggaatctctttctgaaataagcctttatcacaacaatct

SEQ ID NO: 6166 - DNA, 637 bp, Gossypium hirsutum
tctgttgtggtccttgtattgtgatcaatataataagttttccctgttacttcatcagttcgtttttcccaaccaggtgggaggggggcagtatacccaccatagttattgactggatggtaaccatatgtcgaatcactgtcaagagatatcccaagccgcctacactgctcaacaaatacttgcagtgccccaaagaaactagcagcattggttctgtccaaagaatctgcacaattgaaacgcaacacaccattttgatgggatcttaagcagaaggccccttcaaagccatcattgtagatgatttcacctctgcaatccttaagtcgctgtcgcgaaggcaaataatcaccttcagaaatgcctatagccagagtaggtgcttttagaagtttccacaactcctcaattgtttgttgttcaccttgtaactttattcgggcatgccagtcataatttattaaatgaattcgagtataaggaagttttccagtggatttaatatggtttagcgattcctcaaaatggtgaactaaaatgcactcagactttccttctccatttctaagcaagttgacacaaacaattggaacaaaagcctttggcttctgattttgggcaacacccacatcta

SEQ ID NO: 6167 - DNA, 612 bp, Gossypium hirsutum
  misc_feature (467)..(467): n is a, c, g, or t
  misc_feature (470)..(470): n is a, c, g, or t
  misc_feature (518)..(518): n is a, c, g, or t
  misc_feature (545)..(551): n is a, c, g, or t
  misc_feature (553)..(557): n is a, c, g, or t
  misc_feature (582)..(582): n is a, c, g, or t
  misc_feature (598)..(600): n is a, c, g, or t
  misc_feature (602)..(602): n is a, c, g, or t
atgtatcatgttatgtgatagcatcctgtctttatttagaataaaagttttggagtttagctgttgaactgtggcggcaccagaatattctctccttctccaacaccccctatccttcttaaaataaacctaatgcttcaactttcaaggttttatccattcatagattcctattcaaacatctcttggtttgtgtttacaaaataaagaaaaataaaacctgacaattatatgttaattaattacatttgtgtgttagaaaaccatatatagacagggttcttgaaatgtttggggaagaccaaaatgttgtaaccaaggccaagctgggcacgttttttttttttaactttgaaaatcaaggtcatgacattaattcaagcaatcatccctatgcttcccctaattcgaggcatgcatatgactctttataaccacttgcgattcttcttctttttcatttgcanccncttcattttttatttttattttgcatcatggtgcataattttggaacnttcaacatatcatatttgacggtaaannnnnnngnnnnngcttctgtattaatacttaaattanattttatcttttcatnnngnaaataattta

SEQ ID NO: 6168 - DNA, 630 bp, Gossypium hirsutum
gcaatggaaagacttgaaactatagccatggttggaccgacttttttccttgctattgcgatgttcagttttgtgtttcagatcggttcattggtgtcagagaaagaactgaagcttcgacaggtctttcaaattttatgtttgaactgagattagcattgcatcctcatacagaaacatcatggattctctttgttgactttctgatcctttccctacaggctatgaatatgatgggtcttcttgattctgcctactggttatcgtggctcacgtgggagggactcatgacacttatttcgtcgctcttcataattctgtttgggatgatgtttcagttcgattttttcttgaataacagttttgccgttctcttattcatcttcttccttttccaactcaacatggtaaaaacatgttccttgatcttcgctgatgttttgtttgtgtttataattgcttttgttgatttctagtgtcaatttagtcatgatttgtgacttgtgatgcttgatggcaggttggttttgcattcatgttgtcagccttcatgagcaaatcatcttcagccacgacagttggcttctctatttttatcattggtttttttactcaggcaatgctccaact

SEQ ID NO: 6169 - DNA, 645 bp, Gossypium hirsutum
gaatgggtgatcttttagctaaaaaataaaaatgaaatgcgaacacttcaaaggcgtatgcattggacaagcaccataagaatataaatcctttaggactaaaagtaattaatttgcttaggttgttaccaaatccatagaattcttcctcttgggtattcgggctttggctttgttgagttcctgagtatgaaaaatcagatgttcggtttccagggttgtatcttctccgagattcagagtttagtaatgtattatatgcatgcttaatcctcataaatttctcttgtgcatttgcctgtataccagaattcgctcagtacaccaaagccgtaaacataaaaccaaagcaaaaaggcttcaaaaagcaaatgcagaaaggaagcaggcttaaatgcaatccaactatgaaggaacactgaagatgcacaaacaacaacctcgaaactattatataataaacattgctttcaatcggttatgaagtcttaattatatgattcgctaatttgacaaagccaatatcttctcaaagcaaaggattttctagttcctggacagccattgttttatgtttaaaacctgaaaacctacactaacaagattgttgaacaatagaacatggcatataatatgagaacttgt

SEQ ID NO: 6170 - DNA, 617 bp, Gossypium hirsutum
aaagttggttaccagacacactcaatctcaaagagcagggactacagactacaaagaagttgtatatctatctgctagatgcaggcagagaaactaatcttctcaactggtgggagagtagtgacaaaagtttcgtaaggctaaattgaggaccaaacattaattgatccatcatccaagatcatgtaaacttttttgtaaatccacccactacgaaaactatataaagaacgtcaacattgcaacatagttctccttttttatgcttcacaaactaatcttccctgtccatctggccccactttggatttccaacttcatgcatcattcacttgagctatgcaatctcattcagcaatcatatgccaaaagacatattggaatatgaagcaggttctataagccatttcattcacaagtatctatatctaactcaagactgaagttggaaagggtagaaatgttacccaacaacttaaatcgaactaaggctcctttctgtacattcttaacttgattagctcaaaagcctccacattgatagcagttttttcaacatgattgtgtttcctaaatgggactttctgttcaacaaggataaggttggtatcaggctg

SEQ ID NO: 6171 - DNA, 632 bp, Gossypium hirsutum
aaagtcgtaaagtatgcaatgctatccattagaattccgttttgcaaaatcaatgtgcataaaccatagctacacaagttggcaaaataggaaagcatatttcatgtgtctgcatgtaacatgtacactttttctttgtgcaagtgttattttgagacattgctagaaggtagtcttttgaaggttcttttttatgtaaatatcatgttgaagttgtaaaaattctattcctcagtgtataagttgggtcatattctatcttacaactttccttttatgtttgctttgcaaatggatatttggcatttttgctacatcttcaaggttacagacaataacttccaggatttattttctcttttgccatccaattctactgtggcctctaaagctaatcaggaggattgccttatgacgaatacgcatgcttttatcatccttgtgatctatttgatattaaatctacttgagatttcttttctgttccaccagtctaattgaaatttatgtggaaaaaaatgcagggcattgatttcgtgcgcataggaagacacgaatctgtgcatgaggaaattaaggggcattgttttgcaggttggaaagtatattattaacgtgttgcagtcagcatg

SEQ ID NO: 6172 - DNA, 605 bp, Gossypium hirsutum
tctcatagtgaccccaattattatagtttacatttgtttttcccaagttctacagggagggtttacaggaattttacatgtatgcaactgaagaaggcattttatacctgcttgaatttgggaagttaaagaaaacccaaggctttgatgcaattcttaccttttggagcagtataaagttgtatgaattatgaattgaataatcatgtatgtgattgtgaagtaattgagaagatctatagaattctttttaatgagaagaaaatacatagttatggatggtgctggcttcacttaactaagcatttcttcgcatctagttagattctaaaaaaaatatcatgatcctccctttttttgtcattatagaggtaatgaaggccttaattgactgccattaagaattataacatatggatctacatcttctccaattggggtttcaagtttctttttactgttggaatgcctcaagttccaaactattgaaaccaccaagtggggtcaaattcccctttattattctgttactattatttaatcaccattcataaattaattaatgtattgaaaaaatcaacagaaataaattgaatctgatctct

SEQ ID NO: 6173 - DNA, 587 bp, Gossypium hirsutum
  misc_feature (536)..(542): n is a, c, g, or t
aatagtgtatgtgttagataaagcaaagaaacaaagaatgtctgtacttcatactggagcaaaatataaaaaatccagtgatcaacatgtgcctacacttaaaatataaaaaatccaatgatcaaccgaaattaaactattcatcaaaatgattgcaattaactgagttaaaacatgatttttttttcttttcttgcaaatatcttaagttttttataccttcccaaatggtgaaagaagctggtgaagtgctgtaattctgtctcctaatttttctttcctcacctgccatataacatatatatatgtatatatatacaagtcagaaaaaaaaagaaaaagtaggtgattaatttactattttactttcacttaaactatattctctttttcatacattaatctgtaaaacaaagactcccccaaattacttcaaatgtctctcttaaattctatttaaaaaacttaaaaatgtataaaaaaaaaatcaattaccataaaaaaaaagataagtgtgaattaaaaatataatcccnnnnnnntgattcgaatcagctgatttttaacctgagaattaaaaaagataa

SEQ ID NO: 6174 - DNA, 628 bp, Gossypium hirsutum
cagtttcttgagccgataaaagaacatcaactattgtcttgctgttttgctcataacatgaattactggaggttagttttcggcgttcatcaatcaagttttgcatgaattcgtctctcttcctctgtaatatttcaagcttcttctcaattttatttaatccaacccatttcaacatgggcacaaaatctacaatgcttgtggctccgctcacttgaaaggactctctcacaatttctttgaactttttctcttcttccaattcatcctctccatccctacaatacctcttcccagcaatcatcctcatcattacattaagagtcaactcgaagaacatcgatttcatctccacgacctgaaactcaccactcccttttgaagtactcctaaaaagcctaaaaaccaaagatttaacttcatccatgcgtatcccgagatacttttgaacacgattcgatgacaagagttggagagacgccacacgcctcaagttcctccagtgatcgccatatggggcccaaacaagtgtagtataatcataaccaaggtgtttaccggcaagcagacgaggccggtttgcgaatacagtgtcgtttttggacaaacattcttctgtagcagacgg

SEQ ID NO: 6175 - DNA, 637 bp, Gossypium hirsutum
gaagaagtcgatctcttgccgtttctggaaaccagcccttatgttatacacatggacaaaatctgccggttcagcaactaccatgaattggccatcggatgaaaagcagattgatcgtacggcacctaagtttcctttaagagtcacgactggcattgagaggtttcttatgtcccatactcggcacgtcttgtcctgatttcccgtggcaaatatgcgtccatctgggtgccatgcagatgcgaacgagtaatctcgatggcctaccactgtggctacagtctgcgaccaaggaacatgcgattcaggttcaatagaactaacatttcttactttcagcactaagcaacatatgatattcttgacaatatttaaaataccagaataaagatcaaacggatgaaacctccactggtttaaccagatcgactggttacactgattgagtcggatgattagattaaaaagaacttaatataaaataataggtaactttaacattaaatattaaatattaaatattttccaaattactagaatctttaatattaaatttaaaatactttgtaaattattataaatcttatcgcacgcgtatatgagtgacaatcacgtaatatgagtgacaatcacgtaa

SEQ ID NO: 6176 - DNA, 649 bp, Gossypium hirsutum
catcgcgagagaagccaacaaaatgctcctacctttttcactggtttactgaaaggggaacaggaatattgtcaatattctggcattgtatgtacatgtcagaaatagagaaagagagagagaatgagataataccggtcttgaaggtataagttgtactcacgaattgttggtattgctattagccaccacaaaatcaacctatagacaatcacagggtttcgaggaggaatccagagacaaaactttagaaagaatgtattaagttctactgtcaagaagacgatacaaaggctgagaacttgaatgaaacgccatggaccaagcaaggggtgccattcatctttgtcccactgggctggcgtaaattgtcccaatgttcgtttcacctaacaccaatgaccaatcaccatttcatgacttggaatttttaacaaactcttatcaaacctgaagaaacacagtaaagaaagtaattacaggtcaaaaaacatactttgccaataatgttaggctggcgacttattccaacccactcataggttctgccgtcaaagtacctaacagtatgcattccagcccaaatacctacaagaaaaccaaataggctgaagaatcatattaaggctttgttaccacaccaggaact

SEQ ID NO: 6177 - DNA, 621 bp, Gossypium hirsutum
aaagccaaatttggtctactgcatctgattcacctgtccacctagaatctctcgcaactctcattagggttgtgcgtagttccccaagaaccttggttcagtaccttgataaggttagcataccctgctccaagtgagtaacagtccatattctagtaacttcgctttaatttgagtaaaatagatcaagtcatagatacaggaaaaaaaatttaataatcagttttgtgatatttattctaggttgatatattatcttaaatttgaatgataatgtactttttaattctttactgcacaaggtatttagatggaaatttggttatttctgccatttgcttttatctctttgtttgcacatgttgcttttttcagatatgtttaattttcttcatgggctgtcaacatacatttccttctcacagaaatctgaatcacttcaggttttccttattacatttatgcaaataaaatattcactatactcaggtgttaagaatcatagttactttcttaggtagtaaattagactttgcagaactattattctgtttcaaatgttatcatgaattattctgatattggacagattcacaggtggttaacttcatcctacaaact

SEQ ID NO: 6178 - DNA, 622 bp, Gossypium hirsutum
ttaagtggatcataattgaacatgcatgttataattttgttttctttattacatgccataatttagttgcaaaatattgtgaggcttttgtcctttgatgatgatttattctgatattttcttctctcctgttaaattttaccatgtcgaagagatggctgtttgtatgtttgaatgcattccgtttatcttttcatgattctagcaaaatagagacacatacacacgtagagatgcacataagagtgcaattttcatattccagtttctacattttgttgtagataatttgatcaggcgtgtaaatgtttaggcatatagcttgtttttatttctaatgcatgaatttctcagaagttttatgtacattgtggcacttttcttctatatggttgtgtgcttcatcttttcctttcttacaggggatgagcgatctgctatctccaattttgtttgtgatggaggatgagtcagaatcattttggtgttttgtggctctgatggaacgccttgggcccaattttaatcgtgatcaaaatggcatgcattctcagctttttgcattatctaaggtctctctctctctttcacagacgcacactcacacacacaaacatacaaa

SEQ ID NO: 6179 - DNA, 646 bp, Gossypium hirsutum
ctctgattttgtttctttttattcctgtatgttttgagcttgaagagatcatcttattattatttgtatgtttttttcccctttttaaataggcagaacaagagacagatgaagtttatgctcagatcactttgcagcctgaagatgtaagtaaatgctatgtcctccttacgtcatgccttttctttttccagtggatagatttgccgagggtgaagaaggttagagaaataatgggttactctaattgtttttgatgcatccttatgttatcattacagcaaagtgagcctacaagtcttgatcccttccccaccgaggctccaaagaggacagttcattcctttagtaagattctaacggcatcagacactagcactcatggagggttctctgttctccgaaagcatgcaactgagtgccttcctcctttggtgaaaactttgcttcattctttttttttttttcacctttgctttatgctattactaatcaattttatactttatactataggaatatggcgctggattaaatatctttctttctatttacttttaaacaggacatgaatctagcaactccaactcaggagttggttgccaaaaatcttcacgggtatgagggggggttcaagcatatattt

SEQ ID NO: 6180 - DNA, 633 bp, Gossypium hirsutum
tgttgagctaaagacaagcattttggcagtctcatcatagagcaagagagggagcctttgaactcaatgacgcgtttgcagtagttaatgcacttcctgccattgctttgctctcttacggtttcttcaatggtggatttgtcccgggactttgttttggcgcggtaattttattttattttttcttataagatgttaaaaaggcccttattggttttcattttttaaatattaatttaaaaatattttttaacctcacttcaaaactacaacactttgacttgattcaacccaactctcaccaaaacggtgggcatgatgggaattgaacagaagtttttgttcctaatgtaaatttcaatttacagggattaggaatcacggtttttggtatggcctacatgttcgtacacgatggtctagtccaccgccgattccctgtgggtcccattgctaatgtaccttatctgcggaaagtagctgccgcccaccaagtaacgcaacacttgtctgcataataatacttcctttttaattcatctttttgtcatgtttttaatttgggttttgtttcaatcaagcagattcatcatgcagacaaattcgatggagtgccatatggcttgtttctag

SEQ ID NO: 6181 - DNA, 1285 bp, Gossypium hirsutum
  misc_feature (645)..(645): n is a, c, g, or t
  misc_feature (647)..(659): n is a, c, g, or t
  misc_feature (661)..(663): n is a, c, g, or t
  misc_feature (668)..(669): n is a, c, g, or t
  misc_feature (673)..(673): n is a, c, g, or t
  misc_feature (678)..(679): n is a, c, g, or t
  misc_feature (688)..(688): n is a, c, g, or t
  misc_feature (691)..(701): n is a, c, g, or t
  misc_feature (703)..(705): n is a, c, g, or t
  misc_feature (710)..(711): n is a, c, g, or t
  misc_feature (713)..(729): n is a, c, g, or t
  misc_feature (734)..(740): n is a, c, g, or t
  misc_feature (742)..(754): n is a, c, g, or t
  misc_feature (766)..(790): n is a, c, g, or t
  misc_feature (793)..(793): n is a, c, g, or t
  misc_feature (795)..(796): n is a, c, g, or t
  misc_feature (804)..(808): n is a, c, g, or t
  misc_feature (810)..(815): n is a, c, g, or t
  misc_feature (818)..(821): n is a, c, g, or t
  misc_feature (824)..(824): n is a, c, g, or t
  misc_feature (826)..(841): n is a, c, g, or t
  misc_feature (845)..(847): n is a, c, g, or t
  misc_feature (851)..(862): n is a, c, g, or t
  misc_feature (865)..(870): n is a, c, g, or t
  misc_feature (872)..(872): n is a, c, g, or t
  misc_feature (874)..(874): n is a, c, g, or t
  misc_feature (877)..(878): n is a, c, g, or t
  misc_feature (880)..(890): n is a, c, g, or t
  misc_feature (896)..(897): n is a, c, g, or t
  misc_feature (899)..(906): n is a, c, g, or t
  misc_feature (909)..(912): n is a, c, g, or t
  misc_feature (914)..(920): n is a, c, g, or t
  misc_feature (932)..(933): n is a, c, g, or t
  misc_feature (935)..(941): n is a, c, g, or t
  misc_feature (944)..(948): n is a, c, g, or t
  misc_feature (950)..(956): n is a, c, g, or t
  misc_feature (958)..(958): n is a, c, g, or t
  misc_feature (963)..(963): n is a, c, g, or t
  misc_feature (965)..(976): n is a, c, g, or t
  misc_feature (979)..(979): n is a, c, g, or t
  misc_feature (983)..(984): n is a, c, g, or t
  misc_feature (990)..(1009): n is a, c, g, or t
  misc_feature (1013)..(1014): n is a, c, g, or t
  misc_feature (1023)..(1033): n is a, c, g, or t
  misc_feature (1035)..(1040): n is a, c, g, or t
  misc_feature (1042)..(1047): n is a, c, g, or t
  misc_feature (1049)..(1049): n is a, c, g, or t
  misc_feature (1055)..(1061): n is a, c, g, or t
  misc_feature (1063)..(1065): n is a, c, g, or t
  misc_feature (1067)..(1067): n is a, c, g, or t
  misc_feature (1069)..(1069): n is a, c, g, or t
  misc_feature (1074)..(1080): n is a, c, g, or t
  misc_feature (1083)..(1089): n is a, c, g, or t
  misc_feature (1092)..(1094): n is a, c, g, or t
  misc_feature (1096)..(1113): n is a, c, g, or t
  misc_feature (1116)..(1123): n is a, c, g, or t
  misc_feature (1130)..(1131): n is a, c, g, or t
  misc_feature (1133)..(1133): n is a, c, g, or t
  misc_feature (1138)..(1160): n is a, c, g, or t
  misc_feature (1162)..(1164): n is a, c, g, or t
  misc_feature (1167)..(1175): n is a, c, g, or t
  misc_feature (1178)..(1188): n is a, c, g, or t
  misc_feature (1191)..(1199): n is a, c, g, or t
  misc_feature (1202)..(1204): n is a, c, g, or t
  misc_feature (1212)..(1221): n is a, c, g, or t
  misc_feature (1224)..(1228): n is a, c, g, or t
  misc_feature (1230)..(1230): n is a, c, g, or t
  misc_feature (1234)..(1243): n is a, c, g, or t
  misc_feature (1247)..(1250): n is a, c, g, or t
  misc_feature (1253)..(1255): n is a, c, g, or t
  misc_feature (1257)..(1266): n is a, c, g, or t
  misc_feature (1268)..(1269): n is a, c, g, or t
  misc_feature (1274)..(1274): n is a, c, g, or t
  misc_feature (1276)..(1276): n is a, c, g, or t
  misc_feature (1278)..(1282): n is a, c, g, or t
acagacatccttacccgtatcagattttttagagttttgatatgaaaaacaactttcgtggtgatattattgacatgcaagatgctactgattctcaagcatgctctaaccaatgtaaagtcttggagataactgaggaattgcagaatcgatttcgatatgcataatttacatctataactgaaatcagattatggagtaaacaacttcaaatccaaaaatcatgcaagaaatacaagtaatttggcgctaaacttcgttggctggcaaagaagaccactccaatttcataggctacaagcaattaatcatttgtggagggggggggggaatgacatctacttctataatgggcgatgcactattacataactctcatcggtggtttgtccaaattggaaaaacacaatatatttagaatacataatgagattttaattaaggaattaagtggtaccttgtggaattccagtgtatcgcccttagcttttcgcacctcgaccatatgcaaagaaggtgccacttgaaatatctaattcacatagaaaaaaattaaataagcacaaaatgtaagatgagaaataaataaaatgtagccacaaattacctccgtggccacgttaaggttccctttcctcccagctntnnnnnnnnnnnnnannnaaaannccanaatgnnaaaaaattnaannnnnnnnnnnannnaaaannannnnnnnnnnnnnnnnnaaatnnnnnnncnnnnnnnnnnnnntagtaagatagnnnnnnnnnnnnnnnnnnnnnnnnnaantnnaaaaaaannnnnannnnnnaannnnaanannnnnnnnnnnnnnnnacannncccnnnnnnnnnnnnaannnnnncntnaannannnnnnnnnnnaacaanncnnnnnnnnacnnnngnnnnnnnaaaaaaaaaacnnannnnnnncannnnnannnnnnnanaatcncnnnnnnnnnnnncanacgnnacgctnnnnnnnnnnnnnnnnnnnnaaannccaaataannnnnnnnnnnannnnnnannnnnntngtgaannnnnnncnnnananccccnnnnnnnacnnnnnnnccnnncnnnnnnnnnnnnnnnnnnacnnnnnnnnttatacnncntaccnnnnnnnnnnnnnnnnnnnnnnncnnnaannnnnnnnnccnnnnnnnnnnncannnnnnnnnaannnaccctaannnnnnnnnnatnnnnnanccannnnnnnnnntaannnnccnnnannnnnnnnnntnnccccncntnnnnnact

SEQ ID NO: 6182 - DNA, 645 bp, Gossypium hirsutum
taacattttgattgctctaactttaaaaaattctaaaatactcattaaattatttcaaaatttttatttttatttcaaaaagaaaagcataatgccttgttgtttaacaataatgccaaaatctaattagcatgcagtagaagtagaggtgtttaggttggagtctagctcaattaaaattttaggaatgtttgttaagtttggatttgactttaccttaaaaattgatctaaaattttggtcaagctcgatgtaaataaaaatattaaaatttcaagttcggccggcccatattcaaattttttatataatatttttataaaaataatataatacataaaaaatactaaaaacattaaaataaatgtctcccagcaatttgaaaataaattttaaaaatatatgtgcttaaataacactgagataagtgcaatttaacagacaaatacctttaaaatagtaacaaaattaacaataaaataagaattatataatatccaaacaataagaacaatatagtaacaaaataatagtaaaatgatagcaaaatagtgagaaaacaataatatagcagcaaaacaataaaaaacaacaagaaaacaacattttttttatttttgtagattcatacgagctgagcttcag

SEQ ID NO: 6183 - DNA, 633 bp, Gossypium hirsutum
cctcatcttcctcggagtgccggtgttgttggatgaccaagagggaaccattgaagttcatttctgaagatgccaagagatccccaaccaacccaagctctggacactcctcccaatcactcataccaattgtcaaggagctattctctctccctcccttccctactatcaccaatgaatacatgttgtccaatatccctctcagagccactaatgtctctgccccatcactcacgtacttctcaatcaaactggctttaccctgtgccacatacctgttacaaaaggagtctacaaagacattgtccatctcgttctccgttccaatactcgatattgccatgaccacctcctcatccttgtgggatgcatcgctaatccacgaattctgtatacttgaattggcttgtatgaagcggaagaccgtcaaactaacttgactatgcatcaaaattctcttgctacatgctaaagcctcacgatcatcagggccaccaaagaaaaaggttgctatattttgcacagagagagagccatgtggttgctggaacccagtttgtccacgatccaaaaatataccgaccgaacatggggcatgccgaataactttttggtttatagtccgtatgacct

SEQ ID NO: 6184 - DNA, 455 bp, Gossypium hirsutum
gatgggagatctaacattaggaatttttgctttgcagcctcatcttctagtccaattactataaaccagaagatgacaacttcctggaatcacaagggcaagacttactacagatattccacagtagtgaccaacaagtcttacaagacattaaaggctctcaagctctcaatatcaaagctttatggtcccatatggggtctcaccaagtctggcaattcttatggtttcccagaatggctcaactctttacctgccggaaagagtcttgagtttgtatacatccatgctgcttctcctgctgatgtctctgtttcaagctacaatatagcttaataatggaagacattgcaaaaaaaataaagggtaagttccaacatggttctggggttgtggtgttagaatttgtgcagctatacagaatgcgtcaaagaaaaaggttttccttttttttt

SEQ ID NO: 6185 - DNA, 613 bp, Gossypium hirsutum
tgctacaccatctgttgtgcagtctatttctgcagctatacaaatggaggagaggtggtatgcttgccccggggagctcaatggaagaagccttacattttcatcaaatatatatagccttggggttttcctttttgaggtgaggagctttattagtctttcatatttgttaatacttccggtttccttctttgcttttctctgcatagaatacgatgcattttaaccctgtattagctattaggtcaaccatactaagagtataagtcttgtcgttgcgtctttgaaccatacattttattgatctgagttattagggtgaatcgtttaagaccgtaacattaaagtatgtgaaaaaactccaatccctgaatccttgcacatcttgatttttcatcacttcaggggtaggtattatggtgtaatggcttatccattgttctattaattgatgattgaaactgaaccaataaaaagggcactgaatgtattactacaatttgtgcctattagggaaaagggggaaaggaaaaatgtgattcacaaaaatttgggacaatatagattgtactctctcactaatgggcgagacattcttcctcacatgatctgg

SEQ ID NO: 6186 - DNA, 628 bp, Gossypium hirsutum
ttttacatggttatgatttaagtccttatttcatttaagtaacttcattataatatcttattttattgatatttttatatttaatctagtttttattatttattttagttttgattctaaatttttatttttattttaatatttatgataacttaagttctaacttttggattttaattgtgttattaatttattattttaaattctaaatttaaattcattaatttttgtatttagttttaaagttaaaattttaatagaaaatttaatttgataatgaatttttgtagaaaatttttatatttatatcatggatattattcttctcaatattttgataatgaattttaaattttttatatttttcatgacctttataatattttatatatttttttgaatttcatgatatttagcggcgtttgtgcgaaaatctttagcggcgttttttcaaataaacgccacaaattttagcagcgttagcaatagtggcgttttttgtgacacttgtaaaaacgcctcaaataattttaatggcacttaaaagcgccgctaaaggcctaaaaaaaagtcccctaacagttaattttactgtagtgattaggggttgtaaagctgtgatactctc

SEQ ID NO: 6187 - DNA, 643 bp, Gossypium hirsutum
  misc_feature (61)..(61): n is a, c, g, or t
tgacgataccatgaaatcagatgtagctgttccaggactatcaatgaccccatcctttatntcagcattagcttcttgcaggacctcaagaacatcattggaaggatcaattttcaaagaggcaggttgaggaatcatactagatgcagcctcctgttcttcacaagattttccattttcctgaacaggaaaagaactggatgttgctgggcattggcatctccttccagggtcatctttcgatgacttaagttcagtttcaagagaatcaatttcagattcagtcatctccaatgctttcaaaatgtcacccttccatagtagcaatttatttatagcggtagattgaacaaaactagaatccattgtactaggctcatcagactgaagcaaatcaataagtgaagagcccatattaataatcgagttaatatccaatttctctaggctaaaagatgacccttccagctgattttgagacccaaagcttggagaaccacacaaattattaacatcgttatcaatatttgcagctttaccaaatgatttctcttccacgcctgcaataaccaggaacatgttttggcaatcaatgagacaaaaactactcaacacaaggaaaagggcacagatagcagggtta

SEQ ID NO: 6188 - DNA, 601 bp, Gossypium hirsutum
tcacagcactaagcaatgtgagatgtcaatttctcggtatttttctgaactaaacggtttatggcaggagctaggttattaccaagatttccaagccaactgtactagagatacagtaaagtttcagaagcttgtgaaaaaaagagagggtttacaaccttttggccgggttaaacactaagtatcatcaaatttaggttcaagttctagaaaaaaatccttttcctctcttaaggaagcatactccaatgtccagcaataagaaagcaaaagaggtgttatgctttatacaacaccaactgaaaaggttgggttgatcgttagtggctctcaagagctaaagaaagatggaaaccttgataaagataatatgcactgtgattattgtgggaagccacgacatactagagataagtgctggaaattacatggtcggcccactagaggccatggaagaaaacaaaataagtcaaatcagggtcgagcaaacttgtctgaggccgcagagtcatctatagaaactgcatccactggaacattttcttcggatgaaattcgacatctcagacgtcttctatccgaacttgactcttcctcgaat

SEQ ID NO: 6189 - DNA, 672 bp, Gossypium hirsutum
cgagaagaacaatgctcctgccaaaaatgcattcaacaaaacaaaagcaaagttacagtttaattctctcttgaaactgttcttcaaaattttgcagcatgggtctcttaagacttaagctactcggcttcagttcaaaataagcttgaattcggttcaatcagtgtcgacttcatgcttgaacaactttagccattaagttagctaaattgtgagtattctaatattgaaaatctaaatttgaaccccaactcacgcataagcggtcaaggttgaaatgaaattaagctcagtttttactaagaaaaagagcttaatcaagcgagcttaaatagtttgatttttattttgaattgaattttgaacctcaaaatttgagtcaagctcgagctttttgcagctaagccgagtttgactatacccctaatttagacaaagaacgttgaaaaaattagtcacggaattaacacaaactatacatacctgatgcatctccttttctgcacaaagtccatctgcacaagccgggaaaataataaacaaatatcacacaaaattatacctaatattatcaatgacaaaaacagtaagaaaagtaagaaaagttcatctttctgaaagtgaattttttttaaaaaattttgcaagagaaattaagatatcttgtcaatc

SEQ ID NO: 6190 - DNA, 386 bp, Gossypium hirsutum
  misc_feature (61)..(61): n is a, c, g, or t
  misc_feature (64)..(64): n is a, c, g, or t
gctttttctgtctcatctccagcttagagctaattgaaccttcttctttgtgctctataantgncaacagcctatcctcattggctgaaaattttgcccatttcttgtattggtcacttaagttaagaatggccaaaaaatatcgagcaagttccttctgctcaatcagaccatctctaattgcccctgcacttgcataaacataattttttttatttaatagaggagatatacttgagccttaaaagagagaaaaaataatggttatcacccccacctgttaatactagtttggagcaaagctcagcatcatgaatcatacagggcaaaataccaggagtatccaacaaatagatattgggatggctaccaatctgaagatgtaa

SEQ ID NO: 6191 - DNA, 489 bp, Gossypium hirsutum
gctgagaagataatcctacggtgggattcaaccgcatcggaggacgcaagggagagaatgatctttgaaacggaccgtcaagaagccgatctttacctacaagccgtcgatgaaatccaacgttccttatccaacgtatcaatctcaacctcttcaaacgccggcaagaacgctaacgccgtcgatgaccagtcaaaagtcaacaccacgatccagatcgccatggctcgtctcgaagacgagttccgcaacatccttatcactcattcctccgctttggaaactgattcccttttagatccgtcgtcgtcctcaatttcaacgccttctcaccacgaactcgaagaagatgataccttaagtaacgacgatagcagccaccacgatctccttcagcttcagcttcaacactgtgaatcctcggatagctcgacttaccgatctacgagcagtatccgtgaagtggatctgatgccgtccgatcaaatt

SEQ ID NO: 6192 - DNA, 642 bp, Gossypium hirsutum
ggcagtacaaaaagactttcattaacatgaacatgtgtatataagcagatgacttacccccaaagcatagtatgatccattataccacactcggttttccttccttccttcaagaaatttcagtacgatctggtgaaaatagtaaattgaaacatgtgagaaaacaagatagagttaaaaagatctaaaaggtttctctcattcacctgtcccatcctatcccaaaatccgcggcaggttgctacaaatatcctacttgtgaagacctcatttatgttagatatagagtcaatcagttgtgaactcagcatctgcattctctcacggatttctgcctctccatcttcttcctttatttcctcaagtatccttttcagtctcgtatttctatttgcttgtgtctgaaacagccatttgatttgagtgttttccattttcaagtagcaaaagaaagaatacaagaaatcatattaaaataggacttacattgttaacaagcttctctactgttgcctgcaagtaatttttgtactttgttctcaacatgacagtgatcccattcatctgctctccaaacagtgacttcttgtctcctgtgatgggcagacaagctgcccaagactttaacacatcctccactct

SEQ ID NO: 6193 - DNA, 643 bp, Gossypium hirsutum
  misc_feature (66)..(66): n is a, c, g, or t
tgacatccacaacttattattaaataaatcatgttcagataaatagaatagtgaaccaaatatttntggcgaacaccactgatcaaccaaattatatacctgactagttggaaagcagacatggtcatcacagatgatcctaatacaaggaaagcatcacattctcttgcaacttccttggctttatcagctctttccttgggcacattgtcaccaaagaagacaaccttgatgtttaaatacacaacaaaaacattaaaaaaagtgtttgtatttcacttaaattttaattgtacaactacttgacccaaatcagtctcaaactaaatgggcccattgcacaacaaaatcaattgtcattttctttcaaatgtacaattacaaaatgtcaaactaacagcaagatcactggggcaaactatcaatatgaacaaaataagaaatgggaaattaataagaacgcctcctccaacaattacaacacatattcaaacatggatgtggggatataaccctcaaaaagccctccaaatacatggaaaaacttcaaatatttaaaacatatctgcacacttagacactagtccaagtaacatagttgttcatcttaatagttttaaagcgcacacgcacatactaaaaa

SEQ ID NO: 6194 - DNA, 633 bp, Gossypium hirsutum
ctcttggcttgaacataagtgggcaaacgcttttcccccaaatatacaaacacgtggaacgaactttttctttctttctgaagcactcatttctttcatcttcttgtaacggtaaacaatacccaaaatatttagcagctgacgcttgtattcatggatgcgcttcacctgaaattcaatgtagtatacattttgacaaagcattcagatctaactgtcttgagatgactatctgaaatagctacaatggtctgaaagtattcataatatttatcacatacaaatactgaatgacggacaatattatgtcgacaatatgagctaaaaacataaagtttgaggaaagcgtagttgacaagagaaattacctggatgtcgaacattgaatcagggcttactatatagcctgtcctttctttaatgagggatgcaacttttaacttgttgctcctttttgcggccctccattggatctgaagatcctcgttatctgcaaactatgaacatatgccataacactgattaggttctttcataataacttgaagatccagatgcttccttgtacatacagtcattcaaattaaccataaaaaatgctcatctagtatttttatagacaaagacacaaac

SEQ ID NO: 6195 - DNA, 586 bp, Gossypium hirsutum
attcgtcatccatatcaggtccatcaatagataaatcaggcaatcttttctcatctgaccttgtttcataatccctcaaggactcatttacctcagattccccattggatttgagtatgtccttttttgtcctctgaccatttacctttacttcacatgtatgcaccaacagatacacctggaaaacaactcagctttcaattcatacgcttcaccacaaagattcatatttacttttaatcattacaagaaagccttgatggttatactgattttgttcgtgacttaattcagtgtcccttttatattaaaaggtttgagctagtataagacaaaacaaggccttgacctcacatgtataatagactaaaaattgcaaaacacaatgcactgaatgaaagcctaaatcttattcaagcattagattccagtataagatacagagatcaagacataaaagtaatataaacatagaagacttcagtttcatagcgtccttgtaataattaatcaaaaatgaatttccttgattagtcaaggagaggggaaatgcaacttaccatatctcgcatttgaaaggagatgt

SEQ ID NO: 6196 - DNA, 646 bp, Gossypium hirsutum
tgacgttgagatgaataaaatatattcatttttctctttgtttctatgaatttgatttacagggtttcaccaatgccgatggggttaccataacctctctgtagttgaagatgtagttgagaattacaggaaggcccagatcccacttgatgtgatctggaatgatgatgatcatatggatggccataaggacttcaccctcaaccccgtaaactaccctcgttcgaagcttcttgcattcttggacaaaatacataacagaggcatgaaatacattgtcatcattgatcctggaattggtgttaattccagttatggtgtataccaaagaggcattgccaacgatgtatttatcaagtatgacggtgagccttacttggcccaagtgtggcccggggctgttaatttcccggacttcctcaaccctaaaactgttgcatggtggggtgatgaaatcaaacgtttccatgaactggtccctgttgatgggctttggatcgacatgaatgaagcttcgaacttctgttctgggaagtgcacgataccgaaaggcaagcagtgcccgagtgggactggccctggttggatttgttgcttggactgcaagaacataacaaagacgaggtgggacgatccaccatacaag

SEQ ID NO: 6197 - DNA, 620 bp, Gossypium hirsutum
attgtgaattcaattcaagggttgatctttaatctgattatttgtaccattaagttgattattgattattcatatgtatgtacatgtgtttatttctttgctgttttgttttttttcctggtgcaattgttatgaatgtgctgataatatgccttaagtgagggattgagtaatgaggaattttgggagtgatatagaaaaaaggggcacagatgagatgttttgtcctgcagtttctttgattgaatacgggtgagaaatgttggaaaggcttcaattcaaaattgcttagagagacccacttctatttggtatgccttaatagcatttggagttagaaaagaaatgtagattttaaatatcattttcaagtttaaacccacctagaattttaatggtcatgtgtgaaaaaacgtgcagacgaatttgatagcttcataattgtgccattttgttctaaatcatgtcgcactctgtcgtgttcatttttagtaggctgtatactttctggtagttataaggataatttcccattcatgggtttatgaattgccagcagcagaccatgttaacaactgagtgctccttggctttgtattctaaggtatcacaatcctccc

SEQ ID NO: 6198 - DNA, 626 bp, Gossypium hirsutum
cagtgaaaagcagttatacatatgggaagcttccaaaatgagttcatcgaagtttctccatctattcacagatcattgcgccgcagtcaaggcccttgcttggtgcccatatcagcataatgttcttgcatctggaggaggctggaatgataggtgtattaggatatggaatacacagaaaggaatctgcattcacagtattgaaaccaaagcacaggtaaaatccatctgcattattcggtttttttattcaactattagtaattttctgtaaaatgagcagatttctgggctggaatggaacagacatcacaaggagatattgagtagccatggatacagtacaggggaggatcaaaacaaactatgcctctggaagtacccttcgatgacaaaagtgggggagtttgggaaccatgagcccagaattatcaacctatgccaggtttttaactattcaaacttttaagaatccagtaggaaatttgtatgaaaagaaatttgaagtttcttgtattttcctgttgtagagccctgatggagtaactgttgtatcggctgtggcagatgagactcttcggttttgggatgtttttggaccccctatgactggaacttcatggcat

SEQ ID NO: 6199 - DNA, 609 bp, Gossypium hirsutum
actaaagactaacatcaatgtgaatgcggaaaacctgaaagatttaacagttctggacatggttaacaaatcagaaccagttaatacacagatgaaaggcctcttgattcaagcaagagctctagaatttcactcgattcagatcaagggtactacagattccatgaatcaaccaagtaccaaatcaaaggttagctgttttggaaacgtgataggattattgaaagggcagaaagcaagtatctccacggaatcaagggatgcattgcttgtggcgggtgcactgatagcgacaaccacattccaagcgattctgagcccgccaggagggctgggtcagggtgagaacaatgaagggaaggtggtgatgaaagcttgggtatacatgatattcgtaatcttgaatggtacttcgttttgtgtgacagtcataaccatatttcttcttctcccacacggcttctttggttggctattgacggtatccttaggtctgctgtctgctggttacctggtcagctcaatggtcatatcgccaaacctggaatgtgctttgtttaatttgggtttattcatactgtttgtagcgttactagttgtgggtattct

SEQ ID NO: 6200 - DNA, 637 bp, Gossypium hirsutum
ataagctagtataacatttacgtgtattttcttttttcttcatacgaaagcaaattaacatatatacatgcatgcaaaattttgaagaggggattcagcatcctcatgaaattgcattattccatttttcaagatcatgtcattaactttatatttaacatcaacaaatgaaatttcttcactacaattattcactcaaagattagcggggcttttagcggcattagcagctagtcatctgatactgatccataaccatggtcatttcttcacaagcataaaatttagactagcatttatgaatgtcacaaatgatcttttctttttttataccgatcctgttaatactgacttggttacgaaaatatatgcaatctgtctctatcaagagttttaagtctatcctggccggttaacaccccatacttattgatgtgttcaatggtatcatgtgtttagatatatgataaccttaatgtaacgtgaatgtagtggaagcttgtatgaataaaacaaaactgtaaagatagtgaaactgcattttgtaatcttctttgacatttcagtactataatatttgtccgctcctaacagctaggttgtaaatatatcaacaatgtttgcattggacatatac

SEQ ID NO: 6201 - DNA, 588 bp, Gossypium hirsutum
  misc_feature (20)..(20): n is a, c, g, or t
  misc_feature (582)..(583): n is a, c, g, or t
ttttcgatccctgcgagaantcatcatttgattgttggataaatattaacgaggcaatatcgaagacaaaaaaatacttaccattcgggttgtgaagtcgccgaatgattctttgggctgtctttttcgtttccagtagtagaataaaggctcgaaaactttttcgagatcttgaactttgactttgttcataaaagttcttgctaattgggtttgattcggtgttcctccgagccaaatctaaacaaaaaaaaagaagggggggaattactgagttatcctaccaagtataaaacggcatcgagtcaaataatcgaattacctgataactgtttggaccgtcaccaactagtccaagctcagccatgtatggtctggcacaaccattagggcaaccagttacccttatcactatggactcactgtacttgagtccaacctgaaattaggcagtgccgatctatttattagagttccaaacccgatcacaaatacagataattgataggattctttaaaagggtcaaggagttgactgtttaagctcaatgatcatacaacgcaccttctcaaagacagctnnacacg

SEQ ID NO: 6202 - DNA, 627 bp, Gossypium hirsutum
tcaacatcgaagactcctttccaaatgcttccaaaacttacaaaatcaatggagaagatgttaagggctattttgctatggattacccatttaaagcattaagggataaggtcacaagtaagtgtctcaaattcttcttgtcccccaagaatatatgttttgctaaggattacccatctaaacagcttcttctttttttcgccaacagttgtccaaaatatattgtctcgaacagatgcgttcgacaatacaagtccgctgtctactgttgaggaggttttgcaggctaggccgccgttgttttggttgaatgttcaggtttcaaatttctccccgaccgacctgttctcttgtcagcagctaataatatggtctcaccacctgtttctgtattgcagtacgacagtttctatgatgaacacaaactcagtatgtccgactatattgaaaatactattggatttcacagcatacaatacctttcatgtaccgagattggtttcttgaagaaaatggcgaagaaggtaaccaatgacacaagactggtcttgacgttcctcagtcccgatgcaatcgagcccacggagaaaaaaaaatatagcgacatattgaagaatctcaaggccg

SEQ ID NO: 6203 - DNA, 621 bp, Gossypium hirsutum
ggggaaaccgaatgtctaaaccgacaatgagatagtcctccgattttggtcttaaattaagctactgatttgatttgttcatggtttgcttatctaagctgtgtcaatctagcatcgttgttggcacagcttttaaggttaaaatctgtttcctacagcaagaacaatgctaaacataaaaaataaaggttaaaagctgtgtcatatgattctctttgctcgctactctttgcgcgtaatacttgtactaatcaaaagttcacagtctattttatatttcaatttttttctcctgaaattttaaacgtcacaaatttacaaactaatatataaatagttttttctttgatttttgacattaactattagattaacttggatctaaagtatgttctactcattaataggtactaatctactgtaccgattatcgaatcgtcatttgaaacttactagtcgaactcaaaaaaactttaagtttaaataagaattttctaataattcattcaagatttgaatgaaaacatttaattaaatagttcaaccatcattttgaaatttttaaaaattaaattatcaaaatattaagttattaatagttgaaagaccctttggtgaaat

SEQ ID NO: 6204 - DNA, 407 bp, Gossypium hirsutum
atttgctctaaaaacagtttctaagcatataaattccttgaaaattaggcatgctttgaatcttatcaagcaacaacagggcctttttttttctgtatatgcttagcctcagtctatactggaagaaggtcttgcacacccacaaaaacaacccttctttcgtcttccaccccgtcttccaccattgtagataaagtcccttaagaggacaccggttcgggttttccctttgttcttcctttcatcttctagtttcagcataacgtactcaatgctctgcacctcgaactgcaaccttccgatcttttcagaccctttttgtgcctgctcacgtacgtttttcaagttgccctttccaggtccttccaattccattgagtttgttccgtctaaagatgaactccctt

SEQ ID NO: 6205 - DNA, 613 bp, Gossypium hirsutum
gattcgtacttgggtgcaatgatgatgaaattatgctgtttcactggcaccttttgtcttttctggattaatttaatgattttgatgtatcgtctcttccattaaggcttctacaagttggtaaattatacacttaatttgactcgttagcatattctcatgccattttccttaagagttttgttgagctcatttcaatcactctcatcatctgttctttggcaggttgcagggttgccaactaatatcaatttcctacaaaagcttgctaaccataaggcatttgaagagggcaatgttgaaacgcattttattgagcaccataaagatgacctatttgttgatcctaataataaagtaatttatgaggatgcatatagtgcagctagacttggagcaaagctggtagctgcttgcctttgtgaaaaggaacgttctgctatgaaagaaagccattctggtaagttaatacttcagattttatcttggaatcattactagttgttgcttagcatcctcttaatatttacagcttcaatcgtgttcaggggatcctagcttacttcccatatggtatactcatcctccattcagagtcaatcatcatgcacag

SEQ ID NO: 6206 - DNA, 612 bp, Gossypium hirsutum
atggctgttattcatactataatgtcctaatataacaagctggctgtgtcaggatatggcctgtgacacattcttgaaaattgttcagaaatgcaagcgaaaatttgtgattgttcaggtatcatctacttcggcgttttgcctcttatggttataatatcttatctgtgcacgtgcatgcatgcatgtcggaacctgttatattgatgaactgtatcttgttaattcaggttggagaaaatgaaccatttgtttctgaacttctgtctgctcttgcaacaacagttgctgatctagagcctcatcagattcattccttttatgaatctgtatgtctcttttcaatgcctctactgtccggatctttgcatgtctaatctgttgctgaatgagctcaattctcctttttgtgtttttcttaattttaaattttaggttggtcatatgattcaagcagaatctgatccccataagagggatgaatacttgcagagactgatggcacttcccaaccaggtttgttattgatagacataaggttaccttttttgtttgctcgtatatgtgcatgtgtctgtcattgcatgcaaatgtggtgaggttgtgctggta

SEQ ID NO: 6207 - DNA, 365 bp, Gossypium hirsutum
tgcatataatctggagttcacactaggagatgctaacaatgcctgtgaaggagattttatcgtagaagttcgagccggatcagtagctcagaattttacaataagaagtgatgggacaggatcagcagagaaatcttcaatcaagttcgtggtagattcaaatgctacaactccaatcagtttttcaagcttcacaacaagtcagacaaaagacggtattttttgcggtccagtggttgacgatgtagtcttgctctcgctctcttccaatagcctgagaatcgtaatcaaccccaacattttgatttctctgttattgctcatagtgattctatggtaatgcgctctagtatattgcaacttca

SEQ ID NO: 6208 - DNA, 569 bp, Gossypium hirsutum
  misc_feature (283)..(283): n is a, c, g, or t
  misc_feature (290)..(290): n is a, c, g, or t
  misc_feature (345)..(345): n is a, c, g, or t
  misc_feature (388)..(388): n is a, c, g, or t
  misc_feature (431)..(431): n is a, c, g, or t
  misc_feature (535)..(537): n is a, c, g, or t
caaaacttctattgcaccattctagtgcaatcgaggtagaaaccttgtttctttgaacgaagcttttcaatttttccagttcaccaacagcagatagccattctgttggaatctgcatggttatagagtctggatggcaagcatgccgaatcttactgtccatctatattaagccatcttccgacatattcttctctttcaggcctttaaacaatgcattgtaagtggtcgtatcaggcttcgccccatttgcttgcatatcttccatcatagataaagcganttttganttcgttattcttgcacaaagattctattagaatgttgtatgttatagtgtttggnggaatcattgatatggaactcatgtcagtgaaaagcttcatgnctccctttgtttttccatttaagcagcacgcatgtagaagcgntctatatgtggcagtagtagcacaagaccgtccttaatcatccgtttcatcaccctaagagcaagtgccaaatccccacttttgcaaaaataagcgatcaatgnnntacaggtgacactatcaggcttcattcccact

SEQ ID NO: 6209 - DNA, 612 bp, Gossypium hirsutum
ttgtaattttatatagttgatgggtgaatatgttaatgagcaatcattggcagagtgcgttgttttgttctgtattagatgcttttatttgtagcatatttggattcgatatgcttctaaatcttttgagttgctcttattgatgtatcttcttgtccatccttgctatagaggattcatactgttaattaaatttatcactaccgactttatgtttaaaattagacagttgcgggttttttattgtcttcagtgtgtcttcatatgttggatcaccctttgtgagtattttagatgtattttgttatctaacactctgccatcctattttagatgttgttgtggaaaagggtgccaaagaagctaccatctttcgtgtcttgaacctccccttgaggagtttcctcttggagcttggtactgtctagcatgtgtgaggaaaaaattagaatcagggatttattcagtttcgaagggaatagaagcaatttgggattctagagaactggaggcttcggaggatggtatgggctcaatgaatagtcagcttatttccatgacttgtttttctttgctgacatatttctataaattgtgccatagttgtttagg

SEQ ID NO: 6210 - DNA, 628 bp, Gossypium hirsutum
atgctttagttatgtagtttaggaatatatgaagaaaggattacttctaatgtctggtgagtttttgtttccaggttaagcttatttgctgccagtctgccaaggatgttacatgtggtctcctgccaaagtctccctcagccgcatccagcatcatattggacggtaagtcttctttaaagctaagtgaaatggattcatatttgtgttatgtagatcttaaatttgacaaagagaaatggttcaaagaaagttttttaatccttatcaggtaaaacaattttaagctagtttaccaaattggtgggtttgagattaaatacaatatgtctagtttaccaaattcatacctaatggtctaaaatattgctgctacacctttatgagcacactcacagattactaagctacacaaactgaatttgatctgatctatggtatcgattctgtttaccaggatatactttctgctgtaggtggtattatgtgggtcagtgaatggacagctctgaagaatcctgttgctcagcagttttagctactctttacagtgattacatgcttgcgtcttagactgcaaagataacccgtcaggatgattcattcaaaccatggtccatcagatctt

SEQ ID NO: 6211 - DNA, 671 bp, Gossypium hirsutum
  misc_feature (135)..(135): n is a, c, g, or t
  misc_feature (623)..(633): n is a, c, g, or t
  misc_feature (635)..(637): n is a, c, g, or t
  misc_feature (639)..(649): n is a, c, g, or t
  misc_feature (655)..(660): n is a, c, g, or t
  misc_feature (664)..(665): n is a, c, g, or t
tctcatcttaataatcatcaacatgtgacaaaagactcgtgttcaagacttcaatttacactagtctcgagttagatccttagacaacccctatacctaccctttaatagaaaataatcctcaacattcccttgntccatatcctcctctccctccctaacacaccccattttcagtaacaccttaagctccaaaagtctaatattctcagcttgaagaacaaaagcttgcatcaaaattctctcaatggatttcgaaaaagaatctccaaaacccataaatatgagtacaaaatcagatgaaattaaaaagaaatacaattaatgagagagaactgagaagaagactacctaacttgtgaggaggaagaaggcttattagcagctgaacaaacgatggaagaggagactgagactgatgatggctttgcatgaaatcttgtacttatattagacggtgcattctttctataaacggggttttggaagcaaaatctgaaactactgtacttttgtctaaggtttgaggggccaataatgtaacaaaattgagccatggaagccatggccacacagcaacctggaacttggggggagttctgttggtttggttcgttacattcnnnnnnnnnnnannncnnnnnnnnnnncccccnnnnnncctnncctctt

SEQ ID NO: 6212 - DNA, 559 bp, Gossypium hirsutum
tgaacattattatatagttctgagttctgactttctcaccttgattagacaagtagcagaccacagttatgacagtttcatcagcttttcccattatttttgacattgtaaagatatactctcgcgttttggaagagggtgaaaatagaaaaacggagccaacgttgactgtatttcggagttgtaaatgtcaaattacgaagcgttcgtctataagttttcgctgcctgattgttagaactcctttagctaatcttcaaaaacccgtctctacaaatagcatctctgatttgcttgggccaacagattcttagtaaattaatgaaattgaattaattatgagagcagtgcacgcaataataaggaaaccatttgatcttttaaattctactagtgggttagcaaaatgacatatctagacagatttttgctccgtcgaaaattcaagaataagacccaaaaacacggaaaccaaaacccggaacgcagatgcagctaggcccaaaagacctaaacagaggtctaaatccaattcaatttttgaaggaatgaacaactc

SEQ ID NO: 6213 - DNA, 611 bp, Gossypium hirsutum
tatcttaaaaatgttattaaaaaaagctaaatactaagaagccctttccttttccaaatatcctagataggctcctatacaaatttatctaattaagcccttaaagttctaatcaaataagttcaacactgaaagaaaacatgctgttggtatgtaacactattccttttaagaaatatacttttatttctgtaccttattcccccctttgactgttcctgggtttgccttccggtcagcatcctagtcacaccagtaaagaaacatttaaacaatttcatttttttccccaaacagagaaaaagtctacttaaacatcaggaaattcattaaaataaccaaccagttttgcttcaacttcagccaattcttcagcctcccttaaggaaatatagacagatcataacatgattaacttacggtaaagcaaagcttacctaatgacacatgacaaatagaaaccaaacccaagaaaatgatataagactattggaagagactaaagaggtaataaaaagcattacccatcctccataaatccatcccataaagaccacaggccaaatccaaagaaaagcacagtcgtaatgtgatgtgtccatttcctagaa

SEQ ID NO: 6214 - DNA, 608 bp, Gossypium hirsutum
acgctcttactagttctggtagtgtattctgaaatctttagtttttttggttcaaaatcatgttattttctttggttcaacatctacctttttgtgttggttgattttactgtcattgcagctcgtgcctttccgaataccttttggaggcagatggagccttttcttggtttcatatctgatgcagatattgcctatttgaagcagcaggtattgttgcttgtccctccgattaagattgatagttgctgttaccataagaccttagcttattttaattaatatcttgtgtgtctctcaaaaccccttaaggtattcccttttcaggagaaaggattattgggaaatcattttagattaaatcttttattgaaatgctttacacatgaattattggttgccatttgtgttttatttttggtcagtatagggtgatttcttttcaacatggtaggatgaaaagtggaattgaacctagaccttgaccctctgttgtcactacaacaggcatgggttattgttttcatcaaaatcttttaaaacaaggcatgagataaatgaataaattcttgttgtcttgctgatatatattatacgaatgattgtca

SEQ ID NO: 6215 - DNA, 621 bp, Gossypium hirsutum
attatatatataaatgctgtacgtgtgtattatattggatttctttcaaatactatctggatgcgtgtagtattttaggttgctatatcatctattttgcatcttttaggtgatttttctgttctgttttggtgttatatttgcagtctcttgttaaaaccattttgctaacttaataaaactcctttgctaacctaagaatcaatatcggaacaagggataaattggatggaattaaagactatagttgattaaattataaacttaattctttaagctttggtatttcatactagatttcatgctaatccattttacgatgctgttatgttggacacattttgctgaaatatctaatgttagatgttttatcctgtgaagtttaaggagctaagcttatattatttgtattctttttataatgttatgtcttctagcttttatcactacagcaaaatgattcaatatgtagatccttatctaagccttttctaaaaccctgcaatgaagcacaggttactttgctagttattcatgatacaagtacacatgtatatttacaaatatttttgtactgaaccagaaaaccagaaatgatatgcccaaccactgttactaatt

SEQ ID NO: 6216 - DNA, 636 bp, Gossypium hirsutum
aacttgttaaataaattatcaaattaatgttttttattctttttatttcaatccgttgaattaaaaaagaaatccatgttataacgataatgagatcttttcgaatttcataaaattgaaaaatccttaaataaggattttaactcttagaatattctatcaaataagtcgaaatagaatggaaatgctaaataaaaccaaatatgagctatagaaatgctaaataaatgattatacaaacctaactaaattaaatccgagatttcatagaacaaatggctcaagacaacatggaaatgagacacttttgagttttctacccttaaaactgtaaccacaatgaagaaacagccaaacttcatgttggtttacatgttccataagcaacaaaaacaaaactaacattaaaacaacataggagtagccaaaaagaaaaaaacaggggatatattttttaaggactcgttgccggacagccagccattttcaatggtgttttaagcatctttcttctccacgagcttctcaatcagatccgctgcatcttgaacggtgacaatgctttgggcactttcttcttccacactgattccgaactcctcctcgagtcccatcacaatctcgacctgaatcaca

SEQ ID NO: 6217 - DNA, 647 bp, Gossypium hirsutum
gatcgagtcggaagacaacgaggtccaggaaatacgaagacctggaatcctaaccgatgcttccaagctgatggtggcaaaattgatcgatgcatatcttgctgaaattgcaaaggatcccaacttacccttgtcgaagtttgtagacctagctgaaatggtgtcttgcatctctcggccttctcacgatgggctttaccgagccattgacatgtaccttaaggtgagaatcttgccaaactctatttttgtcgatgtacttacaaaccgattctgttgacttaaaatccactcggcttcaatgcaggagcacccagggatcagcaagagtgagaggaaaagaatatgcaaattaatggattgcaagaaactatcagtcgatgcatgtatgcacgctgtgcaaaatgagagactcccattgcgtgtcgttgtgcaggttctgtttttcgagcaggtaagggctactgcttcatcaggaagtagcagtcctgacttgcctagaggcctgaaggatctaaatattggatctcatgggagctcaaggtcagcagcaacccacccggaggaagattgggatgcagtggccacagccgaggaactcaaggccctgaaaggcgaaatagctgccttgaggatgagcaacagca

SEQ ID NO: 6218 - DNA, 622 bp, Gossypium hirsutum
ttctttgaatacatcataacttaattcacggatttccttttgttttttcttttcttctccataattttctttgaacatttctctcctactcacccttgatccattcgatttatgtgatagtttgtcattctcattgaaaatgacaaatatttgttgtacataaatgattgaattgttgatttttattcatttcttatatataagttgcccaacctttttaagtcaacaatttaatgaaaatgtttgattgaaagtttaaaagtgtagatgttaaatttttaatttttatagttttaagataaaattcaaaattaaaccctttaataaagtataatatatatatcttctttttttgaaaacttaaattatttactgaaaatttaaaaataaaaatctataaaagcaattcccctcaatcattaaagttccttattgtgtttggttctgataattttgcctggcatttctcacagcgtttacttaccttgtccctcttgatgggaacaatgattaaattgatgtgtttgtcattttatctaaaaattatattttaaaataaaaatccaactaattattcattttattcatttatagattaattgattttttgctcaacccattc

SEQ ID NO: 6219 - DNA, 569 bp, Gossypium hirsutum
  misc_feature (514)..(517): n is a, c, g, or t
  misc_feature (560)..(562): n is a, c, g, or t
agcgagctaatcttcaggtgtagagccagtgctgtcctgagcactattccaagcatcaatgccaacctgaacagaaaataagcacaatacttaagaagtcaatagaccatggctgacagaatccagactgaaggagatacagaagatcaccgaaattcatgttagcaaatcaaaacaagaattcctgcatttcatttccaggaatgctcagatataaattaagaacatacctttccaggatcatcagttaatgcatccaacacatcctcggaaccatctttaccagctgcaatgtgaagaggagtcaaacctccagggcctagtacatcaggtctaaacaaggaggttttatcaacaccagcagcgactgtcccgttctcaaatcctaatttatctgaagcgttctccggaataaatcttaaaaggagctccactagaggtctacaatttttcctaacagctctgtgaagaagactcatctctgttaatgcaaggtagatagagtggtgctccnnnngagcccactgttccatcaagaagaatattagaagttctcactnnnagcacac

SEQ ID NO: 6220 - DNA, 648 bp, Gossypium hirsutum
cattaatggtcagtcatcatcgttccaatttagaatatctttttctgcttggttttttaataccttgttccaacttccaacaggaagtagaagaagccttcactttctggggtactccggagggtgatctagtccatccggctgaatgcatgcaagaattgcttgagaaagtaaggcgtcataaagtcaatattgatggcaatgtatgcactgtgatggtcacaactttggttcttgaggtatcatcttgatcaaacatttgagatgtcttatatgaattcgttctacttttggcatcatttacctgctagaaataacttatcgtccatatgtttactcatgcttatttaccgtgctttctgtttttccgcaggaaacaaaataaatagatattttcatagtcgtcagagtaaaatagatattatgtattcccatctaaggattgtctcataatagtcctaggtccaacttgcagaaatgccttcataatatgaagataaacctagtcattatttccattttagattattgattgaattcgatatcacattttggtacttgtttaaatttgtagggttggcaaaggaaacttgatccaggatatgatgtaatgcaaacactacaaacattgctactcaaagctgactg

SEQ ID NO: 6221 - DNA, 648 bp, Gossypium hirsutum
agggagtctggtctatatgcgaatggaagttcaaagaaagtcaaaacagaaattgtatacacgactgataaacatcagagtgctaacttggatgtcagaacggtgggccttaattcaagcactggcttgccaactcaagcaaatggaagaagtatgcaaaagtataatgagtgcactaattctggggatctaaagcatgatttgaaagaaagatcagtagtttctgttagaaaacttgtggatcaaactcaggtctcatcagatggtgtgtcactagacatgaaaaaatgtgatgaaaaggcttttgtgaagaaaagaaaattggaggaccgggaggacagtgaaaatgggaatgagttatatattaaggaagaaagtagtgagagtgggtttaggaatggaaagaaatcacgagtttcaaagattgagggggagcagccccatagaaatgatgttgatggtatgatgtacaggaaaagcatggatcatttgattggtagtgctaatgaagtcaggagcattgataggaaccagcaacttagaaaacacaagaaaaagtcttttaagaaaacgttggatggccttgatttattgagaagggattctgaaactgggcaaaatttgaaggcagcaacctctagctcttct

SEQ ID NO: 6222 - DNA, 644 bp, Gossypium hirsutum
ggaaaaagttgtgctgcttcactagcagttaaattcgcaaataatggacaccacactctggtggtttctactgatccagctcattccttgagtgattcttttgcgcaggtttaacccactccctcattttttttattctgatgcttttgttcctgcaattatcttcgtttgagcttggtctatgtgtttatcttcaatttaggatttgactggagggatgctagtaccggttgaaggacctgactttccattgtttgctctggaggtatgcagaataaacttcctaatcaagtgtccgttaattttctttaggacattcttttgcatttgttgcacataatccttgagttatgtattttgtaggagataaccatctgcaagttattgttttgatgggtttttattgccttgtatgcttggtagtttgtatgttaaatttatagctttgtcacagataaacccagacaaggctagggaagagtttcgagatgcaactaagaacaacggtggaaccggggtcaaagaattcatggatggcatgggccttgggatgcttgtagaacaggtgaagctttatttataaatttgttctgtgtagtgccatggatgacctcactgcttaagttttgtcctaatccattcct

SEQ ID NO: 6223 - DNA, 595 bp, Gossypium hirsutum
taaccacaaatgaagaaacagccaaacttcatgttggtttacatgttccataagcaacaaaaacaaaactaacattaaaacaacataggagtagccaaaaagaaaaaaacaggggatatattttttaaggactcgttgccggacagccagccattttcaatggtgttttaagcatctttcttctccacgagcttctcaatcagatccgctgcatcttgaacggtgacaatgctttgggcactttcttcttccacactgattccgaactcctcctcgagtcccatcacaatctcgacctgaatcacaagaacaagtatcattggattttagtgttttttgagtttattaatgtaatatatccactcattccagcaaaatatcaaaacgtaatagatcctatagggtagatatttggttaccgtgtcaagagaatcagctccgagtgcagcaaacttagattctccggtaacagaagaatcttcgggtagtgctagttgcttcctcactatgctacaaactttgtccaccgtctcgggtttggcctgaagatattaacatccacagagccagttaagcatattgatacggagaaatg

SEQ ID NO: 6224 - DNA, 628 bp, Gossypium hirsutum
ctcacttgctttccaacaagagaaaagaatgtggaaactgaagtatattaacaaacaaatgcgcctgtagattaaaatttatttgactaaagtctaaacactcataggcaaggcatcactatttatctttctctcatcatctgtcttccttagacctctagttgagtgaagaaaaccgtccacttttggaccatttggctcatgcgcctatgccaactttcttcttcttttacagcccacgagctggtttacatattttaatggagaaaaggaaagagaccctcttctcctttccttgttgcaaaagggaactgatttattagagtgagtgaagttaaagggtacctcggaaaaaagaaagaaacactgattaaaagccaaaaggtttttatcttttcttaaccgttttttttgggattttatgcaaaaagctttttcagtcctctgctaagtttcaggctattcttagctacaaaatgatcactttctgctttgtggtactactcttaaaaatacaagaagacaagttaagttttggggtgtaatcaccgatctctgcaaacccatttgacgtctctcatttcacatttgtgtgcctgcttcatcttccttagaacaacccttctgg

SEQ ID NO: 6225 - DNA, 592 bp, Gossypium hirsutum
  misc_feature (488)..(488): n is a, c, g, or t
  misc_feature (507)..(511): n is a, c, g, or t
  misc_feature (525)..(527): n is a, c, g, or t
  misc_feature (557)..(557): n is a, c, g, or t
  misc_feature (566)..(570): n is a, c, g, or t
  misc_feature (574)..(575): n is a, c, g, or t
  misc_feature (578)..(583): n is a, c, g, or t
  misc_feature (589)..(589): n is a, c, g, or t
ttatgttcttgatacacctttagacaacaaatcccaagcaaacagaaaccttgaaacaatctttttctccatgctcattagcaacaaccggggtcgtttagcaataaaactaggcgaacaccccattttattcactaggaaatccatagtcaccatcaaattatccacggacaacctaatgaatgacggatacctccggaaaggttcagaaatctcttcatcggaccaagtgaatttcttaaaagcttcgaattttctctattgcgaccgtaagcattcctttaccaggatcaaaccccgatttcttttgcttcttgttccacggatttaaacttatttggactgactcttgatgttgatggctttgaacaaatggatgaaccgatatggcattcgttaactccattatcgaccaaaatattgatattaacctacctaacatcattacgattgtaattcaaaaggcgtggatgacgtttctaagaacngataatcttctgagtggannnnngcacattactaagnnnatcttatgatgggattaattgattttcttngcttgatgnnnnnatgnnagnnnnnntatatntaa

SEQ ID NO: 6226 - DNA, 609 bp, Gossypium hirsutum
  misc_feature (61)..(63): n is a, c, g, or t
cacatcagcagcagcaagtgccctagaaagattttcactcaacagcctaactaatgctgcnnntcagcatgctgctctctctccattccagtattaagaatctcaaccaagggttgaacagcttgccgggcagtgtccgcatttctgatatggtcagcagagaataggctttctaatgctttagcagcactaaacctagcagctcttcctccgagacgtaagactgctacaagttgaccaacagcaccaaatgctgcctcatgtcttcgaatttcagcactgctaaataggatccccaatagatcagtagcagcttcttctgttgcatcttgagggctcagagagagatacttagtcagagcttctaaagccccggattccaccataacaatcttatttgatgcactgtcttttgcaagctgaatcagaagcccaagggacaggaaaggtgcaccagggcggtccggaattggtttaagtagatcaacaagggcaggtattgcttttcgagaagtagcaccaaccctaatgtcttcaactctaaataacctctcaagagcaacttgatctgggtaccgtatcaaagcaaactcctcagacaattcaaga

SEQ ID NO: 6227 - DNA, 584 bp, Gossypium hirsutum
  misc_feature (545)..(545): n is a, c, g, or t
  misc_feature (551)..(551): n is a, c, g, or t
tgatgaaatataacaatagaaagggagataaaacgaagggtatggtaaataacatgtttcagaatttgtacttacagttatagatgcagttaccatagcctgcacaaataatgaaaaaaaaaagatggaaattaattttttaaactttgaaaaataattccattttttgacccaatttccgcctaaagtaatggacttaccaagggcccgaaaaactttgatccccattccccccaaactgcctgcctcctccgggggcccctttttccgggaataattggtgaatggcaaaaaagcatgaaaaactaagggaaccgggtgaaaacctccctgggccggctgaattggccaaaaaaccgcttttccctgacccccaaccccaaccaacgcattccggaaagcccaaattgaaacccggctaaaaacaaagcacccactttttcccggtccctttcccagaaaagtccaggtaaaaaccccccccctttccggaaaaaaaaaaaccaaagttccccccaattcccggccctgcttcctggtccccntaaacnaagaaaaaaaggaccccttctaggttggcccaa

SEQ ID NO: 6228 - DNA, 639 bp, Gossypium hirsutum
tatgctcgccacttgtcttattttcatggcaagtatgacaatcaagaaagaattgaacaactatacaatgttggaagtttaaggacttatcttccattacagaggctccatgtcttggtgagtactacctaactactaaagctcttgatctgctttctaagttaagatgcctaagggtgttatatctcagtggatactacattagatttcttcctgaatcaattagagatctgaaacttttaaggcatcttaacctttcatttactaaaattagaaatttgcctgaattaacaaccaataagtgcaatttacaggcattaattctgaaaatttgcttctatcttaagaagtggcctgcaaatatgtacaatctaaccaacctccaatatctggatatcactaatgtgaactcattagaaaagatgacagtgggaatgaaggaactaaaaactcttcatatgttgcctcagtttgtagtagaaaacaacgttgggtcagggataagagatttaaaagaattaaagttgttccaacaatctttcaacattaacaggttggaaagggtggttgattctcaagaagcatcaaatgctgagctaaaagatatgaatgtgttatgcgcctttgtgtaaaatctag

SEQ ID NO: 6229 - DNA, 625 bp, Gossypium hirsutum
atttctataaacatataccacaaaacaaatatatagggaaataagttaaaacgaaatggagtttgaaggactgatatgatgatcaaaattggctattacagctatttgcaagtaaattttggtacagtgaaagagatcaacaatctaaggacaagacagttgtgcaagcccatctccctcatccccccaggaggtagtcaataaccacgtcaatattttatctatatttaaaatttttcacggtttaagcttaaccgtctctagctgtttgatagtaagatcaacattgacagaaagaaatgaagtgcatgctagcactgaactgaggcttatggaatgacatttaacacagtaatcttcaaactacttttttctgaagtcatcagtgtttagtttcaggttaggtagtcactcttgtcttcaaaatgcatagctgccagtactctagccatctttcaaacagaaacaagaacaaaatcacatttgcgacttcattcagctttgaatataatgccgttcaggtctaccaactcccattgggacttctaatgctaggtcattaactcccccaatagactagcagtctaacctctacaaaagtgtgcaacattagaaaggggagaag

SEQ ID NO: 6230 - DNA, 813 bp, Gossypium hirsutum
caaatgtcaatttcaaaaaacggcacgctaaatttacacaacggaaagaacgaagtcaaaagggcttcggatatttctataaacatataccacaaaacaaatatatagggaaataagttaaaacgaaatggagtttgaaggactgatatgatgatcaaaattggctattacagctatttgcaagtaaattttggtacagtgaaagagatcaacaatctaaggacaagacagttgtgcaagcccatctccctcatccccccaggaggtagtcaataaccacgtcaatattttatctatatttaaaatttttcacggtttaagcttaaccgtctctagctgtttgatagtaagatcaacattgacagaaagaaatgaagtgcatgctagcactgaactgaggcttatggaatgacatttaacacagtaatcttcaaactacttttttctgaagtcatcagtgtttagtttcaggttaggtagtcactcttgtcttcaaaatgcatagctgccagtactctagccatctttcaaacagaaacaagaacaaaatcacatttgcgacttcattcagctttgaatataatgccgttcaggtctaccaactcccattgggacttctaatgctaggtcattaactcccccaatagactagcagtctaacctctacaaaagtgtgcaacattagaaaggggagaaggttgcattccttaattcatatctttccaacagggctttatctggtgtgtttgaacttctatcagcacaaaggtgttgaggatagttctagttctagtgactagggcaatttgcaaa

SEQ ID NO: 6231 - DNA, 599 bp, Gossypium hirsutum
ctcagacaatctttaggtagctcttctttgtcagtctttcattgtcggaaaactactattaagtaaggatattttaagaaatcattctctctccttttgcagggaaaaccagtagccgtaaagtgtgtcaagtttcagaatgttcgtaggtatgtttatagtttgtccactaatgtaccgggtttagtcttgatcatcacgttaaccatactaatgttaaaattactttattatgtttaccagcttgacaatagttattgaagacaaccagtcgggttctgaaatcacaaaaattcagaagactgctttatatggatcaacgtaagttcttaaaaattccttctctgcatcattttatgtcattttctatactgccagaatccactgacaaattttagtatttacatattgttcaagggatgaactcatgctttagtcacatgtcaaatcgatttgaacatacagtgatggttattagtgagggataagagtgattattttatattgaattatctttctcacacctgagctttcaaaattctgaaactacatgaactcagagcttgtttgcattgcctataactagcaaagcagttgac

SEQ ID NO: 6232 - DNA, 426 bp, Gossypium hirsutum
  misc_feature (412)..(412): n is a, c, g, or t
acatgtactgaagcattgattaaagccaaagtgaaaaaggtggtgggcgggatggtggatcctaacccgatcgtggcttcaaagggggttgctagattgcgagatgcaggaattgtcgtgactgtgggtgtcaaggaagagttatgcaagcggctcagtgaagcctggatccatcaaatgttaaccgggaagcctttcgtgactcttaggtaaataaattctcttcaccatagaatctaaacatgaaacaaaattcaatattcctatttgctctgtcagacatcttgctcgctgtgttccttggatttgaacttacctctaaccgaaggcctctttgtaatatccagatattccctctctgtcaatggccactttttagaccagctcggtgaaggggtcaccgaggctggtnatactactcaaaag

SEQ ID NO: 6233 - DNA, 646 bp, Gossypium hirsutum
catatctctgctttatgcatgaaagaacatgcaaattaaaaagatttctttaccaactacatcaaagctaagccagcactcgtaaaaagctaaaatccaagtataagcctataccgtaaatgagtgatcacaaacagatgcaaaagcaaatgttgccgatggatagttctccaagttcaaataatttgtagcaatatgccaaaaacaaagagtataatatgttgcaatttgttgcaattgtacatggatatcctggcgccctcatcaaagcttaaatcttcggataaatttgaagatatacctgagcaagagaggaatgtacttccttgatagtttcttctttctcacacaagtctgcaaaatcagtaaatgtaatgccttgctttgaagcccaatcttccaccatttgttgggaagccaccacgagagccacacaaaaactgtgaaatggatcagcatgcaacataatattgtcgacatagggacagatactgagagcagtctcaacctgtaggaaaaatattagttacagtggaaaattcgaattacataattgtttcactggaaatatccattcatacctttcctaaagagacatattctccatgctgaagtttgacaatgtcttttttacggtcaattatct

SEQ ID NO: 6234 - DNA, 670 bp, Gossypium hirsutum
cacttagctctgtacaaaattcattaaaatgcttggggaatccatggacaatggcagggcatcttgatagatactaaattgtgatgaccaaagacaagaattttaatagcctaaagaaaagagcacacccataagccatgagattttgttttttaagtaacttcagaaagaaactaatcatccaatcggtgattgatgcaaatgtacagtaaacaacgataataggtggtctacttatcatcgaaaaactccatagtagaatgaagttaaacaagtcttgaagcaaactataacattaaactctccatcccaaaactacggaaattgtatctgtacaatatcttgcattttcattaagcagcctctcccatgatgaactagatgtgaaaggtacgcaaagcctgcatatgcttacacattaataagacacaaatacatatctcgacatatattatgacaaaagggtggagatctaccaacacaaagttagatctgaaccagagagaaagaggaaaaacaaaaactctgaccgataaaaacagcatttattgtttagcattttgtaattgtctgtcatggctgaaacaagataatcattcaaatgaattaagctactaggtgcttattgcagataaaaacggtgaggttttgctctaaaagacgcatggtg

SEQ ID NO: 6235 - DNA, 595 bp, Gossypium hirsutum
gatgacgagaaaacagtagaatcatctacttcctgttacaagacaatggtattatgaactcattgacaaacccaaaaggacctgaaggccaaattaattgatagctattctctaattaaaaagttaatgttcaaaagataagatatctactacaacaaagagaagaatggtactttatatgtgcttaatgctcttaatgcatctatatgatgatgacttggcccactcggactgtggaatattggctccctttcagctccctggcaaataacaagaatagtataagcaaagataaaactgacacaactaattgcatcatgctagcagtttacaaaatacaaagttagtggcaccagcagacagctttaacttcaatagaaagtaggggtgagagttcaattgaatcaagtcaaatcaaatgaaaaaatttcaaactgatcaagttgacaaatcctattttatcatcctaactcgatttgaaatcttttcaaatcgagtcgagtaaaatgaaattagtcaaattgaatcaagttaaattaaaaaattaaacatgtcaaattaaactcttcttacaatataatcaattccatgttgg

SEQ ID NO: 6236 - DNA, 554 bp, Gossypium hirsutum
  misc_feature (347)..(347): n is a, c, g, or t
  misc_feature (451)..(451): n is a, c, g, or t
  misc_feature (492)..(493): n is a, c, g, or t
  misc_feature (518)..(518): n is a, c, g, or t
  misc_feature (537)..(538): n is a, c, g, or t
  misc_feature (548)..(550): n is a, c, g, or t
gttgccacaaaatgcacctacatctacctgttgtgtttatgactccttgatgggaataggatcaggctattctttggatctcccaaaacttcagtgctcatcgtacacgtcgatatacgagtttggagatgaagaggatcccatgaaatggaaatttgggatttctttgctgtataatgattcatactacactcctgcatgcaagaactgtgaaaccaatggaggcttgtgtggcttttctggtctggatgagtcattctcttgcatttgccgagatggtgtgaacactaccacaaattgctttggccatggttagttcaatacaaacaacaaatgcactgtggccngttgcacctacttttagatctttgctttcccttttttctttattttctgaagttatgtgtgttgttgatatgagaaatgaacacgggacacgtggaatggggantgggaacccaaacctcaacccaaaactaaggttgtaggtgnnaattgacactctcatatcttaacantcaattaacattctacttnncttaacaccnnnattt

SEQ ID NO: 6237 - DNA, 587 bp, Gossypium hirsutum
  misc_feature (535)..(537): n is a, c, g, or t
  misc_feature (570)..(571): n is a, c, g, or t
  misc_feature (573)..(575): n is a, c, g, or t
  misc_feature (580)..(582): n is a, c, g, or t
ctctgatggttgaccatcgccagaatctttctcacgattcttttgctctagcggggaagaatgccttgtattgtgtggatgcccagccacatttgtaggttttgtgtgcgaaatggagctgtttgttcttgaagaaactgcacatgttgaatcatttggtgttggaagaacatatgtgttggacgttcttgtagatgactgacgcatctgttttactctttcagcaggatcaagcttcctttctggaaatatgggggctgaatggctactcactctatgatccctacttgagacctggaaatccccatggcttttcaccgggtttgcctaaggcaaatggcagaaaataataaaaatatatacatcaaaaaaccacataacatgagcagcaaacttgacaaatgtactaatagagattcaggaaacagctctaatttagaaaataataaaatatatactttgaatgcctgtttttcgaaatagggccaaaaatgacaattgtaccaatggagatttacctctgcattttccatcnnnaaagtttggggaaatgaagtacttacttcatcnncnnngagannnaaccc

SEQ ID NO: 6238 - DNA, 599 bp, Gossypium hirsutum
  misc_feature (569)..(569): n is a, c, g, or t
tcatcttcatgaaaaatattatattaaacagcccagttagtaagccttgtttatatgtctgaaaaacagcaaattgcaagtaacaactactataactgttttaaggaaatagtaaagcaagggaactcattgattctcccctatcccgcgcccccactcaagaaagaatcccttccaagttgttacctttacttgcttccaggtgaaaaacaaactgaactgccctaccacaatttgaatagatctccataggctgccatgttatattttcttagccatttaagcatttacattagtagtattataaagtttaaccccaagaatgtatggtattcaaagtggccctcaaattacaaatctaatctccctcatattccactttgttgtggaaactgttagtgaccaacaaaaagccaaagaaatgtaccataatggaaatgactactgcatgcaacacttaccatgagttcaatccgcttgacctctgattttaagatttctgccttctctttatccaatgcagcctcagcttcagcattctgtttagcaagttgtgcagcatccagtcncacctcaatttgcttcaagcgtgcatttgt

SEQ ID NO: 6239 - DNA, 420 bp, Gossypium hirsutum
  misc_feature (410)..(412): n is a, c, g, or t
cttttttcaatcaacaggggattgctgaaactttgataattttcattgtgatgttaaatgcatctatcatttgctaatatctgtccattttttagggaataagttcaattcttggagctattgctcttgatttaggaattttaacaaccccacagctgcattggatggttcgtgctaggaataaaggcatgaaagcgacagaacctgcctattttgaacagatttcaagctccttcaggttagttgaagcttcagggttttttgtagccattttttagcttgaaattatactacttacagtaatgtactattgtttaggtgcttggtagatttgatcccaaatgaaaccaaaagcagcaagatggataacacagttgtggttgatggggctgatggtgtgggtggagaannncttgaaga

SEQ ID NO: 6240 - DNA, 556 bp, Gossypium hirsutum
  misc_feature (456)..(459): n is a, c, g, or t
  misc_feature (475)..(480): n is a, c, g, or t
  misc_feature (494)..(496): n is a, c, g, or t
  misc_feature (500)..(508): n is a, c, g, or t
  misc_feature (510)..(516): n is a, c, g, or t
  misc_feature (518)..(519): n is a, c, g, or t
  misc_feature (526)..(538): n is a, c, g, or t
  misc_feature (541)..(543): n is a, c, g, or t
  misc_feature (545)..(553): n is a, c, g, or t
cgtttttgagacaacacattggagtccctaaccgaaactcctctgcaatcttttccaaataacactataacggaaataaccgaagaaccgtcacccagaagaaggaacgggaatagcaattgcgaggagaggtttaattttgttctaaaaaggtcatattcatttgggttcgagaggagtttagccgcagagaggatgataaccgagccgaacacagcgtcgccttggaggtacaggagaggagggaatggattttggagcagaaggacgtctccgtttgggtcgttaatgatgaaacccagggttttctcgtttaggtactacagagggatcaaagcttcgccattttttcgtcggagagggttttttccattgtcggaatcaagtgttagatttaccgccggcggcggaggctcgtcgagaagaagtaagtcgatggcgagtccgatgttttannnncagcagctttcagtgnnnnnncttctcgtcgagtnnnctcnnnnnnnnngnnnnnnnanngctgctnnnnnnnnnnnnngtnnncnnnnnnnnnaaa

SEQ ID NO: 6241 - DNA, 1413 bp, Gossypium hirsutum
  misc_feature (524)..(530): n is a, c, g, or t
  misc_feature (532)..(539): n is a, c, g, or t
  misc_feature (542)..(544): n is a, c, g, or t
  misc_feature (546)..(548): n is a, c, g, or t
  misc_feature (551)..(561): n is a, c, g, or t
  misc_feature (568)..(573): n is a, c, g, or t
  misc_feature (580)..(580): n is a, c, g, or t
  misc_feature (584)..(594): n is a, c, g, or t
  misc_feature (596)..(597): n is a, c, g, or t
  misc_feature (599)..(602): n is a, c, g, or t
  misc_feature (604)..(607): n is a, c, g, or t
  misc_feature (611)..(617): n is a, c, g, or t
  misc_feature (622)..(639): n is a, c, g, or t
  misc_feature (641)..(641): n is a, c, g, or t
  misc_feature (645)..(645): n is a, c, g, or t
  misc_feature (647)..(653): n is a, c, g, or t
  misc_feature (656)..(667): n is a, c, g, or t
  misc_feature (669)..(672): n is a, c, g, or t
  misc_feature (679)..(679): n is a, c, g, or t
  misc_feature (681)..(687): n is a, c, g, or t
  misc_feature (690)..(693): n is a, c, g, or t
  misc_feature (695)..(705): n is a, c, g, or t
  misc_feature (707)..(710): n is a, c, g, or t
  misc_feature (719)..(720): n is a, c, g, or t
  misc_feature (722)..(726): n is a, c, g, or t
  misc_feature (728)..(730): n is a, c, g, or t
  misc_feature (732)..(738): n is a, c, g, or t
  misc_feature (740)..(742): n is a, c, g, or t
  misc_feature (760)..(764): n is a, c, g, or t
  misc_feature (767)..(773): n is a, c, g, or t
  misc_feature (780)..(785): n is a, c, g, or t
  misc_feature (787)..(788): n is a, c, g, or t
  misc_feature (790)..(791): n is a, c, g, or t
  misc_feature (793)..(795): n is a, c, g, or t
  misc_feature (797)..(813): n is a, c, g, or t
  misc_feature (815)..(828): n is a, c, g, or t
  misc_feature (830)..(830): n is a, c, g, or t
  misc_feature (835)..(839): n is a, c, g, or t
  misc_feature (841)..(843): n is a, c, g, or t
  misc_feature (845)..(848): n is a, c, g, or t
  misc_feature (853)..(855): n is a, c, g, or t
  misc_feature (857)..(860): n is a, c, g, or t
  misc_feature (865)..(872): n is a, c, g, or t
  misc_feature (877)..(889): n is a, c, g, or t
  misc_feature (902)..(905): n is a, c, g, or t
  misc_feature (907)..(908): n is a, c, g, or t
  misc_feature (910)..(912): n is a, c, g, or t
  misc_feature (915)..(919): n is a, c, g, or t
  misc_feature (922)..(939): n is a, c, g, or t
  misc_feature (942)..(944): n is a, c, g, or t
  misc_feature (952)..(954): n is a, c, g, or t
  misc_feature (962)..(963): n is a, c, g, or t
  misc_feature (968)..(969): n is a, c, g, or t
  misc_feature (971)..(974): n is a, c, g, or t
  misc_feature (979)..(982): n is a, c, g, or t
  misc_feature (987)..(988): n is a, c, g, or t
  misc_feature (991)..(992): n is a, c, g, or t
  misc_feature (994)..(996): n is a, c, g, or t
  misc_feature (1005)..(1007): n is a, c, g, or t
  misc_feature (1012)..(1024): n is a, c, g, or t
  misc_feature (1028)..(1030): n is a, c, g, or t
  misc_feature (1041)..(1043): n is a, c, g, or t
  misc_feature (1046)..(1046): n is a, c, g, or t
  misc_feature (1052)..(1055): n is a, c, g, or t
  misc_feature (1057)..(1057): n is a, c, g, or t
  misc_feature (1062)..(1063): n is a, c, g, or t
  misc_feature (1066)..(1072): n is a, c, g, or t
  misc_feature (1076)..(1084): n is a, c, g, or t
  misc_feature (1088)..(1090): n is a, c, g, or t
  misc_feature (1097)..(1099): n is a, c, g, or t
  misc_feature (1103)..(1106): n is a, c, g, or t
  misc_feature (1110)..(1111): n is a, c, g, or t
  misc_feature (1117)..(1118): n is a, c, g, or t
  misc_feature (1124)..(1133): n is a, c, g, or t
  misc_feature (1147)..(1147): n is a, c, g, or t
  misc_feature (1150)..(1154): n is a, c, g, or t
  misc_feature (1156)..(1158): n is a, c, g, or t
  misc_feature (1161)..(1167): n is a, c, g, or t
  misc_feature (1173)..(1173): n is a, c, g, or t
  misc_feature (1175)..(1178): n is a, c, g, or t
  misc_feature (1186)..(1198): n is a, c, g, or t
  misc_feature (1201)..(1203): n is a, c, g, or t
  misc_feature (1206)..(1212): n is a, c, g, or t
  misc_feature (1219)..(1223): n is a, c, g, or t
  misc_feature (1225)..(1227): n is a, c, g, or t
  misc_feature (1240)..(1245): n is a, c, g, or t
  misc_feature (1250)..(1255): n is a, c, g, or t
  misc_feature (1260)..(1262): n is a, c, g, or t
  misc_feature (1264)..(1276): n is a, c, g, or t
  misc_feature (1283)..(1288): n is a, c, g, or t
  misc_feature (1296)..(1299): n is a, c, g, or t
  misc_feature (1305)..(1308): n is a, c, g, or t
  misc_feature (1316)..(1320): n is a, c, g, or t
  misc_feature (1322)..(1324): n is a, c, g, or t
  misc_feature (1331)..(1341): n is a, c, g, or t
  misc_feature (1344)..(1367): n is a, c, g, or t
  misc_feature (1370)..(1375): n is a, c, g, or t
  misc_feature (1380)..(1382): n is a, c, g, or t
  misc_feature (1384)..(1399): n is a, c, g, or t
  misc_feature (1401)..(1410): n is a, c, g, or t
gcttctaccaggttacaaattaatacccaaaattttaagggttcttttataggaattttggtaaagcaaatcaaatatattaaaaatttcaatgcaaaaccatagaaattttgatataactttataaattatggtatactaaaatgttgaaatagttgaagtataggacctttaagaaaagttttagaaattttagtaaatttttagactgggtttggatgaattcttttaaaattttagatagttttaaaatattagcattttaaaattcattacttcaaaatgcttgcaattgtaattactttgtttgaataaatatttattttatgaaaaatcaggttattagaattttaaaaattaaaattaattataaaagaaaataaaagaatcaataagggtatcattataattgtaaaaaaattataaatatttaataaaataaaatattataatatatatatatatatataagatttagataaaaatggtttaggaaaaatccacccatcccaccttaatataannnnnnngnnnnnnnnttnnntnnnttnnnnnnnnnnngggggtnnnnnnttttttntttnnnnnnnnnnncnncnnnncnnnngctnnnnnnntctgnnnnnnnnnnnnnnnnnncncctncnnnnnnnctnnnnnnnnnnnntnnnncctcttncnnnnnnntcnnnncnnnnnnnnnnntnnnnttttttttnncnnnnntnnncnnnnnnncnnnttctcccctcccttttcnnnnnctnnnnnnnttttctnnnnnncnncnncnnntnnnnnnnnnnnnnnnnncnnnnnnnnnnnnnncntttcnnnnncnnncnnnntcttnnntnnnnctctnnnnnnnnctctnnnnnnnnnnnnncctccctttcccnnnntnncnnnccnnnnnttnnnnnnnnnnnnnnnnnnttnnncttccccnnnctttttcnntttcnncnnnnctttnnnnttttnnttnntnnntcccctccnnntcttnnnnnnnnnnnnncttnnnttttttttttnnnttntccttnnnntntttcnnccnnnnnnntttnnnnnnnnnttcnnncctcccnnntctnnnntttnncccttnntttctnnnnnnnnnntttttttttttttntcnnnnntnnnctnnnnnnntcttcntnnnntcccctcnnnnnnnnnnnnnccnnnttnnnnnnnttttttnnnnncnnnttttttttccctnnnnnntctcnnnnnnccctnnntnnnnnnnnnnnnncttttcnnnnnnctctcttnnnntctccnnnncccctctnnnnncnnntcccccnnnnnnnnnnnttnnnnnnnnnnnnnnnnnnnnnnnntcnnnnnnctttnnncnnnnnnnnnnnnnnnncnnnnnnnnnnctc

SEQ ID NO: 6242 - DNA, 564 bp, Gossypium hirsutum
  misc_feature (506)..(507): n is a, c, g, or t
  misc_feature (513)..(516): n is a, c, g, or t
tcgagctaccgggccctgtcgatcccgaaaagttactagttgtttagctaatggattgcttgaagccgttgtgaagaaaaggtaactgagaaggctcaaagagcaatggttatggctttttctcccccctgcactggacttagtagttagtactatactctgcatatgctttaagcatgagtttagaaaaggtgaatatccaacttgatacttgatgaatctgctacttttggaatcaatgaaatagatttgtcttatttttaaaatcaaatagttggtattaatatttttatttttttggtgaaatataaaacaaaaaaaattacatagagttactcataaacagaatgcctctagtactgtctccttgtagaacttctttaatgaacatatgcaaatcgtcatcatctggacgagctattttagttattgcatctgctgcagaaccacttctctgaatttgtctaactagagtggaatttgatttttcaattttactatctccnnataatnnnnacaaactcaagattatccagaagtagaccatccaaaatgtgtaggaca

SEQ ID NO: 6243 - DNA, 664 bp, Gossypium hirsutum
acataacactgaactcagaccataaacatacatacatccacgcatgcatgcatttagcagttgaaaggtagaagtaaagatgcaggcattacctggaaattccagtctttgagacagcaccaacaaacagagtctcaattccatattggttaacgtatccaacaagtgcttttgcaacatctgtttcctctagcaccactgtttcacattgtatctgacacacacataaaaaaaacacactagaattgatcaaattttgttttggtccctctactatgttcataatttagattaagtactgtattttaatttggtgcatctgtttttcttggtacattacatactggggggaaggggatgttattggtaggatttcaaccctaaagctcataactacttgcatctttgagttgttggcatattgtgatctctatttctataatctcattaattaattcaaacaattaaggcatcatgtcaaatttagtcccatatttacatctttttatcaatgtgacccttattctttttttgagttaaatttgatcatttcaaaaagagctaaattgtttaaaaaataaaaataaaaatgctgactaaaatattaaaatttttaatgtcgttctaacaacccacatcgcaatccatgtgactttatgttgac

SEQ ID NO: 6244 - DNA, 635 bp, Gossypium hirsutum
attaacccaaaagctaaatattaacccaaaagctaaatacatggtttgacaattttattggttacttgtgatttaaacatggaaagtgatcctagaatcaccttaaaatcccttgaacaactttatttttaaaggtttgtaggggtataggatttgatctgaatgttattggtgatacaatgcaagtgctttgtgaagaagagtaatggcttggcttggtttctaataaagaagcgttggggagaatggttgatggtttcagcggtcttcctgacattgattctgaggtttctcactttagaagacattgctgttcttagccgaagattttgtgttcatatgtatgatgattatagcaaaagcaaaagcaaattctccctctcagcttgtgcaattgtgcaatcttttttttcattgtctacaacgtgctgcaatttgtctcacacttaatccacctgaattgaagatgccgcttcccttgatctatgcgcatcctatgagagtgaccaaacacctacctacgcctgcatattgcaactttgaggtcttttgcagattatatgaaattaggagctttattaatgcattttgagtgattaatgaccaactccctgcaatttgctttcttcctccaa

SEQ ID NO: 6245 - DNA, 630 bp, Gossypium hirsutum
  misc_feature (509)..(511): n is a, c, g, or t
  misc_feature (530)..(531): n is a, c, g, or t
  misc_feature (585)..(586): n is a, c, g, or t
  misc_feature (612)..(615): n is a, c, g, or t
cactcaccaaggcctaggacagatgctcccaaccatgatgacatgaataccccaaccaagaagatgaatgttatagaagttacaaatccaagacctatcaaagaagcaaaggagaaaacatcaagaggcctggtaagttaaccagaagcttccaacccttaaaagaggcattcctaataaaaatgagaactaccaatattatcaaatgcggtaagtgtgtttgcgaaatgcgactgtgtgaaaaccaatttagcattgtggtacatatatatttaataagatatcatgtgaaagatatatacaactacacttcaataaactttgtcctaggtgaaaatgtgctgtgtgtacatataatgggggtgtgcgtgtgagtttgtgcattttcttcctcactatcaatgtcgccttcttggaggatttatatgaagaaaaccaataagaatgttggctgtgggggtaaaggaaaattatgaaaagattgtacctgacaacaaaaaaaccctccnnnctactagaatatcatccanncactctcaattatcacacatactgtccgcagtgtctcaaaaattgtcggacagnncaatcctcgtcattcaaaaaccttgnnnnaagataacacaaatt

SEQ ID NO: 6246 - DNA, 650 bp, Gossypium hirsutum
catatataaaggtcttccacttaagttaaaaaacaagtaaaagttttgaaggatgcaggaactataattacatgatacaagcaaagaagtcttatgttttaatattaagcctacaaagaaattctccaggagctcaaacctaagttacttcaactctatttttctttaagtaatgtgtccaacatattttcagacatgggtatgtagttagaatcctacaaatacttggaaaattttgaaaaaaaaaattaataataatatcagcgcataccgatattggacactcacaaccgagtcagagtaacataggctcatagaattttgtttcagaaaatttacatctaatgtatattgttgagaaagataaataattcagttgatttgattgaaccattttgaccatttcaacttttgtatttatcttatagtcttggcccatctaaaatagttatcgtatttacctcctagtttgagtccatctaaaacttgtatatgcttatcacattgtacctacatatatcaaatgaattcagcatgactgtgtgtgtttgatttgtaagaaccactaccttaccaaatttcttagataaatagctgcatgaattagtaggggttacaaaccaagatagctcccttaacatgaaacattc

SEQ ID NO: 6247 - DNA, 565 bp, Gossypium hirsutum
aaattgtccaattagttgaaatgtacttttttgctcccctacatatatctgaaactgccataaattgttatgcgtttctttttctttttcttttcttagatcatcttatcattgcaaaatagtacaaccaagatctgcatggatgctgagtttgtatagtgatttgtgcttttttgccaatggtgccttttgtacatttcttttaacttttccagggggagtcctgccatgttagaatttttctagttgattgagaatgctagattggttaatacattggttgaggacctttgaggtagaactgccttaaattttctgaactttgagataaatactaaataggatgttttgctatacatatttgggagcatataagcttgactttaaggttatggggatgcttatttctaagcaagagggaaaggaattggaacttttccaggtttaatctgtaagatctggggattatttgggttaggaacatgatgcatataaatgctcagttcaggggctgttggtgtttttgactggtccatatccacacccctataaaagtgctcgactg

SEQ ID NO: 6248 - DNA, 635 bp, Gossypium hirsutum
  misc_feature (34)..(34): n is a, c, g, or t
ttgttttgggagtggggagtaggagttataattnggcatcggaatcaaccccccaacctcaacaaagaggttctatgtaaaaagggtcctttgggctacgtcctacgaaatgtcatttggacttctagtagtaaaaagttttcaaccgacttcttatttttaaaatttattatggataaaaatttgaaaaaaaaaatcatagaaactttcaatgaagtagttttcaaatatattttttataaaatttaattaattaaaatacttaaaataaatgaagtcatttaaaaagttagacctgaaaaatgtcaactgtgatatttttattggcacaggaggagtatttcctattagcagaaaaccttctcctggtgtaatttccgagtttttctaggcttcagaatagttcaatcaaaatccttggcacatcaataatctagaatcatggaaaaatcactgaataacaatgataatttaagttgataacatttaagaaaaacagcatctagatttccgaatcaacaaccattgctaaccatgaaaaggtaacttatcattcaagaaaacctcttctggagttaaaaagctgcaaaataaccagctaagaatatttgaataaagtaggttgggactaccta

SEQ ID NO: 6249 - DNA, 741 bp, Gossypium hirsutum
  misc_feature (617)..(619): n is a, c, g, or t
  misc_feature (622)..(646): n is a, c, g, or t
  misc_feature (648)..(654): n is a, c, g, or t
  misc_feature (660)..(662): n is a, c, g, or t
  misc_feature (664)..(667): n is a, c, g, or t
  misc_feature (669)..(677): n is a, c, g, or t
  misc_feature (679)..(685): n is a, c, g, or t
  misc_feature (690)..(695): n is a, c, g, or t
  misc_feature (697)..(702): n is a, c, g, or t
  misc_feature (704)..(713): n is a, c, g, or t
  misc_feature (721)..(729): n is a, c, g, or t
  misc_feature (731)..(734): n is a, c, g, or t
tacactgatgatattgttttatgacatacatttgtatttctttctttggcataattttttcttaaaaagttgcaggtatttaaagacactaaggaggttacatcaaatgtgaaagcatgcatatcgaaagaaaatggatatgcagtgcccttcgtgaaaaggtaagacatggatcaatatataggtagaagattgttgtagaaaccaaagagtagggtaactaatttacttctattgatttcttataaacagcagtgatggtggtaaccatgatgaactgatggctgaactaacttccttaaaggagcgaaacaaatccatggaaaatgaattgaaagatatgcaagaacgatattcagatataagcctcaaattcgccgaggtagaaggtgaacggcaacagcttgtgatgactgtgcggaacctcatgaatgccaagaagagctgaaggtaataaatttctacatatacatgagtagaatgtatagttgaaatgactgctgggtgtgcccttttggaaaatttaggcatcacggttcctttttagagcgaataagttaaattgtacaaaattgtatatgaattcccttcacctctatcttatctagatttagagnnnagnnnnnnnnnnnnnnnnnnnnnnnnntnnnnnnnttttannngnnnnannnnnnnnntnnnnnnncccannnnnntnnnnnncnnnnnnnnnntgttcccnnnnnnnnngnnnnttcgttg

SEQ ID NO: 6250 - DNA, 614 bp, Gossypium hirsutum
aaaggagggacatccattcagggcagtcaacagcatcctgcaacaagacatccggatggaacatattattctctcaaattagaatactaaaagcaatagggttcccattatttgatattaaagatcaatctcgagaataggaatcataaaaaactgtacctctaagtgaaacttgtacttgataccaaaggggcttgaagatttaaatttctgaaccatgttgtaaaagtgtgtcagaattagataaaacttgtagtcaacatcaatatctttccaaaaatgtagttgcaagacaaatgtcatttactttatcagaaaattcttcatcaaattgtatccagtaaacgctgttgccaaaagccattccttcggctgcatagttacagtgaaaataaatcaagaacaagaaaaagtagtccaacatgccaacaatcataactttcaaaaatggcaggggggaaagaagaaaaagcagaagaaagcttggaataatttaaccatctcattgctttgctaattggtctacagaaaccataaaactacatgatgttagttactagaaagactagctttcatcgttttagggtgtgcttggttgcattgaagaatggagg

SEQ ID NO: 6251 - DNA, 608 bp, Gossypium hirsutum
  misc_feature (602)..(602): n is a, c, g, or t
atcggagtttgtcttggtggttgcttttgtcgatacccttgtctttcttcttaaatccaatccttttgtttaattaatgttggatgtgctgcatcatatctttaataatgccaaaatctattcatcttttcattgctcttatacaagtaatttatcaattcaaacaccaacaactttattttatattctcaagcaaaacaacagatcatgaagattgtattttgtctttcctatttagaaagtgagaaaattattctttataggttggattaaagagtaaattagtcatttttattaaaaatttcatctatttttgctattaaaaactggtgtagccaatgaaataaccagatagttaccacatgtaccttatattgatgtataggaactagtttttaacggtaaaaatggatgaaatttttatcaaaatgacaagtttgctcttttatctaacctatataaactaatttgcctatctttttaatagagaggacaaaatgcaatataacttttaatataaaatcctccttttttagtgttgttattttatttatgagttaattatgtcatacatccttaaattatagtcgtcattctaaatnggactc

SEQ ID NO: 6252 - DNA, 595 bp, Gossypium hirsutum
  misc_feature (481)..(481): n is a, c, g, or t
tactctacagtttgggttttcggagagggtgttgtaaatgatgcaacatctgtggtgcttttcaatgcaatccagagttttgacctcgttaataccagtcctagaattcttctggagtttattggcagctttttgtatttatttttagcaagcactatgctgggagtgattgtaagtgtcttttcgtacaaacctgattcattctgtgatcactgtgcttccaccaaggtgtgatatttttcttttcctttcaggttgggttggttagtgcttacatcatcaaaaagttgtactttggaaggtatgttccatggttttcggggttttctaatcacttcctttttccttattggccgccaatcctttaaacaaccttgaaaaacttctaaaaaattcccttccggggcccctcattgaagggtaacccaaaagaatggttttttgtctttttaaaaattttacttacccaagaaccttactngaccttatttttttaattttaaattttgaaataatttttggaagcacttgaatttaaaatgaatccgggcccccaaaaaaccgggatttgctcttttgaagcttatgggatacc

SEQ ID NO: 6253 - DNA, 653 bp, Gossypium hirsutum
aaggcaaccagttatcttctaaaatctttgtttttttcattactgagtctgctggaactcctgcaatccccacctggagacaaagcctgatcaaattttccgagtgaagatctccattgttacattaaaccgagttccgtagggtgaatcgagaaatataaagcttgcttgaattacagtatatcgacttaccctcgtgtaaaagtctggtggtgaatacgcatcaaaatgggtgtgatggaaatcataataccatccttctcccatatacacagtcaccttttgaaaccaagaacaagaaatcataatcattgactgaatattttcaaaatcatcgatccgacagcgatcgcacactcaccttcaaagttgttttcactggtaacttgattttcggatcaaagacttccatagagttcaatagaaaatctggctttttcacataaccacatcccccattggctttgaacattccatgcatcaaccataaggatcttccgtgaccctatcattcaccaacagataagaatctcaatatttttcaaaggaaattaggaacaacatcaactaaataaagcattcatacaatttccttctaatatccatctggctatcatgtcttacatgacagaacaaagaacaaataggccctg

SEQ ID NO: 6254 - DNA, 626 bp, Gossypium hirsutum
tagagtattacatgcccatgctttcctgctatcttagattctgggaacaattaacttttctgttaccttaaaccaatctaaagtaactaaatatgtaaatgataaaaattaagaagcagttcaaattaacaactgtatgcataaaaatttctatcaccaaaaacattgatgaattgatgttaattttcttaaagaacaaacttattattggatttaattaaaaaaacacatgtacacaaaatcaatctatatttgtgtaaaaaatagaaaacaagcagtacaagataattcataataaaatacagatataaaatggtaatatgaaaaattaaagctgtctttaggggagagaaggaaaaaaaacctaagctccgtcatgaaaatatattcatttttattttctaattttcattttctattttttgattattgaaaacaagaaataaaaatagttttaaataatgaaaatatgataacatgtttggcacctattttcctataatagaaataaaataaaaaaatttcctacattcatatagacttgaaccaaggtaaaagatttgatattttaaaaaattgttgaagaaaaataatattttagtgtttatacgggtttgaaccaaagc

SEQ ID NO: 6255 - DNA, 640 bp, Gossypium hirsutum
  misc_feature (631)..(636): n is a, c, g, or t
tttttgagtgttttttgatactgtctagcctgaattaatgtgctgttaaatcttagattaaacttttttgactaaacaatttcaattgatcactgggttttcagtaatttcctacctttttcttggttttaatccttttactaaactcaaatttgagattttgttgcacttcaatttatcttaatttaatcttgcattgttaattaatccactattaattattactgctaatataattttggataaactacacttttaatcattaaattattaaaagcattcatttaacttattggttcttaaaattgatgttatacagtttcctctatttgtattatttgcactaactaaaaactcttcttttttttttttttaaaaaatttaaaaaaaaaaaaaaaaaaaattttttttccttttcggcaaattaaattttaaaaccttttaaatttaaaaaaaccccccctttttaaaaaaatttggccccttttttaaaaaaacttaaaaaaaaaccccaaaaaaattaaaaaaaaaaattaaaattttttttttggtaaaaaatttaacccggggggaaaaaataaaaattttttttaaaaaattttttcccccctttttaaaaaaacccaacccnnnnnngcca

SEQ ID NO: 6256 - DNA, 321 bp, Gossypium hirsutum
ccatacgaaagtcaagttgattggactgggggtcaaaattcatgcaccaagccatctacgctggtagacccaagaccattcttcagcttgatgagcccaatgaccaaagccaatgctctacgactagctccatgaaacccaaaatgcaggaagaaactcattgtaacgccccacttttgttgtgtttagattggtaaagtatgttaaataatttgatttggtatggtggttaagatatgttaaataatttgatttggtaattggtatggtggttaagtatcttaaatgtttgttttagttcttgaatttaatttttttttt

SEQ ID NO: 6257 - DNA, 662 bp, Gossypium hirsutum
agacactaacaaatttttatgtagtttggagtaaatacgtcttttggtttattgggccttgactagagataaatccattgctaaatcacagtacaaataatgatttaagcttaaccaattactcaattgttataagaagaaaataacaatagtattgcattaagcaaaagatatcctataaagtagatttgatctctcaaatttgtgctcttcatgaaagattgtagtctttacttataaatttcgtacctctagctaaacttaacaagataatcttccaaatcttcaaaataacgataataattggataattctttattcatggatgatcatataccaaataataatagtaaaaggactctctataatttagattatcattacagatataattcatgtgtttatttcactaaaattcaaaataaataaataaataaaaagataatacaagtcaaaattctcaatccaatcatatgattgataatgccacacaagttgttgtaattattgttgtttaacaagtagtacaacaacaaatttggagtaacactccccacaagaaccatcttctaattttgtcaatggcagccacaacacttttcgagccttgaatgccgatatatagtacaatgatgaggcggataataagagagccaagctct

SEQ ID NO: 6258 - DNA, 627 bp, Gossypium hirsutum
atgcttgccgttggatcgacatgggtaaccgtgtaattgccactaggtgtcatgaagcttagttgtcctgtatccatatcgcagtcgaaactgtagtacacaggatcaccgcagtttggtccagtgcttaggggataagggaccaagtttgtgccacaagttaaacaacttcttaatgtcggtgctgcaaagtagaatagatattgttaaatcgggcttatatttcagagttgatggtaattgttcctgcaagaggtgaaaattcaaaatttgcctttagaagttgtgtgtgctggtgtttttcctttctgttctggtatcttaacctttagggtacatcagattggcaggaacaacaatatgccttttatgctgcatttcaaaatagtagaattttcttgaagagatcctttagcagatttgtttacatcaaagtaatatctatcaagattcttgatctacgctatgcaagctgcccatagaatctgcactaaactagccaacaggaaaagagtactgatctatgctttgtgaagagtaaaattaccgatatcagacactggcacacggacgtagagatcgtaaccgtcatcttgatcctcctgaatgcttttgagttcctctgtc

SEQ ID NO: 6259 - DNA, 642 bp, Gossypium hirsutum
tagaattcgacttactgaaaattcacatatagaccttttatatgcttcaaatacttaaaagaagaaagtccacaatcaactaaacttgtctagactcatgcaaagatctttaccattaaaaacttgggtatcctaatttcacaaacaatcatttccactttataaactttctacttaaccaaaacagatgcaacaaatgcgcccaacaaacatatgcaaacactggcgcacatactacatatttcaaagtaagacattcatttacaaaaaagtaaaaaaagcaataaggggattacatatatcagccatatcaaaagtggtaagtccagcatcagcatatcgaagcatagcatcaacagcattgtctcgatcaattctaccccatcccccacttgtttgccacatcccatttacaactctacatatttccaatgagtcagttccattcttaactatgcttcttcttttatcttcagtaatgacacactgaatttggtttggggtcaactttcttattggactacacccagtttttgcttcccatttaaccgaattcaaagtaaagttgcttaaagaactctgtaagaattctgccattcaaattgtttttcacctaaaaaagcatccaataagtgccatata

SEQ ID NO: 6260 - DNA, 570 bp, Gossypium hirsutum
  misc_feature (558)..(560): n is a, c, g, or t
aaactggacaatgagtccctgtacattaaatcaaagataaaactggtgtggttgatgagataaccagataattacatgtggcatgccatgtatacctcatcttgactacagggaccaatttttaacaataaaaatggatgaaaattttaacagaaggactagcttgctctttgatcttatgtataggactaatttagtcaatttttttagtagtgggaataaaatgcaatctgacatatagtacaagggcctccatggtacttttaccttctcatagatcatatttggtccatcttgtaatttggtgatgatacctccactgataaatccattttgtatataccaggggaaaccaagcctatgcgaatggagattcatccaaagctgaggaatcttatacacaagggataagttgtattcctgagagtgagacatctaaaagctgccttcgagcattgatgctgtgctatagcaaccgtgcagctacacgaatgtctcttggaagaatgaaagatgcactaggagattgcatgatggccatggcaatagatcccagcnnncgagggtcac

SEQ ID NO: 6261 - DNA, 598 bp, Gossypium hirsutum
tctcccaccggctgctgctgccatctttcactgtcttgccttcatcatccaactccaaacagctatctagatgcaataatagaaaaaaaattctccaattccagtctaagttaagccttgtagtcttcactcttcaccaatagcggatgatgatagtgggagaaagccagccaaaaaagcaagagaattagaaaaaaaaaatggcaccatccagggcttattaattaataaaacaacaaaaaaggaaaacacagaaaagtcggcagagaaaaaaatggggttaacaaggaattaatggagagggtttaattttgcttgggccaggtaataattagtagaccattgttgctggtcctaagctggattttacaggcagaagccattgatgatgatgctctctttttcttttgctctttgagttacaatgttcttttttattattagtattagtattattcttataaagccgatttgcaaaatggccatcgaagtccattcggtcggaataaaacctaccaacaacatatatcttataattttaaaaccctaataataatactttgatgctaacattatgaccgggtccataatatccaca

SEQ ID NO: 6262 - DNA, 606 bp, Gossypium hirsutum
atatattatgatagtctaagctgcaatatttggtttttgaatgttttagtcctttggttgacgtcaaaattttgcgatgaatatgatggaccacaaattctataagcttaccaccacatagctcaaaaccagcaatagccataccaaaaattttggaggtgaagcagcacctaagtatactagttttttgaaggttccgttggtgtcaaaccactccctcttaccacacgtgtgagagggacatattagtgtgtcaattaatatactgccttccttggtaataaaaaaaactagaccatcttccttggaacatgaatctctaaatattagcttcaccctgcaacttacaatacttccacttgtaattggggaggtttctagttgagccttgaaatctggagtgatttctatctttagccattgtaaagataaggggagaggtttctatcttagcatacacaaaaataaagattgtaaaggttatacattgtccgtgaaatatatcaatttaagttagagaattgggagctctttggcaagtaaggctaaggaagaggacataggcaagtgaggcctgagttttatgcattttggtgtgattttctc

SEQ ID NO: 6263 - DNA, 621 bp, Gossypium hirsutum
gttggagaggattaggattgttgtgaaagggttaggaagttgcaactcttccaaaccatttgcatcatcaattctgtttttgctcacattgaatctatcacttatatctgcaatagcatccccgaagctgaaagaataagtcactagatactttgttccactctcggtttgattactcgttggacatgcacatcgaagtggaactttcaattcaattccaggaaccaatttgtattcactttgtggattagctcgtataagggaactgcatgtggttaatccctggtatgcctcagttcctacagtataatacgtgccatggatgcttgagatgttaaacgtggtgtttgcctgataataccggcctaaacaaaaacagcttacagggatgatcacctctttcccggttgggaactttgcatcctcagttacattattgatgctagcaatctcagcccggtccgaagacatgagaaccgaaatgctgggaactgagttaaaaggaggttgagccttatagataagaaaggcttggcaatttcgatcttggccattgcaagtgtaaagaaatgctgaagaagtgcccgattcatcgatgttgtcatcctcctcagctgatga

SEQ ID NO: 6264 - DNA, 445 bp, Gossypium hirsutum
  misc_feature (18)..(20): n is a, c, g, or t
actgcatataaacgcatnnnctcatccaaattaaccgttattgctttgaaaatttgatgtgaaaattgaaagaaatgggtgaaatatttttacctgtgggacattatttgaatgtaaggtggaatgtgagtattggggggtctctctggcagcagaacttagattgaattgtgacaatggtgtgacttatttcggctagtcaagcacatttaccttgtgagatatcattcatttttattggaaagtttatatattatagttgagctggatagtatcttagtgtagaattactggtattatactgctaatgatttttttttatggagggggttaaaagaaaaataaaatatagagatggagacaagaaagctggtaaaccaaatccacagtatacaaatccatttattttgtatcacatcaactctatacaaagtatcacattctt

SEQ ID NO: 6265 - DNA, 616 bp, Gossypium hirsutum
  misc_feature (57)..(59): n is a, c, g, or t
  misc_feature (469)..(469): n is a, c, g, or t
  misc_feature (549)..(554): n is a, c, g, or t
  misc_feature (556)..(556): n is a, c, g, or t
caacccaaaaataataattgtatatacctcaatggagaattgcaggtccatgctagnnnttctgctggtctgaattccacctacaagttttagaaacaaattttataagcagtagaaacatggccaaacaagataaaaccatataatattgtaacataaacattatgacctaactcatactagaaattacttccaaattaccttggctccgcacttcatggcaatatcttgaaaaactccggccggagtttctccatttggaatagttcgtccagattcaaagtcaagatccttatgactagaagatgatcgaccaaggggcatctcctcaccttcaaaatgtagaacattccaatataacaaaatcaaacaactattatacatcaacatagcaaccacgggggttattactactcaaacagaaaaaataaaaatgacggaaacacctcctcctgctcaaaaacttatnccaattacatctcagatatgtggaatttaaagtgagatgaaacctcaagagtaccaacaataacaagaaacttcacattnnnnnnantgcgcaattaattgcttcagctaacctggaaaagaatgataactagacgggtatgtaccc

SEQ ID NO: 6266 - DNA, 637 bp, Gossypium hirsutum
agggtaagtttctataacatcgatggcgaattcaagaacattgacatgtcgagggattcgatgatcagcaaactttagtctttcttcgagaaggtttagccctccgttatggacgacaaatccgtttgaaagcaaaacgatgcgatcaaacagttcgaggatccgaaaaccaggttggtggatggttaaaacaatagtcttaccttgattaactgccattgatttcagtagtgtcactgcatgaagagctgaagcagaatccaaccctgaagttggttcatcaatcaagataacagcagggtcatgaaccaaatcgaccccgatcgatactcttcgcctttctccacccgaaatgccgttgttcgatccctcacggatcctggaacccgccacatgttccaatcctagctccttcattagctctttcactctagaaccagcttccttcctccctcctggtagcctcaaaagggcactatacatcaacgtttcttcgactgtaagcaacggaaatagcgcgtcgtcttgcgtaacataccccgaaactctccgaaaaactttaacattaataggcttgccattgacaagaacttcccctgatgacacttcacaaggtggtatcttcccagcaagaata

SEQ ID NO: 6267 - DNA, 625 bp, Gossypium hirsutum
tatctgttgctatttaaattcagaaccttgggtgcttccagagcagcctgcaaacagtgaaaacagtgacattactgtgataaaatcataagctacagtttaacattgtacaatttatacctggcataacaagctaaaccgcaattgattgtctttgtagtccacacctgcattagggccatagatttttgatccagttttgccccaaaccttctcgaggaacattgggtgatcaacaaacacacgatcaactccacgtttgtaacaatggaagaatcgagcggtctcgattttgtcaccaacttttacctgcaaattaagagctgatcctcaagaatataatccaaagatggttcactttagttgaatttaacagaataaaataaaccttacttcaactaatacactggtgtcccatgcatccatgtactgatcatatcgaggagacacagtcataacacgatgtccattggccttcacaaatgttcaacacaggcatttattagtatcccatcaaaattaagctaaaaccatacaatacttaccgccattgcaggcggaagtccaccaaggacgtcgccaagtccaccagttttgctccatggaccacactcagctcccacaa

SEQ ID NO: 6268 - DNA, 622 bp, Gossypium hirsutum
  misc_feature (7)..(7): n is a, c, g, or t
  misc_feature (606)..(619): n is a, c, g, or t
cttgcanacacattgttgttaaaatagtcgaattaattggtgcaatagcttcatttcaaaattattcataaatttaaacaattggttataactagtaaaaaacatgagaaatcagcttaaacgcagaaaaaaacctagaatttatactattcatttcaacaattttttctttgcattttttcatcatgttttttttaaatttttttttataaaattatcttttaaaattttaaagtaattaaattaaaaatcgaaaatctaattgatttaacatccgatccacttttacaatattgacatagagtttatcaaagaattcaatttttttattatccataatcccacaacctttacatcaaaaaagaatacaacgaaacgtgctcaaattcactcctatttattgcaataataataataatattaattgaactaaaactcacactataaatttcgagaagaagcacccaatgccatgcatttattatgatgtcatggtatttgttttaagatggaacattttcgggtgcaattataaaaccaaagagagtcctttcaatttgcataaatatatataataaaaagatattaaattagttacttgttagnnnnnnnnnnnnnnttt

SEQ ID NO: 6269 - DNA, 328 bp, Gossypium hirsutum
  misc_feature (306)..(309): n is a, c, g, or t
tatattatgaggtttgttggagtacttgtaaatgcttattgttgtgcagggaacctatcattctctgataagcattctatatgtgatcagattttagtgattttcctattaaatggatgtttcttcttaagtttatatgatctaggcctgtatttgcattaggatgtagatttcatctgatggatcttttagtttatagtacaaatataacatagacccttgtgcacatagagaagttcattgttataacatagaccttaacaattttaagttatgataagggaataaggaaatactcatcttgannnntcttgaatcataagagcta

SEQ ID NO: 6270 - DNA, 574 bp, Gossypium hirsutum
catcgaaaggaggttggatccagggtaggccagggcaaaaaaaaatgcacctgtgctgtacaaacgcaccatggccttgggatttctggtaacaatagccttcagcaatgcagcagcagcttctacaatacttggctcaccagaaagcatagccttttagggaaaaagaaatacatgcaactgtatgagtggaacacttaagacaaaaaattatacttcttataaggggaacacatcctatcattctttcctgaaaactaaaaagtagagtgcaaccttttatttgcaatatctggaaacagcattaaatatcaactaaaacaatacctgtgcaatatgtggaaggcaacgtggacttgacaaaatccgttttaccctaggagttggggtaactatctcaccagcgtcatccaagtctgaatgtgcagaaaccatgctatgtaaaacagacaatgcagcctctcctacctgcaaacagtattaccaattagaaggtatcaagaaaaagattcaaggttatacaaacgttacaaagatagtctactgctacagtagcagtcaaagcaacacgtgt

SEQ ID NO: 6271 - DNA, 516 bp, Gossypium hirsutum
  misc_feature (16)..(16): n is a, c, g, or t
atagcacaggtactgnatgcaggaaaaattaaaagtactaacaccgttctgtgctcatcatcagttaactttcactgtcatcaccaataaaactccttaatccatggcaaacataagttggaccaacctccatccattttacctggcaaaaaaacctcccccgaacaaaagggttaacaacttgaaaataattataaccttaaggaaccaaatttgggccagggggaaaaaaaaccccagaaatttttacccctgaaaacttaattccagccccaacctggaaattggataatccagccagcttggatattttgatttatccccagcctggacctaatttcctggtgaactccagcctccccgaaataaaactccaggttggcgaataccgcccctactattttcccccaccaaaaaggatcccccggaaaggggaaccccaggacccctggaccaaccccttttttactcttcagcattgtggcctcatcattcccccaacaatgacgaaaaaaa

SEQ ID NO: 6272 - DNA, 666 bp, Gossypium hirsutum
gactatctacgggcttacgtgtcggaccttggggaccaccgggcgcttgaacaacttcgtcggattctgcggctgttgacgactctgaaggtggtgtctgctttgccaccgcctgcgcgtgatcccactcctctctctctgttgccgtttgggagattgaaggttttggaacttagaggctgtgatttgtctacttcagcagctaaagggttgcttgaattgaggcatactttggaaaagattgtttgtcataattcaactgtgagtttatttgggatgttttgcatttattaaaccaacgaactaagaatcaattgcccttattttagtttatagtattatgaactgtaatatactattccttcttttggtctcttaatgacagtttagtaatattaatagtaggtgaattactgctagaatttcagaataattcatgggttatgtttgtttttcaaaattatgtaggatgctctgcgacatgtgtttgctagtagaattgctgagataaagggctctccacagtggaaccggttgtcctttgtttcttgtgcatgcaatggcttgttactaatggatgagtctttgaaccttcttcctgctgttgaaacgcttgatttaagtcgaaacaagtttgcaaaggtggataatcttccgaaatgtgtg

SEQ ID NO: 6273 - DNA, 614 bp, Gossypium hirsutum
ctcatactaaacaagcctgttatttgagttcatgttttaatttgagtttctgctatactgttctaaccaatacagtggatggattttgaattgattcacaattatcctacaattctaaggttggtaatgaaggtcacaacacgaaattcgtagcgaccagtcagctcttcatattgctgatgtcatcctgatcgtcgaaaccaccaccatgaagatgatgttccctgcaaatccaaagaacagactgacatgttactcatcgaaacaagttaaagcagagaatgagtatgaaagtggaaattttatgcaaaggagcaattaggcagaatgaagcccaaaaaggaaaacagtacctcagtctctcgcaaagacgtgctaaagcatctgctccagttcgagaagcaacatcccctatccgtgcagcatttgataaggtcacacactctgcaagcctaaactcgcaaagttctttcaaagaacatgcatcagtcaatacagcggaatgaccacccccagctgctagttttcgcacttcaccaacacacctacaatatagaattgtcatctaaacagaacaccataaaagttgcaaaagcctatgacacaacaatttt

SEQ ID NO: 6274 - DNA, 654 bp, Gossypium hirsutum
ctctctgtgtagcatcaagtaaggagaaagtatccaaggagtccttttcagaaattgtccagtagcaccttctgcagccatcaaggagcatctgcatagcattggcatctcgcatcactgttgactgtgtgaagaccatatctgcaagcgatgatagaagtttcttttggagcccatagctgcacaaactccaaattttaagatccaaaagcagtgtactgaaaagctgcactttaagtacgtaattatgcttctgagattgacatagagaaaccacagctgcaacaagctcctcatctcccacaccatcatgctttccatccccaagagaagacaaagtttgtaaaagatagtctaagattcttgaaagaatctcaagtccccttgtgcgacgtatctcttcattgttccctgggtggtggagggcaatagaaataattctaaatattggagcagctagagctgctgtagccaaagacaatggaagactaccctgttctggttccaagctatcttgacacattttgctgacagccagaggaagtaaggacatgggacctccataggctaaagcccaaagagcctccacaggtctcattcgtgttgcaacatggacttgtccaagaacctcagcaggtctacgcagaattccta

SEQ ID NO: 6275 - DNA, 622 bp, Gossypium hirsutum
atatatttttagttttctccttttcttcacaagcttggttttagtgacagttttacttggttatatgcagaaaggtgtttcgttgtttaacaggaagccatccaaaggcattgagtttcttataaataccaaaaaggttggcaactctccagaggaagtggctgcttttctgaagagtaacactactgggttgaatgaagccatgattggtgattatttgggtgaaagggaggattttgctttgaaagttatgcatgcttatgtggattcctttgatttcaaatctatggattttggtgaagcgataaggttcttcctacaaggcttcaggttaccaggagaagcacagaaaattgaccgcatcatggaaaagtttgctgagcgctattgtaaatgtaatcctaactcatttaccagtgcagatactgcctatgtactggcatactctgtcataatgctcaacactgatgctcataatagcatggtcaaagacaaggtttgtttcttcagcacgttatcaaattgtgagctttagcttacatgcttatgcatatacttgtcttttgaagaactcctttatgatctattctgggacttgtaagccattctggtgctttaattc

SEQ ID NO: 6276 - DNA, 630 bp, Gossypium hirsutum
  misc_feature (621)..(627): n is a, c, g, or t
gatgctacttctaattgaaggatcaacagccttcaaagtttttgatgtaactgaaaggtcatcagctggttcaggactggacatgggaggaagttccacttcatcaatttcttctatctctgtttcttttgggcaatgaatgtcatcttcactcagcaagtctgtctcacaactttcttttacagaagactgaatggaacctctcttgtccgatggatctcttaagtttgtctcacaagagctatctaaataatctagctgctgacgtagttcctttacatcttcctcgccaatattaatctcttcctcgtattcgttatctatgcgtggcaggatcaaagagcggttaaggcttattcttaactggttcaagctttcacgtgcattccaccctttaaaatatccacttgtactcccaactgagttatatgcatcagactttgctcttataagctcttcctgtaattgatataacagcaagtcaagttatgattaagtacaataaaaagggcaactaatgtagaaacttttcgaccttcagttgacgaatctgatcactcaagccatttacatcatcttcagatatttcatttattactggctcgtttcttacagctttannnnnnnaaa

SEQ ID NO: 6277 - DNA, 581 bp, Gossypium hirsutum
caccgaagagatcctgagctgattttacaacctcttgaaatggttttgtagaattgagaagagtacatctaacatagcggttaatatcattggcagtttgaaccattccaccagccacaacttctagaattgcatgagtcattccattcttatcttctgataaacaagactgcaatggtgggcagctttcatttagaagtcctttaattctcttgatctcttctgtcttgcaaataagcacctgtgtacacatgaaaatggtagaaagaaaattaataattaatggaaaaccaaaaaggaaaaagaaaacttatttcaaatacaatgaaaagaaatgaaaatgaacagttgtaactattagagtcaatacaattactgtaaatgcagaatataaaaaatgacaagacaaaaacagatacccataaaattattgaacctacactttctccttttgtatcaataccagtccgaccagcccgaccagccatctgtttgtatctagtcccatcaataaaatcacggccaattcggggttgtcgaaaaattactctcctggcaggtaagtgacaccagcagctaag

SEQ ID NO: 6278 - DNA, 360 bp, Gossypium hirsutum
atcgcagatgtgggttagagagctgaaatcagagtttggttcttttttgttggtctacaaagatgtgccaggtgatgattccattttacaacacaagctggtgtcttttcccttaattttttaaggcttgtgggtgaagaaccagaggaaagaaagtaaagaaaatgaaggttgggttggagggtgtgaaaattaaatacgtttactcgtttctgcaatgtctttatgactctctctctctctatctcggtggttgctggctgagggaatattataatggagaattagcaattttgcacccttgtatatttttctgatctctcaagtctactcaatatctttgcgtatttccatttccat

SEQ ID NO: 6279 - DNA, 660 bp, Gossypium hirsutum
  misc_feature (5)..(10): n is a, c, g, or t
  misc_feature (12)..(13): n is a, c, g, or t
aaaannnnnnanngctaaagcaaagcaattgaaagaggccatttttgttcaaagatttcgaaacaaatgaagcagatgaaacgaagttctttatctgaatagttgtgagtgaggaaaacaaagcatggtattgaggtttatataggcattggagtagtgaatagaaatcccctgcccttaaacaatgccccctgcatgcccccaaaccaaattagcgccacatgttttttattttttccattttaattgtagttcattttttaaataaaaaatttataatgatttgaattaatttttaacttattatcaacgtttttatttttgttttatttttattttacattaattttacctattatttaattaacaaatttataatgacttagagtttatctaatagaggttttttttttataatcggtcttatgataaaattttataaggtgggaacaagtcccacagtgacaacattatccttcaatttttggtggtggcatgcctttagtcaaaggatcagctaacatctgctcaatgctaatgtgctcaatgaccaatttcttttctttaacatgttccctcatgcctaggtacttaaagtcaatatgtttacttcaacttccacttcttccgttcttacccataaaaacagcagttgaattg

SEQ ID NO: 6280 - DNA, 377 bp, Gossypium hirsutum
cttctctgccatccctgctgctaggcccacgctattaaccaacttcagatattgggttatagtggcaatcgcccattccataaattcaaaacaatttagtggactttcattttttttcacgagacgttcttcacaaactaagtcaatgttagaacaggaaaaaagattatttaattgcggaagcaataataaaagtagaaaaagtgaagaaacaaatagtaagtaagtaccataacatatggcaataagttgcattcttattgcgtgataaatagtttaattcaagtggtcatttagttatttttaaaagttaactttatttgaaataaaggtttttttttttatatctcattccccccggccgggtggaaaaaaag

SEQ ID NO: 6281 - DNA, 604 bp, Gossypium hirsutum
ctagctcagacacacaatttgccaagttgcgatattttgcttctgaggacgacctggaaaccactggttgtttcttggagcaccaagctattggattagctcccaaatacacaacgtagcctgtggtagaacgtttgtcttcagctgaagatgcccaatcagcgtctgagtagcaaacaagctgaaactacccttgagcaaaaaacaacccatgctccctagttcccacaagataatgaagcacacgtttaacagccttccagtgagactcactaggagagttcatatattgactgggcttgttaacacaataggagagatcaggtcgagtaatgcataggtattgaagcataccaatggtgacgcgataaagctggccatcaacaggcttttgactgtcatcagagacagactaatacgtgcaacaaactccaacttctggaaggatgcatttaggctctgtttgattgccagtaaaatattttctgtaaaatgatttcgggaaaatgttttacttttctgtaaaataatttactggaaaatattttctggtgtttgattgaatctgtgtaaaatattttcggctgtttggcagatttcctgg

SEQ ID NO: 6282 - DNA, 494 bp, Gossypium hirsutum
  misc_feature (57)..(57): n is a, c, g, or t
  misc_feature (62)..(62): n is a, c, g, or t
  misc_feature (143)..(143): n is a, c, g, or t
ataatcttctatgtcttgatttctccactttgatgcctaaattaatttttttaatcntcccntaaacaggctctactttttggttctttttgaatacattccagcttcattgaggctacctagtaaatggttggataaattcncaacttttatcaataaaaaaaatatcaaactccatgaaaaaaaaggaaaagaaaaaacattgttatgctctcaatataacaggttcttatattgggagatgaatttttgatcgaactgttcttgtaattccatggttattatttgtgctaaataaatcaatctatgcagtctccttaaagttgatgaatgttgttaccctttttcccctactccaagaagaaaaaatgaatcaatgaaattttcaaaaaaaaaaaataatcaatgaacattttggccgtttgagaggaagctgaaaatcctgagcttcctttatattgcattaactgtcaaatgtaagtttgtgatttttc

SEQ ID NO: 6283 - DNA, 655 bp, Gossypium hirsutum
  misc_feature (605)..(624): n is a, c, g, or t
  misc_feature (629)..(632): n is a, c, g, or t
  misc_feature (634)..(636): n is a, c, g, or t
tccagctccatatctgcaataatccaaaaacaaatttcgcttcattaaaacatttcttaaaaagagtgtgctgcaacaatttaaccaaggcataaacaaattacctgggaaaccacaacgtgcctccgtccattatcaccatcctcaactccaaagtcatgcccatgtccatgactatgcccctgttgatgaccctcttcatgtccacgactcctcagcaaccaatcacagccatcttgcccatggggatgactatgcctatggtgtgcagcatgtgcatgcatcccaacaatgtgcatgcctccaccttcttctgccccaaaaaccttcgcatgcaagtcccttccttccaggaccggtacagtcccgaactctgaatccgactctactgactcgacgcggcctgactctcctgtatttcccctacccaaaccttgtttcctctcataatactgagtccccacaaaatccacaagcaaagtaagcaaagaagcaatcatagcaaagaagcctgaaaatgggaactttgaccaagggtgttcgggcaagcaaggattcgtgagagcttcgttaccatcggcaagcatgtggacgaagccggtggnnnnnnnnnnnnnnnnnnnntaacnnnngnnntgggtagggggaaaataca

SEQ ID NO: 6284 - DNA, 621 bp, Gossypium hirsutum
aataaaaagaaatagattgtaagataatagctaaaatagtaaacagagggaaacgcaaaattcaaaaataaaaaacatatattaaaatataaacaaacaaaaataacaaccacaccgagatccataggcttcaaacacacaacaaacagttaattgtaaagcagaaaacaaaaatcctaaaaaaaatacacactgaaatacgagtaaaaaagcgtagatttgaaactaaaacaataaaacattcaaataattcttaattatgtgacatgtataaatcaaaaacatttattaaaaaaaactctaaaaatttaatttacattaaagttttttaaatttatttaatttaaaaacaattgctttaaaattagacagtcatgttcaaaaatattttagaaatctttttaaagttaaatactatcgaaagaaaaccggatataaaaacaacgcaaacacattccaaaacaactcaacccaaaacactaaaaaataaaaacaagcccgagcaaaaaaatagatcacaaaccggtatccaaaaagagaacacaaagatttagagacttccacaatcgaagcaacttacagtgcatttacaaatagggtcagacagctttccgtcatttc

SEQ ID NO: 6285 - DNA, 585 bp, Gossypium hirsutum
tgatgataacttagatggctaggttttcaaattggatgaggtggctgatcaccttcttcataggaaaatgctgggttggaaaacattatgcatgtgtaaattttcaagctttttgagtgctttagtagatggttttgatggttttcattgcaggatgggacaatgtcatttattcctagcatttcactaccaactaatacggcgtcatttgcattcaagcgacgcttcactccatcggataaattgaggttagtagttactactttatctttgtaaatattggaatctgtcatgaatgtgcttaatagctagaggtgccatttcttttgttttgcattatatatatatatggaaacatatttgattcattagctatagagggttgctttttccctgcaatgtcaatttcaattgaaatgttctattgcatttatgtgcagctactggtacaatcttgattcaaactattggagtgtggtgtacaagcacacgtatgacaaagacttgaaattcaaagctggctacgattctgaggctcgtctttgctgctcttctctatgggtaagtttattctgttttctctag

SEQ ID NO: 6286 - DNA, 624 bp, Gossypium hirsutum
ttctctctgcgcctgtgatcacacgtaaaatataaattacatttactccattaccagacaccatgagaaaatttcttatataaatttattaaaaattgacgttgaaaaaatttaaatttcatgattgtattttttaaatttatcaaaatataaaaatttatgaaataatatttgttgcttgtaaaagaaatgtccttttaataatttcggaagtaagttgtgacccgattattgtgtgacctcaattcagtcaagcataaaattataataattagtaattcgatgatatgcgtgtccgagtagaaaccacacatttagaacataagtgttggtttaaaaataacatcaatgaaatataaaataatcaaaacaaagctttgattgaaatagtaaaattgcaaataacaaatatgacatcattatggtccgtgcattattgaagttttagtatataatatgattttcaaatatcttttttattatcgataaatttagtggattgaattgttaaaatataaatcgtacaaaaatatatcaaaaaatgatttattcaattgtatatttataataattgatttttattgtaattatcaatataattgtaagttgtaacttcggtgagga

SEQ ID NO: 6287 - DNA, 654 bp, Gossypium hirsutum
ccaatcgagaccttctagcttgccgaaaggccatgcaaggtccatagaagggttggtggtggggggggcatggaagaactcccgccctgattggtggggcatgcctgaaaggggctagggattaaggaaggggactcagaatcagagattttgtcggtcatcaatgaccacatttttgtgttaagggaagagaaaagaagacaaagcaaaacgtaaaagaaaaaaaaacaaacgtatttggtttgttgaatttgccatgaaaaccagcaaagacaggttgttaatctcacttaagatagcaattttcaatttaataatttatttttcacttttttatctgattttctctagagtatcaaatattttctataattagatcccacaaatataatttttatatttgtgaaatactctccttttctatctttttctttagtccccaaattctttgatttttaaaaaaaggacttatatagttattgtctaggacacatatttatattcaaattggttaaattaaactttaaaatttgtatttgtcctagtattattttattaaaaaaatataagataaaaacattctcctattaatatttcttattttgtatataaaagtgtattttaataatttttcaagtgagtgaatcgtgacac

SEQ ID NO: 6288 - DNA, 634 bp, Gossypium hirsutum
  misc_feature (628)..(630): n is a, c, g, or t
taacaaattcatagtcaacattagaatttcaaggcgttacagtaaggtaattaaagtcaaattgtatcaattggttggacaaaatataaatcagtatattaactaaaaaaaagaaattgaataggtcgactcgtgaaccaagctaataaatcaatcaaatcgatggatgggttgatttttttatattttaatatattttttatttctaaaatattattaaaaaattaattttctttcatttcaataaatagaaataaatttttcgtccaaattttttcattccacctactaagcacatttattagaaaaaatatatatatgttttactcctcaatcttttttctttctacattaattatttaaaccaacatttaaataaatgattccttcttgtgaaaaaagaaaatagttatctttcaatgggtttgcgcttcaagggttcctaactactaaagtttgaagaccaaagtcgtcgctttgtgtttcaagggttttccagttttccttttcattctctgctcctttcatttgcaatctcactttctcaaaagttgggtaaactagaagacattaaaactctaaagctcatcaatccttttgcttaagtaggaggaggtattatgctttnnntgct

SEQ ID NO: 6289 - DNA, 630 bp, Gossypium hirsutum
tattaaaaatataaaatttttacttttttaccattataataaataataaaactttttactgaaacataattttaaaacaaactaatattaatatacacaaattctagtagaaaaaaatacattcaccaataaaatactattttaacccaaacaattctcatgaaagcgaatagcctgcaaataactttaaattacattaaaaaataaaatttaataaataagagacgtattcgtaatagaaaaagacaaagacacataataccttcttttaattgcattgctaatatacctaataataatccttaaaaagagttttcttatagagattggtaatgcttaaaacatatattcttttgaagaaaaaaagttattttaattaattaaaagaaaggaattgaaaaagtaaaaaaaaaattagatcaaatacaagatcaaatccaaaaatgtatatgaagaagttatccaaaatttttagagaaaatcagatggagaatcatattgatcttttaactttcgatttgaatcagtgtaatttgatttaatataacagtaacagaagaagaaaatggaaaggcatacccgaaagttgaatcatcagtaaaacaagacctaacagtcctcgcgttgaag

SEQ ID NO: 6290 - DNA, 642 bp, Gossypium hirsutum
ttacctgggcaattgcatatggcatggcagaatacattccagcagctttttctctataaaagactgtcctttcaacagccaccacgggctgcacggatgcagcattttggatgccaaggaaaagaacagcagcatacattgaacccattgcattggccagatcttgcctttttttcctgtaaatttacaacgtgtcaatagatatatgaatatgataaaagtccaacgatgaagctgagcatttgtacttgcttgttatagcttacgttttagtgccgaggtcccagaacagtgtcccaaacatcaatgctatgacagtagtaaaaagtaatctcacagcagtataagcggggttgcgccaatatgaccaccgttgcttccataagcaagcagcacactgagtcaagaatggctgagagaactgagttggaaaatagagttcctttgaaccaggagccggtttgcttaaatctttaataagagttttgtttctcctaaacaattgacattcatcagttttaaattcaagctcatataatcttatgttgagttaaagtaaacagattattgcagtgttgattattacttgtataactcttgactttttgtagatatcagcaaaatcaacacctaaagctaatt

SEQ ID NO: 6291 - DNA, 516 bp, Gossypium hirsutum
tacaccttctatacttgttggaagctcaggcaatgattcaagcgccctgcaatttgacaatctaagaaattcaagcttggaaatttgagtaagacacgaaggtatggtgatgaaattgttaccaccaagatcaagttcttccaaacaggatagacgcgaaatatccctaggaatatctccttcacaaagattgcagtcacttagattcagccttgttaataaactcaaacctaacaacgaaggaaacatcagagccatggaatttgtccttcctctttggattacctttaacagagaaggcagatatttttgtagcttggaaggaggtcccttgatcccattaaaagacagaactttaagatttttaaattgaaaaatgaagggtggtggttttgtcatagatgtttcacttaagtcaagctcctctaagaattttacttgctgcaaattctctggcaaactttcaactttatgacaaccagaaaggttaagaatttttaaacttttcacctacct

SEQ ID NO: 6292 - DNA, 604 bp, Gossypium hirsutum
caggaggctttttgttattttcttctgtttgagaggtttggtcggtgaaagaggaactcccacctgacaaccctgtagaaatttcacttccccagtcccctgcatcaacctccctgaaatcttcacacagtaagtactcccttacgtcgtaagggttaggtggacctctgccgtccctcctaaacaaagccaaacaacaaaccaaaaatgattttcctttttattagaaaaagaaaagctataatattgaggaacaaaccatgatgaataaaacagaagttcatagttaaatgcaagacagaacataagaatgtccattactgaatgccatacacgatatgaaacaaaataaaggttaaattggtccgcatgattcactcaagcaatcaattcaatggtagttaggaaacgagaaatactagttcactgttcatgggaattggaaacaaaagtgggctgcatggtcatagacacatagtagttaatgatgttagtagtagtaccggtaatatattactatggcagtacagcataggaagcaccagtgctgggactgtgacagtatttgtaaggcgaagtggacagcaccaccaccaacactggg

SEQ ID NO: 6293 - DNA, 640 bp, Gossypium hirsutum
  misc_feature (57)..(59): n is a, c, g, or t
gggtagtggtagcaaacacacaggtaactggatctatattgaacaacatggcagtcnnnataggactagatttaaaccgcaaatgaaaatataactaaagaactttattgaaaaaaaaatggaaaatataaaaagcgcctgagactgagatatatgggtacccccacaaatcttatacacattcccctcttctctcacaacgtggcgcgcaatatgaatctctatgcatataaaaaaaaccccactgtgaaactatatctcaaaaaagacccactgtgttttcccatacaccctgtggtaaggagaacatataaaattttcctcctcctcagacagaaaagaatgtgcaatttttttctccgctcccccctccccccctctaattaaattttgagaacacaaactcttataaatccccacaaaatataccctataaaaaaggggctaaaaaaaatttttaaaaaaaaatacaagtagaaaaggcgaagagtattatcctcggaactggggagaaaacaggagccgtcgggagacctgcaaaagaccaaacccatacaactcaaaataaaatgggggaaaaagagaataggagaagggggaaaaaggggaaggaaaaataccatttgacgctttgagaaat

SEQ ID NO: 6294 - DNA, 506 bp, Gossypium hirsutum
  misc_feature (296)..(296): n is a, c, g, or t
  misc_feature (328)..(329): n is a, c, g, or t
  misc_feature (341)..(342): n is a, c, g, or t
  misc_feature (344)..(345): n is a, c, g, or t
  misc_feature (359)..(384): n is a, c, g, or t
  misc_feature (386)..(402): n is a, c, g, or t
  misc_feature (405)..(452): n is a, c, g, or t
  misc_feature (471)..(473): n is a, c, g, or t
  misc_feature (475)..(477): n is a, c, g, or t
  misc_feature (479)..(479): n is a, c, g, or t
  misc_feature (481)..(495): n is a, c, g, or t
  misc_feature (498)..(499): n is a, c, g, or t
acatgtattttattacagatgagattgggaattggtgccaatctctgtgattgcttttaaaaaactgtggaactcattgtccacgtgttggcatagaagagaagcaggagtcttcttggtgagttccttccataacctttcaaaatacaaacatgtccaccacgatcatttctgtctcagtttttccataggatcatttcccattaatctatatattatatcctttttcctgtagaaaaaaccaggggctgcctcctatatcatctttcatcagtgctctcaactaaaacctcgcnttttcccatgtgagtctctctttctctctcanntgcttgaaatgnncnngggctattttgttnnnnnnnnnnnnnnnnnnnnnnnnnnannnnnnnnnnnnnnnnnctnnnnnnnnnnnnnnnnnnnnnnnnnnnnnnnnnnnnnnnnnnnnnnnntttgggggatttaaaaaannnannngnannnnnnnnnnnnnnnaannatttttt

SEQ ID NO: 6295 - DNA, 587 bp, Gossypium hirsutum
gatataattgtaaacttggttgactacagttatttctatctccaaaatggcatttaagagttcttatacgaaataagtttcgttgattctgtgaagttacagtaagattgaataaataatagatattaaactgttttacaaggttttattagaagcttttagatataattcatggacgactcctttttttgtgtgcaaaagtgatatgagtctctaggtgatgtgttttcttgtgtcttacatgggatatgaaactgtgtctgtttgtgaattgtagagctgatttgaattaggtttgggtttacttcagctatgttacattgatttaggacttggtctcaggcattttatatgttaggcataactttttgtcttttcttttgaaactgttcatcatttcctatgaactaaaagcattcaagaatagggggataaagttatggtaggatgaactgaagagtccatgtatcactgtatatttgtttctttcttgattacctatatcttttgttgaccatctctatttttacattatcatttataatgggctgctgtatatgaattgttggtatttttacctctttttc

SEQ ID NO: 6296 - DNA, 571 bp, Gossypium hirsutum
  misc_feature (550)..(550): n is a, c, g, or t
  misc_feature (552)..(552): n is a, c, g, or t
  misc_feature (563)..(563): n is a, c, g, or t
aaaggagcccagacgtaagttgcttcaagaaaacaactctcttccctataaaccttccagccaacaaaattaacacggtccctggtgtaatgcttgctgtaactttgctacggtaatctcgagaacagctatgctatctaaaagctcctgggcctgaaatccaagtttcagaaattgagaaaagaaaataaaaaaagaacagaaatcccatagaaggagactgaccttatctggaagcttgcctggagaactagaagaaggtgaaccataatgttgaacagcacttgctagagctaagtgcaaatcggtctctttttgcaactgctgctgcaactttttaacctgtatcacccaagtggtagcatgttgcatgagaatgagatataaatcctgcacaaagctggctgttaccggtaagaaaaaaaagaaaatcaaaacatgtatatcatgataacggcatgtcattcattagcaaaaccgttaattctcaacgagtaaacaattgtttcatgttttcatatgtctccccttaaaagtctattgttatgcngntgcttctttgntggtataa

SEQ ID NO: 6297 - DNA, 564 bp, Gossypium hirsutum
agtctccacgcatcacaagagtcttgtactcaatcaggctgagaagtaatgtgtatcccataacactgtacaatatgacacaaatgagtgaagatagacattaaaaatgccttttcaaagcaaaacaaacatgcaattttatataaaaattagcaatcactagccaacttacttgaactctttgtctatcagatatacccgactttggctagcaagatatcccaacaagtacattggacgatccaaatgaaacattgtcgttacctaaaatcattaaatcatcaaagtgaaaccatcaaaacctacaaaacccaatgcatctaaatgtatggaacaatttcaacccaaggataaacatataacaaatacctctccaccgacacagtaattaagcctccaagaagagttgttgtaaatgaaacagtccccaacccaaatgccggtcctgacacgttcattggtttcatgaagtagttcaaatgcatcctcaactccttcttcatcaaccggtcttccactatctaagtaagattgaactacatctcgctgcatcatgaagttatc

SEQ ID NO: 6298 - DNA, 614 bp, Gossypium hirsutum
tttttgttcattttgtaatgttatcttagctgaaatgtaactaaactttagagttgttaggatatgaatttgatggatgtaatggctgaattattcagcttttcaatttgtatcattttgtattgcaacttgctaaaactgatgggagcagttacaagtttaggtaactgtcataccaattttgtaacactttatatttcaaatgaaatgaaaagtaaatgtataccattcggttacatgtttttgtttttctttgtttttctctgcttgctgtttgagagcttatgctctttgtgtttcatttgttttgtttactgccattgttccaacagtatcaaactttgtaaacatttatatatatattttaattattttttggtaccaatacatgtgaacttccaacagtttgtctttgttgacctgcgaattttcttcctctctgtttttgtttaccaaaatattctcaatctttcatataactccataagcatctttgatttattccttgcttctatttccagaaattgttcagctcactcttctaaaatcaaaacctggtatgggtaatatcttctccatctcactttcactcgataccatcattaccccgttgt

SEQ ID NO: 6299 - DNA, 623 bp, Gossypium hirsutum
  misc_feature (66)..(66): n is a, c, g, or t
gatagcttatgattacagtggtttctgatttctgaaaaggttgtttccctttttcttcctaggcanttttggggtctagtgtagaggttactgtggtttcaaaagtaatactctgtctccattctccctgaatccccctttataaggtgttcttaatcagtttttttgacaaaatagtgttattaattttttccttcgtttcttgcaacaaaaacaccggaaagaatatcaataagagaaatctatttattctcattgttgcttaagagtgaccccatttgcttttaaggttttttgaaatcataggcactgctatcaaggtgactagtaaaaagccgtggaatgaaacagacccaatatggggatttagcaaaatctggaaaattgagctactagtctagcaaatggcacaatgcctttggaaattgtttgaagcataaatataaaaagcaggactgtcagcattaaaatataaaaaattaggtagcttgaagtgaaagatgtaaccaataacttcactagaagagacccattgattccttgtaaaagagaagctactagcaaagttcctcatgagtccatcaataagtcacgataaagcttccgaatacaattgtgatggt

SEQ ID NO: 6300 - DNA, 681 bp, Gossypium hirsutum
  misc_feature (604)..(609): n is a, c, g, or t
  misc_feature (630)..(632): n is a, c, g, or t
  misc_feature (635)..(635): n is a, c, g, or t
atgtccggattagtctttgatggtcctggctgcatttccaagcacttctgcccttctggcatctaactcagccatctgaccagctctaaggaaaactttggtcttacctatctgcaatgccagtcatgttaaatagagtggaatacacaagttgattactgcatatagatgatcacacaatatttgtaatcatggtggatattagaaacagatggctatttccagtatcacctttgacatagatatgattggttaacaactggtaaaggtggtctttaaccccaaaagaaacagttatctgtccaaccaaattgggtacttctgtgacagatatgacaggctaacaactggtaaaggtggtctttaaccccaaaggaatcaggtctaacatggagtttgttcttgtggtcatcctacttggataacaatgctattagtcatggttttcacatttcctaaccatgctctacattgaacatgttaaggaataaaccagtcattaccgaacccttgtcatgtttttctttttttaaagatttaaagctataagcagaaattttcattataaatcacttccttacccgtactatccataaaaccaatnnnnnntaatatcccatgcttactggnnnaanctgtcaccaatagtgctaatagcccatgcttactggcataaagtgt

SEQ ID NO: 6301 - DNA, 615 bp, Gossypium hirsutum
agtatgatgttcttatcattgtgtttggtgttatccttgcattttactctttgatcttgaaagccctatttgagttcaatgcttcctttcaaaagttatttagcttggtagaatctgtggaggtactattttatttgagcatgtttttatgattgtatttgttgatctatctactgtaattttcatggttttgtcaagatatcatttcatattcccttaatttctatgtttgtctttggtctctgctgactgtacatggtgactcccccatgatccttaccctcaatttttgcttttccattttaagctgtttgagtcgtaagtaaaatgtttccattggaaaaggtcaaattatttcactcttaaacttttccaaagcgactttcctcataaagcgttgacagcaataggatctattaaacaaacaatttaacactgctttccaattcttctttccttttgacttcttaaaatacatgtttagttgaaaagtggcaataaaaacaggcagcaaatggatgggttacctcatttataccttttcaaaacttcagagctaaagttctatactttggctgcttgcagtcatttaggatgctaatgtcggtttagatt

SEQ ID NO: 6302 - DNA, 504 bp, Gossypium hirsutum
gagtttaaatcataacatgggcattttcactggcttccactgatattgcattctctatttctttattcttgtagggtattcgctggctacaacaaatctgttagagtgtttgatgtacatcgacctggtagagattttgtacaatattcaacactacaagggaacaaagaaggtcaaacgggtaatttttgtactgagctagttaatgatcgcactgaagctaaagcatattgtaatgatcttagcattggactacaggtattatatctgcaattgccttttgtcctactcacactggaatgctagcgacgggatcttacagccaaactactgcaatatatagggaagacaatatggagctcttatatgttttacatggacaagaaggtgggataacgcatgtaagttagcattgattcccgtcacatggttttatttattatactggctaggaaaggcaaaatgtttttctttttcacctttgtttcaggtgcaattttcaaa

SEQ ID NO: 6303 - DNA, 623 bp, Gossypium hirsutum
  misc_feature (604)..(608): n is a, c, g, or t
aaattctttctctttttatttttcttgttcttcattttgttattaccttcttgaacttcaggcttcccaagatcatcatcaaatgacaaagacattaaaacctgaaaagtatcgaaaattaaccaaagaaaaaggaaggagcaggtagacagttacacaaaaaagtacatatcatgtgaattaataaggaaacagttatcagtagctaatttgataaacggccacctggcagattatcagttaaaaacagaggatgacatttccacatcttattaacatcttaaagacaaacattcataatacaatctgaagtcttcagttgccgagctccaactggcattccatataacaacttcaaatcccttttatgtgagaaaaggtggagaaacaaaatggaaaaggaacttgaataaagtcagtatcttctatagcaaggttatggaattaaaacagattctaatcatgcaactatttcagcttaccattatttgcacaaaaagcaaaaggcatacaaataaccataaatgcagcagaaatgtattcaataccttaacagaatcaggatgcaattgacagtcatgaaccttgacgtgatctgcaatcnnnnnaacagcctcaacagt

SEQ ID NO: 6304 - DNA, 566 bp, Gossypium hirsutum
  misc_feature (374)..(374): n is a, c, g, or t
  misc_feature (533)..(533): n is a, c, g, or t
tttgaagtcaattataaccaagagtcccacaacgggcacacgtattttaatttggttaaaatatgttatatagcattctgtgttctttgtaaattagaaatttaatctgggaattttattctcttatttttcaacagttagcggtattaaaattattttagtaacttcgagtttgttacaatgaatctttttatttacataactattgattgagtattttcttattttaaaatatcacacaaacaaatttaacactgttaataattagatttgtgttttgaaatctgaaaaaaaaaattaagttcctgaaaataaaaatataaggattaaattacaagaacttatgttatattttaaccttttgattttaactntggggaagaagttaggacgactatataaaacgctgcgtttaggttcaagaaaagtaaaaaccgggataggcaaccttgtgctatgtagccaaacaatccaaaattctcagacaaaaccctaggacagcttatatttagatgtagaagcaaccctcgctnccaaaaagaggctaacagaggagcagagaaggg

SEQ ID NO: 6305 - DNA, 346 bp, Gossypium hirsutum
tttttttattagtctaataacaaatttactcattaatgtttacaaaatttattgttttagtacaaattctaaaaattttaacaaattcaaccttcaacacaaatttacaaaaaataaaataaaatatacaaaaattttagactatggacttgaatttggttgtgtttatgagttgaaaattgaaccatttatctgtttaagattggttaatgcagaaaatgcaacttctgtacccttagaagttagccttaatcgttttgaagagctttattaggaaaaaaaacatgctgaaattcccttcaatgatcactttgataatacaataatcagagttaaaaaaaaaaaa

SEQ ID NO: 6306 - DNA, 617 bp, Gossypium hirsutum
caattatcttcacactaaatatcataggaaaagaaaaggaaattgacgtggcttgtgagagagtttacaaatggtgattttttttaaaaatatttttttaaaaaaattgataaatttcgtaaattgcagagttaatttattgattttttttttagaatttgaactaaaatgacaatttataatttattgaattttttatatttaggatcaaattgatagaatgtataaatattaaagggctaaatttattattagatcaataaaaaagctcacatcaccttttcgttagacttgtctatgggttgggccattcgactcagctcgaagacccgtccaaaaaatgggagggtttggacaaaaatataagcccgaaaatgggcttgggtaaaaaataaggctagcttaaaaacaggttgggcatcgggtaagattttttggtctcaacttggctcagatacatacctaaaagtttcaatacccttaataaagtatcaatacttttacaaaagtatcgataccatgtctagtatcgataccgttttaaggtttgatattttggaaattaaagaaaaattgtttgagtatcaatctctcctcaaagggtgaatacctcatag

SEQ ID NO: 6307 - DNA, 648 bp, Gossypium hirsutum
agagaggaaactcacactgacgaatccgtgacgcattgtacaataatcggccttgcgaacagacctgaagaattgtcgccacatgcatacctggaaaaagttcattcattcctttgaataagtgtagttacaaccagaaagcttggctttaagctagtctcaagttcgtacataataagtagcctctcaattctcatccttggccgtgggaagagtcattttgatagtaataaaggaatggtattggcaccagattattagaaaaccaaaatacaattactactgctttgacactcaatattatactatatatatcaaataaataattatataataatgttgaagataatttagaattttattgtattcatgaatcattctagtgagaaatttcactccaataattttactgacagcagcgtttattttatttaaaaaaataaaaaatgaagagttgaaaacatatattaatccttacaaaataaaaggagaattttgtttttgtccaagctcctctggtgtggtctcttacaaatgatgtctcatgagtgagcctaaatcttgaaggatctaaattagcaagcaagtagccaaattagtgaacatgtgaagaaattaaaacatgacgaggcatcaatgaattaagtg

SEQ ID NO: 6308 - DNA, 442 bp, Gossypium hirsutum
aaatgaaatgctaaaactagcctctttagaattttaaagcttttcattcctcatatttaatgatatgaaaccaccacacacacacaagtgtacacttatacaaagagacaacagagatgtaaaagctgcacaaactagaaatgcataaagttcacacctccatatttttttgcaacttatcgtgccctttgagtaggaggtgtacagggatgaagcatgacagaaatattatccatcctactgtcaaaactataaccctgcatattaacagcacaatggaagctcagaaacatgagtatttcatcatatgatacattacctaactaacctctaaaacgaacataaagtaaacttcattcaaacatgaaacatcatgcattaaaaaatgcaatgttacttttgagaagttcaatggctgacccttacagagaataaaatcaag

SEQ ID NO: 6309 - DNA, 600 bp, Gossypium hirsutum
tcccaatagttcaattttattataaaaagaaagatgttgaaaggagcatggcattacagggaaaatcgtaaaattcataaaatatatcaactttcatctatggaaatgaaataaagggacttcaaaatcatggtctgcacaatttgtacaaatagtaagggagaaaaaacaatgaagcataacttactttctccttgttatagttggtaatgcattgatatgtttgcaaagattcttaaaacagaacagaagatgctgcaaaatttccctttttctcatctgataaaatagaactctgacctgaactcatttcccatgtgatccaacattcgagttcatgcataagttattagctccatatagtcaaacaaatggttttctttctgtttttctgtttctctgttcctctttataaacttacattaccctcagtaagtgttaacaaacaatagaacactacggtttccacgttgggctaaaatcaatccttgccaagccaaaagcattttccatatcaatgggtttgtctgcaagctataaaagacaagcctcaccacaagtttcttcgagtggggaatcatgcccagaactagctgcttc

SEQ ID NO: 6310 - DNA, 620 bp, Gossypium hirsutum
  misc_feature (570)..(572): n is a, c, g, or t
  misc_feature (604)..(615): n is a, c, g, or t
tattctcacatcctatttcttccggaagtgaaattgtggtttgcgtagctaatagttctcgtggacacaactcagaaaatgtgcctagttcaccatggtcagggccctttcttctagtcccaccaagtggttcaacaactgttcttgttccccagccattatcaaatgcaatgtttatattatctgttacatctaatgctattcctggagcatttgctggaaggacacgggctattacttttcagccaaggtaatgattttcctaagaatccaaaaattactgctgtctcttgtcaaataattttacttttcttcaatacattctttttttgtctctttcatagcaagttttttcttgtgcagatatgttattagtaatgcatgcagcaaggagttatattataagcagaagggaactgatattctttatcatttgggtgttgggcaacattcacagctccattggactgatacaacaaggtactttgccatctttatgttgaaagattttattccacatcaattttacttgaatttgtggttttatcttaacattcaagtttggattcnnntatctattgccagttccttaaagagcaaactnnnnnnnnnnnnttttt

SEQ ID NO: 6311 - DNA, 661 bp, Gossypium hirsutum
gccccttttgctctcctttacattatgcttcctcagagtctgcaattccatatctgacacatccacttgtctggacaaagcattgatctcattcttgagcttttcaatctcactatctgaaccatgttggcaattttctcgtggaaagttgtcctgggaactgttggagtcttcagtactcattccgtgatcagaacctgccgaccactcattctttacattgtcatccttcattccaagttctcgtggagtatcaagttcagagctactattagaacttgaaatggtaatatcagatccatcagatcctttatgatttccacgcaattcaacattgtgggtggttttgctgaaagatgcatcctgtcagagacattcacaaacaaataagtaaaacatgcaaatccattttccatcaagttttctatattaagcaaatataaagagacgaaaaagttaagagaagaagaaatggtctggaaaacagcaataagaaaacccaaaatgaacgctttttcacttatgaataggatggaagccttacttcaatgagatccttcttaatgctttcatcttcataaccattgctcaagtgggccttcaagctcctctcttgcaatttaaaacttgcatcttcagtttcttccacctctctgacaaa

SEQ ID NO: 6312 - DNA, 604 bp, Gossypium hirsutum
atggcggagcattatccttgaatccgataaccaaactgttatcaattgtttaaaaggaaaatgccaacctttgtgggaatgtgttgctattcgagatgatatctctcattagctaacagaacgttgtaatgtcattttctcttacgctagtcgtttttgtttcgaggtccccgtcgggtagcaaagaatactaagaggagcatgtgccctctaaacagaattcttgcagttccctcacgagctcatttctattctgtaacatgattttttctagcattgaagttcttattaccaaaaatatgaagaaaaaaagctatagaacttaaatacataatatcaagtgcaatcatataactttaaaatttgatataatactaaaagtttgatttgatgtaattatataattaaaattttaatttagacttaattttacaaatcaccaacttcaacattgatatatttagatttgtttataagtcaagtcaaccactaaaatctaaaagtctaaccaaaatttgaaagacaaagaaaatatattaaacaaaaaatttagacccacttaaaatataaactaaatacgggcttacatattcaaagcccaaac

SEQ ID NO: 6313 - DNA, 623 bp, Gossypium hirsutum
ggttgaaccgaacatgaagcgccaagagcttgcatgcgtgtcttaagtgtgtcgagaggaaacatagccatgtgctcgacggtgccggctatggagccagcgatcatgaattgccaaaagtgaaggccatcgtgggttggcgtccgggaaagtgagatttcagggtgaaagtccgaaggaggtggcacggaccggagctggggtgaagcgtcagtggccatgatgaagttaagggtggcgaacaaagagttggttggggtccaaatatataatcaaagagtgagcgggaattagagatgactttcaggtctaacaaagcagagctgctgtgaagtggtaagtcacattctactaaaatataaattctaacattgaagataaaattattaaaaaaaatatctttccttaaagactcaaaagaaaaaagaataaaccaatcaataaaaaagttaacaagatttttatattttcaggaacggatttcgtttgaattggaagtaactatcaataggcaggggatcgattaggaatatagaatttcttttcctttttattagaaataaaaaacaaaatttaaagtattttatctcaaaaaggcccgtaagttattgcggtacatctcg

SEQ ID NO: 6314 - DNA, 511 bp, Gossypium hirsutum
tgtcttattcaaacccggttggctggttacccgctaagccaccagaagttaatttcaggtcgaagagctgggcgaagaagctatgggtctccctttatttgctttgcttcagtcatgtataattgctagctttttgacacatttctgtgcaccttaaaaccacaagggtgacactcccttttttgaaagccctcttatgacattccctttttttctctattatcacatctctcctttctcattggtcattatacagcaaaaacatatgattattatctcatacattggactccataattgagatcatatgacggttttttttaactttgtatctgtaattaaaatttttcacaagtacatcaaataatattttgtaaaaaaaaattatccatatattatgaaaaagaaaattcatatttaaaggtgtacaaaattatggatcagaatataactaatagaatggtgagtgtctcaaattgctcgaaataacgtttggagtggaacaacgata

SEQ ID NO: 6315 - DNA, 363 bp, Gossypium hirsutum
aaaagttcgttgattcagtattgtgcaacatacagttgaaagaaccaatacaatccataattatcgtaatcgcactactaaaaaataaatttacatgattaattgagtgagttgttagatccatcaagagaaataacgattgaatttaaacggccacgcaattgaggtcgttgattcaaatcagattcttctatttgtcaatgaataatatgaattcaaacatcaattcacttgtattccactttataattaataatatgtaccaatgaatacgtaaaaaggaaactataaatacttttggcatttcagtttgtacaatatgagattgggggcagagtagcttttatcagctcctaccacggg

SEQ ID NO: 6316 - DNA, 647 bp, Gossypium hirsutum
tgcgtacagtgaaataatggagattcaagccgaactaagaaaggggcttaagcttaactataagctttcaccagttacctcaaagttaagaagtatttcaacaagcgcagaaaatggataaataatttacaaactcctagtcctagataactctcatgcaatcacggttcagcaacacaaatgcaaacttacatgagtaggctgacaatagagatcaagggcaacaactgaatcttagggagatgatattaaccgcttcagaccagttttctgttcagttgtaagcttggtagggaacttgatgttgaatttaattcttaaatttcctttctttgaaggctccttgggaatgggcattccttcacctttaacaacttcttcataggttggattgatgatgttgttgatagggactgtgagggtccgtccatccagcgctgtcagctgtgctgtataaccagttagagcttccactagagatatcttctgagttaaaataagatcattgccatccctcttgaacacactgtgatgtttctcatcgatgatgaagacaagatcagaaggaataacccctcgttgctcgtttcccttttctggaaatgttatttttgtaccttttttccaccctggcttaatctgaatag

SEQ ID NO: 6317 - DNA, 636 bp, Gossypium hirsutum
gacggtgatggtagtgatgatgaaagctttgaggatagattcaagctacgaaatgggagggaggtaatttttttttaatttttatcagttcaaattttggggaaatttttggaattagctactaagcaaatttaaaatttttttgaaggtttttgaagaaaaagcttatttagtgggcgtagagcgaaaaggcgagacgtcggattcttttgccatcgaggagtcgctgaaggagctggctcagctggccgacaccgctgggcttatggtggttggttcaacttatcaaaagtaagatttttatctattaaatcgaattgcattttcatattataagctgaaattgtctgactgtattttttggccttgaaggttagcttctcccaacccgaggacatatataggatcaggaaaggtcgcagaaattaagagcgcaattcgtgcttttgaggttgagactgtaatatttgatgatgaactctcaccggggtaaggtttgtaatattttcttagtttcaacttttatataagaatctagcttttagtgttttcaatggtggggaaagtgtaattggtgatgtcaattgtttttaccttatgaaattgatatgcaaccttcattatttaacactgcat

SEQ ID NO: 6318 - DNA, 644 bp, Gossypium hirsutum
tcaaaagaggttacggaggaggttcaaaaggtactctcatgatgaacttttcattaggaatgatctactcatgaatattagttatcttaacttacaaaccgtaattttcggatttttctacattcggatattcggatccatttttatttgtatctcattgatagatcggtccaaatgaccatctcatgttggtttcaagtattgatgctgaatgatgataatactaaatagcgtagattgactacaaattatttttggatatttgctttgctttgtttgggctctattcatttttttcttgtcgcatgtacaaatacaagtatgagtatacgatctttcaaataatatccgtgtctagcgatcactcctggggttggaataacgcaggtaatggcaatttctgatttgtatttgttgatacaagaatgggtggatggaggagctgggtggttcaccctgtttaggataggatgaagagttgccaaatagatggtcaaagtagtagggaggaaggagggaaggagatatggcttatatactcctcaccccgtatctcgaggtgtcatgtgctgagttgctattggcggatcaagcgcaagtggcttggtgccataggcttcggtagagtggtgtcatggctcaaa

SEQ ID NO: 6319 - DNA, 600 bp, Gossypium hirsutum
  misc_feature (150)..(150): n is a, c, g, or t
  misc_feature (232)..(232): n is a, c, g, or t
  misc_feature (235)..(235): n is a, c, g, or t
  misc_feature (340)..(340): n is a, c, g, or t
  misc_feature (346)..(346): n is a, c, g, or t
  misc_feature (408)..(408): n is a, c, g, or t
  misc_feature (413)..(413): n is a, c, g, or t
  misc_feature (418)..(418): n is a, c, g, or t
  misc_feature (428)..(428): n is a, c, g, or t
  misc_feature (432)..(432): n is a, c, g, or t
  misc_feature (441)..(441): n is a, c, g, or t
  misc_feature (448)..(448): n is a, c, g, or t
tctcttcaagttggcttatagcttgaacctttagatggattttcatgtcacattgttgtggttgttgaactggaaattgtaagtcttgtatgagtttttagatcccatgagaccccatgcgcaaattatagactttgaacagatacattntcctaattgtcacctgtccatttcatcaaatgggggatgattttgcatatccttagtaacgtgggttaatttagctgtggcnctntttgatggattgtgaaatagacaggattttgtggcatgtaaatgttgtgtaagatgttacagaaactagtttgaataacatgtttggtgcaaatgcaatggctcnctattntttacattatttactttttgttcaatccaaatgatgagaacttgagaatattttggcagtcnttttnccctnttaccttttntgtnttgaaaatnctgattnccaaatgttaccttagggtatttttttttagttggctgtagttgcttcaaatcatattataaggacatatcctttggggttttgcaggttaaattattcgacagtgcaagctatctcagagcattttcagtgggagatgtttgggtagctgt

SEQ ID NO: 6320 - DNA, 632 bp, Gossypium hirsutum
  misc_feature (17)..(17): n is a, c, g, or t
gttatatattggccatnttctcatttcaatgcattgcaatttgcaaataccttttacaggaactgtcattggattcttcccagcatgtccgcgctgctttggcttcagttgtgatgggaatggctcctgtccttgggaaggtaagagcatagagtaattccttgatgaggaagtatcatagaacgtaagggttttttatgctggtaatgtattatagagtaattcctcaataaggaagtatcatagaaattaaggttttttaacgctgataatgtattatagagtaattcctcgataaggaagtatcatagaaagtaaggtttttttttgctggtaatttatgactagtaaatacaagctagaaatgattgattttaccaatgtaaatttctcctagcaagtgagtttggatataatgtctttttatttgtattcttcacttgtggttgtcttaacagatttctcaatgttgtgctggatgcatcaagattctggattaaattgcttttatgggtttattgaactccatttcatggtccttgcaggatgcaacaatcgagcagcttcttccaatatttctctcccttttgaaggatgaattccctgatgtgcggctcaacataatcagcaaa

SEQ ID NO: 6321 - DNA, 642 bp, Gossypium hirsutum
agttcaatcataattcataataattataattataatcacaataatatcaattagtaggttagttatgtataatgaatgatttttttttccagagaaaaggaaattaataattaattttttaaaattttgtttaaattagtttatttattttttattatttttgcccatcaattagtttatattttttatttttatttaagtaaatgaatttaaactgttttccaaaggagggagagttaaagttgttagctgttacgtgtcttaccaacttacgattactcgcgtacgtccagattcacatgaaaccatcgtcaaaaccacgtgatatcctatgaaattatcactcaacaaataagacagttcaaattcgattttgcattttaaaaatttccatttttaccgtattctaacactattatttgtgttaatcagtccccggcgatcacgtttccattttaaaaataattttactgtaaatttaaagttcctttcttatttccttcaacacagtcttgattttgatcgtttttcgctcccatcgaaagcgaagattttaagctgaaaaaagaagagaggaaaattgtggcaatttgttggtgagaaagtcgaagattcacgtgggtaaagctccataaacagtga

SEQ ID NO: 6322 - DNA, 615 bp, Gossypium hirsutum
ctataaggatcagagatagaaagcatttgtgatatgatatccaagtagcatccaagatataagctgggaccagatcattcaattcatgaaatcttgcatcttaaaaatatatccatataatctttgcagtcttcttttttactaataagcctgaatttgataaaaacatgtttataagggtacatgaattgcctatccatttcagggtgagtatttgtcaaataccctagaagaaaagctacctctacgcctaactggctaactcgatgaacagctatgaagatacaagtttatgcatctttcccataactcactttctagaaaaatcataatattccttggtttttgatgagtgcatggtctacagtctactgcaaatactcagctcaaagacagagaaatagagaattgctactcgcttcttacttctacagggatgaaggaaagcgttgtcaaaaagtatgaaatatgaagaattcaaaaataaaaatggcattgatcaaatacattaatttgagttagtgttagttagaaattgctctgtttgatcaatatgatcttgctattaaccttaaagcgttcaaccacaattataacacacacagcatttacgag

SEQ ID NO: 6323 - DNA, 562 bp, Gossypium hirsutum
  misc_feature (536)..(536): n is a, c, g, or t
  misc_feature (547)..(549): n is a, c, g, or t
  misc_feature (553)..(555): n is a, c, g, or t
ttccgggagcaagaacagttgttcaccccaacatcacgttcatggtattgcaacaagcacggtgatcgtcccaactcttcgttttgattgaaagaaatacccacccatatcttgttgaaccaacaggtatatgaaaatattatctccgtaaatattttaaaaagaaaaaaattaaccattccccaggaagacgtgcctgtaggagctaatgtgtgatttcatttcactaggaaaaactaatagtttagatccaggttcaaagctaagtgttagtacaagtagtatgttacacagccccaaacttagaaagacacaactatgtctatacaaatatcaaacaaattattatcatcaccatcaccgaacaaacttattaccaactcacggggatcacatcctacctcttcaaggccatgacgctgataaagagcccggggtatcaccggaatctcatgtctatccatattcggtgtccacaacaaaccatacaaaataaagcatcttcactaacagccgtgaggaagaactatgagccncggtgtgtgcnnntatnnntgtatga

SEQ ID NO: 6324 - DNA, 671 bp, Gossypium hirsutum
  misc_feature (513)..(514): n is a, c, g, or t
  misc_feature (534)..(534): n is a, c, g, or t
  misc_feature (619)..(636): n is a, c, g, or t
  misc_feature (638)..(651): n is a, c, g, or t
  misc_feature (653)..(657): n is a, c, g, or t
  misc_feature (659)..(661): n is a, c, g, or t
  misc_feature (663)..(666): n is a, c, g, or t
gttggttctctgagtttgacctcaattcagttcggtgcaatctatttttcaagtctgtccttgctagaaattttgaactgagaagtttgttttacgaggaactttttggtggttgtgtgtgtatatatttggcttgtgacaacgaatatataatcagatttatattcttatttgtggtcagtttgtcaccttataagctattcatttgcagcagtataaactgttattttaaccttaaatttttctttatttatggaatgcaggaaccttccttactaaatgagcgcttggtattattgttaccagcagcagtttatgctctttgtgctggatgcgaaccttttacccagtgttacaaagaaattcacctgttacagtcttttgtggatgttattgaggttgcagatgattggatcaaggtatgttatgatggttaactttcctggtgggaacatgattaataaatctaaaacaaaaggtggttttttctaataaatctaatttgaatcaggnntataggttaacaaaaataancataaaaaccactttgaaaattttaaaggctctattgaatttcttgcaaatattgatttgaattcatttattcaggttatggcannnnnnnnnnnnnnnnnncnnnnnnnnnnnnnncnnnnncnnncnnnnccccc

SEQ ID NO: 6325 - DNA, 632 bp, Gossypium hirsutum
  misc_feature (619)..(629): n is a, c, g, or t
gctcttcgcgatgtggagatgactgacgtagcgacaattcctgcgatagtttacttgcgttttaagggcatttcaaggtcatttattaatgttaagccctaagtatggtagtaacacaatgggcactttagtctttgagttctttcctttataaacaacattttatttcagagttaaggagttaaagatggatggtcaatagagattagactggagttttctcttaggaaattttcttagattaagttttcaattttatttttatttttatctttatttttatttaatgtgttgaattcttatttcgacaattaaactttgtgattaaagattactcaagagtcgtgcaattacccgaatttatcaatgaaaatttctccacttttttttttaatatttcattcatcatatatttgatagaatgtatgtaccacaatgagaatttgaattatgtgcttttatgaatatattgtatatattaattgattaatcaattatttaattgagtgttaatttctattcgattagatattttatttaatttttccaaacaactaaaaatgatggaattgatgcctctagtaaaatatctagataaaggagaaagatggagaatatnnnnnnnnnnnttt

SEQ ID NO: 6326 - DNA, 640 bp, Gossypium hirsutum
tctacttcacgcactgataactttcgacactacgaaaaaccgatgccttgacgtcgagctttcctttctttttcaaagattcaacatctttaatcctttccttagctttgaaatttgattcctctatcattgaagccaaatccttcactgttttctttgcactagagagttcagactcggctttaaacgtttctgattctgcaattcttctactctctttaaatcgactcatatcccttcttgcaatatgaagctcccttgcttttgacaatggcttcttaaaagttaaaatcacacaatgacaaatttatcagtcaaaactgaaaattacttaaactccattgcataaaaactacaggtttttcatgaatcaccaatgtctaaaaagccgaatccgatgtaaaaccggtgacacctgtgattaccaatagatccgattgattgtattaaaaaaaattatgtattatctaagtatttttaaagttaaataattatcaaatataataaatatttaataaagagttaaatgtataaatcttatcccatataataataatttataaaaataataaattcaacttatctgtataatccgatattttaacaccatgagtaccaaaattatacctcaggaaaagcc

SEQ ID NO: 6327 - DNA, 637 bp, Gossypium hirsutum
ttgcttccggtagcaattggaaagcagcatccagctttcccgcatgcccagcgacatctattaatgcactgataaatacctgcattaaagtaaacttattatcaccaaaagaaacaagaaagagtgcaatcaagataaagttgacaacaaaaattaatgtccaaagaaaacaacaatcacaaatgatctgaaatcaaggacatggcaacctacatgcaaaattttagtgaacgtcagaccatttaaaagtcttacaacattagtcataggagctgctagtttatcttggaacaagaatgtgccaaatacagtcaagggcattgcaatcattttctttatgcataaaggtaagtgatgaccaattacattctgtagctcagttttgcagaccgaaatctggtttaaattataactgaaatactaaatctggacataaagaggctttgagagaaagctgattcctatggagtgcgacatatttgcatttatgtgtcacaagcattttgaaaagctcaagacttgaaagactatacatgatttaactctcaaacaagagacttgcaaactcaaaactaggaccagaatgagtatttcaacagtaaacactcccctcccaaccttaaacactatttcccaa

SEQ ID NO: 6328 - DNA, 603 bp, Gossypium hirsutum
agctggtgatgacccagctgaggtgggatgggtccagagagttggtttgagtatagaagcaaagattccaaggaagaaaggttagagagggtggttgggatgggacccgtaaggcggttagaggaaagatcaaggtggagtaggttttgcaaacggccgagcgagggtgacagggagccacccagcgagaatccagaaaggtttagactgacaacatggaaggagttggcgggggagatgaagccacaagcgactccggtccaagcacagaaattggggttggcttgggatgaccagtcatgcagaacattttgagggtcttgaacaaacgacctcttgatgtccagaagaagtgataaatcttggttttgacagaaaacagaagcgagtgaacaacatgttaaaaagagtatagttaggatgagggagaaatcctttttcatgtagtccatctccaactatctcttgggagaaacagtgtaagtagaataaggggagaagtaaaagaatggtttgagtatactactattgcattgcaaggtttatttgaagaagaagaagaaggggtaggtacgtagggcattaatcaacgagggaagggat

SEQ ID NO: 6329 - DNA, 669 bp, Gossypium hirsutum
  misc_feature (665)..(665): n is a, c, g, or t
ttttcttgcttcatgcattgacgggttagggggaatattgaggaccgcctccggaagatatgttgaatcccctagtccagacctttcaaggatcctacgctggaactgaaggttctcctctgtgaatgtaccagtcaattgtgactgatctacgaacatccttttcgtgcatttccgagattcctccggcttgtagcaagcaaagttgacaagataaacagggcgagggcgggttagaaagtagagtgttgacaagaaaacaagaagggccgagcagattatgacagaaatgaggttgtattgaagatgctcccaaagatcaaaaagatccgtaacagaaaaggtcgagagctgcgccgcgatgacaactacaagaggggtaaggaagaggtacattccatgggtgattaagtaatggtatccaagcttcacatactttagcttaactgatttcttaaaatcaggtaggttccttgatgatgatggcatcaaaggctggtctggttttgagtcagccatgtttttctttttcctgtaaaagattgaactcaatgtattaaatcaagtgcaacaaaggaatcagaataacagaatttaaaaccaacaagaagcaaagctagtaaacgaaaaataagataaaataagtaggctttcaaaggtgaagnttat

SEQ ID NO: 6330 - DNA, 611 bp, Gossypium hirsutum
atcttcttcaataaataaataacaacaacaacaacgagtagaaaaatatgttggaccacgaaaggactgtttggctttgcggtgcaacttctctcattggattctcttttattttgtttgtttcttagtttattatgataagcgagaggaggcaccatttggttggattttgttggatttatttttgtattttaatatattattgaagccctgattgggattggtatcaggaaagcgcatcattgtttgtggtttataaaataagatgtgaaagcatatgggttggtctatcaatggttggggttcgacctttagttctagataaagatattttatattttcaaggaaagaatgtaagtttatatcttaacattaatattgttgaaaagaataatcacaaattttaaatataaacaataaaaaataaatataaaaatcttaaatatagacagtaaaaaataaatataaaagatactcaaaagaaaaaacaaaaacaaaaacttaattgtagcagtcgcatgctatctgtcacatggcctggaaatcattagtctacaagtgtggcctatgcatttgcaagcaatgaaggaaaaggaaacatgccatgcaat

SEQ ID NO: 6331 - DNA, 544 bp, Gossypium hirsutum
  misc_feature (496)..(496): n is a, c, g, or t
  misc_feature (498)..(498): n is a, c, g, or t
tgtgcccagagaatggagagtatggacaaacattgcacaatagaccgcatctggcatgctgaaggtacatcgaggaaatatacaacgctggaggaactccatgttaatcttaagagtatcagggcaggaactcaaccacctgtccttttcacgagtaagtcgcctacggacagatgcaacattttcctcgtgcttatgaagttcactagttagacgatctaaggcttcttgaattctttccttgtcttttttccttttgttaattgctgaactagaattatcgggaagctcttcaagagccttaagagcagcatgctgctttgcaatttcagactcataaacatttctaggaacataaagatcatacagtgtaagcccccaaaaagtggcatagaggtcaggagagagactattccaggctttagaaggcaacatggttttaacagtgtcaagaagttcagaccacctgcacaataacagttttggaaagcaatcngntgagaagaataaaaatttaaaaacaaatttggaactggggctggtg

SEQ ID NO: 6332 - DNA, 834 bp, Gossypium hirsutum
  misc_feature (515)..(516): n is a, c, g, or t
  misc_feature (521)..(523): n is a, c, g, or t
  misc_feature (525)..(525): n is a, c, g, or t
  misc_feature (527)..(545): n is a, c, g, or t
  misc_feature (549)..(553): n is a, c, g, or t
  misc_feature (567)..(567): n is a, c, g, or t
  misc_feature (572)..(572): n is a, c, g, or t
  misc_feature (576)..(576): n is a, c, g, or t
  misc_feature (578)..(591): n is a, c, g, or t
  misc_feature (599)..(599): n is a, c, g, or t
  misc_feature (602)..(614): n is a, c, g, or t
  misc_feature (616)..(623): n is a, c, g, or t
  misc_feature (625)..(643): n is a, c, g, or t
  misc_feature (645)..(656): n is a, c, g, or t
  misc_feature (660)..(660): n is a, c, g, or t
  misc_feature (662)..(666): n is a, c, g, or t
  misc_feature (669)..(669): n is a, c, g, or t
  misc_feature (671)..(671): n is a, c, g, or t
  misc_feature (673)..(683): n is a, c, g, or t
  misc_feature (687)..(696): n is a, c, g, or t
  misc_feature (698)..(737): n is a, c, g, or t
  misc_feature (739)..(744): n is a, c, g, or t
  misc_feature (746)..(746): n is a, c, g, or t
  misc_feature (748)..(748): n is a, c, g, or t
  misc_feature (752)..(756): n is a, c, g, or t
  misc_feature (759)..(775): n is a, c, g, or t
  misc_feature (777)..(779): n is a, c, g, or t
  misc_feature (781)..(784): n is a, c, g, or t
  misc_feature (787)..(791): n is a, c, g, or t
  misc_feature (794)..(798): n is a, c, g, or t
  misc_feature (800)..(811): n is a, c, g, or t
  misc_feature (814)..(831): n is a, c, g, or t
cacagatgtttttcaatcaagggtggtagatagaatgtcgttgcaagagggttcttcagtacttgatcttcagggggacaactatttttcttgctctgtagctcggaaaaggtctaatgctcggtatctccttggatcatcagatgatgtagttaaactcttaacagagctgacaaattcatggatcaacggtatgaacactgatggatctacaatggagggaaattagaggcagcaacttccattgacatcttggtggtactatcatgtaactggcctttcatgtttctcacactgaaattcatttaatctcttttaaatttgatcattcttcacattacaagtaaagctttccagaaagttttattttctttttcaaaataaaattttagtttttgatttctcaatcaatttatttcagttcaattcttctttttgacttgtttcccatcagtatcaatggcaagaacagttaaaaacaaaccaaactgttagctaggccttgaaaaggaggnnatttnnngntnnnnnnnnnnnnnnnnnnncaannnnnctgaatactcccgncttcncggngnnnnnnnnnnnnnnagctgctngannnnnnnnnnnnngnnnnnnnnannnnnnnnnnnnnnnnnnnannnnnnnnnnnntgtnannnnnttnangnnnnnnnnnnnaatnnnnnnnnnnannnnnnnnnnnnnnnnnnnnnnnnnnnnnnnnnnnnnnnntnnnnnnangnaatnnnnnatnnnnnnnnnnnnnnnnntnnntnnnnttnnnnnctnnnnncnnnnnnnnnnnnatnnnnnnnnnnnnnnnnnnaat

SEQ ID NO: 6333 - DNA, 644 bp, Gossypium hirsutum
cacgaagctcattggcaattcatgagcctaaacagaattttaactaattatcaagcactgtaaccaacataaagatcaaataaggaggcacttcttttctagatgattgaatatttcactttgagttccaacctctcggcgcagaagtgagttcagggagctacaataagctttcctcaaaggacccaagcagttaccatcaagaatctgagaatgagcagtgaaaattattagaatgactgagacacaataatggagatttagacttgatctgcattttgacctttaaatgttgcagaaggcgggcatacgtcctgcacttataccgcaagtcagcatgatcaggcttcttcaactgtccccgctgttaaaatcaagcaggtgaacaacatttaggaaattgtttatggttatgatcaagatgaaataacatgaagtagatacctgagaaaaatagtttttgtcattaatcataaaatccaccaaagtggcaaagcagattctcaagaactcagaagctttacggacaaaagtagcttttagtattccaagttctgcccgcttctctctaacctaaaatgtaggcacaacaaacagaagctactttttttcttaaaggaccataaaaatccagatccaggggg

SEQ ID NO: 6334 - DNA, 657 bp, Gossypium hirsutum
atgaaccttgaattaatttattgtcgtttcttttggataaagttaatattcttatgagtgttacaacgctacttcaagtggagtagtgaagtattgtccaccttgaagaccctaacatttgcttagttttgtttgtgttctgatttataagctttctgcttgcattttccaagtaggaaaaaagaagcttttacatagatatgcttttactgtctttgacttatatttagctgtagttgttttcggcatagtttgtttcctttaagcagatggattatttcctagatgtttggttgtgaagagaaatgaattcatgctgcttccatcattaacacatttttgtttttaatgagcccattacattgatgaatcccatgcctttatgatatttcatagttagtaagtgagaaatacaagttggtgtgaaaggcttgttgtgacattgagcatgaatgttactctttttatggttgtcattaccttgatgttttagtttatttttgaggtgttaatttatactacacagtacactgtcatgaataatgccattaaccctctctttcacacaggcaacgacggggaagagtgggcgaaatatcccctcatgaaacacttattcaaggtaaacaggataagttcagtgttggacatgaggaa

SEQ ID NO: 6335 - DNA, 629 bp, Gossypium hirsutum
agttgattgttagaaatcatgcattcaaaaagctctggcatacacaacgagaacatgtccataagatcccgtgcctccataattgccagaatttgagaaaatagttgaagcatttccctctcctcatctttctccttgaagagtgctaagcagtgtacaccactttttaaaacagcagaagctttccagacctgccaaaatcaaaaccagaagatttagtcatgcctagaagcccaccctagatctaatcatcttagtattatacctcatcttctcttaatcctttgaacgcttgaggagctggcaagttggaagttggtgagacaagaacttgttggtgtgttccatgagtagaagacgaaccctaaatagtagaaaataatgacatgagataatacaattcaactttgtgaagtggtgttatcccacatctattaagcatcgggttcctgtggtcttatattaaagttgcacctttggcctattaccaattggttttaagttgaatgcttaacgtggaataaaagcccagatgcattttgttgttcctgcctaaccccatgtgaggttgacaatccccagtgatgctatccatgtgtaggccattgttgagctacaatgtgagggtg

SEQ ID NO: 6336 - DNA, 592 bp, Gossypium hirsutum
  misc_feature (576)..(576): n is a, c, g, or t
agtccattcagtttgccagctagttttgaaatttaaggacagtgatcgccctcactgtactacaccacattgttcatttacaaatgaataaggagctactaaaagcatcagatggatctttatgttgattaggtgtgtggtaatcataacatattgttcttttgtagtaattaattacccctagaacccttgcctttcttagcttagcttacattttcgatgccattcttaatttgctcttcttattgactttcctccgttggtatgccacatgcttattactgaatacaccattaatgggagaagtgctacttcatttttactttttgtttaaggactgtcctaagtatcctatgcaatgcctacttggaatattatgatggataatgatattctgtccaatggaatttaaggaaatggagaactctaaaatgtcattatatataataatggaataaaaataaacagatcatgcttcgtttcttgtctcaacatatataacatacatgaccaaaaataccaatgaaaggggggaaagcatatgcaaaattcatacctctgatctattctattcangagaacatgatgcaat

SEQ ID NO: 6337 - DNA, 645 bp, Gossypium hirsutum
tatttggcaccatgaagagatcacgtgacagccaatgtcaaaattttccaggttcgaaaatttctcggtacttatttcacccttacgaaataaatattgttaaactatatcaaaaattagatggtgacattaaattttaaagtgaaaataacccaagttttgttgacaaggggaatcataaactaagtgagagtagtttatgcaaaccaatccataaattgggtcaaagaaataagttaaaacaattaagtcatatgaagaaaatttctctgtgaccgaataaatgtcacctttaagttgagagttaaatcttatttgttgccattgttatgaggcattttgctgaagaaaaaaaattgtttttcatttttcagaagcaaggaatttaaatagccccaaaagggtaatagtgaaggctacttgtgaaaacaaagaactcatagacaatgatggttcttgctttagtccaggaagcctattaaccttgccacatgatggtagctctcctgtgcttgattctctccattatgttgatgaaagctctgaccaagatttgctgctggatgtaccatccaatggttcgttcccactcacggaactacttcatccgtgactctgggcaacaggcaagcactagttgtaact

SEQ ID NO: 6338 - DNA, 629 bp, Gossypium hirsutum
cttacatagtagaatattaatgctcacccgataggtactttataaaaaataaagagtcggaggaacataggtcgagtcaaagaagacatgtctcttgtttctaacaatgttgaaagaaccgaacaagattgtttattggtttgaaccagtttaaagctggtttgaccaaccaatctagtccgaagtttccatccaaggtttccacctttgatagtcatttaattatacaaaagttcagaaaaaaacctcgccaatgcgacccatcgcctgtgaatctgaagatataatgctgattgcccctgtgtcatgcaatatatcttcggcagcaatggtttccgccctaatccttgattctgcaaatgctacatcttcaggaatatccttgctgaggtgatggcaaaccatctgctaagacagaaatgcatgagaatggaaaaaaaattgagcacacacgtatcggatacatactcgtatccgacactcaccccccaagtccaagcaacagagctgtcatccttttcgtaccagcatgtcaagatgttcatctatagtattggaagtataagggcgagtcgggtttgttgacgaagggaggacgtttttaacgccgcatactttgatgatatctg

SEQ ID NO: 6339 - DNA, 617 bp, Gossypium hirsutum
gtatcccctcaaattaatgctcattgttgttcggcagtgtgctatgcaaaaagtgagttaatgaaaaatcaaatcttatgattagaggtagaaaatgagatagcatgatttaaaaatgtgtcaagtaggtgtttgataaaaattttaattataattctattcaactcaagttaatacttatgaaaatgttaaagtttatataatataaactattatatataaaataacttatctatctctcattagaaagtacatataattttaaaaaaaatactcaatacgattgtaatataagatataataccaacatgatattaataatattaatacgtaaatcatatgcactaattttggattattttcaattttaaaatttaattaaaaaattatattttatactctatttgaaaaagtattaaaaattatttatttatataaagctgaaatgaatgtaatatatataggatgtagatattgacaaatgacaagttgttcaaagcagcgagcccattggaccgctctctacagtttggagttgggtcttcgactagtcctagatccttcttacaaccttgcccgactcatctcatctctctctcacttaatcatttggacac

SEQ ID NO: 6340 - DNA, 645 bp, Gossypium hirsutum
  misc_feature (603)..(609): n is a, c, g, or t
aaacctggtaattcatggtaccttgctgaatatgagcctgcaactgcaagcagctgcttgctccaagatgattaaaaatatgtgaaccaatatttttaattgcgcgtatacatagagaaagacacacacgcatatatgttttagatttcagaatctttatacatatctttttgtcccatgtatatttgtttgtcttagattcgacaatctttatatttgcatctgttttagtctttattttttcctttaaattaactcaaatcaccttctaaattaatgtatcagattgttgattttaaaatgattaatcaaattttaagttcagattcaattggataaaaatgacaatttaaattgtggatttaaatatctaccattctaatttgaatattaaaattactattaatctgaattacttattttgcggatttggaaatgaatatataagtctaccctccataattttagtttcagatttatttaaatatttgatggataatacaaattgtatttatttacttagataattggcgaggttaaatcaattagaaattttcaaaaagttggaaatatttacacgttcatatggaacgggaagtgagnnnnnnntgagacaattagaaattttcaaaacgggaagtgagg

SEQ ID NO: 6341 - DNA, 600 bp, Gossypium hirsutum
  misc_feature (593)..(593): n is a, c, g, or t
tacacaaaaagaaagaaaaaccagaccgttaaagatggtatgttcaggattaaaattcaacttgtaacccaactgcatgctagtaaactgccatagttacacatgcaaagtttttctgtaacatccataagcataccatagttctaagattttctgatatacattggcagcagcggcatagtcacctgcccgagcaagaagcttcccctgtcaacttaaagtcaaagaacataatttgataagaaaagaaaagcagaaagacaactcctcatgaaaatgatgttcaatattactacatccgtgtgcagaagatattacctatatcaacatttatatactcttaacaatgaggaatataagcttcagaaaatacctgtatccgtagcttatcaacttcaatcatcaggagggatcctagtttccctccaagaatatccaaagcatcaccatatttagcttgttgctccaatattgaaaagtagactataagagctgcatagatgtaggataggatatatgtaaatgagaaccaatgagtgaacctgtgggttgcctacaaaggcaaagagatagaatcaaaattgtaccttcangctcatc

SEQ ID NO: 6342 - DNA, 607 bp, Gossypium hirsutum
  misc_feature (598)..(599): n is a, c, g, or t
atatcaattggatactcctcaaagctgttgaccagtaaaatgacacaagttatagttaacagcaactctaaggaatcatgcagaaagagtttagaagatgccatcatcatgtctaagaaacttacaactatgtctggcactacaaatgaaactggtagaactttgggatccggttcaacacctgtagcattgattattgatggtaccagccttgtttatattcttgacagtgaactcgaagaaagggtaaggagtcgtcaacttgcctttgttttgtttttttcacttttctactatcctgcatgatgatgtgactttattattcatctttgcttgcagctcttcgagttagcctgtaattgttctgtggttttgtgttgtcgggtggccccattacagaaagccggaatcgtttcccttgtgaagaagaggacctcagacatgacacttgccattggagatggtaatcatcattcttttgattttctaatcataatcttacgataaaaaaagagaatggtaatcatcattctcttgaatttcaactgatttcgttttgctgatttaagcaatgctactggatgcttcacaggtgctnntgatgtaa

SEQ ID NO: 6343 - DNA, 628 bp, Gossypium hirsutum
atgctataattgctgtagttgtgggttgtctgttctttatttcatcagataacatgcataccttgatagaaaagttggataagaatatcaaatggtggtctatgtatgcctgtttgcttggattcttttatttcttttcatctccatttatagggaagactatcaaaccgagctattcaaatttcagtagatggtgagtgttttaatctgatgtcttgaatcatattgagaatttatgtattttttaaataatttttggtatacggaaggaagctaagagcaagacatggcttatttgtgtttatataacttgaatttgcaggtacatagcgtggattttagttgcagctttgtatcatcttcctagttttcagtcaatgggactggatatgaggatgaatttgtctttgtttttgtcaatatacatctcttcgattctctttctaattgttttccacattatatttcttggcctatggtatctcggtcttgtttctcgtgtggccggaaggaggccagcaatcttgaccattctccagaattgtgctgtaagtgttgaacatgaacttgacgatttcttattgcaatgaaggttttagcttttatgtaggtgctggtccttatgagt

SEQ ID NO: 6344 - DNA, 610 bp, Gossypium hirsutum
  misc_feature (552)..(552): n is a, c, g, or t
gacatggagcttgccttcttcctttcttctaacggtacgtctgataatatttcctgtaaattgcgtatcgacacgaattatctaaaacttaactgatgcaaatgtatcggagttgtttttcatcaagtgttaaggtcgaagaaataacatgtcaggaagaagaaaaagcatccaattccaagacaagatactatgaaatcgtgacgcttaaaatctgaaaaagaagataaaagcataccacaatgcttcccagtccgagataattatcgtactcttcaatcatttgaacaacatctggtcgccaccccagcaaaagtatgcattctttgggccccagactttggtctgatgcctacgtcgaaaccaaaagaacatataactggtcttttggagcatttaatagatgctatcagttatggaacttatctctttgggaaacatacctttgatcctcgtttcttggtacgtttcacaatatttaacattcgttcttttctcaattctaaagcatgagttggggtctctacattatttctcgaaacttctgaaacnttttgcatgttggttacaagttgttgttttgccgtcctgtaataggggcaataacaaa

SEQ ID NO: 6345 - DNA, 433 bp, Gossypium hirsutum
  misc_feature (423)..(423): n is a, c, g, or t
tttctgatgctgcatactggatctggtttaataatgtttttagtcatctttgtctatttattatgagtattgaatttgcccacttatatttgtttgtataaatgggagttctccaattcccattatatttgtttgtgtatttatatattgatgttctgtccatcaagtcattaattactgttataccattgtgaacatgagtttggctaattaaaaaaagaattaaatgataaatgcagtcaagataatgagcagcccaaactcaaatcaatcaaatcattaattctcgatctaattggttcaaccaccgataaaattaatttactattcaacaatataaaataatattaacaacctcaaactcatctatttttgaaggctttgaattttaaaaccctctccccatcttaggttttttacganaaaaaaaaaa

SEQ ID NO: 6346 - DNA, 502 bp, Gossypium hirsutum
agtactggggaagggtcaagccctccaagttgtgaacacaaatgctatggttgcaccccatgtgaagccattcaagtgcctaccacaagcaaacgaatccatgtggatttacagtacgcaaattatgagcctgagagttggaaatgcaagtgtggtcctaccttttacaacccatgaactaaaaccacgtactcacactgctttagacttcatattttctcctctttcggttcagtcagatgatttttcttaaccatttgtacaaaaggaaaaaaaaaaactaaattcaatttgtccctaaaaggttagcctttgttgcaatgctttacttacagatgattccaagtcctcctcacgtttcagtttaaatattttagactaagactagtggggaatatatactgtcaacttacgatataccgacaagagcatgtttttttcaaacaaaatgaaaaaagcccaccaagaaacagatcaacatgagctactgtcacagttaaca

SEQ ID NO: 6347 - DNA, 605 bp, Gossypium hirsutum
  misc_feature (508)..(511): n is a, c, g, or t
  misc_feature (515)..(518): n is a, c, g, or t
  misc_feature (523)..(523): n is a, c, g, or t
  misc_feature (548)..(548): n is a, c, g, or t
  misc_feature (560)..(560): n is a, c, g, or t
  misc_feature (564)..(565): n is a, c, g, or t
  misc_feature (572)..(573): n is a, c, g, or t
  misc_feature (587)..(590): n is a, c, g, or t
tttgtggttcacacatatctatacctacaagcaaatgttatcaggaaaatttgctcgagactcaacaatcactaccccccccccaatcaagaccaaaatattctcaattttatagatgaataagcgaggattgacaagcggtaaaccaagttcaatttcaatcactgacctcaacaatctccacttctattaggaaatgaataagatccttatgaccagagggaatcctataacaacatcatgactcacaggttttaacaactccagagaggctagggattacggataagaaatctttggtaggttacctggggtaaaatttatggcaccaatagaagctagtacaaagttttgttgttaaaagttttgggtttagggtttagagtaattattaagacaggcttcgaatttcaagttttctaaataatgaagggctttgagtaattttaaaatcaaaaaaattttctcaagttggtcaactgaaaatttcacattgtagccatcatcnnnnttcnnnnaaagnggggggtttttgaatttttaaaaanaaaaaaattttncccnnggggggnnagaaaaaatttccnnnnggccccccccccccc

SEQ ID NO: 6348 - DNA, 657 bp, Gossypium hirsutum
tggatggaaacttatccagggatggcagacattaaagaaccaatgcatatggtaaagatttgtacaggagacttctcgaaccaaggaatgaaaaaggaaacaagagagcttacaagataacatatcctttagttgattgtagcatacggatttatttggtttccatgcaaaatatttgcattatgtaccaaaaagaaaaatgtggcagcattttagtttttagagcattatctgcatgcaccagaacctttacgtctaccactaagcatatgatgttcattaaacgattcttggagactcaaggtacaaaaaagcatatccacgcatgtaattagttcaccaagggagacaaatatgtatgtatatatttcagaaaggttaacttacagatgaataaccagagatgcaataatcaggatggcgaagcaaagctagagttgtctctgcaaacaaaaaaaaataggaatgtaacataaccagtctgacagatattgaacttgacatgtttaagaaaaataagagaatacaccacttagaaccagggcaccttctacatgtcataagtattgctacagtaaaacaaaaagaagaaagcagtcatatgcccacttcttgcatccgaaatatcatttaaccatgaacaaaatgtaatggaat

SEQ ID NO: 6349 - DNA, 1060 bp, Gossypium hirsutum
  misc_feature (632)..(634): n is a, c, g, or t
  misc_feature (636)..(658): n is a, c, g, or t
  misc_feature (666)..(674): n is a, c, g, or t
  misc_feature (677)..(683): n is a, c, g, or t
  misc_feature (686)..(689): n is a, c, g, or t
  misc_feature (691)..(698): n is a, c, g, or t
  misc_feature (719)..(721): n is a, c, g, or t
  misc_feature (723)..(727): n is a, c, g, or t
  misc_feature (736)..(737): n is a, c, g, or t
  misc_feature (739)..(741): n is a, c, g, or t
  misc_feature (744)..(745): n is a, c, g, or t
  misc_feature (748)..(748): n is a, c, g, or t
  misc_feature (750)..(757): n is a, c, g, or t
  misc_feature (759)..(763): n is a, c, g, or t
  misc_feature (765)..(765): n is a, c, g, or t
  misc_feature (767)..(768): n is a, c, g, or t
  misc_feature (771)..(777): n is a, c, g, or t
  misc_feature (780)..(784): n is a, c, g, or t
  misc_feature (791)..(792): n is a, c, g, or t
  misc_feature (794)..(795): n is a, c, g, or t
  misc_feature (798)..(802): n is a, c, g, or t
  misc_feature (808)..(810): n is a, c, g, or t
  misc_feature (822)..(826): n is a, c, g, or t
  misc_feature (841)..(842): n is a, c, g, or t
  misc_feature (844)..(846): n is a, c, g, or t
  misc_feature (848)..(858): n is a, c, g, or t
  misc_feature (860)..(860): n is a, c, g, or t
  misc_feature (871)..(883): n is a, c, g, or t
  misc_feature (885)..(886): n is a, c, g, or t
  misc_feature (892)..(892): n is a, c, g, or t
  misc_feature (896)..(899): n is a, c, g, or t
  misc_feature (905)..(908): n is a, c, g, or t
  misc_feature (917)..(918): n is a, c, g, or t
  misc_feature (924)..(929): n is a, c, g, or t
  misc_feature (931)..(934): n is a, c, g, or t
  misc_feature (936)..(939): n is a, c, g, or t
  misc_feature (945)..(950): n is a, c, g, or t
  misc_feature (952)..(954): n is a, c, g, or t
  misc_feature (957)..(957): n is a, c, g, or t
  misc_feature (960)..(961): n is a, c, g, or t
  misc_feature (973)..(979): n is a, c, g, or t
  misc_feature (981)..(983): n is a, c, g, or t
  misc_feature (985)..(994): n is a, c, g, or t
  misc_feature (997)..(1012): n is a, c, g, or t
  misc_feature (1018)..(1019): n is a, c, g, or t
  misc_feature (1026)..(1028): n is a, c, g, or t
  misc_feature (1038)..(1038): n is a, c, g, or t
  misc_feature (1040)..(1041): n is a, c, g, or t
  misc_feature (1050)..(1051): n is a, c, g, or t
  misc_feature (1053)..(1053): n is a, c, g, or t
gagagaaaactgaggagataattgatgactcaaacttgtgttataatgagagtcgtattggagcagtaacagaagtaagagaagaaacggtggacaacctaacccaggaccatgagcttgtagagacaaagagtgaagcctccaaaatttcaaaagctgagctactgggggaaatagatcatatgggttcccctaatactgttttagaagtaaaacttgaggagcaatttcaaacttcttattgctcatttctttctgagactgaagcaagtcctgttgaaaagatcaaagaagagatgcagaaggatgatgaaataaaacaagaatgtcgaggaggttcatctgaaacaaagacaatagaagaggtatgcttgtcaaatgaacaaacagaagcagtctcagaagaagaaactattgctgaccaggctcctctaactgatggaccagtggagcaaattcaaactacatcttcaacattaccttctgaggaaagtgagcatggaaccagagccatcagtgaggcgatagaatatggaaaaacaaagggagaagtacccactaagctagatgttcttacaggaggtgtagtaactggtgagcagactctctcaggaaataaaccagaggaggannntnnnnnnnnnnnnnnnnnnnnnnnctctttcnnnnnnnnnttnnnnnnnttnnnntnnnnnnnntcttctccccccccccctttnnntnnnnncttcttatnncnnnttnnctncnnnnnnnncnnnnntntnnaannnnnnnttnnnnnttctatnntnnttnnnnnccccannnttttttcctctnnnnntcccccccccccccnntnnntnnnnnnnnnnntntttactttatnnnnnnnnnnnnntnntttttntctnnnntttctnnnncacatcttnnttattnnnnnnannnnannnntttacnnnnnntnnncanttnnttttttcttttnnnnnnntnnntnnnnnnnnnntannnnnnnnnnnnnnnntctctnnttctttnnnatcaacattnanncttttcttnncncttatcc

SEQ ID NO: 6350 - DNA, 608 bp, Gossypium hirsutum
aggccatttactaagagtcagattgcattttaccccttttactcaaaaaatgggcaaatagtccctgtatgttagatcaaaggttctttctgttaaaaatttcattcatttcttctcttaagaactagcatggttgactaaataaccaaacagttacaggtggcatgctacgtatgccttatgttgacgtacaaggatcagtttttaacagtaataatggatggaatttttaatagagtgaccagtttgctctttgatctaacgtagaatgattcatttgctcattttttgagtagagggagcaagatgtcatccgactcctaatataagggcctccatggtacttttaccccattattgcagttgaaataatttagctaagtttaatgtagattattcaaggaataggtgaagctcagcttaatctggtacccttcttttctctcctaatttcttgtaatgatttattagtaaaatgtaatagttttctaaaatctcaactttttatatatcatactaaagtttttgttgttattttccccctttttttcattttgtaaaggatgggagccacttggttagaaattgcatttcgggacaaatctatg

SEQ ID NO: 6351 - DNA, 611 bp, Gossypium hirsutum
ttatggtggtgaaaggatcgcaaatcagggaaacaagcacaaccaaacacccgaatcaaatcatagctaggcttatgtttgtgaagaacttcatatggacttacgttatgaagaaccggtgtaggcagtctgtttgtcaaaaacaccgcatgtgcgaaagcaaaataccagtactttagaggaatgctagattgggcaagaagagacaatcccatatcaacaatttgtcgatgctttcgttcagcagtaccattttgctctgaggtgtaagggcaggtgaccctatggtgtattcccaggcgagagagctccttcgacaacacccgatactctcccccccagtcagtttgtagcattttaattgaacaaccaaactgaaccttaatcatctgatgaaaattgagaaaacattgtactacctcagacttgttcttaagaaaataaacccacgtgtatcgactgtacatatcaacaaaagatacgtaatagtgaaaaccattcgaagcaacacaagctggtccccatacatctgaaacaactagttcaaaaggaagagaatacaccgttttggaagaggaaaacgagagtttatgagctttgcctagctgaca

SEQ ID NO: 6352 - DNA, 614 bp, Gossypium hirsutum
  misc_feature (586)..(586): n is a, c, g, or t
  misc_feature (596)..(598): n is a, c, g, or t
attctatgttcttttcaagatctgtagtgatttgagctatatgccatttaattttgcagatggattacataaatacttcccacccaagttttattggtgggagcaaggctgtagaacttgccaatcagcagataaagaattccagagttcctttacctatcaaatcaaaggcaggtttctacttatggtaatttctctggtattatttctgatctttttcaaataccaatcccaattccttttcattttttcctgtgtttctttgttgacttaatcaggatggttcagagcctgataaggctcttacttctgaaagaagtaataaatctcgggctattcttgcaagacaagttaatggaatcgttgctgatcaggcatgaaaatttgtgtttctgctgcccaatatatgcatttccttccctgcctgttcttttttgttttttccagtaactttttctccttcatctgtctgttttctacgtaaataacttgagaagccttttactccatttttgtgcagggagtccgtcctgttgcagatggtgaaaaacttccatctactggtactgcattttaggctgtcgtnttgaatttgnnntgcaatatctgattct

SEQ ID NO: 6353 - DNA, 624 bp, Gossypium hirsutum
tcctttgagatcaacagatatagatgctttatttcataaaagagatttacagctcagaaggtatacttttggtctctttgtttttcctattatttttagtgtaaatgtggtgtcaaccattaggcatataataagcatagcattagccaaaccaaattgttgggctgatcattttgaccagcctttgtctttgtcggacctggttttgttgtctaactattgcttcattagtcaatgttgaatgcctttttgaaatcacggaagcactttgaagaaacgaataaattttggccttgacgtcatgtcttgatttaattgccacagagaaaactctaaagggagggaagcctatttagcatatgtttcggaaggaattggcaaacaccaagactgggaaatggtcatgaagtatcagcggaagaatggatcattgttcaattcaccatctgcaacagcagccactctttctcaccttccaaattccggttgtcttcattatctcactgcactcttagacaagtttgagaatgcaggttagtatgccaatgctacttcacaaatttcaatgtattttgcaacattatctatttctatattactaatgatcatgttcacttcagttcc

SEQ ID NO: 6354 - DNA, 651 bp, Gossypium hirsutum
atttgactgtccttccttccaagggtatccactggttcagttaaagttgcattaaatccctgtaacatggaagagagattacgaaaatgaaaattagaagtggtttttctcttttcctataatgtttggagatacagagcgagagaagcagggccccttcgacattgtcaaataaagaaagatgagactacgaaaattagaataccaatatgagcaatcgattattcgaacatgaatagcgatcaaccgcaacttcaattgggagtggtgggggaatttgtcttgtcctcagttgagcttcaacaatggtaacattaagttcactgcacaaacaaagcttcagagtttaccataaaactgaaagtcttatttcaattttaatctcacattataagcaccaatcaccccctccctcaagttctcatcaaagaaaatatgagcgctaagctatgatcaccaccttacaaaagttgcagcccattcttgagctgtatgtgaaatcacatgcttgaagttatggtggtgtcgtttttctctttcatcagctggcatattcaaagcataaccaatggaagaagcaacttcagtgacattccatggattaaccaaaatggctccggcaccaagagactgagcagccccagcaaacta

SEQ ID NO: 6355 - DNA, 602 bp, Gossypium hirsutum
cattaggatttaaactaatcagaatgccttagtttgtgccagctgaatggcttaagttgataaaaatcgcagataaagtctaaccatggaataaattgttaaaacagccttgtctatgcattattctaaaccctaagcgggccaaagaaattttcaggccaattttcctcacatcaaaaaaactaaaaacgtaactaacctgtgagccatgctcttcaccatgagatttgttgtcaccctcaaggcgctcaacttccacatatttatcaaaggaaacataaacatcccgacaacctttgacatcaagctgaaagtctgccacacaatatgtacacttacattttgctcctaaaggggatttcactatttcaactaatattgggacacgtcagtaaagagaaaataccataaaatgattcccttcttgtagacttgtaatccacattgatgcattcaatatagttcatatgatgaccctcaaataactgctgtattgtcccctccacaacagttccctgtaaaatgagaaggataataatcagcattcagtaacacagtgtgatactgcacacacccagagagagagagagagagagagagac

SEQ ID NO: 6356 - DNA, 642 bp, Gossypium hirsutum
gggaaactaatgtacttgcttgttcatttcagtttttttaaattgttaaaagtacttttttatccaaatggacttttttgtttagatattttcatgtgttttatgtgagatgacctagtattaacttccttagtgctatacaggggagttgattggaaacttcttgaagaacaatgccagtcagttgaccttttatgggtatgttgagtagctttttatcggtttaaaaatcttatttacttttgagtacattatagttttatggcatgaggaagcttgccattcagtgactattaatatattttgcaggcttttttgcttacaagatggtcttaaagaacgagagctttgtgttttctttcgtaataatcatttcagcaccatgtttaaggttacgaactggagtgactttttctgtgacttattgcttatagctgtctatgaattgctaattatgcttgtaactcttgaacaaatttactaaattaataggccaatttttctaccagtttctttattgctctattttaattatttcttggtttgatgaaactcatgcagtatgacggtgaactttatcttttagctactgaccaaggctatctaaatcagcctgatttggtgtgggagaaactaaatgag

SEQ ID NO: 6357 - DNA, 644 bp, Gossypium hirsutum
ccaatcacattacgtgtgtatgttagactgaattttttagaaatacaaaattttaagaaaaattatcaaattcactgtgtatattatgtgtggatattgtttgattcttttcgagttttattgtggttttatattaattttattttatattgcagttggtcaagtatatatttgtatttgtattatatagattgcatttgtactagtgaaatttaggggaaaaaaaatctattttagttataaaatgcatttaatcacaatggatactcgtataggaaaaggttattcactgcttaatgacattgattaggataatattcattggtttgtcattgaaataatttaaggatgcattaatgactagatttagggattttcaatcattagatctattttgaaattaaaaattgtgaattgactttatttttttaataaatcaaatactatttaaaaaatcattaaaaatattttttatttattttaaaaaataaatatacatatattttctttatatgttatttctcaattgttgcccttaattataaaaagaactataatttttatacgtccaaaaattttaattaaattcgaaattgaaattaatcaaatataaaaaaaaaggtagggattaaggtttggtttcg

SEQ ID NO: 6358 - DNA, 698 bp, Gossypium hirsutum
  misc_feature (627)..(633): n is a, c, g, or t
  misc_feature (636)..(643): n is a, c, g, or t
  misc_feature (647)..(648): n is a, c, g, or t
  misc_feature (658)..(662): n is a, c, g, or t
  misc_feature (664)..(664): n is a, c, g, or t
  misc_feature (667)..(669): n is a, c, g, or t
  misc_feature (673)..(682): n is a, c, g, or t
  misc_feature (684)..(694): n is a, c, g, or t
gatagctcctttactgccttactgcctgtttagatcttagcaagttgttacattttcatttttcatttatgcgtgaattagactattttgggtgacattgggcacttttcctagttaggagaagccatttttcaggataaatttgacaatattatgagtatgttttttggcatcgttggttttgtttcaagtgatttactctctgtgatgtgtcgttgatttcgtggttacttaccttctgtttgggcacaaggaaagccattgagaggaaaagatccaaatatgcttttgattttagttcatgattacgcaatttgctcataaatcatggaactaaactaagatctaatttaggttcttggctagaactttgagtggattgattagatagagaaaacctttaagaaatgtagaatcataagcttctttgatgttggtatgttttgaggttaccttgcttgatagttgagtttttccattaatgtagggctatggagttcacatcaacatttttgtgatagtcagggatgataatgtgaatccagtaatgactagaatttaaaccgctttttttgaagaggcaacttacaaatgatggttttcatcctctttatttgagacgcaagnnnnnnncgnnnnnnnngtannctctctctcnnnnnanctnnntttnnnnnnnnnncnnnnnnnnnnngacc

SEQ ID NO: 6359 - DNA, 641 bp, Gossypium hirsutum
  misc_feature (633)..(633): n is a, c, g, or t
gaaacttaaagatgatatgtcttcacctaaaataatttacccaacagcagtagctatcagccttaaactctaaccacgagagatagagagggaaaagaacattcagaataatgcttttggtacctgacaaaattctccctttgtccactcatatactgagctttatgaccacaatcaaacattttttacaatagagtgcataaatacatcctgcaatccagcaacaacgattcaatcgagtgccaagcaattagagaagtttcttatgctatcattcatgatccagcagttaagcagctacaattccagaagatagcaaagcaaagaaaattccaaatgtttgaacacaataaggaggaagcacaaacctattttcccgtaagaccaatcaaatttatgatcgcaagaagtaacataactgcatataatttatgtctagtttctaagagatttcaacgctataattggagaaacaaattcccatcattcaatcctttcaagtggagttcagttccagttgaaataatttggtgaattaaatttaaactcagactcaacaaatgctccagaagaccctaaatttaaacatcactcagatgtttagtgttatacacttgttgaagaactgaactngtccacaa

SEQ ID NO: 6360 - DNA, 690 bp, Gossypium hirsutum
gccatattatccatccaaactccaacttttgcatgaaatttgagatgctttaaataaaaatattaggtataaaaaatgagtttggataaaaagattagatccgatcaaaatatagttagactcggacttgaatattcagtctaatagctttttacgggttgatactcttgtaaattttggtctaatctattcaatagactcatccagtccggtttaagtttttatagtcttttttataattttatgttaattttaacacatttttataatattttatggtttttatatttttattaaaaatttaaatatgttttgttaattttatattttttataattgattagaatttttaaattttaatattttataatatttataagtttttatttttataagtttatataacttaaaatttttctttaaatattttaaatattaataattttttaattttgttttggttttttataattttcaatgatttttatgagaaaatattatattacacctaaatctaatgtcattatctgattgatttgataatttattttaacgtcaatacaatcaatcacgggttccattacctaagaaatttaattggttattttaattaatagtagtttttaaaggtgtttttagcctaaaaaacataaaataaaataaaataagagaaggttaaattctgttatc

SEQ ID NO: 6361 - DNA, 619 bp, Gossypium hirsutum
  misc_feature (539)..(541): n is a, c, g, or t
  misc_feature (545)..(546): n is a, c, g, or t
  misc_feature (557)..(559): n is a, c, g, or t
  misc_feature (578)..(580): n is a, c, g, or t
  misc_feature (601)..(606): n is a, c, g, or t
  misc_feature (610)..(610): n is a, c, g, or t
cacaccgagctttatatctctctatttcaccagaggctcaaagtttgaccttgtacacccatttacaaccaataggaaccttccctggaggcaaaggaacaacattccatgtatgattagattctaaggcccgaatttcctcttgcatggcctgaacccagtggggagagtggcgagcctcaaaataagaaagaggttcaataatatgggaaagggaagaaacaaaggcctgagttttgagaggtaaatgggataaaaaaacagaattagaagaagaaacacctggggatgaaggagattgatagggatgaataaaatcttttagccaagaaggaggcttaagagttcgaccagaccgcctaggttcaacaataggcaaagtaggagagacaaaaggtggagatgtacttactgaagttggaacaggatgtggtgaagcgcttgttggaggagtaggagtgggaataattaagaaatctaaatccaaaatgtcaggagtagggggaaacaaaacaggaaattcaaaaaaaaatatatannnaganncatcttccccnnnatgagaattgtgactaacnnnaaattttctagagaccccacnnnnnncaanatatcctct

SEQ ID NO: 6362 - DNA, 641 bp, Gossypium hirsutum
tcattgagatgattcatactgcaagcttgatacatgatgatgtattagatgaaagtgatctgcgaagaggttagcccgtaaattaacatcttttttcatgtgttcgatgtgttgttcttaagaagaaaccatctcaaatctaaagagataatagttcttccattcaagtgcattaagaaataggtagtctatgcttttggtctaatcaccgcactgatcgttctggtcaatggatcatcttggtgtgccagttactctaggccaactctataccattgttgagggtaagcttctacaacagaaaaagggaaaagagaagttttaagaatggaaatctctggctttcttaaaaaggaaaatactatgcttttgcagtagtttacgagcgggagattctttattaattattaaccgttaaatagtcggcaagaagtacattttcttcgggatagggataattgaggttatggttgcggcgcttctatacacatgtataagggcactagacacagtttctatttcagtatatacaataagtgcatgtgtaaatgtggggcgtccatgttctttgtacatatatagcaaattggtagttgtggtggtgtttaagagtgaaactgtagccaaatttctagcctgtg

SEQ ID NO: 6363 - DNA, 621 bp, Gossypium hirsutum
gactttctgtagcatcaaaccaggggaaagaacaatttgttactaagatagctaccatatcagcagtgcaacatcgtaatcttgtcaaactattagggtgttgcattgggggaaaacgacgcctccttgtttacgagtatcttgagaacaaaagccttgatcaggcactctttggtaacagaacatgctaatagactaataccatgtttttatatctttgtttattaatgaatcagttgtttgatattccttgcaccataaatgcaggaaaaattgacttgcgtcttgattggccaacccggttcaatatctgcttatcaactgcaagaggactagcttatcttcacgaggagtctaggccaaggtttgttcatagggatgttaaggcaagcaatattttgcttgatgcagagctctgcccaaagatatctgattttgggttggcaaaactttatgatgacaagaaaacacatgtcaccactcgcgctgccggaacaatgtaagacctttcaacctttttgttcatgaatcctgcctaattagcagcatagaatttatgtttttgaatggttagattattcaccaatgcaatgtaattatcttgaagtggtaccttgggca

SEQ ID NO: 6364 - DNA, 618 bp, Gossypium hirsutum
tccatcaactattagatctgtctccctcgtgcatgccattacgtctatggcaacttttagcataggtttgaaaactgatttttggtcaatgtcttggaaaatcaaattcttcataaacataaatggcaattaacatactatttatgttttcatgtccaactccatccatgtgtatatgtgttggacaacatctttgacagtggagatcttaaacatggtaacttatgtccatattgaatggtttgtatcctgggaatgagtatcattaattttaattagattatacctttgtccatatcgaaaggtttgtatccatggaagcttctatgagctgctgaagtgcttgctgtctaatggttgcactctccttattgttagaaatctgaaaaatgtggagagtcggaatacagaaatgagtttattcctttctagacaataaaacaaaacgggaaaacaaattactcagataaaatatgattttcacagtgagggacaagaaaaagggggggggctaacgaaggggaccttttaacattcatagttcacctggtgaagaatttgaggaatgatgatacgcgattttagagaacagcaagtcttggtattgctggaattctc

SEQ ID NO: 6365 - DNA, 623 bp, Gossypium hirsutum
taggagtcccacttgagtcagggaagatcctatctgcactcgcaacattcaggattcttcaggagccaatctacaaccttcctgacacaatctcaatgatagttcaaacaaaggtgtcacttgatcgaattgctgccttcctccggctcgatgacttgcagcctgatgctatagagaagctacccagtggtagttccaatacagcgattgagattgctgatgggaacttctcttgggatacgtcatcccctactgcaacactaaaagatataaacttgaaagtttcccatggcatgagtgttgctgtttgtggtacggtcggctctggcaagtcaagtttactttcctgtcttttgggagagttaccaaagatatcaggaactcttaagttgtgtggtacaacagcctatgttgcccagtcaccttggatacaaagtggcaagattgtagacaacatattgttcggtaaggaaatggacagagacaagtatgacaaagtgcttgaagcttgtaccctcaagaaggatcttgaaattctctctttcggtgatcagacggttataggcgagaggggaatcaatctgagtggtggacaaaagcaaagaatacagattgcctcgagc

SEQ ID NO: 6366 - DNA, 490 bp, Gossypium hirsutum
gacaggttcacaagacgaattagttaaaacaataacatcacattttccctgaactttttaaaagatcccaccaccatacattttcaaaattaaagcactgccagatcacaataatttagaagttggagcacaattaaagcttaagatgaatggacaaataggcaaataaatgcaagaaaataaatctcattctcaagcaattcaattgctacaaacactaaacatatcctcaaaataattatttgcatgtccaagaacttgtgaattcaaattgttatgcaactgctagcaagacgagaagaaaatgaaagaactaaagatggtatgctggaatccacattgccttcttaaatactattacatgtatagtctgcattattatccgaaaagaccatcaattgtgagatgaaagatttaacaagatgtttatccaacttctaggataccaaaatctaaccaaaaggtaagcagcactatgaatagttttgca

SEQ ID NO: 6367 - DNA, 626 bp, Gossypium hirsutum
aaggatgcagcctcagtatatttcctttcaacaatcaagtgatcaaggtattttgatcccacctgcatgtaaagcaaattagcaggtaaaaaagaaacaaaaataatttttgccattaacatggacacggattagaaacctaggcaaacaattgtatcagcaataaaaggtattatttaccacaattcaacattaaaataaaatcataagcagccaaaatctttaatattataggaataattaggttgaattaagaatgctaacagccagcagctttgtatggtaactcatgtgaagtcattaccaaatatattaagaaaaagaacccaaattacctcatcaaggagttcactccgtccctgaccagcctcagctgctgctaaggctttttcatgccgaccatgctgaagaagccatgcaatgtgatcctctgcatccctaggatcaaaaagtttataggtctaaaaccaagcaggatttgcaaaatatatctgtaggtaccttagaagatataggacaaattctaatacaatatgtacaaatccaaagtatcatcataacaggtcaacgtccatgttaggggaatcttgagaccaaaattcagataaaactcattgtgccctatg

SEQ ID NO: 6368 - DNA, 621 bp, Gossypium hirsutum
  misc_feature (11)..(11): n is a, c, g, or t
ctgattttggntttctgcagtacaagaagccgagcacttggactggggaatgcgactaagaatagccatgggaatagcatactgcctcgagcacatgcatcagctaactcctcctattgcccatagaaacctgcggtctggctctgtgtatctgactgaagactatgctgccaaaatatctgatttcagcttcttgagtaatgctaccgcagccaaggcgggattggctaccatggagctcttagaatcccaatcagcagatgcagaaagcaacatttacagctttggggtaatattgtttgaaatgataaccggtaggatcccatattcagtagacaatggctgtgttgcagattgggcatcagactacttgaaaatggataaacccttgaaagaaatggtggatctaactcttaaatatttccaggaagatgaggtggagaaattgtttgaagtgattaaaacttgtgttaatcctgatccaaaagagagaccaacaatgagagaaatcgcagctaatttaaaagagataacagcagtgggacctgagggagcaacgccaaaactatctcccctttggtgggctgagcttgaaatcctgtcgacagaagcaagttgaaa

SEQ ID NO: 6369 - DNA, 592 bp, Gossypium hirsutum
  misc_feature (475)..(476): n is a, c, g, or t
  misc_feature (547)..(557): n is a, c, g, or t
  misc_feature (581)..(583): n is a, c, g, or t
gctgtcttttttgcagcattgggacgaggcgcaatctgtttttggacgaacacagtctaactcaggttatgcaatttcatcggcggttggttagagtcggccttgcgctggtaagcttaaatgtatcgttgacgctgctgcttctttttaggacgagggatgcacgagttttgctgctgcgttacgggacataatggtaggtgtacgaaaggttagtcgggccatgtaaataatgtgtgggatcatcgtttagcagaaatttataccatcaaggaagctttattatagcttcgaaggcagagcttggattctttaattgttgaatagttttttttaacattaatctcattgtaagttcttattatatttgttctttttgaagaataactagaattatctataaccctttcctaacctttaaataagagaataatacgattcaatgcactcaaatccacatactcctgcactgacnncaatgcccataccaatcgagctaagacttaatcagcaaatttgaatgtacttgaataccattttttctatnnnnnnnnnnntaaaagggaaaaaaaaaaacttannnaaaaatgcc

SEQ ID NO: 6370 - DNA, 624 bp, Gossypium hirsutum
gaggaggaacatggaaagagaaggggctaactaagatttgctaggaaatctatagaatgttttataatattagatcacacacatgacacctatagtttctgtttaaatgtgtgggggatttttcgacatgacttgcgaggagagcttgcttaggtaaaaagcctgtttgaaatttaatttcttgtctgacaatggataaaaaaaaacttcttgtttgacaaaacactaatcacttatcagcttcttatcaactttttaccaacttctcatattcatgaattgatatcttgcgttgatggacccagaccttcgcatgagaaggaggaggagatatttttttgttcttgaattttctgctgattcacatatcaaatgagtagaatatttatatacacacaaattaataattgattattaaacgcgtataaattaattgtggagtgaaattaaagaaaattaaaaatgcaattaagagtgaatatgtatatgttacaataaggaatcaataaattgaaatattactaggcatgcgatgtaagtaacatacagatcatgataaatttaattaagagatgaattaaatgggaggaacaaatgtaatggtagaagactagctagagggct

SEQ ID NO: 6371 - DNA, 632 bp, Gossypium hirsutum
tgacttccctcacaatattttcttcgtgccactttccatccaatgttaaaagaaaaagatgctgtgcttagtatgatgagaaaggagaataacataacatagaacttgaggatggaacttctaaggattgcttttttgtcgcatgtatgtatgaattataattgagcctcattggatgaactggtaacacaaaaacgtgtggaaaatgtcggagttccaccactacaaaattgcctccttcctgcttgccaggcatgcaagaagtggcatctgtcttgccttcttgaaagaataggcgactgcggattatgcttttctgtaggtggctatttggttaatcaaggggatggatataaccataaatggtgctggaagtagatcaaattcataccaacaacttggaaattatatctagtggaacagtttcctatgttcaatggatagtgtgtttgcatgttgattggtgtattttttaggaccattattcaataagattcatattctagactaaagggtttttactataacttgttcttgatggtatcattttgctgtccagccttatggattttcccgaatcgtattggttgggtttgccgccttgtgttttgtgtgtcattcacgcattatgt

SEQ ID NO: 6372 - DNA, 595 bp, Gossypium hirsutum
cagtattttcaagtatagaaagaagaacccagaaaattatggatatttaattaaatagcggaaagggaaacatacagagtaattttgaacaagaaagaaaacaacaaagttcctcagatcttttttttcagttttgtttaaactggtttttttgtcttaagcatctatagatccttttcctgcataaacttgttctattctaggtttttatctctcttttacgcctttccctttttctgggtttatgggtttttagttgtttctttgatggttctagttgcatgtaggattaagcttctttttttatggtttttttaccaggtctaaaagggtgtatgcatttgttgaagcataaagccttaaacttttttttggtaattttagagtattgggtctgcctcaaaacggagtttaaggattgacttttaaagatcagattttttttagaacactttcaggaggactttttttggaggggggttctgatggggagccccgatgagcccaacataaagggcattgatgcgtcggtcggtggcttggtttgggttcgacgcaaaaacggttcgtggtggccgggtcggattatggccct

SEQ ID NO: 6373 - DNA, 604 bp, Gossypium hirsutum
  misc_feature (57)..(62): n is a, c, g, or t
  misc_feature (90)..(91): n is a, c, g, or t
  misc_feature (384)..(388): n is a, c, g, or t
  misc_feature (412)..(416): n is a, c, g, or t
  misc_feature (425)..(431): n is a, c, g, or t
  misc_feature (436)..(439): n is a, c, g, or t
  misc_feature (443)..(445): n is a, c, g, or t
  misc_feature (453)..(453): n is a, c, g, or t
  misc_feature (457)..(462): n is a, c, g, or t
  misc_feature (477)..(480): n is a, c, g, or t
  misc_feature (486)..(488): n is a, c, g, or t
  misc_feature (491)..(494): n is a, c, g, or t
  misc_feature (497)..(498): n is a, c, g, or t
  misc_feature (504)..(510): n is a, c, g, or t
  misc_feature (512)..(512): n is a, c, g, or t
  misc_feature (524)..(525): n is a, c, g, or t
  misc_feature (527)..(533): n is a, c, g, or t
  misc_feature (539)..(540): n is a, c, g, or t
  misc_feature (544)..(548): n is a, c, g, or t
  misc_feature (550)..(558): n is a, c, g, or t
  misc_feature (567)..(568): n is a, c, g, or t
  misc_feature (570)..(570): n is a, c, g, or t
  misc_feature (572)..(574): n is a, c, g, or t
  misc_feature (577)..(590): n is a, c, g, or t
tatgtattattcattgcccctcccataaggtttgacgtcagtctctatttccactannnnnntaaataacttgtttccctaattattttnncctgcttccgatgtgctgccatgattctttgtactgacaattttacatgcatatttctatgtatgcccttcgtcataagatacaatcagtcccttgtattatcttttatcttcatagcaagtattatctctctatcttgttcattttacgttagtctggttttgcttccactggtgttatgctcctctctcctctactttttggggatctgtgtgtgttctcgtgaggagattagtgataatgtgcagagcaatgatgatgctctcgtgtaacactataaactctatctcccnnnnntatcacatatatagaatttctcannnnncatctctgnnnnnnnaaacnnnnttgnnntgttgccntatnnnnnnctgatgacaaacagnnnnctatannnacnnnntgnnctgcannnnnnnanaaaatatataanntnnnnnnnttaacnnattnnnnnannnnnnnnncttgttgtnntncnnnagnnnnnnnnnnnnnngtgcgctcgcttct

SEQ ID NO: 6374 - DNA, 1198 bp, Gossypium hirsutum
  misc_feature (546)..(557): n is a, c, g, or t
  misc_feature (559)..(559): n is a, c, g, or t
  misc_feature (561)..(565): n is a, c, g, or t
catgttggccactgtattacagaaaggtttctgaatcatattgtagattgatttgtcgaaattcagaggtgtttttctaataatggtttttgataacgctgcctgcatgtcatccgtttaaggacagaaaagattcctttctattttatagatttcgaatcatattttagtttgattcatcgaaatttggaagtgcttcatagcttataatagtgtttgatgccactgcttgcatatccgccattgtatgacaggtctcttttatacttcatagattttgaataatgttgcagttagatttatcgaatttcaaatagtgattcatagctaatcatactgtttgatactgctgcctgcatatcatacgtcgtctgaaagaaagatttcctttatattgtttagactttgaatcacattgtagttgatttatcaaaattcggaagtatttcatagctaatcgtagtatttgataccgctgcctgcaatcatcccttgtatgacagaatggtttcctttatattttttaagatttgaaattccggggannnnnnnnnnnntngnnnnnctagctcttggaagaccacaggagacaaaacactccccggaatttcaaatcttaaaaaatataaaggaaaccattctgtcatacaagggatgattgcaggcagcggtatcaaatactacgattagccatgaaatacttccgaattttgataaatcaaactacaatgtgattcaaagcctaaacaatataaaggaaatctttctttcagacgacgcatgatatgcaggcagcagtaccaaacagtatgattatctatgaatcactatttgaatttcgataaatctaactgcaacattattcaaaatctatgaagtataaaagagacctttctgtaatacaatggcggatatgcaagcagtggcatcaaacactatgataagctatgaagcacttccaaatttcgatgaatcaaactaaaatatgattcgaaatctataaaatagaaaggaatcttttctgtccttaaacggatgacatgcagacagctttatcaaacaccattattagctatgaaacacctctgaatttcgaaaaatcaaactacaatatgattcagaatcttataaaatatgaaggaaacctttctgtcatacagtggccaacatgcaggaagcaatgttgaacaccatggtt

SEQ ID NO: 6375 - DNA, 739 bp, Gossypium hirsutum
  misc_feature (701)..(706): n is a, c, g, or t
  misc_feature (709)..(710): n is a, c, g, or t
aaaccttgcatggatcttccagtgagtaatcaatgatctgtagctgtcaattgctgcataaatgatagaaccttggaagtttttttcctttgatttgcatgatttttgcttgtcaagaagagaaggggttgacctcctaattttgcaatatagaaatctttgttactgctactcttcatgtttttctagaagtgcttctatctgacgcattttaggacatggttagaggttaatgactctccaaggaccctctaaatacatggaaaagctttaaaagaaaattaaacatacccctgctggatacatactcgtatctaacactgacacccgcgttcaattaagactgagaaatcaatattatagtgagcttttatttcattatttataatatatttttgcatggtttacttatggagttcaatttttttgttctttattattattattattcattgggaggaagatcatatgatctggctaaaaacaaattaagcttctgttaattcttgattaacttctcagcttttttgtactttgaaaatctggcaaattttataacttttgctgattcttgatactaagcatattgcctattaggcagcttgatacgaattattgtgaatatttgtgattgatagttcaactcatcaaagggggactgaaaccttaggactcgttagagagagaaagagagggagggnnnnnntcnncgtttgatgagttgaactatcaatcacaa

SEQ ID NO: 6376 - DNA, 650 bp, Gossypium hirsutum
cacttcttagtttatattaatgtcttaattacacaagttgtatttactgcacagaaaagaagatcataatttagagttgagtgtggttgtttttgatccacacatatataagatagaggaaaacgaaaccctgccattgaaatcttatccattccatatcctaaaaggaagtatatttggaaaagaaataataaaaaaattcgtaccttactgataagagggttttggtcgagtaccctttgaagcccatcatctgtaattttggcacagtacatgagaaccaaggttcttagcctaccatttgcctttgaagcaattttcatcagaatctcatctgacaacctcaagctcaaaggcctttcaacgatgacgtttagccatgggagtacatccttttccactgcatctctcagtgacctgcaaacttcactcatggacagaagttcaaataatggaaggtaggccaagacaagaaacaaagcctcatggggtggccctgcaaaactggatcgtttatgtgaacgggttgcaagttccatgctctttgcaatctccatattgttttgatgaaagaactgtctagattatatatagagaatataaatccttaacaaataagcgaccaaaatatgccctaaactaaaggagaa

SEQ ID NO: 6377 - DNA, 629 bp, Gossypium hirsutum
catcatctctttcgcagaaaggtgctggggaagacgatttaagcaacttccacaacaatgcacatctccgtaagtacgggaaactcaatcttcgaatcatatctttaatatcacaagaatggtcgacactatttgacacaaaataccaatgagcacaaccagtttctccaagaatgccacagatatcagtaactaggcgattatgggaatctaatccatcggtcttacaaccatgtctctgacaacatacaattaaagcctgaaatcaacatatcacattcagaaaatatgtggtggtgctaaattatagtgaccaagagttacattcatagaaaatggctgctccaagaaaaaatttcaaacagtcaaaggaatcctttgaaacattccctcatagaaaacatcttaaagtcttgggttcctatggtctttataagttaggcctccccactggtccacctgccaacggatttcaggttggatgcttaacatatcaaaccttgtgttacattttgttgttattgcatgttgttcagtaatatcccttccaagtttgtcacaaggtaggctctctgccttcacccacatgtgacgggtagccacttaagtgatctatacgaatcggttaa

SEQ ID NO: 6378 - DNA, 653 bp, Gossypium hirsutum
gctttgtacaccttccatatggaaaatgagaaactctttaatgagatgtttaaccattggatttagcaactccagattccactagtagaaaactcaaaacaagaactggggactacataagaatcatacatatggtgctctttaataacaaaatcactacaccagttcgataactgtgtaaagaactgcttgacaattaagtttcaactcctcaaacaaagactttttaagtagattagttgagtgaccggagaccagtaataagatagaagacagatagtgaattacaagtgcgctgggccataccaactagtattccttttcttgtgtctgaccagaagagaattcttttgagaccactcattacaagacatgagatagaaaaaatgaatagatcaagtagaatgaaaatcatactctaaactagatgggatctgaaagcaaaactaagcatctaagaagacaaagaagacaaagaatactgcatgaaagccaggtccagacaccactagtgatgatttaaaataagattggctaaataaaatgacacacacataatgagggagggagagggggagggggggggagagatattgaacataccagagccaaagcatactgtataacgtagtttcctataggggagcacctaa

SEQ ID NO: 6379 - DNA, 615 bp, Gossypium hirsutum
cccaaatctacttcatgttctacacaggttgtcaagaaatggaagaataagcctctacaatagaagcaaatcatttgtggcaagatgctctacgctagaacatgacaccgtcaccaccccatggtgttgcaagatcaccccaacacagaagagctctaaacgagtcgagttaacagaggagggtatgattcccggatctaaccaaaacaataagccaccatcaaattcaaaacgaaagagagtggaactaacagagcatcaaaaggaagtaagacgagcgcagcaaggaagggagagggactgcaatggacacggtcctggggtccgaacttatacgaatctcgacttttcgcagggaaaccaagagtcgcaagacagtcagggcattcaagattcggaagccatgttggagatgttgagaagagttggatgactgttttctattaagtgatgttgtatgatagtttcacatattaattccctccttggtatatgtaaatattaatataaaataatatattttaataattattatttttgaatagtgatatgagttttttgggcaggttaagcttggacctaggtttaatttttctagaatcgagtttcagcccg

SEQ ID NO: 6380 - DNA, 616 bp, Gossypium hirsutum
  misc_feature (13)..(13): n is a, c, g, or t
tgcctggttgatnttgggaagtgggtttggatgagaatcgattttttgttgtcactattaattgaggattgccatctcaatgtaattttgcagtctaaattcagggttactgcattctccatctcattacatctaaaaactttatctataaattctgttctttctttcgaattggaagagtatatgtattaggtaaactacaccccttttttttcacccaattattattattattatttttatttcggtcatctaattatcatttttcttattttggtcactcaattaattgatttttttgtccattttctttaaatttaacgggtggatgcatgaccattaaaaaataatataataataaatttagcgttcaatttttatattatattaatttagttatatttttaaaaaataattttcaaaatttacaaataatctcaatttgatcctcaaagttcatcttcctcttccgtcaccttttttccaaaaaaaaaacctcaatttgtatgaaacactaaaccaaacattctttgctggttctaaacttaattttgtatttgaaaaattatatgtttgaaggtcggttcacccgggatagggggaaattcaaacggaa

SEQ ID NO: 6381 - DNA, 645 bp, Gossypium hirsutum
caccccgacaaagatccgagccaagatgattcaaatatgggtgcatgggatatgcacgtcctcgaaaatctagattgtgtgggtagtagaaaccttcttcatctttcattctccgtgccacctgctcacagttttaaagagtttgaataagtctgattttgtaatacacaaatatactagtagtataaaaaggtgaagagaacatacagcaagtttaagctctatatcacaacgctgtgaatgcctctctctgttttcctttttcacagatctgactttccacttccatttcctaagcaatgcttcatcctcagtatctggcttttctgggaagggaacctgcaaggtttgaggattacaatttccacttaatgtcagggaatcaaaataaatgaaaacaaaaccacagtgaatttaacatcatcctcattgaccataaaatatacagcacaatcagaagccaaaaagtgccaagtgttagaaaaaaggcaaaaaatagagaaaagggataaagtagctcacatcattgcggtccaccatatcagcaagacggcctccactagtccatattctatctacaacattaaggacccgcttatttatcctccatttggtatatccaagtgtatccagagccctaccatg

SEQ ID NO: 6382 - DNA, 526 bp, Gossypium hirsutum
tcttgagcttgttcatcagcagctatggttatctcgcgtgaagaagggagcgtaaatccaccaacttcaactgcaatttacccaccaatgagtgatgaacataatagcagtagcagtggaaacaaccttgctaacctcaatttggattcaaggttggtttatctcaatcttggtgctacagcttcaactcaaatgggatcaagaatggagggtgatgatgatagcagccacaacagtcaaagagaagccatgaatcgacatgacccaacaatgtaccatcactctcatgacttctagctccaacactttctttctctttctttttctctctctatatatcaatctcattctctctctctgactctctctctatagataatataaaacaaatggatggtgaaagacaggcaaaatagtagttcatggaaactcgttcatgagagattattggatctatatatttgtccgtcctttgatttcaatcactagcctttttccctatgctgtgaggggtgttttttttttt

SEQ ID NO: 6383 - DNA, 546 bp, Gossypium hirsutum
ctctcttctcatctgtttttcttctcaatttcacgttaaaagcatttaaatgaactatgttgacatttttggaagtggtagatggcattgattaattaaaaaaaaaaggttttagagtagcgtagataatagaagacaatggaatttctttgctttgtgtttctatccagtgatgtggaggcaaaataaagaacattgttgtgagtacaattacaaagacatacgtatatatatgtatgtatgtatgtatattttttgttcggtaaattacatcaaaggatccacagcaaaagcttctgtaatatccccactcagtgccagatttgcagacccaattctaattatgattctaaagacagcataaacaatttgcttctaagtcgttctaattctatataagtagttgcaggcagcaggccgagagagtgtgtgagagaaagagacgcactaattaatggccattggaatttatagtctcctcttcattattatccttcctatggctatgctgatacacagacttcctgtgatttatctcttctctgc

SEQ ID NO: 6384 - DNA, 650 bp, Gossypium hirsutum
tactatgtatgtgtgcaggggagaactagaatttttttaaaaaaaaattaaaattaaattgtaatttttttatagtaaaaatgtaatttttaaaggattaaatcaaaattttagtattttaaggagattatagtgtaattttatctttactaaattaaaatttaaaaaaaattaaagatcaaaatagaaaattttacattttaggtgcagcacccctaggttagccccagcatgcatgtaacaatttttttttcattttcaacatttattgtaggaaaagtttgacaatttctttttagaaattaattataagttttgactattgagcggttgaaatgtatggtagtggcccattaacttgcaatcggtatcaaaggaaaagagattagaaactcacttataattgaggagaaaatggtgcaggaaaatggagacctcaagtttgcctaggtcagatccagggcagattctacttcctcctccaaagggaatgaaattctttcctttcaatccagggttctgcattcaggtcaaaccgacagtacttaattaacataatttgtgtgcctttcattcctttatcagtttagtatttttttttaaattattattattgttgattctactgacctcccatcttgaaggactga

SEQ ID NO: 6385 - DNA, 620 bp, Gossypium hirsutum
agctctcaaggaagttgaagcttccaagagcgatagatacaagaatacatccatgtagtaaacatgaaccattcgatcaatcagatgaacatctattaagacaaagcgaagacattgtcagaaattgaatatccccaaagcggtcctattatttatagtttctagaaatgccaataataagaatttgcaatgccaacactttgaagagattttgcaggtttaattaattaagtagatgtaagaattacagaacaatgtgcttttaatcaaaacatcaattctactaatccctaaatccttcaaggtctaccattgaactgaaggcagctattcttgtaagctctaaaaacaagaagctagttatgcagtttatctgttgtttacaaatgaaagagcaggtttgccaattcaatggtcatgctaaagcttcacaaactcatcatatacacatacatagtacatttataagcttgattcaacccaaatagctaccgggttgccataatgaacatcaaaggtcaaaaaatttgttatcagtcaagttctccttgggttaaaactcttaataattgcttgagaaagaaaacaaacctgtcccggaaagatattgccctctgaaa

SEQ ID NO: 6386 - DNA, 610 bp, Gossypium hirsutum
tagcatgaatgtcttttgataaagcttgctgcaattggcattctcaaagtaattagttttgaattatttttaggaagaggctggggaagttttaatgttggcaaagcacaacaaaggatgccattgtaagaaatctgggtgccttaaaaagtactgtgagtgtttccaagctaacattctttgctccgaaaactgcaaatgcatggactgcaaaaattttgaaggaagtgaagagagacaggctctatttcacggtgaccatgccaacaatatggcatatattcaacaggcagcaaatgctgccataactggagctattgggtcctctggttatgcatccactccagtgtctaagaagagaaaaggtcaggacctgttctttgggtcaactgccaaggatccatctgttcaccggcttggaaactttccacaggtaaagcttcttatctatgcatatttattgataattgtctttggagaaactgtgtcggctaattcttctcttgttacaataaaagcttcacactattacttttagttatgctctcagaacttacatttgctacctcttttcttcttcttcttcttcaaatccccccttcaaaaaaaa

SEQ ID NO: 6387 - DNA, 612 bp, Gossypium hirsutum
ttttgaaggagaatttaatgtggtagtaagtaacggtgaaaggtatacatttgggaggacataagctgaactttctagggattgctaagtaaagatttggaatctaaaactacccagcaaacttagaattttatttggaactgctgcactaatgcattgccttcaagagagggacttttggaaatggaaatgtctccctaacccaacatgtgagatatgctagcagtatgatgggaccattgagcatcgactttttggttgtgactgggtaagagtcatttgtttcgatatatggtctaggaaaacattagtaccttttattgttggttgctttctattgtcggaattattgaaagattagagattcagagatgatttacaggttagaatttgttatacagcttggtatatatggaaaatgaggcgtgaaagagttatgcaggggaaacagattgatatttggaagacaataaagaagatacgaattgtgtctaaggaaattatggattgtcgggatggaaaagagagtcagaccaggctgtcaaagggtaactcaacaagccagaggaataatggttgaaacttagttgtgatacggcttttatcccagac

SEQ ID NO: 6388 - DNA, 657 bp, Gossypium hirsutum
gcaagcatagtcgctgaagagcgagctcacggcaaggctcaaactcaagacctctaccatatagaggatcttgagggagctatgcactcgctctttagcgacgatgatttttgcttgttcaagcaacacgtggcacatccataaagaacacataatttttgttgatatgcctcggctctacctagagcactacgagctcatcatactccctcatcaataacttatatgccataggtcataaaatcgagttagaccttcagtttgccatggttctcctactcagggttgagtcagaccacgcgcaaactcttccgtttgccatgttcacctattcaggcaccccaaaacactcctattttgtgaccccactggagctctctcaacggagtaaagagacaaatcccaatcaaatgttatgatttaaagaaatccttccattttttaaaatccaactcaacaatccttccatttgcccataacattaatcaattatcctacttaaacagagatttggatcactaattccataaacaaacatacttcaaatacgataaacaaatataaacaaaaacaaatcatcaaaaacccagaaacaattgtaacagaaagaaactaaagattaaagagaaaggactaacaatagcatcaaaggagcca

SEQ ID NO: 6389 - DNA, 524 bp, Gossypium hirsutum
  misc_feature (380)..(382): n is a, c, g, or t
  misc_feature (482)..(483): n is a, c, g, or t
  misc_feature (494)..(496): n is a, c, g, or t
ctcatcactgagacgcttccgcatgttaaaggcttcatccgcctgtgcttgtgctacctattgttagaaaatgtagagaaccaactttcagcacattagcatacatgggagattttgtgatcagcagcaactaaattaagctcaccctgaaaagctggaccaaactttttacatatcaactcccaaatgcaactatagcaaattgtctactcatctaaaagaatataatctctagtatcctttaagtaaaccttcgaaatcctaaacttcatacaaactagcagaaaagatttgcagtgctatacatttcagaagactccaaccataggaaaacagcattttatctatatattaaaccaaatgtgatgcacactttccannncaggccagcagcgcatcgggagagcacatgcactgacatcacatgaatgcatctgtatgtttgcagctttacaaaattattgcactgcttttttctgggnngacaatatgannnataggttgtgcaagtgagtgcaaatttc

SEQ ID NO: 6390 - DNA, 661 bp, Gossypium hirsutum
  misc_feature (67)..(67): n is a, c, g, or t
ttaaatgatggtaaacatgcccatatagttaattgcagtaaattggacagaaaataaatgtataacnaagtaaccttagtcgtgtttggcaggcatgtaaagggaaaattgaagaaacaaatggttcaaaaacaataatggaaaatcaaactccccaggaaaagaaatactgacttgcacgtgaaataaagtaccaaaaattgcaaaactaattcaggcagcaacacccaccccaccctttttacctaacacagataaaaatgaattcgaaacaaagattctaccataggaagacttacatggtgatgcactagaggagtgtcaacgacgatgctacagaggagtgtcgatggtgattcgacagaggggacaatcaactgtgatgcagcagatggtcggggaaagatttggggattttgatttggggaattagggatccggggaaaacttttaggggaaaaaataagggatttcggagatgagttggggataaaactgagcaaagcaaaacggagccgtttcgtttaaaataaaatgatactttgtggcgtttttcttgtagtgccgctaatgcttgaccttttgcggtgttttctcataaaagacgctaatgcttgactttttgcggagtttttctcataaacgccgctattgctttact

SEQ ID NO: 6391 - DNA, 654 bp, Gossypium hirsutum
ccataataataaaaataaaacatcaatttgatgactatgaaaaaggatggtatatcttgaagatgtatgcatcaataatgcacgttatgtagtttccattaatccctggagacagttgcttttcctgcaaggaatactatcattaacagcatatcggaaacaccgccataactggttaccattgatatgataacaactctatgatagtaaaataaaatttattattacatcatcatttcaacaaaaaatgcaaacaagtctttgaaggtaaacttaaatagaaatttttgaagagttccataactattttgtaattttttaaaatttaacgacttaatctaaagtttttagtaactttgggtgtaatttacataagcatgaaccaagaatttataactaaaatcaagatctaatgcattcttaatctctgctaatcgaattcttaatctcagctttaaccaaaaggcttccacttccaaatgaaattttaagcatcaattaaacatgtttcagtaagaaagacccacaatttatcaaaattgacaaaaaaaaagtttaaacacaataagcttccattttgagtgaaatagagaaactttgaatgtattgataaaaattataagaagaatagaattgtggaagtgttatagggca

SEQ ID NO: 6392 - DNA, 644 bp, Gossypium hirsutum
ttgggctgctaagccttgttggcaccttgggcggcatcggtggtggtgttgttgctaccgtaatggctggtcagcagttctggggtacgcctggatggcgttgtgccttcattttgatggcaacgttaagttcattcataggactccttgtgttcctatttgttgttgatcctaggaaaacagttagtgtcaatcatgatgccagaattaatttagaaaggtactaattgctcattcgaagtttttcgtttttatctgtttcagtatcttatcaccatctaaatttagtttttagggtttggcattttgatattttcatatattgttttggtcactcagctgctttcttttgcagggatgagttggtagaaaaagggaatggtcgtgtctcgtctgtttggtccgagtcctggatggctacgaaagctgttattaaaattccaacttttcagataattgtcttgcagggaattattggttctctaccatggactgccatggtgttctttaccatgtggtttgaactaattggtacacaaattctaacccattttcttgtttctttttggcacgccagaaaaatggtcgaatgctacatagtttgccgaatcactggtttagtgcttgatgtttgatacctttgg

SEQ ID NO: 6393 - DNA, 613 bp, Gossypium hirsutum
  misc_feature (27)..(27): n is a, c, g, or t
attttggttacaccaccgtctactggntggctacaaaattcccgtaaaccttctcaattggtttttgatccccaattcacacttgctgccgctcccatgtaaggaaaaccaaagaggaaggttctgaaatgataaaatctcccgacttttccttgggttttttaggataataaacatttggtaattttatcacagcccaaagaataaaaatgataaacatggaatcatatcgtaataaatcaaagttcggttttgcattgcaaaatttccaaattactctcatacatatatgataaaatccaaggagataatcacccagcaaaagatgatgaattgagcttacaagccaaaacaatgcttctcaacatcccaaaaggaggaaaaaaaaaaccaaaggacctactaggttaacactgctgggggggggaaaaagtcccacctctgccatctcctcctgttttaacaaacaacaaaaggaaacgtgacccttaatacttttttttttaaaagggaccttaatttagaacccctcccccaaaaaaaaataaaaacccaaaaaggaaaaaggggtaatttaaaaaaaaccctttcacttttttaagggccccaaaag

SEQ ID NO: 6394 - DNA, 612 bp, Gossypium hirsutum
tagatggcatgaaaataagttttgtttacgtatctgatttgtgttcaggctattgctattgctggttgtttcattaatgaaggttctattctcgttgtttgccctgctgttttgcgttattcatgggcagaagaattggagcggtggctacccttttgtttaccttctgatatacatcttggtaacatttagcatacattccatcttttcattttttggtttattttttttggggttaggggtggaggaatttgggtggttgttaggaaagcaaacaatcgaagatatagcaaaggaagctttgacttattttttttctagcccaaaattttttttgagagtatatgtttcattgttaattattcttagtttaaaatagaacaaagccttcaaggggatacgtttaggaaattttagtagttagtaagatttgggggttgaactcaatttccataacaaaaaggatgtggaatttactcactgacccttttcttatattatgtaatttaggtggggtcaatattgaaaaaatataatatttttttgttataatttgatctcaaaacctagatgtagcactgcccttgagcttaggtaggttctccaagattc

SEQ ID NO: 6395 - DNA, 577 bp, Gossypium hirsutum
  misc_feature (506)..(506): n is a, c, g, or t
  misc_feature (512)..(512): n is a, c, g, or t
  misc_feature (525)..(526): n is a, c, g, or t
  misc_feature (572)..(574): n is a, c, g, or t
agcatgttcctcttcccactcccttcgaaagtttggcttgctgttgagactgtgtttgttgacgttgctgagggtggtgcctgccagattgttgaaattgctgctgctgctggggctgccgctgccgttgcttgcctatctgtttgttcaacccagtagcaccaggttgggggttcctaccaagcccatgaggtgccaattggtgtttatgttgttgctgcaatgacataggagtcgttggtgaagatggtgttagaggggatagcgaacctggctgagtagaagcctgagattgaatctgggaaccattctgcagagaagatatgggaagttgggtctgaggttggacatttggcatcaatgcactagatacagcaaactgttgctgtggctgctgctgctgctgcacttgcctttctttagtgaggcacatggcatatgcttgttgctgtgacccataaacatgattgtaaccctgatgatgagcatgatgataattgttcagngcatgngattgctgtgganncaattgctgctgctgctgttgctgaactggatatgaaaaaacatgnnntgc

SEQ ID NO: 6396 - DNA, 638 bp, Gossypium hirsutum
gcagaaaaggatgaggaaatataagaaggtttgagaaatcggacacaatgagcaacctgtgttgagatggtctttgatataattcctgtaatgcattcaacagtgtttttgtaagcaagatcctcgctcattccattttcagtgtatcttctaaacaaagactccacaattccctgaacagcaccaagaagaatgcctagaaataatcatcaaagcacaataatttaaggagaaaaaggaaagaaaaagcattcgaaattgattgcagaagtgcatggaaaattacttaccccgctccccaaagatgtcactcttgtattcctgctctaaagtattagcaaaggtgaaaggtgatccaagggcgaccgaccaccgaacacatagcaaaacagcaatttctaaacatcaaaacaccgaactcaaaaattaaaaacataaaaaaaactgaccactttttacggatagttaattaatttccggaaaatgtcatcctattgccggcaataagaaagctcggaacaaattatacttctatctaactattatccagacaaaaaaaaaagcaactactgaaaaaacttttccgggccttattgaaaggaaaaaagtcggaacaaaaaaaaaacggaaattaacta

SEQ ID NO: 6397 - DNA, 617 bp, Gossypium hirsutum
gaagaagaaattgatactacaagacccatagttatgagctgaaacagcggttggatatatcgatggtttgtttcttcttactttctcttcatgaaaactttctggtttggataatctatatgtaaactggcttctccgctcttccttcttccccaatcacaacctatgttgtcccactacaacctatgttgctccgaccttttatttttttgaagcacctatgcctggcacctatgttttaacacattcctgggcatggttagagggatataatccgcatatactcgtgttagatacatccatatctaccaatcaaagattacaatggtgccaaattcatgccaatgtgatggaatgtctcttcctctacaacattcgcacttggttttcttgccctacatttgcctgtgtccggtccatcacttgtttttgctattacattctagtacacatgctttaggacctacaaattcttgattaggttccatgcttaaatttaatgatgatttaagggtacattggaaagtaacagactaacctctccaacatggtgatttagttgtatgccttgctgtattttgaatttctttatatggagatcaaatcctaaaaattgg

SEQ ID NO: 6398 - DNA, 397 bp, Gossypium hirsutum
atttgctttactgtctgataagttagtgatgaaacataaaaataccagcttaatgtatgacagggtataccaacaattccatgcaaaatatttgtaacttgcataccattgacggtaagtttcagatggaagtgtttggtaaaaataggtaccacaatgttaaaattcattaattagatacttcagcttgaatgtttctctacacaatgaaatgtatggctgatacgacatgatttataatcagaatacaagatattgataatgatatcagggtaatgatctagattgttcaaagttgacatcccaagaagatcttcacgccaattccaaggctactttagtatggccggtaccgccaatctgctctcgacggccttgcaccccccattgcgtaact

SEQ ID NO: 6399 - DNA, 636 bp, Gossypium hirsutum
aagtaaacaaatgtcgtcaactcaatcactgctcttactaagtacctaaagataactaatgccattgtatacagttccatccacaagagacaagaagataaaacactatgcacaaacttgaaatgtcactagcttggctaggtgcagtgaaagaatattaaaagcaccacagaaggagggacagacaagctccatagtaaaaacttacagaaccgtaactgcaaagccagaggcatataagaattctagcaactcacagaagcaaaaaaaattagaaatatttacagtctttaccaacaataaaatcctttaaccgtgatctctactcaatacaaagttttcagcaggtggattagccgaaaacacccttcttggagcttttgaaaagggcaggtgatgggtcagtaatgtgttcctgatcatgaaccttcagtattttaatatataaatatgttctacatgtgtaccaacactggcaaactcaagaaaaaataacagaaattccagcgattcataaataattcagaaaattcactaaatcattctaaacaaaccggcagtgagcttaacataaaggtatttagaaatataaagttaaaaaatttaattgcaccagacatccctaaactctgaccc

SEQ ID NO: 6400 - DNA, 642 bp, Gossypium hirsutum
tatatccatgatacgcttcatttatttttaattttcactttcacctgtttgaaatccttacttcttaacagaacttaaccattaataaaattgtagacctacacgtaacatatttttatattaactatccgtgcatttgattcaattcccaaattagttgatctaccatataatcagactctttattttctaaagtatctaagttcgacatttatgtaaacatattcaaatgagcatatatatatattaaatgcatagctgtatctggcactcacctcgagttcggataatatagttgaaacttacaagttatcaacccaattgaattggctcaagttaattccagtgttcatttcagttccattaatttctgcatctctcaaagtaatactaataacccaaaattttaaattgcttaaattccctatttattattcatgtttaaattaaactaagtagaactataagtccaagtctatgacaatgttttcatttccttaagaaaatacgtaacaacttcaaagaaattaagttcaacaaagctaactatttatcgaacataattgaaaacctctattttggggaaattttgaaaaataaaataaaatcataccgtgagtttttcgatgcggtcttcatcag

SEQ ID NO: 6401 - DNA, 469 bp, Gossypium hirsutum
tcctggatcagttggattgttgttagaagccagattcactcttttgctgctggagatagatcacacccaatggcagacaaaatctatgcaaatttgaattccttgttgcagtcaattaaggaaataggatatgttcctgatcttcgttggatattgcacgatgatgagtacatctaaagcccggcacagttcatgactagtaaaatttggccttaaaatgaccacgttaagagaaatgagaggtgcaatgttatcatctattggacaaagcatggtgttgatcatgagctttggttgctgatatttttggggatgatgacctggttctgtgtttgtgttggacaataggttttgcttcaatacggataatatctagattttctcaagactagatagatatgtatcggatgcgggcatcaaacgtggctacttccaagtaaaataaatagttgatacacccatcactaga

SEQ ID NO: 6402 - DNA, 639 bp, Gossypium hirsutum
  misc_feature (54)..(55): n is a, c, g, or t
  misc_feature (69)..(70): n is a, c, g, or t
  misc_feature (349)..(349): n is a, c, g, or t
  misc_feature (366)..(366): n is a, c, g, or t
  misc_feature (377)..(379): n is a, c, g, or t
  misc_feature (387)..(387): n is a, c, g, or t
  misc_feature (392)..(394): n is a, c, g, or t
  misc_feature (401)..(401): n is a, c, g, or t
  misc_feature (404)..(407): n is a, c, g, or t
  misc_feature (411)..(412): n is a, c, g, or t
  misc_feature (417)..(417): n is a, c, g, or t
  misc_feature (421)..(423): n is a, c, g, or t
  misc_feature (429)..(430): n is a, c, g, or t
  misc_feature (435)..(435): n is a, c, g, or t
  misc_feature (439)..(442): n is a, c, g, or t
  misc_feature (447)..(449): n is a, c, g, or t
  misc_feature (453)..(454): n is a, c, g, or t
  misc_feature (457)..(457): n is a, c, g, or t
  misc_feature (459)..(459): n is a, c, g, or t
  misc_feature (462)..(464): n is a, c, g, or t
  misc_feature (466)..(472): n is a, c, g, or t
  misc_feature (475)..(476): n is a, c, g, or t
  misc_feature (479)..(479): n is a, c, g, or t
  misc_feature (487)..(490): n is a, c, g, or t
  misc_feature (496)..(504): n is a, c, g, or t
  misc_feature (508)..(512): n is a, c, g, or t
  misc_feature (514)..(514): n is a, c, g, or t
  misc_feature (520)..(521): n is a, c, g, or t
  misc_feature (523)..(525): n is a, c, g, or t
  misc_feature (527)..(536): n is a, c, g, or t
  misc_feature (538)..(569): n is a, c, g, or t
  misc_feature (571)..(614): n is a, c, g, or t
  misc_feature (617)..(627): n is a, c, g, or t
  misc_feature (630)..(634): n is a, c, g, or t
  misc_feature (636)..(636): n is a, c, g, or t
attttgcacctgcaaagatgagaacagttgatactgagacatgtcacctagatnntcaaaggatgaagnnaatttctagctgatgattagatgaacctaccgacttagaagttctagcattcaagaacattgcttatcgtttaactaagaactcttctcagtttttaaaactcaaacctttattcttaaaataggtatagggagggtaaaacgatttccttccagcatcactagtaagtgtctgtgtgtttatcatctaaaaaagggaataaaatcgagcataaacccaaatctaagtcaagacagatgaaaatgcaggtcagacatctccgatccaaaatatgaaagnaaatatcaagcatagcnattatgttgtnnntcactganttccnnngctgcgnctnnnngaannattanactnnngaaacnnactancatnnnnatatnnntgannatnanctnnngnnnnnnnacnntgnctgcacgnnnnccaacnnnnnnnnngcannnnntnctggcnncnnnannnnnnnnnnannnnnnnnnnnnnnnnnnnnnnnnnnnnnnnntnnnnnnnnnnnnnnnnnnnnnnnnnnnnnnnnnnnnnnnnnnnnagnnnnnnnnnnngannnnnanaca

SEQ ID NO: 6403 - DNA, 536 bp, Gossypium hirsutum
tgagtgtattcctatatacctaacttgtttgctcttgtgaagagaaaattaaaagtttttgaccctttttcctgatttttagaaaatcctccaattgatgtagttattcaaagtggtgttgttcctcactttgtgtgatttcttaatgagcaatatggcctccaacacaaggtttgaaggctatttacagagttccccttggtgaagtgaactactcttttggaatatataaatcacaattaacatcactgtgttttcctttctatgtagctttattctgtaagagctttatatgctattggaaaagggtcattagagcaggcagtcgttgtaattaaacatggagccatacctatgtttatacggctgttgtgttgctctgaagaatgttatcaattgaaggagctggttcgtgcttattcacttccatattttatatagctgttctttacctagttatttgatatactgcatgcttcgtaataaattaggtggcagcagctttgggtagtctggccagtcaatctcctgatttt

SEQ ID NO: 6404 - DNA, 763 bp, Gossypium hirsutum
  misc_feature (648)..(650): n is a, c, g, or t
  misc_feature (652)..(664): n is a, c, g, or t
  misc_feature (668)..(669): n is a, c, g, or t
  misc_feature (674)..(677): n is a, c, g, or t
  misc_feature (680)..(690): n is a, c, g, or t
  misc_feature (696)..(699): n is a, c, g, or t
  misc_feature (702)..(706): n is a, c, g, or t
  misc_feature (708)..(713): n is a, c, g, or t
  misc_feature (718)..(718): n is a, c, g, or t
  misc_feature (720)..(724): n is a, c, g, or t
  misc_feature (730)..(733): n is a, c, g, or t
  misc_feature (735)..(738): n is a, c, g, or t
  misc_feature (740)..(748): n is a, c, g, or t
  misc_feature (751)..(759): n is a, c, g, or t
aaacacaatattcagctttattcaacccatcaaagtacattttagaaaaatgagctgaattttaagctacaaactacacatacatatataaatatatatgaactcaattcacaaaacctgttttttttccctcttgaaaataagaagattggtagcagtggaaacaaaatgtttagccatgaataaccataaaggaagctgaaaatcatacaataacttataaatatatataacagagctaaaacagagctaaaaaggagaaagaaaaagaagggttaccaattccctgccaagatcaatagcagcttctctatagctgttcttcttaccagggctactcccacaaaacacacagattcttttgaattttgattgtttcatttccatctctctctccattttttctttttgtggggataagggaatatcctctgttttgtttcttcaatgaagaaagaaaataattgtgaagggaaaaagaagagaaatggttgaggattttgagattggaagtgggcaggctgtgtgcgcatatatatataacggtaggcaagaggctacaaggttgtcgacttggcatgcgttaaccccatgatgtaatggtccaatgccatgcccccttattgctacatgttgggtagagtaggnnngnnnnnnnnnnnnnattnngaatnnnnccnnnnnnnnnnngggttnnnncannnnnannnnnngacgntnnnnnctcttnnnnannnnannnnnnnnnggnnnnnnnnnggcc

SEQ ID NO: 6405 - DNA, 568 bp, Gossypium hirsutum
  misc_feature (558)..(561): n is a, c, g, or t
  misc_feature (563)..(565): n is a, c, g, or t
tatttctagttctactgccttttggtctccgggcactaccgaaattctaatagttttgtcgcaagtaagtactcttatcttgaatatactaaaattaaggataagagtattgatacggcgtgattgtttcgtacaatcttttctctcgacattaaggtattttttttatttataattatattttttttacttttgatattaaattaggttttttttaaattatttgtgagaaatagtttctgacaatatttaaaaaaaaatttaacctttcaaatgttcaaatcggttagatagatgaaatattcatattaatcgtctttcaacaaattttgatttgttttttcttttattttaatgaactcaatattctttattagtttctcgatatcattagtaggagagattaattttcagtttactcttgattttttcaagataatattattccattcattatagttactcggcatttactaatcccttaataatacatttacaatttttaaaaaaaataaaaaaagaattctcacttttagtcgagactttgtgtaaaatctnnnncnnntag

SEQ ID NO: 6406 - DNA, 665 bp, Gossypium hirsutum
tgaggctgatagactaagttcaccatgtgctaatgttaaagcatctacagccatgagttctattgcctggaggaacaaggaaaaaagaatgccgaagtgtcaaaagtctattgcatttactatttgtacacatcctgtagcatttactgttaaaaagttcagattaaaaagctccaaatacgccaaaactaacattttgaagttgtggacaaaacagagtaattgcagtttggtacctttactttagcatgcgtataaaccgttctatgtaaatcagctcgagtagcaaataacttgtggacagtcagatctgtcagaaacatatatattagttgaagattaatagttagatgaagataataaatttggacaaatactaacaatccttggcccggtaacatatctcatcacccatcactctcattgtttccagtaatctgcaagttaaaatgaacatgaaaaatatgcacgactacaaaatatgttcaataaactagaaagatctgcgcttttgcagatgcagaaatgttgaaatagcttgaaacttaacatcccaccagagtatgtattaaacaaaatgatcatatgatcattatacattgatccctacctttgaaactgaaaattgcagccaaggccacaagcacgagagttccgtacaatta

SEQ ID NO: 6407 - DNA, 641 bp, Gossypium hirsutum
aatctactaccactttatatgttctcggcttttaaggcgccaacgagcatctatgacaagattgatagaactatccgatcattctggtgggaacatgatattggtcaaagaaagttacacctctataattgggacaagttttgtgcaacaatcctggaaggaggacttaggattagacaagccaaactcatgaacgaagcgcttttagctaaactagcttggaggatcatgtcttcgcccaactccttcattgctgaagtccgaaaagctaaatactacaaacgtgacgcctttgaagttgtccaactcaatgctactgactcttgggtatggaaagatatccttttaggtagagatatctacaacaagggaaggacgtccaaatttggagtggtaatgattcctggatcaaaccgaatgccgttgaaaagcagttggacgtagtctaaacccataacacttttgttcaagccttctcttgcattgaccaaagtagaatgagatggaatgaaagtaaatcaagagaaactcttggcccccaacttgcaaatgatcttatcaacaagccaatctccttggttggggaaaaagatagaatcgtatggcgggatgactacagtggcgtctctaccgtcaagaat

SEQ ID NO: 6408 - DNA, 629 bp, Gossypium hirsutum
actaagtctcttggaggaagcggaagaatcgcactgtcaatggagagatcgacgctcattgtagtagcatttggcattaagaaaaatttcggcagtatcctctcggaatgtaggccatgttctttgaaccatgggtctttttcagcagcaatattcaagattaactgaagagcatcattgcagaagtaccctgacaagggatgagaaggctgcaacacaaggacacaagcttcattacattccatacaagttcaattgggtaaaattctatcaacaaaagtactggtgacaattcatattcaacatcatgagttactgcaaatctcttacaggagaaccaggtgtttcatctggctgggtagaatcaagtttctcatcaggcaaggcattgtcctgtagtaaggagctgattatcaggattcaacttagtaatttgaagttcctaaagtgatttgtttcggtatcatacaagtccactttgatccgtcgttaatgtcaatccattagacatatgtttgatcatgcaatacgaaactcttttattgcttctacaaaaggtcatttttcaagataaattatgaatcacttgtaacttgattagacaagtaaaggtcatgggaagtgggaaa

SEQ ID NO: 6409 - DNA, 553 bp, Gossypium hirsutum
  misc_feature (465)..(465): n is a, c, g, or t
  misc_feature (510)..(510): n is a, c, g, or t
  misc_feature (512)..(523): n is a, c, g, or t
  misc_feature (526)..(528): n is a, c, g, or t
  misc_feature (530)..(546): n is a, c, g, or t
atattgaatttagatatccatcaccatattcattggaggcaattttttgtactcatccaaggtgctgttatatgcttattcctatgtatgaatttatttcatgattcacatatgtatcttattcaaatacatgtaagaagactgatggctattctggcttctttggtgtataacgtgtgatttgatcatagtggacatgatataagtttccagctgaccttttgcgttatttttgcaattgcttttggggataagcttctctttttcttttgtttttttccctgaattgtgatcatatcagaaaggaatttaaattgctaatatggtagctgattgtatagcaaaaacatgtcctgaaaatgctttagagttagtcatatttgaggttacctttgaataatgttaggaagatgttaatagatgataaagctggaatttcttatgtggactaatagatcctaagancactgatggtcttcttcttctataaaaaaaaaaaaaaaggtttcncnnnnnnnnnnnnatnnnannnnnnnnnnnnnnnnnaaaaaaa

SEQ ID NO: 6410 - DNA, 598 bp, Gossypium hirsutum
  misc_feature (392)..(392): n is a, c, g, or t
  misc_feature (463)..(463): n is a, c, g, or t
  misc_feature (479)..(479): n is a, c, g, or t
  misc_feature (497)..(497): n is a, c, g, or t
  misc_feature (510)..(510): n is a, c, g, or t
  misc_feature (515)..(515): n is a, c, g, or t
  misc_feature (517)..(517): n is a, c, g, or t
  misc_feature (519)..(519): n is a, c, g, or t
  misc_feature (545)..(545): n is a, c, g, or t
  misc_feature (547)..(547): n is a, c, g, or t
  misc_feature (555)..(556): n is a, c, g, or t
  misc_feature (560)..(562): n is a, c, g, or t
  misc_feature (567)..(567): n is a, c, g, or t
  misc_feature (583)..(584): n is a, c, g, or t
  misc_feature (586)..(588): n is a, c, g, or t
ttgttgtaaatccaacgacaaaggagatggaagactcaacactagacctatttttggcaggcacggataatgctatattaatgatagaggttaatttcaatcctaattctttgtattaggatataaaggattatgatgaacttttaccagttactagaacacatggctgctgattttgttcttttctaaaggatctttgtttttgtttttccttttatcgtttgctcatggaaatattttgattggtgtgtgcactgttagcatgattccatctaaatcatctcctgttaactttacctcatttgttggatgttgaagcctgttctaactgtcatataaggaatttcaagttaagaaacatgaaatttggtgtgttttcctgggaaattctngggtgagctccacaaaaaaaagcttaagaaaagcttttaccaaaatatctaaggatttaccaatatttctnatatttttaagaaatnttggtaaatccttagatnttttagtaagagnttttntnanatgaagctcatggtagaagtgctcgngntttcctcnncctnnntctgntgctatctccttaatnntnnnccatgattat

SEQ ID NO: 6411 - DNA, 655 bp, Gossypium hirsutum
tagtatttggatttaaatgttaaagttactatcagttacaaatttggagtggatgcggatagatatctccctgtaatattcattattcaaatttttattgtttttttagataatagaattgaacatctaaattcgcatcaaatttgcagatttgaatttagatatatgatagatttaaaaaaagattaattttacattttagcagaccgggacatgaaatttggtgaatttagatatcaaataaataataatgtctaattcgaatttggatagtaacacttaaataatttgctaataagaattctagcttttaatagatttggaaatttaaatttggataattaaaaaatgcagatattcctatcttatacaaactggaaataagtaataatgaagttctaggaaaaattttagttgatatttaagtaaatcttaattttcattttggtttttttactacattcaattttaggatttagccactgtaatttaaataagattgaattatcgttttggtatttatattacatttaatttgaattatttgagtttaatttcaatatttaatttggtgtttgagtttttatcttttttttcaaactaaatctcatttattttagtagaacacacctatcaaacatttattggagccacg

SEQ ID NO: 6412 - DNA, 647 bp, Gossypium hirsutum
ggaaatcatgttcttggttggtctatttctgccctttgacatatatatgggccaagttttgccgtcaaactgcggaagagtattgactaatatgaacttttaacttaatagagggagtttcatgatttttagtttttgcttgtttggacattgtgctattgttaaaatatgattttcaattccgggttgaatgtaaattaaatcttttatatttaaatatggatttggctcagggaattttgttaagaaatcctttatattaatttaaaattctaaaatataaatttattatttgttaaatttttttttaaaactgcatggcaaacgtattttggattaaacgtaattaataacatggaaggaccgcaaagaaaatgcattattgtttagaagaaaattggggaaatttcccgaaatcattattaacatgaaaaacaaataaactattctatagggtaaaatggttgttgcttctgataaatttaatctttaatctttgtattttttttattaatttcatccttatttttttagttatatttggtcgttaattttattgttttttttaacagaaatactggctaaaattttaagtttttaacgaggttgggatgataatttgcgtggcaacttacatatacttcatg

SEQ ID NO: 6413 - DNA, 627 bp, Gossypium hirsutum
attcttttccctcagcaaccaaaatgaaagcattaagaagcagtggaccagaggaaacagttactatcttcaacaatgcaaaaaagccagacacaaaaatctctctcctgtggcataaaattatggtcttcaaaatagatgcctgtgatgatggcttggattgcatttgcttgttcaatcggtatgagaacaacaaatagaagctttctgctctctctgcctcacttaacttaggtatatcttcatcctgaagagtcttctccctaccttttttcatcaaagggttcaaccaccaaaaggatagtttactaaagcaaccagctgtggcaaattgggtaacttgctcagtgcaagcagctttggtactgccattgtgatcagcacttaaagggccataaaggccacattcattggtgttctgatcaccatcttcatatccatatcccttgcaagcacataatagcaacaatattgccccaggtaatgataaagcatctaaaactattgttatcgtgactattccattcaaaatagcagcaaaaatcgataaaatacaaataattgacgcaaatatgaaggtgagaatcgaaagtatacgaagtggtgtcttgggaagttgattaccct

SEQ ID NO: 6414 - DNA, 424 bp, Gossypium hirsutum
catcctaagaagggtgataccatgcgttgaattttaagttgttaatacattatacaaaacgccatagcattacggcacacaattaacatcacgtttatgaagagaaattaatcatacatgccaagcaaaagaaaaatgacaaatcataaagacaacaactaccaaggatgacaattgacatcacgtttaccaagagaaattaatcatgttactaaacccaaataatgcatatgcagtataagcaaacaaagtggctgattttatggcaaagattgagtctgttcaagatggagctgttcattgttctgagcatctgattccaagctgttgctccttgctcaaaaatgatgtccagaatacgttaagagcttcagtttagtttgttttgattttttaatcactcttttattactaaaaaaaaaaa

SEQ ID NO: 6415 - DNA, 566 bp, Gossypium hirsutum
atcactagaaccattcgcgccattcccaaacccaaagctgaattcagctctttgaggtttttcccgatcctggtcctcaaccttcaatgtagtaaatgtgagcagtagtgaacaaaataaagtccctgaacaacttatcgattgatgaaaatatatgtattaatcaaacttgaaatacaaaaggattgcctttatgtataaacaagagccacatgcaaaaattatacatcctacacactagtaacaacaaactatcaccactaacaaaaagtaaaagaacttacagaacagttttgtggatatctggttaacaaggatttgctggcttatcgaaatgacaaaaaaaaaaaaatttaaatttttacctttaaccccccggggggaaaaaggaccccgggctttcccccccttaaattccccccccttatttttcttcttcatattaagaaaaacaatggttttaatttttatccaaaaaatttaaaccccaaaatttggggtttggcttttccccttttaattttcccccttaaaaattggaatttggcccccgggggttccccccc

SEQ ID NO: 6416 - DNA, 618 bp, Gossypium hirsutum
aaatatttacattatttttaattttcaaattgtttttaacattaattaacattattctccaaatcaggtggagaaagtgcaagggaaaggaaaaggaaacttcttctattcattcatggaaactctaaatcaatattgagtttacgatgctgtcgtgtgtgtgtgtgtgtgtgtgtgtgtgattctaatagaataattgtttagggtttgttaacattggagagtagagaggtaagctaaaaacatttgaaaatgtatagtgagctatatatgtggtgacaattttgagtaaagcgttggagcagtggggagtaggagtgattatataaaaaggaaatgaagatgattgatgatagaagatactagtacgattagctgtaaactgagattaaaaacgaaaagcctgctactttttttgtaaagttaggggatggtcattttcatcccttgataattgttatcgatggaatgatggggttttgggaaagctgaagctgcccacccataccgcaacagctggatctacatattggtatgatttcattcacaaaattatttttgtaatgccttgtttctgttttcatgttgaaaaggaaaagtcaaaaagtaatctttcaa

SEQ ID NO: 6417 - DNA, 626 bp, Gossypium hirsutum
ttacgggtacttattcaaactttattaagacttgatcaaaatgtcttacttgcagctttgatgaaatctggattggaagtctgttcggtagaggtcaacaccacagatgcttgcctgatcctatcttttggaaattctacccgctatgttcatgcaaccttcaagaaatctcctataactacaagtgaagatgaggctcgggaagctgtaaagaaggcatgcaaaggcttacattacttcgccatccaagaggcttggatccagatgctcatgttggattctggttgctattggacctaccacccccaactgtggttgaatgggttgcttaagttatttgttttcatcagcaactgcagtaaaaaggcatcccgatgacataaagtagcaccagtgcaaagctgaggaaatttaatataaagaaaaaaatagcaactgcctgagaactgccacatccagaaatggaaaaatctccacaatccactcacaaagaattacattagccgttcagtttcaaaatttgcttctcttttgtttttgaagaacaaaacgaatgccttgcttcccaagttccaagctttttactctaccatcatctagcatcacagatactgtggatgtgtctt

SEQ ID NO: 6418 - DNA, 601 bp, Gossypium hirsutum
gatcaaattcctgttgctcaaccttctttacatagtacaggagatcttcaactccaaatggaagctctccttcatcttgcttctgatgacaaaacaaagcaaataaaacatttctttgaaggggaaaaaaaataaaaggaatcagcatatggagattatgttctgacctttaactctttcaacatagccagctctttattggctaagtccgataaactggaagaaatgtcctctaagaattccagcacctgacacattcacaaattcctaagaagcaaatattacattcattaacgaagcattgaaaagtaatacaaaacctagatgcatctttaaaataaacttcataacagtgttttataagaatgctatattccataaagcacaatccaaaattcttcataacagtgttttataagattgctatattccaaaaagcacaatccaaaacttcattcttttctatgtttcctaatgtcatctatttaaaatgtcacaacatcatgattttctgctatgtaaagctagttttgcatggtttggtcatatcactcaggaaatgaatcattaagataataatcatttcaggcgtcatttgtat

SEQ ID NO: 6419 - DNA, 610 bp, Gossypium hirsutum
  misc_feature (529)..(530): n is a, c, g, or t
  misc_feature (594)..(596): n is a, c, g, or t
  misc_feature (600)..(602): n is a, c, g, or t
  misc_feature (605)..(607): n is a, c, g, or t
gctgcattgatgtcatgtttcagcactaaggtttgtatacaagagcccctgcaaacgtgcctttaattaattctactatatgctccctacagctacttattttctgtttgcgtgtagtgaatttggagccaaagttgttccacctaaaagaattctaaagatgcttcctgaactctttgaccatcaagatcaaaatgtccgtgcatcctccaaagggctgactcttgagctttgtcgttggattgggaaggatcctgtcaagtcaatattgtttgagaagatgcgtgacactatggtaaatagtattaagattagtctgttctggacatgcccttttccagctatattgaaataaaatgttttttttttgtttgttctgcggataaaaaaaaaaaaagctggaggtggaattgggaatggggacgggggcacccaacccatctcgaagaaaaaggtaaatcctttcagttttacaattctaattttacactatgtgggggagggaggtgtggcacccgatgcctggttnnatttatgttttaaacaaaagaagttttgtgttttcttttatttaaaatttgaggttgggggttnnngttnnnaannnggg

SEQ ID NO: 6420 - DNA, 475 bp, Gossypium hirsutum
aactgatcagggtagcgtaaatccaaatattttgcttgatgaatcatacatgggaagattatacagggttgcaaatatccttgcattgcttggacaaaatgctcttgaggacaagacgattggcgctattggtcttgggaagacaaagtataatgttatcgatttctggaacattagtagaattggcgaaagctgttctcgtaggatgtgcgaactgcgaagtgcgtgttaagactaaggcaactatatcttcatccttgatggtgtcatataaagaaggctcggagtctgttttcacgtgttctcaatgacggagaaaggcttgtcgagtttgttgtgcagggggaggagcccttcttctgcaaaattatatccgggaagaaacaaattgtaatggcttgttaagtcatggtagccaagttgatcgtacagcaaatcattcagtgatactggacactgttatttggatgaagtg

SEQ ID NO: 6421 - DNA, 614 bp, Gossypium hirsutum
accctgggaaaattactaaaaggccttctttttagtttataactaattttataattcaatcattatttgtgagattttataacattaattaggtttagttctgtaaaaattaatatcataaatagcattatgtaaaatttatgggcaggcaaaggtcggggtcaagggatatattttctattcaaggtcgaggagggagttgatgtgttatattatttgatgcagcttgcgtatatatacttaaaaagttgggttagagtcagggcaagcaaaaaaaactgcctcgctccaccttgttgccgtccctaagaaaaaccatatgcaactcatttgcaatatatgatagcagggtcttttcagaaaactcattcaaaaaatagctccacggacctttcttcaattcacaaggcacataagaatattccaatataagccagctgaaaacacaaatcatgaaaaataaaacgcaccatgccatgtaaagagaagatctggatgcaatctacaggtgatattccaacaagaagaacattaaaaaatggggcatatctgatcaaatggctctcactcccagaatagtcagcaggaactggtggcgacaacaaacttataaa

SEQ ID NO: 6422 - DNA, 560 bp, Gossypium hirsutum
  misc_feature (34)..(36): n is a, c, g, or t
cttgttctctgtttgtgattcgattagtaagtannnaaatttcttgggaaatttattaaaattcgaagtcgcttttactgtattcaggttattctgatgatatgctcgagctacttctcttcgcattggaagatttgagaaactctttgaaggaacaaggctccaatttgatgattcaatacggctgcgctgaaaatgtcattaaagagcttgtaaaagaggttagtttctcttacattttttcttttgtaaaaaaaaaaaaaaaaaaaaagcagcaaatttcggactctttctctctctctctctctatatataaattgaagcataaggtatgaacaggtgaaagctacggatgtttttatcgaataagaggtaaaatatgaaatgcgacatgtgattggagttgtcaagaagacattggaaacgtcttcctctttagattggaatctggacattgtcatgtggagaactccattctatgatgttaaggtggccagggtttttattctattttcacttgaatttttcttgcataactctaaagatgattcccccccccc

SEQ ID NO: 6423 - DNA, 637 bp, Gossypium hirsutum
ctattgaaattttttccattttgattccaaactagaggatttgtaggtaaattatattaaggggacggaaaagaaacactcccatatgtgttttggtcccttcgaataaaggataaacgaagctgcaaaaggttgaagaaagttaggagggttgccggagttggttcccgggcgtgctctgatttaagtcagcggatatcgggaaagtgctccttccaatatttgcggacttgagcattagatcatgtttcggattattcactccagtgcccatcgactttcctctattgtttgtacaatctttccaaaagaccatcaacaatatgcatctatgtcaagaacttactaattttttgttatttaatatgtcttgctctggcatttctatcatgaaatgatcattggggtgatagttgcatgataaaaactttcaaatgcagcacataaagctaaatctaaattttcgtttcctgctgtgtaagttggcatttgacgattagtctcatgtctgtataaataatgggaattactattttcttgtttctcaacttaaaaagcttatatcttttgtttgtgcccatgaacagcctggtcctcgcgagtctccgattcagtgctatattagaagggacagagc

SEQ ID NO: 6424 - DNA, 622 bp, Gossypium hirsutum
  misc_feature (60)..(60): n is a, c, g, or t
aaaatgacattgtttaagcattttggaccttgcctcttcttcaatagtttctacactggnggaggtaagttggaaaagaacgattttccgacatgtttaatatacatatcatggtatcgtattcatgtttacgattttaacgatgcaggtcttaccagaacaaccgaacaagaattacttttctttactatgggtgattccgaagatggtgaatgcagtttgggagcttattaggggcatcattttgccttacatgtacggtccagactacaaggaaggttgggttttgagaatgttgagggtaattggattattagtaccaggtgtgtcagctcattcccctcaagattacgttaattccactcgattgggaaccttgtcagatgttgagctccacaaacaccaacttaaaatagattgatgacaaagaagattctcataaagcttgttgtcaaatcacttttaggacatgttccatcagcatgtacatgtataaatcagatatgatttgtgaaaaaacagttacataatctatttgaaccctccaattctatcgcttgtaaaaaaagaaggtaaagtttccatatccattttcatggcaaactgttatactaccggaaaa

SEQ ID NO: 6425 - DNA, 616 bp, Gossypium hirsutum
tgatcttggtacctttcttgacaaagggaagggtctcgcagatctgaacacttcttttgacaagggaaaaggtctcgttgtacaataattttgtacaaattttttctttgtatacatcatttcgttttattgaaatgtatacaattttcttcaatctttgtgtttctgtatttatatttttattcccggtgtcatgatattatattaattgacaaattaacattcaaaaggcgttttctattttcgatggtcttctgtgttgtgaaatagtgggtgtataattcttgtacttgagcaatttgaattgttaatagggtgggtgggtcatgttttgtttggctatcttcatttgttctcttaaaagtgttagcttttgacatattgaccatcataatgttgaagcgtattgtacaagtcttttggaaggacatcaagtacgtttaagagcatttaattcgaggcttgatagtgacatttagggaagtgatatcaatgatagcgccttacctaaatatcctgtttgaccacgtgttactcttgtattggatagtgccagggcgctatcattggtaagaggatatttaggtacggagagagtaacactccgtggtaagaa

SEQ ID NO: 6426 - DNA, 618 bp, Gossypium hirsutum
tggagtctttggaatttttcaggacatctcttggtctcgtgaaggaaatggatatagctaacaaccttgcaaaacagggaattgactcttcttccattcttattcactggtggagaattttatgaatttcatgctttgagtatctttgttgtttgttagctattgtcttgtcttgtcttgttggggacttccactccttttttgctgtattttctagttttacttgagatgagaaggacacattgtgatcggtactaataccaatacacttctgacaaaataataagtagcagtgaaatgaagaattcaatattaaaagaaatctaagactaatattatacaaagaacctactagtttgccattaattacgttttgttttacttgaggagtgttaagattgatatggaaaagcccagtggatattaaccacgtgcgcatgtaaatgtattatagtagctttaagcactgcaagcggatataattacatacggtgataactataatatcaccggtgttttgttctaaaagataaccacgttgccccacccctgaaggctgaggtcccgtttaatcaatcaaattcaacaccaaaagtaatcgagccaacacaaccgtca

SEQ ID NO: 6427 - DNA, 644 bp, Gossypium hirsutum
atcaaagttaggtccatatagtcataagattgcttctggaatgccaagcttgccgctaagatataattgcgttggaacctcacatttttggagacctgagactgcatccgactgtgccaaagttaatgaccctgacaatgctattaatggctccagcaagaaacttttactctcattttctctttcgtcttttcttatttcttccagtaaagctttacttgtatcaatacctggaacagtttgtttaataaccccaaatcaaaatcattagcaaaaacttgcaaattcagtaatttctccaatctgttaaaatatcctcacctgcaaggtatcctccatgcacataaccattaaatctttcacttgtgtgttcaccagtaaaaaaaatgcgtccaactggggcctgaacgtaacacacacaagtattattatgattgaatatgccaatgcagatggcattctgatgttattttaagaattatacattaatatataatatattaatccaccaatcctcacatcacacacaagaaagaatttaactgtgaattatccgataaacaagttagagttggttcattcattttgatatcatgaaattcttggatgttattacaaatggaagtgagagactgagattcaga

SEQ ID NO: 6428 - DNA, 654 bp, Gossypium hirsutum
gatatcggtttgcaagattcgaattgcaggctcatggaaaaatatgtgtgtgcgtgagagagagacacatagagagagataacgtgctgctatgggcaactaagcaggattttctggacaaagaaggcattacaaaccagcatgtagtagtgtgttccctattttatacatcttcgggtactcgctcattggtgaaggtagagagtagagactaatgacacccagaactaaacatttagggtaacacataggccaagaatattaaattttaaaatggtaccaaacctggttttgtttactttttctgcatttctttctccttttcttttcatttgttaagaaggaaatgaagaaaaagaaatttgaagctaaaaaattgccaaatctgcagcagtgccactaaatacatgatgaaacacggaaaaagtaaaaactaaaattctgatgagtttagcaagttgtaacctttgcaacaaacttcaagcagctaaagctgagtccatcaggcagaaggaaactaattggtgggtagggcgaatatcatttcctgcataataagaaaattggattgttatttcgctaggttataaagaataattcctattgacttatgagagacgaatatagttttaagataaaccttatcacagacag

SEQ ID NO: 6429 - DNA, 652 bp, Gossypium hirsutum
actggagagaagaagttgaagagaggctcattaaaaaacccaagaagagatacacttcttggactgaggaactgaatcttgataacttggctcacttgggtcctcaatggtgggtggttcgagtcccgggttagaggtctcgagacagctgaggtcacggctcgcgtgctggctaggaacttcccgaacatcgaatttaaggtaaacagagccagtatagtttgttgctatttctatttattggctggtagaacataagatgcattttgttgttcgtgtagccttttatatttatgctgggacttatttgagggttgaactgaaacgttattgagatttgagagaaaaatatgaaaatgtttgtttgtgctaactgttgctaagagggctagacatagcggctagccttggaattggtgtaaccattgttatctcctccattaagcttctttatatgtacaatcgaaaagttgtctaggcattttaggcgttattgtttaagatagagaaaaaggttaagaatttgatgcatatataatatgattacagttactagttccttttttttccttcagatatatactccagctgttcaggagaagaagagattaaaaaatggttccatatcagttaaaccgaagcccttatttcc

SEQ ID NO: 6430 - DNA, 638 bp, Gossypium hirsutum
tattaaaacattgaaagtgagcctgtgcttcaacaatttgcatctgaataatgtgttttcatgtatattgttcaaaccaactaatttctttagtggccattttgagtctttatatgggctgctgcttcttctttttttatctagaaccaaaatatgggaaatttccctttgtagaatgttctaacacaatgattttatgatttcagatgtatagaggtaggctgagagatggcttctttgtggccattagatgcctgaaaatgaagaaaagccgtagcactcaaagctttatgcaccatgtagagctcatttccaaattgagacatcgccatttagtcagtgctcttggccattgctttgaatgctacttggatgattcaagtgtcagcagaatttttttgatctttgaatatgtaccaaatggcactctcaggagctggatatctggtaatcattaatctctatgttaattttttcccaggacagatatcaaggccacactatttgcacttcttctccatgtcttagagctatgttgctccgactctttatttctcttgaagcatccatgtccaacatttttgtttgactccgacatggattcagggacgtaaccttcgagacccttcaaatacatt

SEQ ID NO: 6431 - DNA, 608 bp, Gossypium hirsutum
tcagaaagctatagaatcaacaaatgaaaccaaaattttcaataaacatacaacatcaatatacccctaatgagaccatccaaaaattcaggaatacgagcgatatgaataccatgctgaatatgaggatagcaaaatgaattatctaccaagaaatcacaccaactgaataagaaagcaagcgtaggaagagaagtagatatacaaggaaaaataagcagaatctgcattggaaacaagtgaaatgacaacaacctaaatctgtaaggagagaaccaatatttagttttttggtcatgaaaaaccagtcagtagcatcttgcaaggaatgacccaataattttagggcaatatagtgttgtttttggtactttttttctactaaagagaaaggtatccaaagtgggaaggacagcccactcaatcgaaggactgacgagccaccttccaattttaatttatcattcaattcgtggtgggtgggtccccctttattcctctgcatctacacactaatctaaacattttgaaatcaacggttactggggcacttgggacccacccttcccatcttttctccttaatctctgcgatttcggtgcacttta

SEQ ID NO: 6432 - DNA, 635 bp, Gossypium hirsutum
agaagcattgaatgttaaaaaacaagaagaagagatgatgaaactacagaaacaagaagcacttcaattgcttaaaaagaaagagaaaactgatcatatcattaaaaaaaccaaagagaaacgtcaacaaaagaagcagcagaattcagatcctaataaacctaaaaagcctgcatcttctttccttttgttcagcaaagaagcaaggaaaactctggtacaagaacgacaaggaatcaacaactctacacttaatgccctgatttcagtgaaatggaaggtatgttatcatcctaaaatcaccatttttgcaattttttaacttttttttgtttaattgatattgggtttgtgttgaattttttgggtttggatttattaggagcttagtgaagaagaaagggatgtttggaatgcgaaagcaagtgaagccatggaagtatacaagaaacaaatggaacaatacaacaaatctgcagaggaggagcagcagcactagtgaaagactttttttaatgttgatgtttaagtgttttgtttgaacatcaatccttttgatgatgatttgattaacattttctggctgcaatctaatatttctttcaagttttaattcgatatttccctctcctcga

SEQ ID NO: 6433 - DNA, 632 bp, Gossypium hirsutum
ttcttatttcacacttcagattttgaaatctttgtcgattaatagtaattgatttgtatgtcatacttgatgcagcttttattcaatgtttttagtatgttggttagaaagttctcacatgctgggaaaaactgttgtttgctgtagttttgttcttattaggctttgttaatggctgtagtttatggtatcatatttgcaaaatcctagtgaatgagggagtagccttggaagctccatgtaaacacctgtacaaaatcatgttttctactagattttgggtaaacaaaactacgaggtcacaaatggatgcttagtctcttgcttgctcattctcctgtttttctattattctttgattttatttacagtatgttttgggtgttagcaaggggttcgctcattttttatttgctttttttcttcaatatcattatcgttcaggaactctatgcaaaactaaacaggatggctagcctggcagcagatatgtttgtaggaagggaaagatttgctacatcgctattgatgcggctcaccgaatctgtcatcatatgtctttccgaagatcaaagcttttgggatgatattgaggaaggaccaagacctttaggtccacttggattacgaca

SEQ ID NO: 6434 - DNA, 618 bp, Gossypium hirsutum
attatcaaacatccatggaagaaaagttatacctgaacatcccatacaggataattatgacccttgtagcaaacaagatttgcatttagttttgtgctccataagcgaactgcaagaaatttgtatataggatgaagagtaaagtattaaaagagaagggagggagggaggcgcggagaggtgaagaaactgagatgcgagggaagaaaatccaaatgagcatgctatagagtttaacgtacttgttgtatctactgaagaagaaagaataaaatcaccaagaggactaaaggtggctgaataaactggtgctgagtgaccctcaaacaatgtataggaccttttcccaccatttggccccagaacctgttcacttgaagaagaatcattttcaacctgcagattagctgacacgatacttcactgtcaaacagagatataaacaggcattttataatttcaggcatatcaaaagaggtatccaactatttttggataaaatttctacagatactgtgcagtgtcatggggggataaacaaaaacagtcttttttacttacaacttccaccttgttggcccagctttgccatatcccaaacctggggtgcagaaatca

SEQ ID NO: 6435 - DNA, 612 bp, Gossypium hirsutum
gtcgagtcctctacctcaagggacgatgaggcttcctcaatgccagtggttaatggagaaattgagaaacttgagttgcaagattcttttgaaggccggaatctgaattgtttgaaaaattgtttatcttcaactatagaggattctcatttcaatgaggaaaatttagttggtgcggtttctagtaataaaacatcgacagataacatcgaggttgcaaagattagtgttgaacatccttgcaatgctcaaagtctcgaagttttgggccagaatttttctacacttaataataagtgtgaatcttcttgtgattttgaagttacagaaagttctgaagatgacacaaagaggtctgagattcaagggatgccaaaagccaccatttgtaattcctttgaatgtcagcacctgaattctgtggatcctgcattgtctgaaatgggaggaaacggaaaatgcagtttacagcagagagttgacattgatggtgaagttgtggaacgcgttgaagacttaagtggagaatgtatgtcgatgacaccgcctgatgtcaatacgtcctccaagtacaagactgatggtagcagaggcaacacagcggataatgtt

SEQ ID NO: 6436 - DNA, 359 bp, Gossypium hirsutum
caaatttgttttctttggcataattaatgttacaaaagaaaatgtacgtaaaatagtacaaatatattatactaattataaattctgagagagaagtgatatttttggcaactttgtggaggatggggtgggggtgctatgctatggataccacaagacaagaggaagcaatgagaactgagacagttgggccttgcctctcacttggaattgagaaattaaaggccgtaaagcagagcagctagtaataaggcgtctgttatgctgttttgtcaattaacaggatttattattatccaccatattcctcaacgtgtatatatatatatatagagagagagagagagagagagagagag

SEQ ID NO: 6437 - DNA, 551 bp, Gossypium hirsutum
agattattcaataaaataaataatcagccaaattaatatttacatatttttataatcagaatatctttaatttgaaaagtttatacaaaatattagccatcatagacttagtatgagtttacgtaagaaaaataaatttaatggtgtttatattataatattataatatctaattttataattatttttatactaatcataaataaatttaactttcatctaaactcatatttagtggattaatctttatacttgtacaaaggacatagtttagtgactacctgccaaatagagctagttagaagaaaatgaagaaacgtaggtagatcaaatctttatatcctttctacattttgaatttgaatttttttaatttttaataaattttctcgaaattttatattttaaaattcaaagttaattgtggatattaaagaatagaaaatgcgtttatatttagtgagattaaaaacaactatgctgatgtgattgaatattgttgtagagatattagaaataacagtaggatgtgtgtttgtactcaaatgcag

SEQ ID NO: 6438 - DNA, 928 bp, Gossypium hirsutum
  misc_feature (275)..(275): n is a, c, g, or t
  misc_feature (469)..(469): n is a, c, g, or t
  misc_feature (531)..(531): n is a, c, g, or t
  misc_feature (588)..(588): n is a, c, g, or t
  misc_feature (753)..(753): n is a, c, g, or t
tattttatcctctgcttttgttgatggaggcagtttcttttttttcgagatggaaaagctcttattgaaagagagttgaccgatacaaaacaaaggaggattaaagaattattcaataaaataaataatcagccaaattaatatttacatatttttataatcagaatatctttaatttgaaaagtttatacaaaatattagccatcatagacttagtatgagtttacgtaagaaaaataaatttaatggtgtttatattataatattataatatntaattttataattatttttatactaatcacaaataaatttaactttcatctaaactcatatttagtggattaatctttatacttgtacaaaggacatagtttagtgactacctgccaaatagagctagttagaagaaaatgaagaaacgtaggtagatcaaatctttatatcctttctacattttgaatttgantttttttaatttttaataaattttctcgaaattttatattttaaaattcaaagttaattgtngatattaaagaatagaaaatgcgtttatatttagtgagattaaaaacaactatgctnatgtgattgaatattgttgtagagatattagaaataacagtaggatgtgtgtttgtactcaaatgcagttataacagttaagcgataataaaaaatgactactaaaaatattagattagaaattatatataataaaaaaatttaaaattattttacttttatganattattaaaaatatgtgaatttattaaaaaataaattaacaaaattatttaacttattaaaagagtaaaataaaaaaatgaaaatgaattaacatggtgtaaggagtatgtatatataataaatggagcaaagataaaaaaaaaaatgtaagccgaatgaaaacgatatcgcagc

SEQ ID NO: 6439 - DNA, 648 bp, Gossypium hirsutum
cagcaaactgctgccaaatcaaattctcaatagaatctcccttaaaaattgtaaaaaataaaaaatcacaaatccaaagactcttaaccaaactagcaatgtatctgggagaagtcaaatgaatagttttgacttctatcttcaattctgtaatcaatagccggatgaagatactaacacattatgttccttcaagcgcctctggaaattagccaagcgagtttgtaactgtgtgataccggcagccttctgagaaagaatagtggtcaatctcgatatataatcatccagctggttcccaggttgatctgcttcaaccagcaggttcatctcctgcatatatatatatgtcccaaaatcatgaaatagctcaaaactattgcttaatgaattaagataatggaaacccaatgagctaaagaatgtgtaaagaactaagggttacctctttgacaatattcatagtttcctccacttgtttcctatgggcatttacaagatcctcctcttcctgtgtaaaggcaacacatgggcttttaacaatattcatagtttcctatgggcatttacaggctactttttgtctcgtaacaatatcattatcttgtaaaagttacctgtaagagagcattcaaatcatcatctgag

SEQ ID NO: 6440 - DNA, 630 bp, Gossypium hirsutum
catttgggtatggagacaagcgagctcgatacatttgcaaagattgcaagaggatactttattctttcacataatttaagccctgaagctgttgatctaataactaaggtctttttattaccatttcttcttcataacttcctcataggaatcatagaatccctcacatgtttgtattaaaataaaatttcagttacttgaagttgatgaaaagacaagactgggaagccatggctcctcttctgttagaagtcatctgtggtttgatggtgttgactggaaagggatcaaagatcggacttgtcctgttccacaagagttagcttctcgtgtagctcaacatttggaaatacattctgaggattgccctgttgctgttgcttccccacctcaggatatagcagaactcaatgttccggagtggcttgatgattggtagaagaacgacttatatgcatttccatcctttttgccgacagtttccaagtggagttctattccttgtggtgagactgactaccagtgcgtcagaaactaggcagagatatcattgcagtaattcaagtataaagttgccggccttagattgcttataattctgtgattccttttttcagtgccatgaattca

SEQ ID NO: 6441 - DNA, 630 bp, Gossypium hirsutum
ggtttatgaaaggaacaaaaataggattctttccatggtttgactcattgcttttttttattgcgataagtcgcaacaacagcactcactacacccatttcctcacccagctaattcagtgatcacttgaatctctcaactgaaaaaggttcatacttatctcttgaaacttcagctaaaacacaataaaacgaggctagaatagtgagtttaggtaccctggactctaaaacaaagagcaagttcacctatggtgacaaggaaaagagaaatgacttgtaataaaagttcctaacgtgagaacaaaataaaacattaaaataagagtctataacagaacattaaaaaaagggtactcatatctgaattggtcaaactataggatttcacatgcattgaccccttcaagcttcaagaatccaattacattgcaccgcaaaggaaaaaatgagcatgacacagtcaaaaacagaagatccaaaaaagaaatttctaaatctaccccttctggtacaaacataagttaatacaactgagatgaaaaactgaaacagaagaatcaatttaccgttcaaaagaacaaaaagaacatataccatactataaacattgaaacaggccgtgacttat

SEQ ID NO: 6442 - DNA, 536 bp, Gossypium hirsutum
  misc_feature (65)..(69): n is a, c, g, or t
  misc_feature (376)..(376): n is a, c, g, or t
  misc_feature (381)..(381): n is a, c, g, or t
  misc_feature (384)..(384): n is a, c, g, or t
  misc_feature (388)..(389): n is a, c, g, or t
  misc_feature (391)..(391): n is a, c, g, or t
cgcagatacactaaagactgtgatgaacaggctgaaacgggatatttgagtgctatccatttcannnnntgaccaattaagttcgatcacaaaagcatcagatactgcaactgttgccccgtgattccatgtttaaaagaaaagaccagaagaagaagaagaaaggttcaactgaatcatggtgttaaaaagggaaaaagaacagcaatacgatatgttgttggagagtggaggatcatacaggattattgttataaagagttggaaagttagcttgtagtttaaatagttattgaagtatggatgcttaatcagtgtgaacagctgaacgaataccttatattaatactgcatcgtccctttttttggtagaaanaagtntancgcnnanttatttgtgaaactcaaattttaatgcttgccagaatgctattgaccgtaccaactcatatcctccattaagcaacatttatggaatcttgaagcaggtaaagttgtatttgcatttatattgatattggtatttgtaatcatat

SEQ ID NO: 6443 - DNA, 628 bp, Gossypium hirsutum
atataatttttagtagagtaaacttttttctataataacatttaagtttttatatataatctattttttatgttttattttaatcatctgtaacatatttttatttataacaataaccatagttgtaaaatatattatttattaaattaattttctataacaacatattatctaaaattataggtatttcatataagtaagtccattgattttaatttattaaataaaaaataattttagttaaaatattatttaaataaaataattaaattccaaataaaaaaataaatttttattaaatgaaaataattttaaatcagtaaaatttaagatatcaattcaataaattattaaattccttaattaagtattttactatgaatttgaaacatcattaaacgcttataaatcgattacttgaatttaataactcatagtgattaatagaacttgttagatctttaacttcataattaatcatatgaatgaatgtaaaataaaatatccataaatgtgcacttacatgtcttttaattttgttgacttatttatctttttctttcttttttgaacataattcatactttctttattttatgcatattcacgatatggagtttatggtagg

SEQ ID NO: 6444 - DNA, 657 bp, Gossypium hirsutum
catgagcttggtttaggatctcgagcaattgcaatgctgctgctattttggaattctggatttgcttgccagttaatgcctggctgaaagaaattagattcatgaggtttgatgagtacatttctaggaaaggcctgatttctcgctatttcaaattgtcgaacagatgtttctttacactttcctggtgctcgatccagaagccattcttgttgaaaatgtttatcgacacatgaattttggaggccaatacttttaggagcatctgctaatccttgtctctcattgctactttgacaaattgtaacatcttttcccatcagcctcattgttggagtagggctattcaggagcatcttctcagcattttccattgcatgacttatgtctttttcctttcggttccaaaactggtcatattgtccacatccagtgaaagagttgtttatcagatttatgtctgaatccatcaaacagtcagagcagttgcatctcctatcagattctgtacagtagccatattttctatgaccatgtaattctgaagcccctaatctagctgatgaatgcaaagtagcattctctttcatgtgattctgtgcaggaaacaaacttaactgattatttggaagtccactaccaatacaatgcttacct

SEQ ID NO: 6445 - DNA, 619 bp, Gossypium hirsutum
ctgatcctctgttcttcaagcctctgcagttttcgggaagatcttattatcgcagtcggataatggaaccgattgtgataaatcatttcgagactagatcgatttggagaaggggtttcgatttgatcatgggacagattatttttcaactgctcgggacgttattgttattgtgtcagttatattgttctcgctacaataatacagtaccaacaacacttcggcagtcgatatttccttccgaagagattccactaatcggtgacagatgaggaacttccagtggattcagaagaacaattgccaatgaaatataggacctagtgcacgctttgtgttaactatttttgcttaccgtggacttgtttttaatactgtgccgaaaaaaccatgtaaattgatttttttttatagcttaatgagactgatgtaagataaagttagagatgaaaaatgtttttaatacattatagctaaaattccgacttaccctcgttattgttctgaatctacttccattgagaggtagagtgttgtgaggtccggtcgcatcagtgtatatcaattgtaaattttcaatagctctttaagtttattgcttgaatggaagtctctattg

SEQ ID NO: 6446 - DNA, 579 bp, Gossypium hirsutum
agagtgtcattgtcgtttcctttactggcatggtatgggtctctcatttaggaagtgtttggttgaatagaaaagtggagtgtttggttgaatagaaaagtggagggatgaaaagagtggaaaagtggaaagaaaataaattttgagtatgattgatatggaagaaaagaaaataggaaagaagattattttcatcctaatgcataaaaattaatcctttcaaattggaacaatgaaatgagagaaaaatgagagaaatgtccaccttaatttaaatttatgcatttctcaaatgctctatgttcttttatttcatttttcaattttatcaagcaatgagtagaaagaaaatgactttctttcaattctcatttttcttaccaaacacacttatagaaagataaattatattttctatttttctaccatttcactttttcatcttttcaattttttttcaactctatcaagcaaagtcttacctgagcttgattgagtagaaaagtgaaaggctagaaaaaaaaattgagcatgcttagtagaaaagaaattggaagggataccatttccattctaata

SEQ ID NO: 6447 - DNA, 637 bp, Gossypium hirsutum
gaggttgctgatgctagtgacaggtatggtttcttggtttattgttgcagtattttgttcagaatcaaacttgtactaaaccaagaataatatgatttggtcctattagatctgtaataaaaaaggaataatttttctcttctgagtttggaagatggagaaagataaaatattccttgcagtttcatcattgattggaaacttcttgtctagtatggtttctgtggcatattacaatattattttaacccttagttgaatttgcagtttttttgtcagcagatgcaaaaattttggtcttaatatttatcaaatttattactgttgaggcatttttatgcatgttgccgataataaagagtagcaaatcgtgtgaatgttaactagaagtttatgcttgctgcttacataatctgaatgctagcatctttaagatgcaaatgctaagggatagtttctgcattgcattttactcactttttaatacttttatctagcattgcatttactcgcattttagtggttttatctagtttgtaggatcaaagaatagatatttctgttaatgtttaactcattcaaccctttattttaaccttttttttcctctctttttgtttgttttatttcagttcac

SEQ ID NO: 6448 - DNA, 690 bp, Gossypium hirsutum
  misc_feature (643)..(646): n is a, c, g, or t
  misc_feature (681)..(682): n is a, c, g, or t
ctatatatatatatatacatcaagaagaatagagaatgcaagttaaagagaaattgcattttgttgattttacattattttgttgccttgcatactatttatattatgcggcgaaatagaaaagtttgcttaggagtaatgattttataatctttgcctaccaattttgtctccaattcaaaaatttgatctgaccgattcgtattgctttgaccatcattgtcaaaatcggtgcacaattgattgaattatgtaaaaaaatactgttgaatcatgggctcaacaaaatttttacaatatttaaattttacattaaagaatttgaaacaattcgaaatgatccaaacccaatttgactataaaaatcaaacaaattattaatttgaatttaaaataatttaagctcgaaataatccaaacttaaaatgatttaagttagaaaaacatgaaaccaataaaagattaagttggaaattaacttatattgaaataaaaacacaggagttttcatcattgactaattctgaccaagtttaggagcttttaataaacaaaataaagttagtgagcattaagaagggggattaagagatttgaggatagagaaagatggataaaaataaagatatccattgacaacgtnnnnccagagagaaaaagagggatctcctttgaccaccnncaccagag

SEQ ID NO: 6449 - DNA, 649 bp, Gossypium hirsutum
ttaagtatttattgggtaaaacaaaaatcaaacaaaagaattcatcatatattcatttttgtaagtatttaaaaaattagttcatgctcaaaaatagaaaagttcaagatatagtataactgaaaaaaataaaaaaattcatgataactccctaagaaattacttggaatcttcaatcttaacagaaatttacttcaaaaccggcttcaatagtgtttttcttgaatattctctaatggccccctcttatctccttatttttgtcatatatacctattagaatgcccgaaaaacataaaaatcttgatttttcgctgttcaatgcacaatcctatgaatttgacacggtttaccacatgcccatgtgactcacataatcgtgttatctgaccatgtgaaaaggtgtagcccgtgtggctccttcaacttgctccaacgctccaattttctctccttttgttctcaattgttctattaagtattaaaatatgaatttaaaggattaggagtataaaatgtacaattaacatcgaatagtcaccaaaaaacgtgttaagaatgaggttaaaacatgttatttttaacatttatcaagtcttgaaagttaataatgtgtcattggatgagttatcagtgcgagcaactatgg

SEQ ID NO: 6450 - DNA, 583 bp, Gossypium hirsutum
  misc_feature (369)..(369): n is a, c, g, or t
aaatttttcggtaagtgcttttagttatcttgtgttgcctggcccataatgtctttctttcctttgttttctcctgtattttgcgtggtttttctctgttattttgtgaatagaaaaataaaaaagggtactaagaattgaactatacatgcaattgataagataaaaggggctataggtataaatgcaaagatgaaggtgaaaggaaaaaaaaagggggggtgtggaatgatccagacgagagcaatactgctgtttcaacatgtcactaaccatggccatcaggatttcaacatggaagaccatagcattcacatttttgtttcttaaaatctaggtttggttaatcttttcatctttcttcgttcncaatgctaaggcatttctgaaccgtctccaaacagaaatccttcaaggatcttctttggaagctggaaggtgatcgatctgtgtgggaatatccatttgctgttgctggtgtgaacatcacctttatgctcattcagatgcttgatcttgaagcaggtatgattccttaaaagtagagatgtgaatgccaaaattattttctgaaaaatggatc

SEQ ID NO: 6451 - DNA, 669 bp, Gossypium hirsutum
agggtgttctctccagtctaggtccttcaattttatcctgctcgatcgatgtagattgtgaacgtcttggagatccatcttgcatttctgtctctccactttcaaacgaggggcaaggaccatcgttgcaggtgcacaaagggatggcaacagaaggaaatggactacaggtaactggacagaaaatatccgaagaaactgatgcaactcgattctttcggatctctgaagcaggtgatgggcaatctgcatcacagggatgaagcatgcatgatgtacaaaggccaagggatacatgtaacctattttcttttaccggagaaatgggcaatttgacaaaggagagaatgccatgtctacaaagtgggcacggaatagaccccggtggggccacgatattggagggaatgtggcttgttgagcaaagatagagtgcacaccttacgcataactcatgcccacatcctgaaaagataaatgaattgatgagagagcccttgtatttgtaaaaacactagcaccgggtttaactatatggatgtattcaccagctttcctcctaactcactataacattaagttttttgatgctatgccattaaaagtaaattctaattccaacacccctacttggtgccaactggaagaccagagagatcatgctcatga

SEQ ID NO: 6452 - DNA, 621 bp, Gossypium hirsutum
cttagagactcctacaacatgaatgaagtggaaaacacaatcaaaatagttcaaaccaaccaaggctattctaaccttagaaggccaaatccagccaatttcttgttaaggccttaaataccttgtacaattgtggcagatgacaatgaggtattgttgacataaagaatagaaagaaattcagacgacaaaagagaaaagataaggaaacagaggagagaaacaagtaaaaagatattagtggacattggaatgttacctagttagctaaattgcacccatcatcaaaattgaggttttcactgtactgaaatagaatagtatatcaaggaaagatggggaacttattccaattttgggtaaacttaatgagtatatttaggtattatgcccaaagaagtacttaatcaaaaaggtggtacttgattaaatctatcactccaactctccttttatcatatgattatttgagccccttaactattatttacacccaatcaagccttcttagaatgagaaactgccacatgacccacatgaccataaagaaacaattataaagcagatacccgtccttgaataaaaaattaaatagtaaagaaacaatttcctcccaaccag

SEQ ID NO: 6453 - DNA, 574 bp, Gossypium hirsutum
gccgtacatgtttatgttgcttatgcattgatggccttttgtcttgacaaggacccaaaggtgctatttgtttcattttctcaaaaaaaaataagaaacaaagaaaagattatgatagctcgtatgtggggaagtgaaaggaataaaggaaacagtgctacttaagatgattattctaagattgtggaggtttaatgttattacacgacagaaacaattgattactttacaacaaaaaaattgccatgcgaataatttatttaaaaaaaaaaaaactcagccataacttttgctgttaccatcctttatgcaggttgctcacaatgtttttgaagcagggttgaaacaatttatgcacgagcctgtatatattctagagtatgtttgttttttcgttatttttattagcatattagttgttacctcgttggatagttttgtaggaatttgttctctttgatgtttttcttgaaaatgaacactggtagtaaaagcattatatatattagctctccaacttgaaagtaagagttcaaatgtcatgcccagtaaattttgagataagtcaaaagtg

SEQ ID NO: 6454 - DNA, 629 bp, Gossypium hirsutum
caaaaagcttttcaattagcaataagcaagaatattgcagttctccagactataaagcagaataatttaaaaagacaattaagttcccatgcctctcgtgccgatatcactacaatccgctcgtctgaatcatgagaagtatcagaaatcttgattgctgcaccagtgtcattctgcatagcccgcaccacggaaccacctttccctatcaaactaccaaccttgtcagcttggcataacaatttaaataccacttcctcttccaaccctcctctgttatgggctaccgcattctcatgccctggattcggagggtaaccccttgaatgataatctgcaccatgatgaccagattgaaaaccccatggaggaaattggtccggctgagaatgtgcaatattttcttgaagaaaacttgaaatagagaacagtgctttctttacagctgaaaagttccctgttatctgccagaaggccacaatattgcagtcataaagaatataaacaggagaaaaattacaaaaaggttaagcaatgcaaaaattaaaaaatgctaaacgtataactatgaaatttgtatatacaagggaccctcatatcctcaatgaatgagaattttggtttaaagt

SEQ ID NO: 6455 - DNA, 662 bp, Gossypium hirsutum
  misc_feature (657)..(657): n is a, c, g, or t
caaatccaaaacgtggtccttcactcccttgctaacatctttgacccagatgtaattaccaatatctcatccaaatacctaacagcataaagtttcaccggcttatagaaaatattagaattattcaaatcaggctcggttaactcaaatttaaaggtctttttattcattcgaagcctcatttcttgaatttctctatcaaaacccccaaaataaacattaatcaaaatcgaacacaaggcgctttcttgaggaagccctctccctaaatagcaaccaccaaattcaactctaaccacatcacattcaagcaacttctttatcacatcaatcaacatagcatctttaattttctctccaataaaccaacacaacttatcaacattaaactcatcaaacttgctagaacaaaaggaaacattaaaccaccaacttgggtttgttacattgttctttaagtacctaatggcagtgtgtctgcccattccaacacgtccaccataagaaaatgtcacaaacttttcatcataaacaatttccaggaccatcctaatggcttcaatcaagacctttagtttcaaatttggtaaaatcaaaggctcacctgaaggactgggcgggtccattttgacacagcaagaggaaacatcgaacttngtctg

SEQ ID NO: 6456 - DNA, 631 bp, Gossypium hirsutum
ttaggtttgggtatttcttgaaataaaatacagacctcatgctcttatggctaccccaggcctaggccaaggcccaagaccaggacatcccacatgtatcctcgattctcaagtgcctacgtgcacggtagcaaatcaaataagatgaatagtggggtcttaagctaatccttgactaaaccttaaaaattttaatgtcataatacctttcaaattctcctaatcattatcttactacaataattcttactaagaaaaatatctatatcgtcataatttcacctaaaaaataatgagttacctctacagcatgggtggaatcccatgtcagaggactacgtctacatttgaaaggagataataataataataataaagcgagcaaaagcatattatacctacatacattacattacatatatagtgatgatgaatgcacctttgcgtttgttagagaaatctacacccaagatatgctgtcggcgaccttaacaacaagtctttcaaagcaggaaaggacccactccactcccacccccattttcatctcatttctacttcctttttctttatttttttcagtctttcttggactttcgctttattgcttgtatttctcctctctctctcg

SEQ ID NO: 6457 - DNA, 636 bp, Gossypium hirsutum
agacttatcaagaagaaatctgttccacaagtattaaaaaatttgagggatagagttaatcgacggataaagaacgtaaatctaaacaactatgttcctagtacttcatcttaattcatattattgctattagtatttgtgctttaggttctcaactattgtttaacctgtgtaaatttggtatatgaaggaccaatttgcaggcatgaaatcttatatatggttgttgggttttgtgatccaataccaaatttcatttctctatcaaccaataggccaaaccctcaaccaaatcttaagcaaatggcccgctcggtctgacctggacaacataaagatggatatcaaggcgatggaggacgacgaacggctcaaggcaaagcagtctacgaatgctgatgagatgaagatggaggcacttccgggattggaaaaaatagaaaaggacattaagaaattagatgaagagcgagtaaaggtaccgttagtttgtttgtttgatggaatgatttcattgaattgtttcatatcctcctatatattaagatccatgtttcaatgtaacaatcctcaaattttaccttttatcctaacttttaaacttggtttttcaggactcagcaaaaacagctaact

SEQ ID NO: 6458 - DNA, 577 bp, Gossypium hirsutum
gtgtagcttttctattaaaaaagtttgtgattttcttttagtttattataattattatggtgtttgctctttggattaatttttgttttaataaaattatcctcagttttccttttcctttttgagagtggtgtacatagtgaacattccctgtcctgattgaaaatttttttttatatgcttcaaaattaactctataatttcaattatgtttacatcaaattctgataaattttgtgtttttttttctccgtaagaaatgcatttttaggaaagttactaatttttgctttagcagagagttgggtttctcttgggaagtgatcacttggaagttaaccattcaaattatttttttttcttcaattcttttgtactaaacattgtttttgaatgaaggtaaattgatttgttgagaatttgggtttctctaagctttacctttcaccttatatagcttctctagagggtttcttttgatagggtgtgaaaattatgctaactagtaagatagaatgttgtgagagattgcggaatggaagaacgaagtggaattgaagaacaagtgcaaggcaaa

SEQ ID NO: 6459 - DNA, 562 bp, Gossypium hirsutum
gttggatcccaaaaaggcacaaaacatagcaattttgttgagggcactcaatgtgaccgtcgaggaagtttgtgaagcccttttagaaggtaatgaaattgccatttaggaatcatcacttataactttttggtttattgattgcaattgtggttcaagttttgttgattttaagacttaaaaatgtccataacttgcacaaaggtcattaagctggtctgctggatatggaattggtattcatttgtccttatattccttgaacattacttaatgaaagttttctgctgaaattgtcactgaacttagtagtttgttacgactttggacctgtgtttaacaattcacagtagttcaaatttagatgctactttcgaagcatgttcccttttaaggatataaaatttgcatttttaccattgttatggtgcaaaccattgaaaaatcctttgtttgtctttctaccattgaaaaaaggttttgaaaatttgcctccctattcttaactgaagaaccccttttaaatgggtgaatggtttgaaaaaatcccactctgaaaaca

SEQ ID NO: 6460 - DNA, 619 bp, Gossypium hirsutum
  misc_feature (611)..(615): n is a, c, g, or t
tgggactcgatttgagtaggtttcttgagacaaaaatgcaaagctttgtttatcaaaagaattcatgggacttcttatttttagatattttgtgaacttgccatttttcatatttatagtatctaatttccgcaggtgggattgtagttttcagtacggtagtttagttgaggaggtagatgggcatacagctatactttatcacaggcttcagttggactggttcagcatgtaatattttctctccaatttaaattgtttatttttatgctttcattttattgataatttgtcttttgaagcagtggcagcatattgttctgttttggaaccaaacttgttaggagtacacaaaaggacttccttttggcatatttctttgttgtgatactaaccttgattgttgccaatatattttatctattcaatgtattcagaaaatccccaaaatggactggttaagtctagtagtgttggatgcgtataagcatcagaagaaatcggaaaagatgaaacttcactgcatcaatgaaatacaatgaaaagaaagaagaacaaccgagcaagcaagaactgaagtaagaaaaaggattgagtgaagagagacaagnnnnngctg

SEQ ID NO: 6461 - DNA, 661 bp, Gossypium hirsutum
  misc_feature (525)..(569): n is a, c, g, or t
  misc_feature (571)..(587): n is a, c, g, or t
  misc_feature (589)..(591): n is a, c, g, or t
  misc_feature (593)..(602): n is a, c, g, or t
  misc_feature (607)..(610): n is a, c, g, or t
  misc_feature (613)..(615): n is a, c, g, or t
  misc_feature (621)..(626): n is a, c, g, or t
  misc_feature (629)..(632): n is a, c, g, or t
  misc_feature (635)..(639): n is a, c, g, or t
taaaataaaattctataaaaacacatatttattagaggtttttttatttattttaaattaaaacaatatattttaaaaaattgttctcttttttaaaaaaatcaccccaaagaaaaaccctattcccttctgtatatatatatttcttttccacctagacaaatgtgtcaattcaaataatatctataccacctaatctcacaattataataatggatatcagcgtcgttctaaattttaacgcctggctatttgttttagtgttgcccctcaaaatcatcatttatgaatacaagttgcagggttatggcaaatgagattggcacaatggctagtggccatccagaattaattccagcttgcttaaaaagtttcgtaaccatgaattattgatccaccttaagaagagagtaacccgggaatgagaatggtgaaagtaatattaattaaaaaaacttaataagctatttgagtcgagcaataaatatcagataactcacagttctatcaccttgtcttggaagnnnnnnnnnnnnnnnnnnnnnnnnnnnnnnnnnnnnnnnnnnnnnannnnnnnnnnnnnnnnnannncnnnnnnnnnnaaaannnnaannntctaannnnnnatnnnnctnnnnngaaaatacaagacatacatgga

SEQ ID NO: 6462 - DNA, 586 bp, Gossypium hirsutum
cattttaaggagttctttgataagtatcatagttctcggattgtgttgcttctacttgtgctgctggggactagcatggttattggtgatggcatcctaaccccatcaatgtctggtattgtctctatttggatgacttgaactaaatttcctttatttttttacaggaggatgaatctgggagttagatatattttacagagcatttgatgttgttttgcaaataaattgtgtgaaattttatatgaatgttaaatgctgatcaatgcacttttaataaaaagttgcatttgttgctttatctgctaactacagtctactcctttttgatctactcttgcatttactaatgacatgcatttcttatacagttctttctgcagttaatggcatcagaattaaagttccttctcttcatgagagtaagtcaaattattgttttccatctccttatattgtacaattcctttacttttgattcagagtcactcaagttgttcctaattgcacatccacacacactcatatctacaagctaagcctgccagcctttttgcagttactagtggaaattgcaagaaagcta

SEQ ID NO: 6463 - DNA, 679 bp, Gossypium hirsutum
tccaaccagtccacaatcgcgatataaagaaacccctcacattttaagccaaacctaagtgcgaatttgaatcccatcggtttctcatcaaccaaacagaaaatttcagtctacaattcgaattttcgttttctaagttaaaatagaaggggagtgagggattgagactgatagcgataaggagatactgtttttttatttgatttagcgaaggatgtctgcggcagtgtgcgggagcaagagatcgttcttcgaagatatcccgtcaccgccatcggcttcttcctctaagaagctccggcgctgctcgccgtcgtctccttcttctgttcgtttctctccgtcgccatctgctctcaatcacctccaatctatcttccctcacatggacccccaggtatatcgccttttttagttaatgttgtacttgtattcgttaagtatattccttatcgtatttaacaattttgatttcagaaatctgtgaataaggtaaaactgtttcttggtttcttgctttagttgtcatttcttgtttaaactctcatccaattagattttataattgtttcctattgtgttttaaaggaaaagaagtaagtttcgtcttcatttgatagtctaacaattgtaattgtgtggatttagcccatgaagacgagacttacttcttttcctt

SEQ ID NO: 6464 - DNA, 611 bp, Gossypium hirsutum
ctctatgggtggcaggcttgtattcttctatcctgtgttgagagaagatggttctgtagaaacccatttcccggaacatccatgttttaagttagttgccacttccgaacagatgctcagctcacgatacagtcgtgttttactcaccatggtaaagacatctttgtacacggaggaacttgctttggcagctaggataaaacatttggaattcagggagaatcatctcaaatggttagaaaatggtaatcttcactcttcggttttcagtccagcagatgccgagtctggtgattcaaaagtaagtaaagaatcaaaactgaaatatagagggaaatatgtctagtcttgctaatgttttgaattgattaataggtttatgaactcttttagatattatggttactaatctgtcattcgtattttattccgaatgattgatgaaattttcatcgatgaaggtcttttgactgcaactttatatgttgtgagagagaagtaggataagtatttaagaatgaaacatcacacaatttcacgacgccttttttaattttttagcctcttgtaatcttggatttttcttttttggctaacctgttcatttgttg

SEQ ID NO: 6465 - DNA, 630 bp, Gossypium hirsutum
aaatggagagatccctgaagaaacggctcctgcatacatggtacgtttgattatacaccttctgcctactctatatgctttcccctttctatagtttctatagtttgacccttattttggcttttcttttctttctttttaatgtgttatctcttcaaacacgagagtgtatagcttagattcgatgtttatccttttccacgatttaaaattattttggcttttcttttctttctttttaatcttttatctcttcaaacacgagagtgtatagcttagattcgatgtttatccgtttccacgatttaaaatcactgattttatatgtacattgagcatatactgcttcttgcagagagcaattgaagagggtgcagactttatagaaacagatatcctatcatctaaagatggtgtccttatatgttttcatgatgttatcctcgacctgacaactgatgttgctaatcacaaagagtttgcaaatcgtaaaaggacatacaatgttcaagggttcaacatcacaggcttttttactggtatagaagcatacaatttttagtccgctattgtgccataaagataaaaaatcccgtagatgggcactgtattttgtttaacaccttaagt

SEQ ID NO: 6466 - DNA, 684 bp, Gossypium hirsutum
  misc_feature (64)..(64): n is a, c, g, or t
  misc_feature (66)..(68): n is a, c, g, or t
  misc_feature (645)..(646): n is a, c, g, or t
  misc_feature (648)..(681): n is a, c, g, or t
cacttagtagcctagctaagcttctccatagttaacacaatatataaggagaaataggatcccncnnncttagaccccttgaagggagaaattcatctatgaagcacccattccacaaaattttcatggaagaatatgtgacacattacataatgacatgaactaatgtctcaggaatttgtgcatctaaaagtgtatcctcaataaactcccatctcaatctatcataagccttctccatgtcgattttgatttccatccatcttttcttcccatttttttgttgcatttaatgagcatcctcttgagtaataatcacgttatccataatatttttcccccaacaaagatagtttgattagctacaatataatacgacatgataggtttgaggcaattcacaattacctttgttagaaccttgtaaggcactgtacatgagcttatgggtcagaaccaagagattgactctagagaacttactttggggattagcacaatcaacattttattaagaaaagattcaacattacctacttcaaacacccttttaaccatgcacaccagcgactctcctataatattctattggctctgataaaattgggtatgaagttcatctacccctagtactttaaacggtgnnannnnnnnnnnnnnnnnnnnnnnnnnnnnnnnnnnccc

SEQ ID NO: 6467 - DNA, 595 bp, Gossypium hirsutum
ctttcattcttctattacattttttcttgttgctggcctccctttgcgtagtgcattgttatatgcttgtggacttgccattatttctttcatgggttggttgcataaaaagggaaattgtcccatgttctttaccccaaagtctatttacttgtgtacaatttaccttttgaaagagaaggaacaattttaaataatatatgatagagatctattgcacgtaaaaactactgcatgctaagtatgaaatgatctgtattcaagaataatcttgaccatcgttccatgtagagttttctgctcagatctgcaagttttaagtgtatttgaattttatagacaaaagcacacatcttttctgcaatgaagaattccaatccaattttcagttttcatcaattccattttaagtggtagtgacaattccaatgatagttatatttataattacataattttctcccaattcaacagtgtcatggttgtttgatttttcctgctaaaatttatcatattggtctcaaatctcaatgttggattgttacaggacattattctcagattcaaggagagaagaagtggaaagggctcatgg

SEQ ID NO: 6468 - DNA, 637 bp, Gossypium hirsutum
atgtgttgattttatttcctaatattctcttttttcttttcttttgtttggagaataaaaaccatgtctttgatgtttgaacttccacgttattggtaacaacaattaacattcgttactaacttagggtgagtttgaataggcaggacatttacctacaattgtgagataaaaaataagctaaacataccgcatcgtacccatcgtttatccaaacacacccttaatggatctataaagcagatatatctagttgttatgtaattttgatttactattattaatattattagagttagaagcaaatattgtttagtaaaacttaggcatattagttcattcacctaggcataacgaaaatagtatccatatattgttttcacagttcactcactcgttttcctcacggtaatgagggtctaattaattttttagtaaatctagatttattgattgaactgactattcaattaattaaaaataaaaaataaaaaaattaaccgatttaattataaaaacaataacaaataagaaaatggctgctttgtgataagtactgtagccgttgcctcgttgaataccaataagaggagattcatggaatatgccaatgtgcctttgcctatcatccgattat

SEQ ID NO: 6469 - DNA, 768 bp, Gossypium hirsutum
  misc_feature (683)..(685): n is a, c, g, or t
  misc_feature (729)..(730): n is a, c, g, or t
  misc_feature (735)..(741): n is a, c, g, or t
  misc_feature (749)..(763): n is a, c, g, or t
tgaaacttttttccgagtttatcttccagtggcctctatttttcatttggagtaattctttctgttatccctgtcatacttgtaaaataaaatggatgataaaataaaagggtccagggcaagttcctagctttagaactttgggtgaaagaagaggagcctggtctcttgcttaagttttagcattgtggctttattgtgatgcattttagacttgatttcttccttaaatttctcccaacattgtgccccgatcccaaataatgtaccggccatcatcatatatctgtgcattggtctaacttgattctgctgccttttcttctttttgcccatccgctttcttttctgtgtccatctactgccagcttcacagttattcacacaaaatagcttatcgtgctacctttatccttgaaatgaattttgattggttgtatgatgatgacgaagaataattttatttgccagatggctcaagtttctacctactttcacttttggaattaattctaaaacagaatgaagagtattagcagtgtagatgctgtgggttaaaatggaaaatgaaaagaagaaagtatagctttatgattgtgatatttttactttcccctcaaccccaaaaagggaaaaagaataaaacgaaagaatatgtcctgaatgtctgcccctcaaccccnnnaagggaaaaagaataaaacgaaagaatatgtcctgaatgtctgnntcccnnnnnnncttttctnnnnnnnnnnnnnnnttttt

SEQ ID NO: 6470 - DNA, 637 bp, Gossypium hirsutum
gcacacaatctacaccggtgtttccatatgttaaggtaatataggtcgttacattgttcgggtagtcggctatggatacggcaatttatgttctaaagagatgtaaaccaaaacttgacatggaatgttatttttgcagagtttatttccatttcaatcatacaatggggataagaatctcaagcaattaggtgaactccctggagttgaattccctgatctttgtacacttgatggctatttgaagcgttggggaactcatgaagtcactcaaagcaaaacgctttatacctggattaatgaagaaggggcagcagtaggccaaaggacttatgccgaacttcatgctaatgcttctttcatcgctcaaaagatcttaacaagcaaaaagccagtcatcagacctggtgatagggttctcttggtctatgttccaggtctggactttgttgatgcattttttggatgtttaagagcaaaggtgttgccggttccagttcttcctccagatcctctgcaaagaggcggacaagcacttctgaagattgaaaatatatctaaatcatgtggtgcagtggcgatactatcaactattgtctatcactcagctgttcgtgcaggtttggtgaagcaaatg

SEQ ID NO: 6471 - DNA, 654 bp, Gossypium hirsutum
ttcttcattttatattataatatttaatccttttctttaatttttcaattaatattaaataatttgatttaaatttaagtttgaatatcaaaattttaaaggtaaaaattaatggaatttggagttaaatttaaagttggattaatagagtgaatttaggtgaatagtatacttatctgtataaaaataaaaataataataaaattaaatattataacgatactataatatataatataagataaaaattaaacaaaacaaaacataccatatctaatctcttattaaactcgccttaaatattatatttaaattagtaaactacatctgacaacgaatcaaaagaaaagcgaacatgcttttggtgttgtaaaggttagtgcatttttcagtaaatgatttctaaatttgtaatgaatggctaccagaaaactttttcttttctacaaataatgtaaacagctttttcttaattattggataaagttaattaacacaaacgtggcatttactttggcagcttccctgaaataatgtgtccgcagctacatttttctctttctttttttagtatttatttttatcagattttatttatattaaatgcttatttaagtataaatatgaaattaaatatttacttttggcagttca

SEQ ID NO: 6472 - DNA, 841 bp, Gossypium hirsutum
  misc_feature (268)..(268): n is a, c, g, or t
  misc_feature (304)..(304): n is a, c, g, or t
  misc_feature (482)..(482): n is a, c, g, or t
  misc_feature (627)..(627): n is a, c, g, or t
  misc_feature (809)..(809): n is a, c, g, or t
acatctgtttgtcatggctacacatactacatgacatggagactcattcttccaattttaatattataatatttaatccttttctttaatttttcaattaatattaaataatttgatttaaatttaagtttgaatatcaaaattttaaaggtaaaaattaatggaatttggagttaaatttaaagttggattaatagagtgaatttaggtgaatagtatacttatctgtataaaaataaaaataataataaaattaaatattataacnatactataatatataatataagataaaaattaaacnaaacaaaacataccatatctaatctcttattaaactcgccttaaatattatatttaaattagtaaactacatctgacaacgaatcaaaagaaaagcgaacatgcttttggtgttgtaaaggttagtgcatttttcagtaaatgatttctaaatttgtaatgaatggctaccagaaaantttttcttttctacaaataatgtaaacagctttttcttaattattggataaagttaattaacacaaacgtggcatttactttggcagcttccctgaaataatgtgtccgcagctacatttttctctttctttttttagtatttanttttatcagattttatttatattaaatgcttatttaagtataaatatgaaattaaatatttacttttggcagttcattggaggccttccagaaagagtggggtaagttgaacataaatggcatattatcggaaaacaataatttattgtgattagagaagtatttagagatcacgatgtcanattggatgtacggttttactacgaagattgag

SEQ ID NO: 6473 - DNA, 640 bp, Gossypium hirsutum
tctttctttttagctactctgtcaggtaatattcttatttcatacttcagtgcttaggtattttacatattttgaattatcagattactaggccatgaaacctggacctctatggccatatcttgtgcttacttgctatgctagccagatttaaaacgttgtgaaatactttcagagtggccaaattcctcgcatctatgcatgcatttcctgaagatgttttttcacttttaattaatataaagtatataagaaaacattttccaacatcaataccaggaaaaggatttagtaatatttgttctgtactccctgctgctgcttctttctttcttttttcaattgaattgagtccagatcacctgtcaaaactgttccatctacaatgttgtaagaagttgcagagaccagaaactctcatcggattttagtatttcatctccaaaattgggactgaatgtaaactttagttaaaagtaatttaataattcaatgaggaggttaaagaatagcttgtataataagctaaacttgttatcattttaatcaagtatatgaaatggactttttttctttcaaatttttggtgttacaagtttgctacttcatagcaaaactgtttttatatgggtcagagtta

SEQ ID NO: 6474 - DNA, 651 bp, Gossypium hirsutum
tctgttataatgatgtatttgctacaataatcgtagtttcacttctaagtactttgcagccctaggtagaacttcttctcatgattatattttgctgccataattgatttatttttataacttctattatgttcttaacaaacattgctaatcagccaggagatgtgaagtttcattctttttagtgcttaccgcttagaatgaaaattatctattaatgatttagtttcatttgaataatctgtatcatgcagagtaaacaaagggatgagtattgaagattttaaatttatatactggatggaatatgcccatcgaatgtgggggagagccctaggcatgatgtttgcattgccgttctcgtattttcttcgtaagggatatattaccatgcgccttggactaagactctctgctctatttgctcttggtgctggtcagggtttaattggttggtggatggttaaaagtggattagaggtgagaagtaatttgttttaattttatttcaccgtccttagtaaatatgagtttaaatttgtagaataatattgtttcttcctacaggaaccagcttcggaatatgttgagccccgagtgagcccttatagacttgctgctcatcttacttctgcattcgttatttacagt

SEQ ID NO: 6475 - DNA, 629 bp, Gossypium hirsutum
gtattctcaagtgaagcacttttcggaataaaaaaaggcccatctctggtccctgtgttgaactcaattcgaaaacctgagacaagtttcaatgagaaaaccactcaaaaacagaaaattggaaaaccaacaaaaaatagtgaccaattttaatgagagaaaccctcacaaacaccaaactggaaactattgacaaatatagaagtcaggaacaaaaactaaaatcaaaatcagctaaaacataaaaagccagtccaagtggaccaatttaagtttaactgtaaaaggttattagtttcgtaagacactcaaaagtctgccttttaacttacaaaaattaggaggaaatcactcctggccaagtagtagtgtgtggaggtacagtttcagctttctcggttttcttaagctgatatctgaagtaccgaacatgaactctagcatgatatagcaaaaatttagaaaattattaggccaccttgagaggctgttttggctactcttccacttcaagtgcatattctagtggtttttttaacaggcaaataaccagaaacagatggatgactctgacttttaactattttcatcaatatattattaaaatattctattttatccaatgttgt

SEQ ID NO: 6476 - DNA, 523 bp, Gossypium hirsutum
ttctacacagaagtttctgcaaaaaagaaatgcattccccaaaaaggtggtcatataccccttttaactgttttttgttttcttcaaaaagcaaaaaaaaaaaaaaaaaaacactaatagcaactatttttggctattaaaatcaacaaaacctcataaaacttgccaaggttaatttcagcgttacattttgaaagttgaagtacttcataaatatgtttctccctaaacatacaaagaaaatgaatcaattaaagcttttcagaattttgacaaatttcaaataggtgcaagtcgaggaatcaaaaaagcagcaataaaaaaaaccaatggaaaattattttaaccaactcttttctagctacttcatgaaatgatatcaccaattaaagacccatttattcagaactaccaaaagttaaaagcctttttaggaaaaatgaaatcagccgttagcgggaaaaccatgtagatgaggcaaagaataaaaatacttccttgtctgtaaaagtaatgtaaaact

SEQ ID NO: 6477 - DNA, 645 bp, Gossypium hirsutum
actctctagtccttccagtgacatctcgcccaacccatacccagcagtattaattttaagccaactctctagtccttccagagatatctcacccaacccatactcatcgaaaccacctccaggctgctgcgactagcaccttgaaaaacaaactgatttcagcaaggccataaccaccaagaagagagggaaaaaataatgagccactcaccatcaggcaatgctatggcatccatattctgcaagttccctcgaagccatgggaatgcaaacgagccagaacaatagaggaccagaccccttgtgcaaacaagcaattacgaacgacatgaatcgaagtttccatggaagccccacaacatttgcagcagccagacaaagccattcccaggcgaaccctttgaccatagaaatgcccgacccgttgaggaatatggcagtgccaaaccaaatgccaatcaactggatttgctgagccctccaactgtggaaaatgagcatatgttttggcaaccgaaacttgctggcacaaaactaatgccaagcaatgcgatcatcgccagctgccttggacggcggcaaaacagacgtgatcaaatgcaaagccgacactggtaaaaccaaagttaaagctcccattccagt

SEQ ID NO: 6478 - DNA, 614 bp, Gossypium hirsutum
  misc_feature (555)..(555): n is a, c, g, or t
  misc_feature (559)..(560): n is a, c, g, or t
ttcacatctgggtttaattttataagacttggtttagcttcactttggaaaaatctttttcttcggggtttggggctaaagtattaaataaaatcccggtcaacgagttcggaaatgagcaaaaacagccacctgtctctgccctttaaaacgcttaacgggtaaagcaaccatccattgaaattaattatttccgggtttaaatcccttaccaaaatacctggatcctaaaaaggattggaccttaataaccaacaccccataagaagagaagacgcaaaaaaagaaaaaaactccgtatctcttagagatttctccacgtgtaaaaacgtgaaccacatacataaaaaaaaaaacgtggaataacacggtgatctaaaatcaaatcatacctcctaaaaaataatatgtgtgtaattataaaaacacaaaagaagaaaaacaaaaaaccaaaaaaaaaggctttatggccaaaaccccccccctttttttgaaaaattgcaaaaatcaaaaaacaaaaaaccctttccggggccaagtttttcaagggttttngagnnaagggggaatacttcaccaaaagctaaaaaggaggccgggaaaaacctactttc

SEQ ID NO: 6479 - DNA, 623 bp, Gossypium hirsutum
aacgcctttcatggttttggttctaacagcctgacagacccgatgaaaaggaaagagtggaagcagctggaggaagggtcataaacattaatggcaatcgtatcttaggagttcttgccacttcaagatctataggtattgcctaaaactccatacttgatcccttcttatataggaaaaaatcatttgatgatgaaatggtgtttaatctgattcaggagatcgatatttgaaaccgtatgtaatctccaaaccagaggtgtctgtgattgaacgaacaaaatccgacacctttgttatattagccagtgatggtttatgggatgtagtttccaatgaacttgcatgcgaagttgtgaaaagatatttagatggacatataaagataacattttcagaccacaacgactgctgtagtggaaatcgtgcggcagaggcggcagccatgctagctgagttagcagtagctcgagggagcaccgacaatatcagtgtcatcgtagttgagttgaaagcttgaaatcactcttctatattccctctttttttatatgtttcactttgttttcaagttgtaatattaatatcacagaggggtaacgggttaacatacaacgtttgtt

SEQ ID NO: 6480 - DNA, 629 bp, Gossypium hirsutum
ttctgtttatggggacagctatgatgaggaaagtgacatgggtaaagaaaaaatgagcgaggcctctagaaaacgtaaagctattgcagaaaatgcagctaaggattatgattggggtaaccttgcagacaaggggcaggtgagaggtttatttaattgttttctttgattcaacaatgctttaaatttctcttagtcatcgaaatggattcttttgaactaaatttgagggtaattgtacaaaccaggatttgaggcaaaaacacttgaggcttaatttatttgagtgaatgctattttagaagaaaatgctgtttcacttaaagaaaaagtgtttataaacttcttggtaggggtgaagtcggtttggttccgatcaggtttcttttattttttgaataactctcgtttagtaaaaatatactagtgttttgttttccgattctattttcccctgattttggaatgtaacattggcatgaaacctagtatatgtagcaagattgctgttaattggggtactgaaattgtcacacttgacaaatccaaggaagtttatcttgcctatttattcctcttttgcagttgaagaatttaacagtaggagatttgaaagtctacttaaatgc

SEQ ID NO: 6481 - DNA, 590 bp, Gossypium hirsutum
ctcgcggttgttgaactgcacaagggactccaaatcaagacgtctcacatctgtctcacccaggaacttgatgcttccgtaaccgtgccgtccaaccacaaaatccttgacatgccgacagtaccctggttcagccctttcctttgcagccagttcttggattcgaggttctgtatagtaatcagaccgcctaagctttggcattaaagcctcaatgtctgccccgtgctcgtagacaatagcagcctcacctgctctgtggccattgagtgtcatgcatgactctttctgagcagaatgatcgtcatggactccattagctttctggttacctttgactgggtgaattcgctccttcacatggccattttcggctggattttctacacaatcatattaatcaaaagacattaaacagcagcaaaagcaatttataatgaccctaaatttatctgaaagttataatcagataagcacactcataatctttatcacaaaagaattaacatgccaacatgcagaatatatatatatatatagacaacacgctaccatgatgaatatcacaagacaacaggcagaacaaatat

SEQ ID NO: 6482 - DNA, 634 bp, Gossypium hirsutum
tgatggggttggactacatgcaacatattaccaagtgaagggctgatttgaaacttaggctaaagttagggggtgtatgtttttattagttacaataatattaccataaaacaataatactcgacatgattacaatctaaagtcctcgtcaccataacagtcaaagcgtctacttcatatccattcaagacacgtagtcatgtgcatcatcagcgacaacgttatcggttctctgagatgcaccttggtctgtccctattgttctcttactcatgttagctcgttgcactagtcgaaccaatgcttgaaccacttccgacataggaggccggaattcgggctccggctgttccagagagacaattaaaaggaccagttaaatgctacagtactgaagatgaaacaagcagctcacaagttgtcttggcatttttcaaccaaaacattacctggacgcaaagtgcaataacgtcggcaaaccgagagagagacttaaccgggtaaagcccttcaagtgcagggtcaaccatcttagataaagcatcaatatcatgcagctgaggtgttgcccatcgaaccaaagactgctctagtcttggccttgtgctgttcaaaacactcgcctacttagaat

SEQ ID NO: 6483 - DNA, 646 bp, Gossypium hirsutum
gcctacaaaagttgtgttagatgccaaaaatgaaatcatatcgctaatcagcctcgtcataacaaaccactacgtttgtataaaggatattccataccatcccatgcatgtcctgctgagaaacagaacaaccatctagcgcattggctcttgagcttgtctgtttcgcaaaatcaaagatgaggattaatattttttatactaatgttgcaatcaattgcttatattcagtcaaaatatgtaagatgggcaacaaaccatttgctggcagctgtcttgtcccatagatactccttccgaatcaaaatgaacctacaatagaaaaatagtctatttctaaaggcctatacaatattgccaaaaatatagttgaagaatctgcatttcaaacactgagcctaaacaaacctttctctttttacatgctttcttcttcttagacaatttggttgttgcattccaattattctccgcatcagtctcaagaagaccatgaacagatgacgtgcttggctcacaaacactttttccagtgttgttcacactgacacaattttttaaggctttttctaatgcctgtagtgcaatagtatatgcttcttgagataaagaaccttcttcacccaatttgatggctcgcttgcat

SEQ ID NO: 6484 - DNA, 609 bp, Gossypium hirsutum
aaaacttacttcacatattacacttaattaaaacataatgtatctattaagatcgccgtttacgatcatcttcttcttcttcatcagaatcaccgctctctcggaaacgtggattcttctcctgtttgagtcaaaattacggtttcaaaatatgcaacaaaaaggatggattgcagaaattatcataaaaagtgaagcattaccggtctagcgtcatggtcagaggctctcctggattcatgatccgagtttctctttgaggactcacgtgcatagtggtcatcatctcggtgtcgcttccgatggtaatctgcttcaccaacaatcaatcaagtctatgaatggctcaagcgtatatcaatgtaacaagaataattagtgcaactcacaggtaatacctctcccatgacgataagaaccaccatgaccacggccccctccatgcctaccatctgaaattacaacatgtcagtttaaatcctttctctgagcatattaacacccaaaacaacatgagatgcacattatggacaaagaagcccatgaacacataagaagttaaaagccatccaggagatttgcttcggaacaaaggattaaactatgcag

SEQ ID NO: 6485 - DNA, 684 bp, Gossypium hirsutum
  misc_feature (104)..(106): n is a, c, g, or t
cttttggtctggataaagctttggataaaataaaaacgttgaaaaaaaatttgaagttgaaaccaaactgaaactgagaggaaagtgagactagctcaagaacnnnggcttgcaacctagacaagttgctgtctggttccaaaaccgccgtgccaggtggaagaccaagcaattggaaagggattatggcctgcttaaaaccagttatgaaactcttaagctcaactttgataccctccaacatggcaatgaagctcttctgaaagaggtaatattataactgcttggttaacgtgccaatcacttcactttctttagctttttattctaaaaatagcctaatgattgctgccagataagagagctgaaagcgaagctgaacggagaaagcgtagggagcaacctttcagtgaaagaggaggcgattatgcctaaagcaatggaacaaagtgaaccagtttcagcttcttctttgtcctcttcatccgaggcagtagaattgaagtacgagtggttcaacagcagcagcaatagagtggccgtcgccatccttttcccagaagagaaagatgggtcatcagatagtgactcaattgctatgaagaatgaagacgaccacaccaacaccaacaatggtgttgtttcgtcatctgggtcctacaaagccaactcttatgccccacc

SEQ ID NO: 6486 - DNA, 611 bp, Gossypium hirsutum
ctccagttaagttcttgtttgcagctacggatcttacaatatttcttgaattatggtgtgttgtgatctgagttcaacaatcaagattaaattatttagggacctggccaacttgtagtgttaccagaagtggagatatgaagggtcaggaatttagttcagttcaccatttgagagttgaaaacctcagtcttgcagtcagggaggatactaatggagcgaggtggaagttgataatcctgacccctgaaacggagagcttgtggtttcttggtgttgttgtttgtcaagaaagctgaacagagtgaagttccaggttgctcccacacacgagcctgcattgcacaatagcttaactcattttaaccatatccaattatctgatccaaccacctccatcccttacctcttgatctggacccaacttttgaacaaaaggagatccggaaaataaagccctcttgcacaaatttacagccctgtgagcgtccttgaggtgaccccattttggttgccttattaaacctacaatattcacatgtaaaaattagctgtacagagaagacttcatccatggatcatcagtaagaatattcttcaatcctaccaaa

SEQ ID NO: 6487 - DNA, 613 bp, Gossypium hirsutum
gcggccctcgattcttcttcctgcaaacactttccgccatcatcattcagtgcgtgtctatatcatgcaccaggtgttcctgacacatggtttgctgagatcaacgaacatgacgttctgtgtactgatgctaacgctggtatatgtggtaattccctaaaaatgaatctttcagagaaactatgactataacagctagaatcttaatttactttggaaactttaggttcagcagctcgaatttttcaatttaatgttttcgaagtcaagattcaatctattccggttttaggttctccaaatatttacaattttagaaatttacggcatataccaccgttagcagcagtacacagcgcgatgttcgtcgatattagcaaaccattggtcgggaacacttaccgcctcatcaaagttgagaacgagccgcagaacagtgcaggatcagacagatgacaaacttggatacacaccggataattctggaggaaggtgcttccacggagaagaatcagggtgccaagcattgagagtaaaaagtttttcggtcaggaccccaacccacagcaaacatcaccgcggatgggatggtggacgatatgagcgtgtaaca

SEQ ID NO: 6488 - DNA, 652 bp, Gossypium hirsutum
  misc_feature (644)..(644): n is a, c, g, or t
aagaaccaatgggcacgtgacgaccctgcttttgttgtagtctgcagccttcttttggcagttgcaacagtagcttattgtgctgcgtaagtttcttttacaattttaaacatggctgcatttaacaaaaatagattgctaaccagtggtactttaaaattgctccctgcttttaccttgatggggcttctggatttgtaattagccttggataaatctttttaacaccgaattggcatgcatatggtgcttatatggtatatttgttttaaagttttcttagatttcactactaagcatcgtgagagttctaagttcttctgagtaattatctgtctggctcaaatattgtactatatatcggaattctttcactttatctgtttccattgcaccatcaaatattttatagacctcgtcttgtaatgttttgctgtcttctctatacaggtatgatcacagtgctgcacatgctgtttctgtagttatttcagtattggttttccattttttacttactggaatactcctggaaacatgttgttggaaagagccaatagctctttgtttttggagctggagctattatatcttagaaaaaaatgtatgctacacttttttatctctaaatcggcttaagttcnacacatct

SEQ ID NO: 6489 - DNA, 589 bp, Gossypium hirsutum
  misc_feature (558)..(559): n is a, c, g, or t
  misc_feature (562)..(562): n is a, c, g, or t
ctaactcggtgtctcaagtttgcggatctgtaccatgttagaacacgtcagttcaattataaaagctgaagaaggataaattcacggcaagcgaaaattctctctaaactacttacggcatatttcatgtcatcataattggtataatcaacaataccaaaagttcctgaatgaacagagagagataacaaatgaaaactcattcaaaatcatgaaggcctaagaacttggtcaattcgttgaaaaatcatgaagacataagaactatttcaaccaattcaaaacatgaagagaactcataaatcagaatcagatgctccctacaggcataaaaaggggaagtggcaggaacaattgatcttttaattctaagcatcagccagattgaacatcaaaaacatccatataagtgtgccctcataaggagataagaatatgacattgcaacattctagagcaaattgagattgaaaaagaaacaattagatgtgtgaatatcagattaaaaaagaaaaacaaaaagaagaaactgagggagcagaggggactatgggctgnnatnggtcagtaatgtgtatcctttgtgcgt

SEQ ID NO: 6490 - DNA, 575 bp, Gossypium hirsutum
agagtcttctattctttttttgtaagttgaatattgtgtgaaatttaagaataaataaagaaagtaggtgattttttatttttataaaagaatgatggtattgtttttataaaattcgttggttctctaaaaaatttttgacctcttcacaggaatagtttttgaggctataaaaatggtacgtgccaaagacgatgtctaatatgattttattcccatttgattatgatattattaaaaaatgaatcactgaaatccatggccagtagtttcttcttttctttttcaagcatggccagtagtttggatccttgaactactccacaagtttagtaaataaatcacatataaacatcaatcttagtaaaagttggtttatggttcatcattttttttatatatatataaacagtcaaataacgagatatacatatttttataattatgatttgtttttagattttgaatttttattcaaaactaggcttgctttgaaaatgcatttccattcccatttgcatgtgcaaatgcaattaggtgcggacatccccccttttttctcaccctctcccact

SEQ ID NO: 6491 - DNA, 622 bp, Gossypium hirsutum
ttttctttttgcatctacatggtctcgaattagtgtctttgatacaaagttgaatccgaagcttaactcggttatagtcactcttacgagttggcatccagtaagtccagggctcgaattttcgcatttgcagtagtgtaatgagttccattttccaactttgtttttctttctttctctaaatggaagtgtgaaatgagtttcatttgcatccttattattgtccttgttctttttgcatctaaacggttcgtggaatttagttcaattgattcatataatcacctaagaagtgatgttcgagaagttcgggtttgaatctaatataaatcaaatagatgtatcttttaacgagagatccttaggatgaatctttcaatgaaatacttttcatatggatgtatcgatataaattattaagtcttatattggtgtaagtggattttttccataatatttattcgatataaaaataaattcaaagtttcattgtgtataaatagttgcatattggataaataagtatagttaaaagagtaaattagtttttctattaaaaaatttatcaatttttattattaaaaaattgatacctgtacatcagcacaaggtatacttggga

SEQ ID NO: 6492 - DNA, 630 bp, Gossypium hirsutum
  misc_feature (34)..(35): n is a, c, g, or t
gacctgtattgtgccatctaaagtctaaaccacnntgagttatccacttttattttgtttctattgaaagcaactacgatcatttatgtaaaactttatccaatagccaatcttttattgtattccagtgcactcatcaaattccaaaaacttcgtacccatcaggcatcaagcaaaattgttttaaatatccaactgagcttctccattccattcaacctgatagctttaaaacaccctcataattttctcatctcttatgactaaacaatcctatcctatatataaaaatgaaacacttaggaaagttgttaccaagaatacctttactccatctttaatttttttctcctcaaattgcttcatgaattctacatgacctaaaacaccaacattctaatgtatcattcatctgacgcaagttcatgtactctaatcatttgtccaaattagcttgtatctggattcacaagctctatacatgccattatatcaagaaacaaagaatctcaagtcctagtggctggatatgcaattcaatttcttactagttatttggggcacatttcttcagttataatttcctttcagtcactagtctatgcacatttaatgctcctatactgcatg

SEQ ID NO: 6493 - DNA, 595 bp, Gossypium hirsutum
cgtggatgataaaagttatagaatcaaataaaaaaccaaaacaaatgcatcgaaaaagacacctatcaacacgaaacaaatacatggatgtcaacaagtttggtgaatgtacccaagaggtccctctattatagggatcagatcaaatttgtccctttattattaaatggatcaatttagtccctgtactattataaagaacccaatgaggccaaattggaatagagaacatttaccgtttagaaaacatcatttactgtttaacagaaataatatttttaaagtttttatcattctgtaaatgaaatcttttggtcagaattgaactgcaaatgaaaagaataattttcaagacatttttcacacggtaaatgttaactctattacaatttggacttatttgatgctttttaatattataggaattaaattgatccatttaataataagactaattacatctagtccctataatacagggacctcccaggtgttttaacccaagaaattactaatcagcatcttattcgaagactaattatctctgatgcatcaaaaactaaaaagttgcggaggatacctattgacatagagg

SEQ ID NO: 6494 - DNA, 559 bp, Gossypium hirsutum
  misc_feature (384)..(385): n is a, c, g, or t
  misc_feature (411)..(412): n is a, c, g, or t
  misc_feature (432)..(437): n is a, c, g, or t
  misc_feature (452)..(453): n is a, c, g, or t
  misc_feature (458)..(459): n is a, c, g, or t
  misc_feature (468)..(469): n is a, c, g, or t
  misc_feature (471)..(472): n is a, c, g, or t
  misc_feature (489)..(489): n is a, c, g, or t
  misc_feature (494)..(499): n is a, c, g, or t
  misc_feature (501)..(504): n is a, c, g, or t
  misc_feature (510)..(512): n is a, c, g, or t
  misc_feature (515)..(516): n is a, c, g, or t
  misc_feature (527)..(528): n is a, c, g, or t
  misc_feature (530)..(535): n is a, c, g, or t
  misc_feature (538)..(543): n is a, c, g, or t
  misc_feature (550)..(553): n is a, c, g, or t
cgttatacttgatcacttcctttttcccataaagagataagctctcgtctttgcaccatcagaagccaagagctacctaataccattggattctaatgccgttgctttctctatcgttttttccttgcttgtaaatgaattatatataggaaaattagctttttactaatataaatttcattgtaatcttgtttctagcttcggcgataaactgcccatatgtcaaattactaaaaagtttaccattgggtccctcaacggggttaggtgtaaccacccatttcaggttactctcttactaccgcatcttgcggtttttcatcgtataaaaaaaaaaaaaaaaaaaaaaagtctatttctctctttgttatcagcgggatattnnatgaaaaaaaacttggttccttttgnnccaaaaaaaaaggtttggannnnnnctttcccccaacaannggacnnaggggaacnntnntttttaccgggcaaaanaatcnnnnnntnnnnattttnnnttnntttagccaaanncnnnnnnttnnnnnnttctttnnnnaaaaat

SEQ ID NO: 6495 - DNA, 618 bp, Gossypium hirsutum
  misc_feature (553)..(553): n is a, c, g, or t
  misc_feature (588)..(589): n is a, c, g, or t
  misc_feature (591)..(591): n is a, c, g, or t
aaatcctactatttggctaatagggcatgccatcaaattgaggtaatgtacttcaatcaaactctttcttctattccttttgataggagctgaaatgatattgaaaataacctaaaattaattaattatatatatatatattcacaattgtgttttatttgacacttatgaaattaataaataaatcaagttttattagaattatatttaaagatttttaaaactacttttattcaaaataataattttattaataaaaataaataatatacatcaattttttattatataattataaaatctaaagtttttaaataaaatataaaaaggataactatttagtacactaattaccgaaagtttcaattttacaattcttcaattgtatttaaaaaattaataaataaatatataaaacacataaaaatctcaataccactactacttgaccgatattaaaatgacaaaaaaaatattatattaaataataagtaaaattatattttataaaaattatagataatagagaggggtacaaaaatcattttactcnaaaaaggagttcacgttgattcatcgatcggaacnncnttagcttcggtaaatataaagagaagt

SEQ ID NO: 6496 - DNA, 725 bp, Gossypium hirsutum
  misc_feature (659)..(663): n is a, c, g, or t
  misc_feature (667)..(671): n is a, c, g, or t
  misc_feature (673)..(677): n is a, c, g, or t
  misc_feature (712)..(719): n is a, c, g, or t
tctgtatagagctccggaggttaacattaggagtaagctctagactttgaaggtcttgtcggcaagtgggacaatcatagtttccacgcttgaaatattcctgaatagccttcctctcaaagctgtggccgcagataattgcaaccgggtctaccatcatctcatcgcacaaggggcatatgaaggaaccgatagggtattggttgtggtacgttgaggtatcctcattcagtggccttgaaaccatttcggtactgtacaataagtgtatcaattgagaaagctcaagtgcctccgccagcttcttttgaacttccatctcatgtttttcctgcttcaaaagtgccaattcatttttcatcaaagatgcatcggcattggcaccgactgcttccgcgattttctccaggagcttcacagcactctttctgtttctactgctccgggatattgaattctttatttctgaagcaattgtttgtgttgatgctgacatgcggaactccattgaactcaggtgctcgatgatacgggtattcatactcttcaagttcactgccatatcaagattaatcaactcaaatgaggaaacgattgcagctatatctttggctaaatattgcatctgcgagagcaccgaatgcgagtgaagtatgacnnnnnaatnnnnntnnnnncgtttcctcatttgagttgattaatcttgatatgnnnnnnnncttgaa

SEQ ID NO: 6497 - DNA, 400 bp, Gossypium hirsutum
acatggcaataccataggagagttgttggttaattattatatatgcatttttattaattccgttaaaatattacctaattcattctttttatatacgaaacaaagatattgctatcaacagaaatatgacaaaatcttggttgtccatacatttaatctctttttgtctgtatattatgctattcatacgtcattttctgtttgaaattaggcctcggggttgaaactcattcttttggtcattcgattttcccctttttcactcgcatttactgtcaagccagaagaatcctccattcaatcgcccacatgatcaacatattccccattttcaatgacttaacatcaccaccaatatattcaaaaaaaaaaaaccccccccccccttcctgggggtaaa

SEQ ID NO: 6498 - DNA, 632 bp, Gossypium hirsutum
  misc_feature (626)..(627): n is a, c, g, or t
atcatgcaagttgtccagtatccggggcacattagcaggtgactggccccctgaaaagcttgtacatgttgtagaaaaactccaatgtcgtgctcatggtcaagacggagtagcaatccgtgtctcaggatccttcattattggaaatcagtttctaatttgtggggatggtttacaagtagagggcatgcctaactttaaagatctttctatcgatatccctagtaagcgaatgggtacatttcaggaacaatttataatggaaccaggaaatgtcattggtcgctactttatagctaaacaagagctttacattattcaatagacgaactacgagcatgctctccgcttgaggttagtagttcttgacttgttcacaaagtttacattaacattcggtttcatcttgctaccggattgattattgcagtcatggaatgagaaatttcctcatttttgagctaaattacttttttcttattacagtttctacaactttttcaacttcttccattgactgttgatctcatgtagtgcatgttggtatcacgtatattggtgtaaaccacatgttctgcttttgaaacatataagtattgccattgttatcgatgttatttgctggnnttacc

SEQ ID NO: 6499 - DNA, 656 bp, Gossypium hirsutum
tctatttataatgattataaaaagaaaaaaaatactcaaccttaaagaattggacataatttttttttaaaatttatttgtttaattatttattttttgtgacttgtttagttggctttgctacgaaaaattaatttatcaaatattttatttattaaataatataatttttgagtcccaatactaaattttctttcttgaactttgttatacatagtcaattttacatttgtaagtcatttatttattaataaaagaaaacgatgatatacatgtattaacattgaaattaatttatcaaataatttatttataaattaatataaattttgtagtcccaatactaaattttctttcttgaacttattgtttagtgttatacgaagttaaatttcttaaatagatatataaaatctatttcatccaatttgtgaagaagctgattaagtagtatgcatgagtgtatgactagccattttacaggttggatggttggcacctggcaatggcatcccacattttaacaagatctttcactctcaatgaacccaagtaatatatataaaaagcttatttgtttgaaattttatttcagaaactaaaaggcaagttttctattaatttctgcatccttgagtgcaaaaacaagctcctac

SEQ ID NO: 6500 - DNA, 608 bp, Gossypium hirsutum
  misc_feature (26)..(26): n is a, c, g, or t
tctatattggttcataaaaaaaactnggcataaaacatgttgaaaaatctaatatttgcttgttcaatatgatccaggaatggtccgacttatacaacttatgcggcggtaaagatgacgggctttttctctacgagttgtctgacgagcagcaagaactcgagccacaaaatcaatgcggtattaaccagcaagttgctgctggtgcagagatagagtgcaccaatttgcccccttcggatgtggctgaatcttcctactcgacggattcagtccctaaaagatcagccatggaggttgaaagatcggccaccggtgtagaaactgaattggctcaacaacaagcaaagagaagtagattaaaaagttcgagttgcttatctaccgtatttgattagtgcttataagtcgtaatgttagacccatcgtcttgtaagttagttttcgaggttgggtttctgtttatttgacttgggatcctatctaggcataggtatttatatcaaaatttttttttgccttgcttatattacaagttaggttttgaggtcgtgtgtttgaatatgtttcaactgtatatatggacatctataatagtaagtgcggtt

SEQ ID NO: 6501 - DNA, 621 bp, Gossypium hirsutum
agaatttagctcctaatgcccactgttacacagttctaattacatccttatataaggagaataggataatggaagcagaggaattctatgaaaggatgcttaatggtggtcttgttccggaccatgttttgttcttcaaacttatgaagatgtaccctaaggggtatgaacttgacattgcttttatggttctgaaggcaatagctctaaatgggtgtgggtttgatccattattacttccggtttctgctaatgaagaattggagcaaaagattgtgattttgattgaggagatcttgaaaagcaacttgcatctagccaaagttgcattcaatgtacttataagtgccctgtgtgagcaagcacaacaggatagtgctttgcatttcatggataaaatggagagtctaggatgcatgcctctcctttttacttacaactccttgataaagtgtctttcccagaagagtctttttgaggatgctgaatccctactcaatcgtatgcaagctcaaggtatctttccagatcaagcaacctgtttgataataataaatgaacactgtaaacatgggaatctggaaccagcttttgatatcctggaccaaatggaggacagag

SEQ ID NO: 6502 - DNA, 625 bp, Gossypium hirsutum
aatgagtttaaagctacagcgttacctaggataacatgggaaggaaggacaggcttgtgtgagtttctaagcccgtttcccagacaaaaaggttaagaagatcatccctactttacctttctctctatccccttgcctacaaaaataccacacacctcataaacattaagttgagttggcaccatttcagtctgatattctaatctcaactcctaaaatgtccttcaccacctcgtatgacacaaatgcaatagctattgatggtacaacctgaaaaaaaagaaaaaacaaaatattaaacgaccattttaagacaagatatcattgtatattcaattctacaatactctttataaggtatgttcattgcaatacataaaacaacttgtagtcaagtagtgcaggtgtacaaccgagaaaggatagagatgtaactgattataagattcaaaagccactcacaggaagacagacgtattagtatcagttatgcaaaaagttcaatgaggcaaacttttaagcgaataagcaaaataacaattccatgcattcagctaacacagatttaatactcttactttaaagtagaagtcaatcttgcctacattcatgcccaaatctaaac

SEQ ID NO: 6503 - DNA, 613 bp, Gossypium hirsutum
agcggctagattctggcaatgctattaaaagaaggaacgcttttgatgttatatcagaactggttcagatatcaaaagattcatcacataaagctcatcactcaacctggtatgttattttaatttatctgctaaacttttgtggttcttgagttttcattgatctttccctgtttatattacaggcaagttatagcaaatcacttactggggtgtcttgaagatgaagaaactgctatccaggagcaaacacacaatttgcttccactgattggttaggtttaacttattatacagtgctaagtgtgtattttattgtgtgtgacttcaatagtttatcactttagcaaaaggcatatggatttacatatctttactgcatttcctgaaatcaagaaattctcgaggaccatatacgtttttttttctttctatagtgctatttttattttctacaactggtttgggtataagttgtagagtcttgttctatgaagcaccgacacaaggaaaacccccttgtaccagtgtcgtactggcatccgacatggccatatgtgtccgtatgtgtggtacctgtattatctgtccgtgcttcctaggtcttgtttct

SEQ ID NO: 6504 - DNA, 611 bp, Gossypium hirsutum
tctgtcaaacaatgatatatacaaatgaataatgagccaaactacattttaaacatatgtgtaaataatcataataaataaatatgtatgcatttaacattttctaaacaggttcacaagccaagtcttgttaagtcaaatcaacctaaattcataaaattttatcgatcaatattaatcgagctacttcaaaagaatattatttataggtaaacagtttaattatttattattgattcaggtttattcaaatttgaaaatctcttatccaaggcgtttctagttaattattttgaacccattttattaattaaaattttaaaaaataataataaggaaaataagaagtaaagacttacaggactgtagatggaaagcttggcagctttggcctacctcacgtatctcataagatcttcataagtgtagaattcttgctcagtggctggacataagtaggtctgcaattttctcaataattgttattgttaattaatccaaacaaactgttaaaattaattaatccaaaaaaaatttatattatttaaggacaactcacattccgacacatattattaaactaccgtacgggctatgatgtcgcatctaat

SEQ ID NO: 6505 - DNA, 580 bp, Gossypium hirsutum
ttgggggttttgccacctggaccttgctgaccatttatttgcaagcaataatctcgtattgttgaagggatgctccactttttgcagcttttttactaagttttgttttttttagatagttttgtctaggtttgtttgggtgtctcacattgatatatgctttctgaaaattttttactttgtacaatgaaattactcttagattacttaaaacaattttgggttgttatttgtgttgtctttgttcacgtcgaattgttttctaattagaattaggtaaattttataaatttcagcatattggtttcaaatttgttgatgaagattagtagaaaaagaagaacactaagagaaacacaaattacccagattttaaaaatttttaagttaaaaacatttaattatttcatgaaagtaatttaaaaacaaatttctacttttatcattttgaaaattttctattttaacaatatattttattatatattttctaaatttttatatatttatttatattttcaataagctttaaaatatattgaataaaatataattttttaattaataatgccacgcggca

SEQ ID NO: 6506 - DNA, 632 bp, Gossypium hirsutum
  misc_feature (626)..(626): n is a, c, g, or t
gagacttttgccccaaaaatggtaagattatagttttatccttcaaaaattgtaaatttatatattaatacaatagtaaaagtgcatttaactccccaaattttacaatttaattcgggttacagacaaaactttaaaagtaacatataaacaactatatgctatctacgagaaagtttaatcaaacaaataagggaaaagattgttacaatttgaagttttataatcttcccatcgtgctccacagtgcgtattttctgtatatatatttgagttccgtaaaaattaaaattaagaacacttggagtagagatagatgagagatgctcacaaagtcgacgccaattgtgcttatgtaactgtccagatacgaatcatcctgcatttgagttatgaaattaagacgtcgcattgaaaaagactcatttattttgtgaccttgaattgtaacactggattcttacagcaaatcttaggagaagacatgatttaccaactccagagtctccgataagcaaaagtttaaacaagtagtcactgtacacataaattattaaaattttcaaaaattcataaaaatgaaaacaaataagtgatgaggggagcttactattcaggattcatgnctgttg

SEQ ID NO: 6507 - DNA, 637 bp, Gossypium hirsutum
tcatgaacagaaatcgcatcaacagcaacctgtgaatgggaaccagcagtttagctcactgcctgcacagtatccaggacaatcagcctggacaggtccttattttgtgtgaaatcaatatgcaagtgtagctggtgagtaggaacttcactcattttccacctcttggttttgtagtttgattgtaatgctttctaaagtccttttcacaacctgttcatctagatttgtttttgttctcaaggttcttgagaatggttactgtgaatgtattgcttccatttgcctgccaagttcaagtccaactttgaggcactgtcagtgttgagtttttgatggagcatgggaagcattggcttccagcaggcacttgctgctaaacaagtgagtatgcactattattttcctttttcattttgtttgtatgcacttggtgatcttattttagatcatttcctagtaactctagctaatggaagccactctgtatttcatccactcttgtcatgaatatatagtttccagtttatctcaacaaaagtggggcgtattgttagttttgcagatttagccagatttgtagaggaagattgaggaaatcaatcaatcttatgagatgcagaatttggtaagggag

SEQ ID NO: 6508 - DNA, 395 bp, Gossypium hirsutum
gttatgtgtaggttctgaaatatatcaggagactttggcaaaggcacttgcaaagcattttggtgctagattgcttgttgttgattctcttctgttacctggtgtatgcatcttttcgccaacttgttttgacttttgattctttgcaattgcatgtcatgaacgcaagattgctctaaaattatagtttgcatgcttgctagttcattttatcttaatatcattcctttggaagtggtgtagtatacagtttttccaaatcttgtatgggatctggggggagttcttggagtctatacttcttgttaatgtcgtagatcatgattctgcctcgccaaatatgtaaatgacttgagatattttcaatttgtaagcaaatgtgccaaattatggct

SEQ ID NO: 6509 - DNA, 592 bp, Gossypium hirsutum
  misc_feature (583)..(583): n is a, c, g, or t
aatcctatagtttttcctcattatggtagtcgagtcttttgaatgatgaacccacacggggtgccgcttttttctttgtgtcatgtcagtcctactctttccccacctcataccacttatggctccttttctagtacacctggcctcacatatttagttctgtcacatgatacaccttgttttacacaatttccctctatatattgatcaagcttttttatggtccaggtttagtatgagtaatttttatatgatgagagaggtttaaatgaaaatgaaatgctcaaacatgttattcccatggccttaaattctcgtacatcattaaaagctaaggcagtggcagtagacacagactgatacacctaacagaagaaccaaattcgaaaaatggtaaataaaaataggatggtgattgcctctgtcttaatcatccaagcaaaatagatgaaattttgggattggaacatgttttaggactcagttgtcagctagagcatgttccaggtctgtcaaaggtgagtaagggctagtgagttgcatatcagacagcatcctacgtagttgagaggcttcctcttcnagctgaaca

SEQ ID NO: 6510 - DNA, 634 bp, Gossypium hirsutum
tttgtttaattagatttagattggcttggtccgatgtgtatgcattttctggactgaaatgggtatggcaatttcaatctttcagcaagatctatcacataatctcatgaagatttgctgataggtctatatgagcaggtttagcttgactgaattgataacatcacttttaagctaagctaggcctaggaagaaacagaaaaaaaagggttcttaagttaatttacggcataattcagtttattacctttaaactctcttgcatcatgacatacaaaagaccaggtgtttctttttcaatcacctctttagttgcttcaggggtcacatctcttggagtgaatccggtgccaccttaataatgataatacaattttaagaaaaggagtgagaataaatagaaccaaaagggaaatcataaatagaaccaaaagggaaatctctatatccaacaatgaaaaaggagaggctgctgagaacaagaatcttaccaagtgtaaggataagatccagcttatcaatatcactccatctccgcaaaacttccttgatctttcccacatcatctgaaaccacacctgtagcaactacctttgcacctcctaacttttccgatgaggaattcacacagata

SEQ ID NO: 6511 - DNA, 641 bp, Gossypium hirsutum
ttttactataattttgtattttttttcttagaaatcaatatcttttccaatttagatgatagcattgccttggcaccatagaacttggatgtttcttatgaatgaagttcttgtttaatgcatctcatgttgatgtgtaaataattattgtcttaggttggagggactagtataagaattgggggaatggccaaaggttctgggatgatccaccctaatatggcaaccatgcttggtgtacgtctttcaagtgtttctagctttcctatatgatacatcaattctgttctaaagcctgataactctttcaggtaataacaactgatgcccttgttgaaagtgatgtctggagaaagatggttcaggttgctgtaagccgcagtttcaaccaaatcactgtatgtaatttcattgctttcaagcctccctgtgacttatatcaactaggtgacatctcagttgaatggactccatttcttccttgacatggtcttatctgtcttgacttgtctttagcaagttcggttattgtttttctgtaggttgatggagataccagtaccaatgatactgtcattgcttttgccagtgggttagctggatcgaattggatcacttctatgaacagttacgatgctgca

SEQ ID NO: 6512 - DNA, 619 bp, Gossypium hirsutum
tctgtgcatgtaaatttatcaactcaacgaaacatacggattgctggcaactgcacgccaagaaaaaatcaaagtaagcataaaaattagtatgctatttatatttgaattacagcacctagttgtcaatatgttgtgagagagttaaaattagtattaaagacacattatgaaattgagataaaaattaagaacaatgaaacctctaagtaaagatgaatggcattggaaacattatttcctcttttcctttttccagcactggttttatttataatcatctcctatgcaacagtgtatataaaattttcatctcaataagttacttgaaaactaaaaaaagggaatgcacacaagtcctgcaatacatcagacaacgattttcatcctgggaatttctccactatatgtcttctttatcattaaatgttgaaagttctaaattttgtagtgctctcacatgaatgaggttaaacttacattgtttacagatgtcattcctccacagaatccatatgattacgacttcaatctgcctgctggaccaagcgaagcattctctcaaacgagcatctctgactttgcccctatcactccagataaggacagaacagcagaa

SEQ ID NO: 6513 - DNA, 608 bp, Gossypium hirsutum
ggatcagaataaccatcaaggacaagcttagacgcacgactaaagtggagcccttgatccatcgtgccatgtagataacgcaagattcgcttaacagcgttgaggtgtgagtctagaggtctgtgcatgaactgacagactttgttgactgagaaagcaatatctagtctggtgatgacaacatactaaagagcacccactatactctgaaaaagactttcatcttcaatcggacttccttctgaagctgataatcgacaagtagacaccataggcgtaggggaactatttaccttgtccatagaagccttcttaagtagatccagtacatacttcttctgattaggaaaaatgccatctgagatgtatttaacctctatgcccaaaaagtagtttaactttcccaagtccttcagagaaaacttatcattaagttccttaacaaactgacttatagcactttcactagaaccagtaactatgacgtcatccacataaactagaacgtagagcaactgagctccagagcgatttataaagagggaattatcagcctttgacacttcaaactggttagaaagaagaaattcccttagtttgtggaacca

SEQ ID NO: 6514 - DNA, 609 bp, Gossypium hirsutum
tctttagttacatttttaattacttatttattatttaatgatatcctatgcaggggatctacaaaggaaaagattgaaaaggagactggggttcggataatccttccatcatctaagcagaatgattccattagtaagaattttgttatcctctaaaaacatcttctttttcttcattgtgttcatggaatattgtgttatcactaatgttagagttatctggttttaaaggcttcacacttttttttatgatatatgcaagtaaagctatcttggagcttgggttgaatgtttattgcttgcagtcattgaaggcacttcagctgatagtgtagctaaagcttcagaagagatacaacgtgtaattgatgaggtaagttggctatgttgctgtatattatgatgctattattaaaatatttggtcccaatagatggaaatgatgttcttgtgatcaatatattgtttaagaaaaatctagtgttcaagaaagaactgccatgaaataaattcttattataactagctatgttactgtgactcgggtatgttggataatggtatgtgtcaaacatgagtatattcgtcttttttttgtttttcttatgt

SEQ ID NO: 6515 - DNA, 527 bp, Gossypium hirsutum
  misc_feature (502)..(506): n is a, c, g, or t
acattctaagggacaggatgatcactaagcaaaagtcataagtaaaagaaatgtaaagtatttaaagggaaaatgaaaagaatgaattcaatcaaatatgccatccattccaacaatcaactgaatggaatgaataaattacaagataataagattcccactgctggagttatacatgaaacaaatagatatagttcattatgctttatggtcaagcactcaagctccacacacaaagaggaatatagtagtacgtacaaagagacaatatgaatgagcaagaaatactattgccaaaacttggagtttgaaacatattcaacttgaaatttataaaagagccaacctttggatgacttggacatagcacagccaccaataacttaggtgaacccagcatcaatgatatttcatagctactacaaatccttaaatataccacagttaacagttttggagaaaaatgggccagttggtcccaacggctttttgctagagattnnnnncaattttcaaatgcacacata

SEQ ID NO: 6516 - DNA, 552 bp, Gossypium hirsutum
  misc_feature (400)..(400): n is a, c, g, or t
catgtttgagtgatagaaattcggataattaataatttattactacatttttatatgcaacccaaaatctttatatatttttatcaatttggtcattatttttgtttttaaagttaatttgatcattaatctttaaaaaagaattaattttttaaaaaatagaaatgctaaccaaaaacattaatattttaacaagacttaatccacaaattaatacctaaaatatgtcctttttccatcttgttagctaaactttttttttgttacaagtagtacttaaactacattttctccccaagttgatagcaaaccattgagtctatttaaaaaaaaaaaaattaactcacaaattaatatctaaaaaaaactttttttatcaagttaaaaccttttttttttntgtcacaagtgatacttaaactattattcatttacccattttacacaaaaatgttatatttgctaaaaaaattcagccaataataggctgtcacaacatataaactttaaaaaatatttttagttcttttattttattttaaattatttccc

SEQ ID NO: 6517 - DNA, 596 bp, Gossypium hirsutum
  misc_feature (478)..(479): n is a, c, g, or t
  misc_feature (495)..(504): n is a, c, g, or t
  misc_feature (508)..(508): n is a, c, g, or t
  misc_feature (518)..(519): n is a, c, g, or t
  misc_feature (523)..(523): n is a, c, g, or t
  misc_feature (525)..(534): n is a, c, g, or t
  misc_feature (539)..(540): n is a, c, g, or t
  misc_feature (542)..(543): n is a, c, g, or t
  misc_feature (557)..(564): n is a, c, g, or t
  misc_feature (566)..(567): n is a, c, g, or t
  misc_feature (575)..(578): n is a, c, g, or t
  misc_feature (581)..(583): n is a, c, g, or t
  misc_feature (585)..(590): n is a, c, g, or t
cgttgtacatggaactatgtttcaggagtgctatgtatatatgtctgggggtcaacttaatgtttcttgaattcttgttttactttagacatctggttttatagtgggcgttctacatcatctctggtttcagatatctggcactatctgctgcttgtgatatgagatgtgaaaatcaatctcaatgccgacggcaatggcaatgcttttttatatccacctctgaaagatgattccaaatgatcaaagataggggattcaaacttcaaaactaacacctgtgcaaagcaaaaaggctagagttgaattggactgaaaacatgataacatttaaatctatacgtatctcaattgacgattaataagtcaaaaatgcaaactcttaatccctttctttatgaacaccaaaataagtaaaacaccaaaagaatatttgatagagggctcaaacagaatgtgctcgctcatatatttatcnntcccatgattgttacnnnnnnnnnnaaangtgcatgcanncatncnnnnnnnnnnggccnncnnctacatttatttcnnnnnnnnanngttaaccnnnntcnnntnnnnnnacaaca

SEQ ID NO: 6518 - DNA, 608 bp, Gossypium hirsutum
tgccccgcataagtgagcaccaaagtgaggaggaagttcgtttagatccttcaattggcccggttgctgctttttgtctgcttgttcttgatcctgatcaggttatccctcctccaaatatacagtttctatgtgtctcatccacttcttcattttgattacttctgtttaagatttatatcataatttgcaggttgattatttgaatttgaagaataatgagagagttaagtttgtatctacacttgatatgaatggagtgaaaaactggacatcagagagaatcaacccttgattttgttttcagtttctaaagccatgaggtggacacacaatggcatatggttgatgtggaataacatattataatcttttatacatcaattttcgctggttgtatgtatgtattttagattccataaataaatatagtttcttcttgatcatgtaataaggcgcatgactacaatttactctattgtttgttgtgttgtgctttattttagattcaataacaaatttcagaccatgtacgcattgcaccgaccttagggacctcttcacttcctcttccgactcacacgctgtcaagtgcttcctctacgctc

SEQ ID NO: 6519 - DNA, 498 bp, Gossypium hirsutum
  misc_feature (494)..(495): n is a, c, g, or t
tctaggtatttaaattaattttttaagttcaggtccagccctctctcaaaaatagatttactttttttgtccaagcttgatccaatttatgaaaagtaaactcgggttcgactcgactaactcatacttgattttttttaaattatttttttttaaaaatgtaatacactaaatgcattaagaaaatattaaaataaaaattttctaaaaatttaaaaatacattaaaaagtatttttattaaaaaaataactataataaatattttattgcattaaatataatttttaaaactttatattttgggttgagttatttagttgggtaaattttttttagattttgagtaataaatttaattattattagattaattatttaatataaataaataaaattattatttaacatgtataattaatataatattattttataacataatatattcggacgaggccggtcaagctcaggccaaaagatttgcccaaagtnngcc

SEQ ID NO: 6520 - DNA, 651 bp, Gossypium hirsutum
gagactataagatgaaaagtagtttcttcttagcaaaagatggaaaatagcatctattctattttttttatcaaatacatttaaaatttattttcttttcatttttggagtactctctttttcagtttttcattcaaccaaaaatgttatggacatataaagttataaatgtttaataaaatcaaatttatacgacacctaaggatgagataagataggatatgagcgagatatgatgaagtaaccctaggataaatcaatgttgcattccgaataaagatcaggaaaacgacaggataataattcagaatatcataagcagggcctttcatcttttggtaataagtaactttttaactttttcgtttctctttctaagggaattacgaagtatctcaaagtgaagagaattttcaccgaatgaagctgtgttttggcatcattttgcctctcaaatgcgatgtctgaaataactgcaacagttacataaaatcgcatttagaagaatccaggtttagcttagttttattaatttaaaaactgagattcaacaaatttgtttttcaattgatatttaaattttaatatctacattgttttaacttatttttaagatactgcttccttttgtgccaacatataattgcattc

SEQ ID NO: 6521 - DNA, 601 bp, Gossypium hirsutum
  misc_feature (588)..(591): n is a, c, g, or t
  misc_feature (594)..(594): n is a, c, g, or t
gtctcccgtctactccttttagtggtatcaatgggctatggtgttgtgcggccaacccttggaggtgtaatcttcaaagttctccttcttggcctgacgtactttgtcttttcagaagcactcgggctggttgaaaatctggggaatattgatgacttaactggaaaagcgaggctgtttctggttctacctgtttctctgttggatgcttgcttcataatctggatcttttcggcattgtcccaaactctagagaagcttcaggtagtgccaagcttatcttttcatattacaaccataaagaatagcttgaattgtcccttaatatgtatcctttttctttttttaatacactcgatcttagcagatgttatatcttcctcttgcattacatttaaatctcgtttgtgcaatgatattcatgtaacataaatcacgctccacaagaatcagttttccattccatttgatgtcgctccccataattagacaaatcagtcttgctcataatatattgtagccttgtttggtgaaagtacaataagtgaatcctttctgcatgttgatgcttgcagatttctatttgcnnnntgngcaatag

SEQ ID NO: 6522 - DNA, 602 bp, Gossypium hirsutum
  misc_feature (548)..(548): n is a, c, g, or t
cttacttccatggcttttaaaaccaatattttcatgtgaacatcatctttgttactgagatgcgagtgcccatataagtatataagatattgttatgttaactttttctagttttttttttatgtgtttagagtatatcccatacctatgtttagaactccatgtatgtgttggatgcattatgcattagacattgagtattttaacaaaaataagagcagtaggatagataactattaccattcattttaatataagaaaaacttcatttttctagtttttccataaatttaaaatatcttatacttctgtctggatatgcaccaagacacaaaattaattcatttaatcaaaaccattaccatggctctaaatgtttagtgctctcatagatggaacttaatcattcaaaaaagtgtgatgtaatgcttatttaactatataaacacatacctaggattttatgaactgaatagcttaaattgtttagaaatttaataaagcgatggtgtcattaaacttagtattttggatttttcagagattgncaaccagctatcttgtcgcagcaagggtaattcttcgtattgaacaccttgtca

SEQ ID NO: 6523 - DNA, 612 bp, Gossypium hirsutum
gttcgatagaagcagcagagctttgcttgatcttgagcaccattgcaatggcatcaatgcggcattgttgttgtttataaagtatatagaggaggagccttctttaagaggttcccttcagtaaatttttttctgaaaaatatcttctctaactttcctgatgttatccaaaatgtttattttattggtaatatttagttgtactttatatttgtttaaaatttgatgatgttatacattctctgattgtaggtcaggtaaagttgggtgtgcatgctatgcggttatgtcagatacaaggtggatctatctctagtgaggatattaaggcgacaacacttgtagctttgcttcatcttttagaaagccgcatagcattcaataatgtattcctccggcactacttgttctgctttttacaagttcttgcaggaaggtgggtatgcattctaatatggtctctctaggatttaaaactttcctttggacaaggggttgcttcatacatgttgataatattcctggggaaaaaactacattgatgaccaaagtatataattctgttactgttgtcttctgaaaattgtcctgtttgatcttattgagcttcga

SEQ ID NO: 6524 - DNA, 578 bp, Gossypium hirsutum
  misc_feature (539)..(540): n is a, c, g, or t
tatcagttttggctcttaatacacccttttgtttgttgtactcataaaccaaactcttccacgtttctcaaagtaatgaatgcagagattattatatttatatgcatcttttgtgctggcagggttatgaaatgattgctcttgatccattatcacccgattgcctattcccaaatgtggaatatgtttaagattattatctcaattggacaaaaatttgaactctacaaatgatcttgatttagctattattttatttatttttagttttaaatatttcttatttcttactgggtagcaaaatttgtgataatgaaatgttaaaaaaaaaatacagtagcagatgtctattactaaataagatttttgtcgaaatggtaagataaacatgacaaaaattatatcgatttaagtttaaatcttcttacttgggtatttttctattcttaatgtaaaaaaaaaatctaaaataatataatttattttataaaataattatttaatcaaattgatgttaattaaacaataatattttagcnnagtatataatttttcataaaatgtcaaaattactaatc

SEQ ID NO: 6525 - DNA, 620 bp, Gossypium hirsutum
ttagagttgttgtgtgcacactcgaatttgttttctggtccattgccatcgtccctggcgcaatgcttgaagcttcgtatacttgatcttcagaacaattcgtttagtggtcctcttgatcttgattttaccggaatgtcgaatctttactcacttgatctcgctactaatcattttactggttccctgcctgtttcactatctgattgtaaaggactgaatgttttgagcttggcgaagaatgaattccgtggccaaatccccaagacttacgccaatctcggatcgcttgtgttcctctcgttgtcgaataatagttttatcgatttacctggagctctatctgtgcttcagcactgcaaaaatctctccactcttatcctcacaaagaatttatatggagaggaaattcccagaaatgtaagcggatttcagagcttaacaattttagcactcggaaattgtgctctgaaaggccaaataccggattggttgttgcgatgcgagaagcttgaagtgttggatttgtcatggaatcacttaaatggaagcattccgacttggatcggccagatgaagaagttgttttacttggacttctcgaataactctctcaccgg

SEQ ID NO: 6526 - DNA, 628 bp, Gossypium hirsutum
gcgaatgcgttcaattactccattatctttcgtctcctttttcatttcattgttcaaagtcaaagaccctccattaaagcaagctctcaaagctcgagctgttgaaatcatcttcaaagctcaatttggtatgtccatagttcactgaagttttgccaaaaatacatctatcaccacattaatttccttctctcaatattttgggtgtcactaacagatacaaagcttttagagttcaagccatcaacaattgcagcatcggcagtcctctcagcttcccatcaactctttgatgggaagcaatttcccagctttaagaaagcaatttccagctgttcatatgtaaataaggtaatctaatgttcttactctttctctccagctattaacatttaccacgcattaaaagccaaccaacaaacttattattataactttctttttagtattaatgcagtgcaatagccaatatgctttaaacatgtatttatgagattaaccaatgtgtttgcaggaaaacatggtaaaatgcaccaattgggtggaagagatagcgatggagggcagtgaatcaatatgggattaccagcatatttgcagttcagggagtgaaattaccaccgttact

SEQ ID NO: 6527 - DNA, 575 bp, Gossypium hirsutum
atggtaattgcggatgttaatcaagctcatctgctatttatgatatttgtatggacccttaaatgtccttgtttagattttatatatgttcttgaacagaaacaaatggataaggctagcagctcactttttgaaatttgaaactaagtttttttaaggaaatctctattggaaaagtgtctcataaaagttttacaacgagatgcatgtttagttatgtccactaacaaatttagtgctatgtgttaaattccaagatttatcacatttgaattcatgatgttttattttcctaattgaggatttgtcccatgtgtaaggaccaaattgttcctccttctgtacttcatattatctttttatttttctatggtaggattaattttttgtagggggagggggttgatgttttttagattaggctatattgaccttttgcatcataactgcaagtgataatatagataaaatatttgcacatatgatatgaaatttattcatctactgtataattatttatttgtcttattatcaggttgatcaaataggccagaaggatacaggtgtagaggatg

SEQ ID NO: 6528 - DNA, 605 bp, Gossypium hirsutum
ggtgtggttgtgcgtgctgccatgcagcggggtcgttgtgacgggagtgaggtcaagttcgatgacaatgcagttgttcttgttgacaagcaaggccaaccaatagggaccagagtttttgggccagttccgcatgagctgaggcagaaaaagcatgtcaagatcctcactttggcagggcacattgcctgaggcatggatccataatatttttcccccgaacacaagttttttttagcaatccaagcatttagatattttcatgttgtcccaatagcaggaaaaaaatgggaagagggaagaactaatctgttgtttctatcacaatcctgggcaatgattagtagatgtttgccttatctttaatgagaatgcaatatatctgatgagacaaaattgcattgatgacctcatgctgttcatacctggttgaataattaggagatgctcagaagagtctttttgtagaaaaaaaaattatgatattgaaaagtagttcgcagttacatttgacagttaattcatgcccttgaagtactgctatttaccgtataaaatactttatacttagaaatgccttaaagaagaagcttggtacagaacat

SEQ ID NO: 6529 - DNA, 656 bp, Gossypium hirsutum
aggacttggtacagtattgatcacccttgctggtcgtgaggtaaatcagctgcctttatccttgtgatgcataaaagagattaaattgcttcttatttgttgaaaaacctcattagtgtcctaggtaataagtatcatgcatacaatgtaattaaatatcaaccatgaatgaatatcagactgaaatctgaaagtatcttgagtgaattatcctaaaacttctgtgttcattgagccataattcttcatggttgccttaaaaagaaaatcaagatattcttacatatcatagtgtatattataatgtaaatttacataagaatggtggttaaagcctgtggggttccttgatctgtttatttcttcgatgcactcacaatatcatgtttctcaactctggcattacctattattattatgcatgtaaccagtatgttggttcttgcccatgatacattcatgttatctttatctatatacttatcaagttcttaatttgaagctctttttgatcatttttccgactcaaatttttttctcgtgaattcagatatttacaaattttctttcaagtgtaatgatccatgcaacaagaccgtttgttgtcaatgaatggattcaaactaaaatagacggctatgaagtttcagggacag

SEQ ID NO: 6530 - DNA, 321 bp, Gossypium hirsutum
  misc_feature (51)..(53): n is a, c, g, or t
  misc_feature (304)..(304): n is a, c, g, or t
ccaggcattccaagtttatcatgtctgggatggttggcagtagaactgtannngttattaaatgcttctttttctccactttacaagaccacatacaccccccctccccaccccctcccccgaaaaataaataaaaaatacgaaggcatgcacacttataatggcacaaaatcactgtgagaatggaaatacgtaatcggtttggccaaaggaacaagagttactatgtcagtactgctcatttagcaaaatggataatactagaggtccgatgattaaatacaacctaaatggaacacttcanttgaattgaccttcttt

SEQ ID NO: 6531 - DNA, 409 bp, Gossypium hirsutum
ctgttcaattgggtataaaattacttttattttatgtaacattgccttgttctatacttctaccctttctcttttcaagtaggtttattttcggagtttgatttttagtgacaattctagtattatgttggcctgctttgcttgtatctagattttgctacttttatatttctttttctgttgacctaatctatataatgttccagttgtgttttaagcattcctgtcattcctattttatggcaactaagtaatattgctgaactgaaaacagtatgctgtggttaaattttaaggatgaaagggttataatattgcaaggttttccaaaattgttaaattcttccaggataggttaatgtttaggcaatttctcctctggattggatcattttatgttgtgtttatt

SEQ ID NO: 6532 - DNA, 729 bp, Gossypium hirsutum
  misc_feature (650)..(708): n is a, c, g, or t
  misc_feature (710)..(717): n is a, c, g, or t
  misc_feature (720)..(726): n is a, c, g, or t
tttttcggattgatgtctcagttaattttcaatctaaaccgtttcaaacaatattagctaaaataatttttttattattgtattaatgcaaaaatcttaccatttttaagatattaaacttttccattggcaaagttggatttgaaatcataattttttatttctaaaaaatgtacactcaacaggataaatgcaaaccgacaggcatgggtcattcccaagaaatgaaaatttacattttattccttttaaaaattaggccctccaattaaaaaaataattgctcaattttttaaaataaaataaaatcataaattaatacatgaaattcttttttatatcaactggaaatgagagtcaaatagattccatcacccatttagttataaaaaccttttaacatttataaactccacaaaaatgattctttatttaattccctaaattacctatcctcgcctgggttgataacagtattgtcgatgaacctttggattacattcatgaatttttcgccattttctctctggcttgtaagcaattcaagaacacgaaaaggtaattggttttcctacaagaactgatccaagtacacaaatgtcagcaaatcatttttaataaacattttaccatcatcatcattaccgtannnnnnnnnnnnnnnnnnnnnnnnnnnnnnnnnnnnnnnnnnnnnnnnnnnnnnnnnnncnnnnnnnnccnnnnnnnccc

SEQ ID NO: 6533 - DNA, 566 bp, Gossypium hirsutum
acgttattgtgtatcatcttaatgctgcaccctcgggcctttaccgtatataaatagttgattaaatccttatgttcttcgtcaagttgacactaattttttatgtcttcaacatacaagcgaattacaccattgattactcaccggaaagtcgatagcggtaattaaaggaagaaaacaaaaaacccaacttagcatgagaaacacgtgatcttaaagattaggggtaatctagtcactaaacaaaaaaaccgtaagttaggacaaaagacaatgtaaatatatctaaaactaaagggtaatataggaatgtcattaacagtatcttttttattgactagttgaagaatgaaatagatttgcagagagaagtcagagattgaagaaagagagatctatatcatatgtgaacgctttttgtggtctaaaagaaaagtttttttattttcaaatttgttttcttttccgttaattatcacagaaactgtagtttgaggtttgaaaagaagggtttttattttgctggttacagggatttctgctggttcactcgtgaaaccttcatt

SEQ ID NO: 6534 - DNA, 638 bp, Gossypium hirsutum
caagctttgggaattggaatactctctgtattaggcaatgtcaccgagcgtaacagttccagcgagaacaccagccccagaaagtgcgaaaggatagtgtttgccgatgcctgcacgagcaaagagatatgtaagggtaaggccatgcaataaccaaggttattgcagttgcaccaccatgaatatcaatatatgactgcaatgtgacgtatataaagacacctctaaatttaaaacaaattgctagcaggtgacctcaggcagctttccaaatctcgatattacaagcatggacctcattcagctaaatgctatatagatattccattatgaggcccgaattagatgtaagtacctgcaccaagaatacatccaaggcaagaactggactagagccgggagcaattccttggtaataaggagttgtggaggaggtaagtgccttcgcgactagtaaaccgactgttgcttgcatgccaagaatagcagcacccattcccaaaagattcagaatgataccatttttcaagcttttcacaacattggcacgaggaggagcctgaaactcaaggggaatttttttagtagcggatgttgaatgaggtgatgagtcaaaagatcaaataagccctgaattt

SEQ ID NO: 6535 - DNA, 634 bp, Gossypium hirsutum
  misc_feature (293)..(293): n is a, c, g, or t
  misc_feature (327)..(327): n is a, c, g, or t
cttgaagcttaaccaattcatcatgcatttgatccatgataaaacttaaaaactcctgagcatcttcctgcctgaaaatgatgataaataaaaaaatcatcagaatgtcattacatatgaatattgtacatagttatatctgtttatcattctgatttcaagcatatacaaacatttcaaagttaaaaccaatcatcatatttctttcaataaaatgctgatgaggtagctgtagcaagttcgcactaaattactatacatttgacaccaaatgcaaggagaaagggattcanaggtaagataattaagctctcaaaaattttcagnatttcagaaagagttaaaaagaaatcaagagggccaggacaagcatatataatgcttgattttgatcatggatggtgatgtttcaatatcagctggccatgttctgttattttaatagaaatggtctatgcaaggaacatcacttgagactggtaaaaagtataaatattgaaataaaactgatgtagaaagcggacaaaccttggcctaccagatatgctatttggcacatccggagtaaaacttttaagtacagattcaaacatgacagggctgaaaggtcttccaatctcaagaactgctgttc

SEQ ID NO: 6536 - DNA, 474 bp, Gossypium hirsutum
  misc_feature (59)..(60): n is a, c, g, or t
  misc_feature (212)..(215): n is a, c, g, or t
gaatctgcttgaaagtcaacagtaggcaattcctggtaaaatcttgggcatgaaaagcnncaggatattcttaaaataaatgggcagaaacgagcacaaaacaacagcaacaacaatatgacagcaaaaatagcagataataacagtaacaacgaagaatgcctccccccacttaaaacacctagtcctcgatgggaaaggaaaaggaaaannnntagggggaaaaaaaaaaagtttaaaaaacctccccatgtggttaccggcggttggggcacacggggaaaaaaaaaatggcaaaacggcaaaagggggagacggggggggggacgtgtgcaatgttgtttcggtttcgggttctcgccagggagattaaaaaatcggggggggggggggaagaaaaaaggagtcgggggtaatggggaaatttggggaaaaaaatggggggttgggggtttttttttgtggaaaaggggg

SEQ ID NO: 6537 - DNA, 606 bp, Gossypium hirsutum
  misc_feature (553)..(553): n is a, c, g, or t
tgagtctaggtattttgttgtttgacattatacattaggtttaattatcaagattttagccattggtttgggaatattcatctgtatatacgttgctgattcatgtctttttcataaggaaacaaatcaaaagtgtaaggaagaaaaaaaaaacccatttgattatgaaaggaccataaaaagatactcctagttccactgattgtgtagtttgaaagagaaagaaattagaggggccatcagttcattaactgtcaatgccacaaatacaaaacttcaattatggtcgaatggtaaaaaaattgatgtttgttaaataaaatattcataaagttgaaaattttttctctcctctaaaaatctaacctgacttgacttcgaatattttacaaaatggggaaaaaatccaagccatttgcatccaacaatatagagtaaaggattgattaacttcacaaaaatgaaacatgctaatatccatcatgtcaaagtttctggaaacaaaatggagaaggaaaaaaggccaaatttcaccgaccaaagcctcgagaanatgtctgaaaaaaacacaacctcataaatttgggttaaagccttaaaaatcaa

SEQ ID NO: 6538 - DNA, 631 bp, Gossypium hirsutum
cttatttgttacagattgtcacggttcatcctcagcagacaaaggttcgaagaaaaatgattatttcccgttgttcaacagccttgaactgcttttgtcctatattatcacaggcattcattattagctattggtttccacattgtttatccattacttattgcaaaaatctcaaatgacgtttcttttaaatgaagttactaaattaaaccaatcatgatctcctatccttgttacatatacctttcaacactatttatatttatatatttctcatggaatcttttctctttttatgtagactgagagccccaaagtggaagaaaatcagaaagttgaggagaaggtgaaggacaaaagagagtcggtgaaagaaactgataaacatgaaatccatgaacacgaaaccagtaaacatgaaattgataaacaagccattaaacaggaaaccgagaaacacattcgtgaaattgcatcactgaaacaagaactagaaatggccaaaacaatacacgagcagcaatgcttggaaatgcaaaaagagactgagggtgtcaaggcaggacttcaagcgaggttaaacgagctcgagtccctcctaaatgattccaacaacagagtgaaagaactc

SEQ ID NO: 6539 - DNA, 641 bp, Gossypium hirsutum
ttaattgtgtgcttagctgatttagtagtcatttaggttgtcattatgttgatgtaatggtttagacacttgcacaagcaagctttgttttctttctatgtaatttgaactacttatggatgtaacttaagttattattcaagtaatgaagatatagctttgttcatcatcacttgaaattgttttttccttctgtttttaatctttcaaacacaaataagactttggttattgtctttgctattaatcacaactcaacacatttactcttccttgactatttgaaactgtcacaatctgtctggaaaatagtgctccaccattgacaattatgttgaagttggcttccatgcagaccatgaagcagaccaagctacccgagccatgcaagttgctgctgaagctcatgctgatgttttgttgctttcaagtggatgttttgctacttagttagatgtgaactaagttgttagcatacttgatgtaattaggttctgatagattgataaatcagctttaccaagtgtacaagttatgtttatcaagtttctaggttacttagtggagttaggtacatgtttaggtaatattttcatttttttgaccagctgaaatgcttggtatatgtaatggcttttgtg

SEQ ID NO: 6540 - DNA, 592 bp, Gossypium hirsutum
  misc_feature (575)..(578): n is a, c, g, or t
tatgcttctatgagtagatggaatcgcatgggggaagcatggaccaaaatgaggtccctaggcttgagaaaactcccaggatggagtattattgacctgcatggcagagttaccacatttttctccggtcaaaccgctcatccaaaacatgaagaaatagttgcaacactgtcaattctgtggtgggaaattagtgaagcgggtgtgaacttcaagatgaaagaagttcatgatatgttcttggatggatggtttttataggaggtccaataagatgttgacttttgagcatgaaaaagggtacattacaagcactacattcatggttttgatttcataattgatgtggttgaaggtttaggtttctgactgcaaattttgggtctttgtgttcagtgttacggttcattgtttaggtggataaaggggttaaaaaaaattgaccttcgccgatataagttatttagataggccaaatgatcattgtaatgactataaataattattgtaattatgaagttattacactaaaataatgatacagaatgtaataaaattgtcgagcttttcctagnnnngtaaacatatacga

SEQ ID NO: 6541 - DNA, 608 bp, Gossypium hirsutum
  misc_feature (58)..(58): n is a, c, g, or t
tgattgtcctaagtgttagatatttcctcacattaatgtcttttaatttctaaatgtngcttaatgtgcatgatagtggataaaatgcaatgaaacatatggagttggaatatggaagcttgatacagatgacaacatggcttccttctacttggtgcacatggagttggaatatggaagcagatccatgtcatgagattattggccctgctttggtctcaccttataatgaaccaatgttcaactcttgtcttttctttctgactaaacattaacatagcattctctgatctttaaaattttcctaggcataataaaaatttgcggagccttttgtgaggattcccaaggtgacttggtaagtgttatatagtatgcatcttcttattaccgtgtttgaatgtttgcaggcgttgctccatttcatttactgggatgccttaccagacatggaagagctcatgggttcaacttctaaatgggcttctacgcttgtagctcagcatctgcttgccgctgctgaccgttatgcgcttgagagaatgagattgctttgtgaggctaaactttgtgagggtgttacaataaacacagttgcaactacatta

SEQ ID NO: 6542 - DNA, 629 bp, Gossypium hirsutum
  misc_feature (624)..(625): n is a, c, g, or t
ctcctattacgagtggtgtgttacaagatagttgctcttgtcttactgtgtttaattgtgcttgttttagctttaatgaagttttgctttaattgttggctctgcagatgttcccgaaggatgtgtgattataagggagcatattccgattagcaacctctttacttgtctttggttcaacgaagttgaccgttttacttcccgagaccaaattagtttttcaaccgtaagggataagattgcggcaaagacgaattggactgtcaatatgttcttggactgcgaaaggcgcaactttgtcattcaggtattttatttttctgttcttttgcattcttcattatgaaatatgcttaatgaagggacttcctttttcggctaatgatcatatcctgtaaattccaaacttgcatgcatatttgcggagttcttcactgtctcttgaatctgattttatatttgttcgttggccaatcaccgaaatttcgggtgcttgtttttccaccggagggatgaaatcgtttttcattatatttgctgtacaacgctcaatgattctccaatatttctaacttttgttatgcctcacgattgataaaccgtttttcacactcgcttccattnncaca

SEQ ID NO: 6543 - DNA, 601 bp, Gossypium hirsutum
  misc_feature (40)..(41): n is a, c, g, or t
ctgctctcttctcattatttttttgtttctagtattcacnngtgaatatccaactacaaaccgatttccttactaatcacttcaaaaatccacgcaccaaaattaagaatctccacatcaaacaagtcacaagtggcaggtaaatttcattttttgttttagtgtgacaacttatttacaccgtcttgtacatgctttgcaggatcgagcatcagtctaagagaggttgccctgctctgccaaaaggtatgctaaaccctgcaatcctccaactgatattttcatttcttacattcaagacaatatgtttcgatcatatatgctgctttacctttttctttttgagttgtttattaggtggagaatcacattgtagtagcctgccccgtgtggtgatatggatcaaataacttgagcatgtggtgaagcaaataaatcacttgcaatcgtttgtgctgcagaatcaatggctgtgtatgcagcctgctgagatgaatggactttgtagcaattccctgtcgtatccaattttggggaattgatcctggaatacggcacaagtactgggtgtattaattctgtatcttttgctaataatgca

SEQ ID NO: 6544 - DNA, 587 bp, Gossypium hirsutum
atgccaatacctgcacattgcctagaaaagaacaaataaataaattaaaaaagcatcactatccaaagacaagaataactccagaatagtccagaacacgttgcataaaacactcttaaacaacaccatgacggcacacatcatgttacaagactgaaataccagatgcagatcatttttatgacgccaatgcttaatgactaaataataagatgggtcacaaaaagaaaattgtgaaattagttaatgaggattttgcatgcactaactcgcagctaagcagtagacacattaccaagttaggtaacatctgatctagataggagttgaacagggtttaatggaatgccaaaactattagacacatatcagacatgcaatgacagggtaagaagggatagatatgtacaaagtacaggttttagaatggaggtgcttgtgcaagattataagaacacaaaaatagagaggaaacattatgggacacagaagagatatgacggaaaactgaatttcatttcagaaatctaaattcagtataattacaaactacatagctttttatagtagagggtggacttgagacc

SEQ ID NO: 6545 - DNA, 651 bp, Gossypium hirsutum
tatgtgtgcgtctcgggtctcacctctccacaaacgcgctaatgagtttcgggtccaactttcactctaggcctatattggtcatatgccaaaacccgcttcactcaagtaattttcaatcaacgatgatggaggaccaggtagattacaaataaaacattgtaacactcgatctactgactattataaaaaaattataaaaaaatattaattgaattataaaaataaaataaaaatattaaataatattaaaaaatgaaattaaccattaccattttcatttggtcaacagagatatgtttatcatcgagacgaattaattgtcgagtcattgctaacacgatcaaatttcttagaaattataaaaaaatactaattcagacaaaaattaaaattttagagagctttaagagcttttttgagaaatttagagagaaatttgaaaaaaatataaaattggtgtgaaaaatgggtggggtttttataatctttttttccttaccgttgtgcccaacggtcagattttttaaacggccgttggagatgactgttgggagattacacggggaaaaacgcgtccccgtcagggctttttactaaagcgcgtccacgtcaatgcgcttttgcctgacacaagaaaaatacattccg

SEQ ID NO: 6546 - DNA, 405 bp, Gossypium hirsutum
gttcaagatccttgctctctttagattcgtctttggtggaggcaacaatggtagtggggtggaagaaacggaggaagaagtaaatgtttaatatttttatatattttaaaatatacgtgtattttatatatttttaattttttaaatattgttcttttttcaaaaaccttttcttaaaatttttgttctttaatttattatattaaaaaaactatttacgtatttttatatatttctttgacttttttagaattaagataaaattgaaaccatttgtaaattttgagaattaattttatttaaaattatgactaaattgatataataagtaaaatttgaggaatgaatttattattatactaattttttaactaccatgtcaccctttgtcacacttaacgacac

SEQ ID NO: 6547 - DNA, 593 bp, Gossypium hirsutum
  misc_feature (563)..(565): n is a, c, g, or t
cattttggtatgatgtgtgaccaaaattgtcacattgcttcagccattcatagcacttctgttcttgacatttgaatgtaaatgtttcatctaggtttcacataccctgcttagtttggtagactccagaacaggtcagccttttcctgatactcaaaaaagactcgccatattcacaaagatgcttcatagtggaataccacaaagtttcaattggaagatgcaacctcagtcaccttggtcagctcaggttcttgctaaggacgtaaaagacactgctggtattatctgtctattaggacataaatgttacagttttatttttttatgaaaacttaggaattcttttcttgaaatatatctgcatgataattatcctagagaagaatttactaacatttggttgaacaagaactgcttcttgaaatgatagttaaaatatgattcctgatgattgtaatttatgacatgttatgtcatgttgcagtttcacaagtgcataccttgtctgactgtcctagcagttttcactggaatgatgatatccttgagagggatttgtnnntcagacaaccactgttaccatatggcca

SEQ ID NO: 6548 - DNA, 550 bp, Gossypium hirsutum
ttcattccttgatttggcgcacacgtccaggcaggcagtaaatacaaatagttaactagggttagagttgctaatttttgagtttctttcatccattttatttttcccaaatcctaatagtcgaaaacaattttttgtttcttgttttgcttaggtaggagagcgaagtgcgtctgaagtgacttgtgatggtcttatggatgaatattctgagagctttgtgaattgggtaacgcatggagatttgcttattccagtaaagtttacttgccagtagttgtagttccatgagtagaatttatttaaactgcaattacagccaaattgaatccatccgaaggatgtgagttgatttcaaaatcaaaataagtggctgaagatatacaagaggtaagtgggggtacctgatatcacaccgtatgggagggggaaaaagcattaaattttagctgttgtaaatgggtaccaataccatagctgctaattcatttttggagctctctgacggcctcaatctacaaagaaaaaggattaaaaaaaaccacccaat

SEQ ID NO: 6549 - DNA, 617 bp, Gossypium hirsutum
aagatgaaagccttttatttcgacttattactcttcgaagtctttgtaattttttttgaaataatactcagattgggctttattgaaactagtaataaacaaataagtcttagaaacataaaatagagcaagcccagtaacaagactaggccaaacggaaaacaaacagaagcataaataaaagcaaacctaatcacctaggaaaagaaaaaaggaaacaaaaattgcaaaacattaattcagccgctccacctacccaatcagattcaaaagctattaaacgtcctgtctcttcacctgttttccttcttcaagacgttttgaaccacccaagagctttgaaaagtcactttgatatatgctcttcaccatttccttccttccatttctccctttcccgtttcaatctggttctctcagccttccattttctgcttgaaattttgcaccatcagggactcgtccgaccaggtaatcccctctgtttcgtttattcgcttctgttgctaaaatatgtgctaggctatttgtagatctagggatatgctcaaacttgcattctttaaaataaaacgaaagctgatggatgtcatggataaacgcactcaccattgatt

SEQ ID NO: 6550 - DNA, 643 bp, Gossypium hirsutum
catcgttgtgtccgtcgactatcgtcgtgcccctgagcataggcttcctgctgcttacgacgatgctattgaagcgttgctctggatcaaaaccacccaagaagagtggttgacacaatacgcaaatttcaccacttgtttcgttatggggtcgagttcaggtggtaacatagcctatcatgcaggaatacgtgtggcggaagaagccgacagtcttcgaccctggaagatccgagggctaatattgcaccaaccattcttcggcgggtccgtaaaggttgagtcagagttaagattggttaatgatcccgtattgcctcctggtgtgggggacctgatgtgggaactggcgttgccaatcggagctgaccgtgaccacgagtactgtaatccaacaacaaccaaggggacaagccttatggagaagctcgctgcggtaggatggaaagtgttggtgaccggctgtgacggcgaccctttaatcgaccgtcaggtggagctcgtaaaatcaatggaagaaaagggtgtaaaggtagtgagccattttcgtatgggggatcatcatggagtggatattatgcagcctgataaggccaacgcactgtttttggtcttggaggattttattgcatctgcaacctca

SEQ ID NO: 6551 - DNA, 639 bp, Gossypium hirsutum
gcatcttgagggatgataaaccagataggtttctgtattccacaagctgctaatgaatatgcttcaaaaggaaacaacaatacaggcagtagaaactttgaccaacagaattaccgaatagttggtctgagatagtttgggcatgagtggcttgataaactaagatttgctactaaattctagaacgatttgggagaaggaagaagatataagaagaaatttgtattagagatcacaggtttcgttggtcgtgatttagtttattacactattaagggatataaatgtcttcttgtgctttgtatgggaggagtaaggtatgtcttgactcatgagtgaccgactttcacttgttttacctatcatgttaggagggaaaatatagggtgtccgtggtccatgttttaatctttttgtttggaaaagtgatttccccctttcttgggaggcacaggctcccttgacaatgcattggatcttccagaagcatgaattattatgagggccaatgtgtctaagaggccatcattgatttgtttgtgatgaacattagtttattttatttggttaaaacaaagttttatagaaggaaaactaaatcatgcaatcattgtgctcagttgagcaggaagtattgga

SEQ ID NO: 6552 - DNA, 645 bp, Gossypium hirsutum
tcttcatctgtttgtagtatcttctaatggtgttttttcttttcttttcgttttgtcctattctttcagaaagtattgcaggagtttccaaacacacttgggagagcctagttggtgctgctttaggttctcgtaataaatggcataatgtaaaaaaggttggatttggagaaattagcaaagttttagaccttgccaaggcctgcaaatcatcctctcaagtactatttgctgtcgctgattacttggataatgtgaatgggtatgttgtcatttctgtctttctttctctctctctctctgtctatatatatatacacatacatatacatgcatttttgaaaataacccagggttgagtggttctctctctctagtggggtcaaggcccatctggtgagttccccctttcccactggccttgaacaaatttccaaacgcagatagaacacatgcactcatgaagcatgatcattctggtcttgtttattttattcttaaagaacacagtcacccatgctctttctgatcatgtaaatctgttgtgcatgttgatcactggttatgtctgaaaatatcgtacaattgtaggcctgcagtgcaagctgatagcagcaaggaaacatatcatcccttgcttaaagg

SEQ ID NO: 6553 - DNA, 598 bp, Gossypium hirsutum
  misc_feature (550)..(552): n is a, c, g, or t
tctctgtttttatttaattttaattgagatagattcttatattttttcgaatgatttggttgctttctgttcttttttctgtttcagctagtgtttatatcaagatgaaaaagccaaatgctgccattcgagatgccaatgcggctttggaggtttgtatgtatatatttacatatattgttgtttgccttcgtttgaatgtgtgcacatgctcgaaggataaatgcttaaatggtaattatgtaaattttaaaccatgtattgacttgcttgatatgtaaggaacttttgctgagcaacattgtgttccatatttgtttcctcattttttatggattcatgagacatatttatcctcattcttgtctcgcagattaacccagattctgctaagggctacaagtctcggggcattgcacgagcaatgcttggtcaatgggaagatgccgccaaggatctacgcttggcatcaaagttggatcacgatgaggaaataaacagcgtccttaagaaggtttgctctttctgtttcattttttttctccttgcnnnagtgaatgtctatatagtgttcttgccctaactaactgaactctca

SEQ ID NO: 6554 - DNA, 520 bp, Gossypium hirsutum
agtttttgttgttgatttatggcaatatatagttttctggtcatgacaatacttggaacatgtctgattgacttgatcacttcttgctgcagttacatcgagcacaagagtgaccactggtacccggatccaatgattattttcaaggaacttgaagagttaaacagagtgaggatagcaatatggctcacacacagaatgaatcatcaagacatgggagagaggttcacaagaagagccctcttgatcgaagagatggttaagattttcaacgacttggatatcgaataccggttatatccaattaacatcaatgtgtgtagcgtgcctcccatggcatctgatcggcttcctcctaagtggaccggaccagccagctgaacaaaataacaagctagctgtaaaccatgtcttcaatgtcaaagctgtgagtagattttactacttgtgacattgtttccttgataattagcttagatgtttagctaataaattaatcgtataatttgtcttttggtag

SEQ ID NO: 6555 - DNA, 406 bp, Gossypium hirsutum
tctcgccggtgagtgaccacgccctctctcttctttccgtctgatttctgtaaatttttatactactttattttctttgccaatatcaagactccctttgctttgtgtatcagcggtgacaccttacaagaaattaaaaataaataataattatggctaggagatttttttggtaaactatacaaattgtgttaaaattttcaatttaggtattaaggtttatatttcttgctgttttggtcaccacagttaaattaataatagaaagtctaactggtatgattatacatttaattttcaatatttatatattctatcaattagatcctaattttaaataattcaataaatttaactatttacattacaaattttatcaattgatcttcaaacttcctaaccaaag

SEQ ID NO: 6556 - DNA, 657 bp, Gossypium hirsutum
aatagtgggagtgatgggcatcgttttgatggtaatggtgggaaagatgaggaaaatgagggtgatttgagagctgaagattctgaaattcgaatggatctgaccgacgatttattgcatatggtaggcagtttgtataatctacattatatgttagtttttttttataatttttgtattgtttaatcttattgaacctttttgtttgtttttcctgttttcaggtgttctcgttcttggatcatcggaatctttgcaactcagccatggtttgtaggcagtggcgatctgctagtgctcatgaggatttttggaggtgtttgaactttgaaaaccggagtagatctcttgaaaaatgtgagttttagatttacttaatatctttacttcgttttcatttggtttatacagtgtattccaagcaaatgaagttcagaaattgattaaatttgacactttcttttttcagataagaaaactttatgagtatgcaattatatatcagttgcgcttttatcttttataaattgagaattaacatgtttggtgcttgcttcctgagcaagagaatactcacgtcatatgttacagatcttcataaatagctcaatctctattaattgtttgttcattacattattttgcatgagccaaata

SEQ ID NO: 6557 - DNA, 414 bp, Gossypium hirsutum
  misc_feature (408)..(409): n is a, c, g, or t
atagacaattgtactgcttactcctttccaatattttaagaatgttcactcgtccatggcatcatcaggcttgttgaatgttaccccaaacaaatatatttgttttaattggcaaaaggatctaaaaacccttgtaaaaaataaaaaaaaaaatcaattaagttcctaaggaaaagtgcactcaattgagctttgagtgacaaaacatcaattaagtcctgttagtggaaactgtttttatcagtttgactattaacgaattctgactgactaatggaagcaatgagaagcttacatggtatgtcatgtcgataagtatgctgacttgacatgctacgttagcatatattttaaaaaataaaaaagatatataaaagaattattaaaaatgcatgttcggaatgaacnnggaca

SEQ ID NO: 6558 - DNA, 618 bp, Gossypium hirsutum
tgatacctatttttttccattttttcctttgaaatgttgaacagctttgcgcagaatctcatcctggaagtcaatataatttagccaaattgaaaattcattaaatattagtgttactaaattacagattcaagatggaactaaatttgtggacgcagtaacacgacagaacaagatcaataaagttatagacagaaaagcaatgtcttaaaacacaagagagcagccatagagttggaagaatacctcttcagctgtccattgtccttttgtagaacgtcttgtaggaccagtagtcctcctacggaaggattgcaaagtcagcaaaactcagcagttcataaaacaatcaatttcttgtaagagaaaataaagaactaaacatagtgaagggaggagaacaacgcccaagaacaccaatactggattttaattttcaagaagaggtgctaaaagaaacaatcacatcgggttttaaaggaaatacccatgaagagctcgcattctctgagcatcatcgctgatgctgagcccaaccgaaggggtcgatactgttctgtcactttccatagttccatacggcaattccaactctacaacgcttctctccgcaatcta

SEQ ID NO: 6559 - DNA, 657 bp, Gossypium hirsutum
atattttctcttttttttcttttccggattattataagttattatcatatctatttttttatatataatttttaaaattacttataatctctctcgaacttttaaatagaaaaataatatattttaacatactcaaacgattgatcctcttatattaacaataatactgatatcggttgaattaaatataaacaaataacatttaatatatatattaaacttgcttgttaatatatgtatatatatatatgggaggtgcgcatgtgcaatgattgaagcccatgttaggagtggaatccaatcatttgcaaaggaaaggaatgtgtgtgtatttgcggatgtatatcatatttaattgatactgttttgcttttgtttgtttataatgtcaacataatgttttttcgtttctaattatccaataaatcattataaaattatcatagagatctttatattatagaatagatatgtctataggtcaggtctaatttaaaaaatgagaaaatttgaataaaaatataggctccaaaaaatagtattgggcaaaaatataaggcccgtttagaaaataagtcgggcctcgggtaagattttttgctcgggcttgatccgaatttgaaaaaaaaattgttgttttgcttctatgttgctgac

SEQ ID NO: 6560 - DNA, 687 bp, Gossypium hirsutum
aataaaggcatgaaaggtactaattcaaacacaacaattgaggatactcatttcagcaaatattcacttgaattccaggaagacaattggtcaagttttgacctcatttctcatggagaaattagagtaccactcatcaattaattgttgcagatacccataacagaataaaaataaccttatcttgtaaagcaaaagcatttttcttgctgacggtttcagtcttcaatttgctactactgatttcactgccatcttttgtccttgcctgaggtacactgtctgacctcattttctggttaccgaggacagatattgatggagaagatccctgagccattatgtttgattcttccacagtagcgttgtttcctgaagcaccttttctgttatccaacctagaaaacaggcccaatgaattgaatgcttgagttgataactagagtaaaaacttcactactttagtgatattaaacaaacgacaaaataaatttatacacagagaagcaggaactggaacttatagaactcgaaagtgtagagggagggaagtacagtgattcagctagctgcctccctgtgccattaatcaacttgctttcaacatgttcaagggcagttgaagcttctttaccattgtgaagttcagtttgagcaaatggcttctgtgactcatcctcattgtga

SEQ ID NO: 6561 - DNA, 564 bp, Gossypium hirsutum
tgagagtgattggatctagaattttgaatgaactcgaaatttcaagtgaaagattactggttttgttgatcgaaatttgaaactaaatagtagaacaattcttttactgttttataagcagatcagatcggtagcgaaatgcttcggctaagggcgtttcgagggaccaatgataagattgtaaagatggcagtgcatccaacgcatccttggttagtaaccgccgatgcctccgattatgtctccgtttggaactgggagcatcgtcagattatttacgagctcaaggccggtggtgttgaccgtagacgtcttgttggtgctaaattggagaagcttgctgagggcgatggttcgtaatctatttctcttttgatttttaatcttttttttcttttgcgtttgatttgatttgatttgacaattttttttccacttaacagcttccaaagggaaacatgcagaggccattcgtggagggaggtaattaattagtagcagtgccttttttttagcctttctttttccattctttaaatcgaaaatctgaaagcgaaatctgag

SEQ ID NO: 6562 - DNA, 608 bp, Gossypium hirsutum
aaaaacagatgggtacaaaccatccggaacccaatgcaaataacaataaaccgcaaatggttcaggttcaaccttgttggtgcagcacacggcaggattccttcttaacgggtgttttaggagaaggcaggacaagcttatctctggccaaacactcaaatggcggtttagggacaaaaacaagtgaatctccaagcacaattaggactgatgataagctttgttctagtaaagaaatgcccttaactatatttccacatccaggtaacacatgctgttttatacacagggtttgctgtatgtgagtgaacttgaactgcaatcttagttcatggattttaagtgtgcgataaaaagggtggctcagtacctggctttaagatcatgattaacaagaattcaatgcaccatttgttactaatcagctcctgtcttgttataatgagttgcaaagaacgtaacttgcatgatattgtattgctagaatgttttattgaattaaaaacattggtacagttgcctattttaggtaataatttgacttcttaagtgtccgcagttccacactctaaccattgaggctaagttctttgtgtacgcatcactcg

SEQ ID NO: 6563 - DNA, 653 bp, Gossypium hirsutum
tcaagaggcagaaacgaagcaaaacagtagcaaggaacagaaaagcatatttgtatttggctatatagccacaaacacaaaaaaatgtgacacacacgatcaagcaatcaaaaaaaacacaaaaaggttgagtttcagtctctgttatacttttttcggttctttatattttattttatttttatttttttggtgttctaaaatcagttttgaaacaaaaataaaaaagaagagaaaagaggacttacccgaacctcggagccgtaacatcggagccctactccgtcgttggaatcggcttcaaaaaaggaaaatggggagtctgttctctcgtgcttttgggggttaaggaaacgcgattttcgggcactttaaaaatagaggttaaaaacccccttttcgtgactccgatcgccctctacggcgacataacggcagcgcaaggatgggttctttaaccctagcagatgagagacatgaaaagggggggtattctgtttgggaaaataaaaaaataatagaaattggtttaagtgatgcatcaccagcgattaaaacggcgccgtatagggcctctgttcgcgcgacccgacccatacccagggggatccgcgcgtttcccatcattgggatatttatgcgcgaggtcccta

SEQ ID NO: 6564 - DNA, 547 bp, Gossypium hirsutum
  misc_feature (520)..(521): n is a, c, g, or t
  misc_feature (524)..(529): n is a, c, g, or t
  misc_feature (531)..(531): n is a, c, g, or t
  misc_feature (534)..(542): n is a, c, g, or t
tcacctgatcaaacttaaatatttcaataagcatccaattatcaaagcatagccttcatgtagccccaagtaaaaggctgaagcacaaagcacgaaccacaaatgagtactcagtgtgcggatcccatgccaaacattcaacctcagcagtcaccgaccacttaaaaccggaatgagtgggcactcttccatctttctgcaacatataaccatggtaaaagtgatgaagtctgactaccttgaaagcaattaaaggagaaaaactgaacacaaattacttcgtcagtagctgaaagcatgcacaaattttatgcaaatgaatagttcaattaccattacaactgaacgatcaaacgatccactaagaagaacttgtggcacatgatgattccatgcaactgcttgaacctacagagtacacaaagaagaaatttcaatttagagcaacaattaatagcaacattcaatatcaattaagtagttacaagttacaactgaaattgtatagaagtcaaaatanngtnnnnnntnccnnnnnnnnntttac

SEQ ID NO: 6565 - DNA, 647 bp, Gossypium hirsutum
  misc_feature (37)..(38): n is a, c, g, or t
tttccaagatcatttattgttctagtttagatgaacnntcatccgagtagtagatttcctgattatctttgtcaatttctcatagttcccgtcaagcggtattatgcaggctggagggcactacatgcagcaacagcaacaaactcaacagatgacaccgcaatcgctaatggctgcacggtcctccatgttgtatggtcagcaaccattttctgatctccaacaacaagttctgcatggtccacttggcatgagctccggtggaagcacgggtcttcacatgctgcaaagtgaagctagcactacaggtggcaatggagcacttggagctggagttttccctgctttcaggcatggctcttctggagaaggcaagcaagacatcggtagtgcagggtcagccgaaactcgtggagttctcggctgcgattgacggcctaatgatctgtctactatccagatttagcatagttaagaagatgaatttaggggatatatattttttaaaggaacttgtttctgatgcaaggaacaatgttaggacacaaactttagaccttttggtctgtgttttctagtacgagacagcatcttatggtaaactaaacatgtaatttttgtagggtctcatgattctactttccaaa

SEQ ID NO: 6566 - DNA, 639 bp, Gossypium hirsutum
tccgtcacggtgccgttttggtttctggaactaagaaaccctagtaagaaccggtatttttttgtttgttttcttttcggtttagagtagaagcacttatgttttcttagagctgggtaatttggggggaaaaaggaaggaaaacggtggcgttttgttgggggtggtattgcctcgtacgatttgatgccgcaagaaccgttgccttgggatcggaaggatatttacaaggacaggaagcacgagagggcggagttgcagccaccgcctctgttggcagctcgatggagagaggcgtcttctatgtcgtcttatcagcacgggtcctttagagaattcgctcgttggggatccgctgactttcgtcgtcctccgggtaagttatttcctcgtatagatttagtttgtacatcatgggatttgccatatgatttttttttggggcggggggagtaagacagggttgatccatgggtcttctaggttttgatttaatttcttttgagcattttgatttttttgttcttttgtttcattcgagaatatatgttcattattacagttgatggaaaatcttttccctttttgagtaacttttgcttttctcgttttgccgtatcaaaatcgacgctccctggg

SEQ ID NO: 6567 - DNA, 530 bp, Gossypium hirsutum
ccttttctcttgtatattccaacaaaaaaatctacacggctatttatactaaaagagtaggcctaactaaagaaacataatcaatacattaaatctataatcctaattttaagctaatctaatccctaaaaatcaataatgagattagttgagataaattgtctacagttaagcctaacaagtagcctaagatcatgataattacacatctatagctattcataatttacaatctgtaacaagtatcaagtatcaagtttatcagatagtctatgcagtctttgttgttcccattttggataaactcaggttcagcatttctctacctcgacttgtggcctttcctctctaagaggtgctttattatgtttttcaactcctaaatagtttgaacgaagatgttatgtgtgagggacttctgtttctattctctctttacttgcagctattacgattgctttatgtctttaagagattctttgttttttttttcatatgaaaattcataattaatcttagggccagttctt

SEQ ID NO: 6568 - DNA, 682 bp, Gossypium hirsutum
  misc_feature (26)..(27): n is a, c, g, or t
atttattttttttcaagccctctttnncttgcagaagaaaaataaatgaatatcataaagcattacaacgcaaatcttgttgcgttccatcaaacggaaaaatcccagcaaccacggtgtaaataagtcgaaccatgcaatttcttttttaaaaccattttcatcttatgcgtgatttaggggaagggaactgaagaattagggtaaacatggtgaaattctttttttttaccattttttttaattttaacaatttatttttattaccgattgaatcttagttcaattgacatcgatattgttctcattgcaagaggagtgtacattatccaaaaaaaaacagatatgataacaacctataattagattaatgttcaaattatgcttatttatttttcttttgttaaacgaaaattaaaggaaatacaattttaaatgatgtagcactgtcccattagctgcaactattttttttaacagctttaatggggaaggctaacttcaataaggaaatcaaaatttaagtacccaaaccagttaaaaaatagttaaagacaatagtttaatatgctccaattgaattaagcctatctataacaatacataaacaaccgtgagggtgtgaaaagagttgtaaggcacacaggagattttgcgtcaatgccaattatacttggctgac

SEQ ID NO: 6569 - DNA, 631 bp, Gossypium hirsutum
cattcaggggaaggacaagacagaagacttttgccaatgttcttcgaaaagatcttaaattcccaagaagcacacaagtaccttctcttctttctcttttgcatttactaccttttgacttaaaaagggtagcatataatacagcgagttatggattcaaattttaaaccttccggctgacagcatgaatcaatcttgaagcacttcattccttgtgcttcttttggtagttatatgagacaaagtaatccataaatatgataaaaagtaagattgaagaaatgtttagaactataatatcacatcgtattacgggagatttgacacacacatatatatatgttggatgagtgcaggtaagtctgcatgcaaagcagttaatatttcgattattagatagagatccaaaaagcagattaggttggcgtgaaggtgcgaatgaaatcaagcgacacccgttcttcaaaggtgtaaattgggctcttgtgcgctgcatggtacatttattatgtccaatcccttcgactcctctaagcaaattcgtatttcttatataaggatataagttttgatttattaatgccacagaatccacctcagcttgatgttcctggagctctcaaggaagatc

SEQ ID NO: 6570 - DNA, 556 bp, Gossypium hirsutum
gttctaggtgttctcaagattgatttgaagggctggtaccaccaaatcagattgagaggttgagatgaatggaagacaacattcacgactcctggcgatctttatgattggttagtgatgccctttggcctttcaaacgcaccaaacacatttacgtgggtcatgaatgaggtatttaagaaaattttgaattccttttgttgttttttatttcgatgacataatgatttatagtaaaagcaaggaagaatacctatctcacttgcaacaagttttgcaggtgttgaaaaaagagctttatatgaatttgaagaactgtacttttttgtgtgaagaagtcatgttttgggtttttttttttttggtttttggaaggggaaaaaaaccttttttaaaaaaggttttcccccaaaaaaaggggggggcccaaaaattttaaaaaagttccaaacctttttggggttaatttttttttaaaaaaggtccccaaaaaatcccaacctttttttttaaaaaaaaaaggggaaaaaaagggttttaaaccaaattttaaaaa

SEQ ID NO: 6571 - DNA, 443 bp, Gossypium hirsutum
  misc_feature (293)..(293): n is a, c, g, or t
  misc_feature (398)..(398): n is a, c, g, or t
  misc_feature (401)..(401): n is a, c, g, or t
  misc_feature (423)..(423): n is a, c, g, or t
gattgctatcgcaatctaaaaaagaactcgtttgaatgcagaggatgcaagaataaaactgatatagttcaggtaacccttttctttccctcgtttcattacatctttctccatcgtcattccttttgtgtatttttgttgctaaagaatgctcctacatgggggtgtaatcgagctgagctgagcttgaatattgcccagctcgattgaacatctgtttttaagctcaagctcgattagacacgtatacgaatttttggactccagcttgagctcaatacctctacttattnttgattacaggctagaatgcaatttattaaattgaagatatgaatagtctctctaggcattcaagtcatttattactatgatcgaactcggctcactaattaccncantaaccactcattttatcgattnctactctcgtaatttgctcg

SEQ ID NO: 6572 - DNA, 650 bp, Gossypium hirsutum
ttacagtgcacaccaaagtcttcaatcttattcagaggaatggtctgatattcagagataggatcatcaggaggcttatatccttcagggtatgtcctgaaagctccaatctcgacttttccagcggaaacagtccttgttgggtcaattacaaccgccaggaagggctcctggaactgctggttaagcatttgggttgaaacatcaataccggacagccagcatccatacccgggatgtgaatggtaccatccaacaacattttccaatcgcccagcctacaaaataaaacaatgaacattcttcttaagagatgattttatagccaacattaccttgtttcctgacacatgggattaactaacaacacacagcaattacgtaaacaatgatacaaatacatataactgcaaggatataattgaaaaccatctagttcaactcaaattaaattaacagttattttccttccagaatctagacgttgcaacgactgtgagtaattaactcttcgcaatgaagggaaaggatactcataaaagcacacgcttattttactttgtatttccgtctccggacataattattaactctaccgtttgtcttgcctaggtttaaatacttaagttcctgagactgagctgattgaa

SEQ ID NO: 6573 - DNA, 640 bp, Gossypium hirsutum
  misc_feature (636)..(637): n is a, c, g, or t
tgatttcccactaatgttgcatagagttcagaactttaagtcttgaagtgaagttttgctttcttttcctcaataacttgctacaattggcctttttctatcctgtccctcttctcgcctgcttttttatgtttaatatctggattctacaatatacaaaaagtatcctaaatctttggtcttactgtcaaatcacccttcataatctttaaagtacagacaaatagtagtaaatttgtaaggtaaactgctatatttcatcctaaatctttcccaaatggagaaaacattttcatagttattgaagcagcatcaaactgcataaagtttctattctttttaactgttgaactggttactattaaatttaaaagaaaattaaatatgagaaacgagctttagggcactgtaaaatgctaattcctgtataaaatgaatttttttgtttctttttcatggagaaagtggactgggttggaaaaaaattatcagggaatctcttaagctcattagaagattgctttgattttgttttgaatttgtatctgatgctaaatatgcattacaaaatgaagctcatgttggtatgctcattttgcatttcgtattaatgataaggaccacttactctgccannaaa

SEQ ID NO: 6574 - DNA, 722 bp, Gossypium hirsutum
  misc_feature (658)..(665): n is a, c, g, or t
  misc_feature (667)..(671): n is a, c, g, or t
  misc_feature (673)..(677): n is a, c, g, or t
  misc_feature (679)..(682): n is a, c, g, or t
  misc_feature (686)..(690): n is a, c, g, or t
  misc_feature (698)..(700): n is a, c, g, or t
  misc_feature (716)..(718): n is a, c, g, or t
atgatggcaaagagagttttggctttggtcatcttcagatgacaaagcatttactaactacggcagatcaaaacctttacaacgaaataccataaattctaactaccaccaccataaaatactccccagtatctatacagtacactttctaactcatttttacctatttttctttctggctaccaaaaatagcctctcttgttacaagctttattcctctcacccatagctctgccatttcggacccgccttcgcacatgaaatgaacctctttgttcttggtagtcaccactcgaaatactccaggtttgttagcatcacccttgctctgccggttcttctcaaaggctgcacttggtcccaattctgcctctctgcatataacatttcttccacttgatttcccccaatgcagcagtccggaactctgcaccattttcatgtctttcgagtgaggattgccctttcctccctttgtatgcttcaggatacaggcacccctgacaacaaggttgcgagcgagctcatttagaatcacatgttcagcatcgtttttcaagatgacagtttttcgagcaagagagagcgcagtctcccctttagcattcttgaaatcacaatttgccccatgtgagattaagagctcacacattgaacnnnnnnnntnnnnncnnnnntnnnncccnnnnncccccctnnntccccccccccccctnnnttct

SEQ ID NO: 6575 - DNA, 638 bp, Gossypium hirsutum
gacagggaaggagtttggcggttaccgtgtcggatttttttaagtttattttaattaaagaatgtaaagtctcatttcctcacgatgtgcagggccgtcctatagctgcagtctttgtttgtttgtttaatctgcttaacgttcttgatgtttattatattcaagggagaggcccacgttgtgacatttcattggtgggaggattagtcgaattcatgcgcgtgcttcattcactctcacctacttaattaatggctaattaatcacatttagtcacctctcaatgattgttcttggaccattaagtcattgtaactgcaattttatcagggtcactgaacactttcaattagtttaatccaacaatgcatgaacttggccttcctatgagctgtactttgcctggttttggccccatctttggactcctggattagtaacagaataatgattttggaattaagaatggaagccaatccttgctaacattctctttagaatttggggtataaaaatatgtccctagttctttcctcacctcaaacaaacccttccttgttttccccataggcttctcaatttacaggagataagatggagtctgttgcagcttttcatgatggaccttgggactcatt

SEQ ID NO: 6576 - DNA, 631 bp, Gossypium hirsutum
tgccacgattgtgaagaggtagagcttgttcccatggcttcttcttcaaatctactgacaccactagtcttggagttggaggagccatggattaagctttggggaaaatagggagattgttgagatatttgtttcagtcttgccaaatgtcacccattgaagcaagtattgactcttgagtcttgaccaatactctacttgctgacaaatgggttcgaccatttttccaatggtcccattttggttttactagactgaaataccaaggttcactaactagacaacagggtttgattaaaattgccaataagaaacactggaagttattgtttacttgaaaaacgattaagaaaaattataggaacagctttatgttgcagtagaagttgaaagaaaggaaagtggggaggcaaaagatggaggtagaaactcacaatagattgatcagcatgcttgacatcttcggcagagtagtcacttgttattccacctccactgaaatccaccatttcaactctgaaaacctctccatctttaacctctgcaacaactggtatgtcggggtgccaccggttgtggaggggatgtttttgttcccatggctttttcttcaggtctataggcaccacta

SEQ ID NO: 6577 - DNA, 612 bp, Gossypium hirsutum
  misc_feature (38)..(39): n is a, c, g, or t
ttggggtaatttttactgtcaactattgatgtggctcnnctttaaatcattgcatgcgtacaattgcttgctgttaattttatctctcaaatctctttgaaccaaaagggggaatgcttacttgtttgtaatacgcagcttgtaaaaatggtaaattcattttcatgacatatttcatttcttctccattgtttcttttttaatggtataaattgtgaatctttgttaactttttattaacttgttgggtaataatactatttgcaattacgctcagaattttcacagaaaaattatatacaaactccttctcttaagtttatattctgagcgtaagattagtggttttgctcttattatccaaattcattctctagttactaatataatccctatagtgtatcatggtttagttcctaaaatcaaaatatacatgttattggactttttttatcaaaagttcccgtgttggtaaaataagctcttaggatctactatatatgaagaatggaaatttagtttgttctaatggctattttagcgaccaatatgattgtttgaaccagatttagtcacagtagcagtctatagagtggcattagaccagtcgac

SEQ ID NO: 6578 - DNA, 625 bp, Gossypium hirsutum
ctcccaactatttatgtatattgctacatatatcatgtaggttttgaggtgtggccctccacccatgaacaaggccatgactggacaccttgatgcactcggatattcaccggatatgcagttccagttctgatccttgtagactaagcttaagctcgactccgaatgtcatttgttgggtgcccttctgttataatcggaaccgctgctcagaacttgttataataagttttctatcaccatgattgaaaataatgtagacttgtgaacatactcatgtcggattcataatcagtcggtaatttacacccgataattacagccaaattcaaataataaacctgctttacgtccataagcacagtattaaacaaataaagcattagtttattttatataaaaataataaaattaattccacctgtgaataggttaaattttgctatttattttttatattttaattttgtcatgtttaattattgtattttaattaatttttaatatttcgatcattaccacacgataactattaaatttattaagttctgttatggggcaaatatattatcatatgtatattgttatgtcaacttattatttatataaaccctatgtgttggct

SEQ ID NO: 6579 - DNA, 524 bp, Gossypium hirsutum
tgaaacacagcagacctgttcaggcgagcttctgtacaatttgcgatagatttgggttgaggtttttgtacattggattttccatcattgacattgtactgcaccttttcaatctataaggatggccatattaaacaattcatttatcaaaattttctttgttgatttcatcttccatcagatttcaacaaatgaagacaattacattaaagtaacgaattggattgctacatatactaaaacaggatgttgtcttaactacaggatgttttgcaatgaagaatgcagttttgattaaaaaaaaattaaaacaacatttaatttttaaatttaacaattttttaaatttagtctttacacttttttagttcacattagttccggaatttgataatttttttttaatttgatctttgaatttgaattttgttcaaaaagtgatgatgtgatatttcgataatgtgcatcattatcacctaaaaattaaaaagaattatataaaatctaataaataacactatctc

SEQ ID NO: 6580 - DNA, 622 bp, Gossypium hirsutum
  misc_feature (613)..(613): n is a, c, g, or t
  misc_feature (615)..(615): n is a, c, g, or t
  misc_feature (617)..(617): n is a, c, g, or t
tcgaatgaacaaagtaaactcccctaatgtctttagagcagcatatctctagctgattgatagtgaagggcggtaagaagccctattcaagctcattctagcgaacgatccttgccaacttcctttccaactaccttagcgtcatctcgggaagggggattggtttgatgtgcctaaataagagggctcgccagctgacttacgagtaccagcagcccctaccattataaaaatgctaaagctttccttatgccgattcttatttctaacaagagaagagagaaggctctgcaattgcctgctcctttgacacccgctcctattcctattatgacgattgcgagaagcccgagtaggacaaaagtaagaaggaacgggaagacacgtacgggacggaagtcagacttggctttagtagagagggaagaaatcgattccgttgctctggcgtcggaggaactccgtcttgcgttcccctttttgtcccgtggacattcgtagtggggcatctttttcgttcattcctccttagccggagggcactctttcccgtcgcttgagagctttcagtttaagaaggtgatccataatcaatggaattcgatgctgcttnangntgctc

SEQ ID NO: 6581 - DNA, 565 bp, Gossypium hirsutum
  misc_feature (32)..(32): n is a, c, g, or t
  misc_feature (550)..(550): n is a, c, g, or t
  misc_feature (553)..(555): n is a, c, g, or t
tgtccttgagagatacggatgctccccatctncttttaggccaaacaaataaataaaaactaaaaactattaactacccaaactatgtatgtattttagacatccattgcataaaatagatgaataaataacagatgtctttcttcatgaataaagctattaacaacccccccctcttggtgggtacataagagctcacacaagcttaaacatatacaagctctttttatggtttttcatcttgctgctgttttaaataatgaggcaggcttaagataggatctatgttatacattgatattcttgcctgtttgaaatttgtatcattgcttttgttcttatgggaatatgacagtgaagaggggaaaaaaactaattggaaattttacacccttgccacaggtaaaccgaacatccaaaagctacaattagattgtgtacaatagaagctggtgcatatccttattttaactaaaattatataacttatgcaatcagtgattaccactttcaccatcggaagcatcttcgagtctggcaattgcatcanctnnnaaaaaaaaaa

SEQ ID NO: 6582 - DNA, 649 bp, Gossypium hirsutum
tttgttccctttttccaaccaggtttgatatcaatggtcaggatttcctgcactggcaatgtcttcctgcaacacagacaaatttttaagacaaccttgttagcaagggaaccatcagcagccatgaaaatagttggcattatcaggcatgttacgatcttatctcggataggtatgttatttagaaacatgtacgaaatatgatcaagacaaactcttcagctctcttttactgcttacttatagactaaaacagatcaattaggaagttaacaaatacgcttcaatatatcattgaaaaccaataattgaatgattaatagtactgcaaacatatttcaataaatagatacttcttgttacttcagaaagatatcaaccaaattcaatgaacgttcagctggaaactcgaaaacacatacaaaaaggaagataagaagtcaaattagtaaaatgaagcatacccgctagcatctgcaatttctctagaaatcttcatcttctttgtggttcctttatataaatcttcaaggctacaaggcaacgtattttcaataggaggaggtttacgaggattctgactcattggccttccttcaccaaacgaactgaatatatcatcaccaaacatgccaccaaatgaccttga

SEQ ID NO: 6583 - DNA, 569 bp, Gossypium hirsutum
  misc_feature (436)..(437): n is a, c, g, or t
  misc_feature (466)..(468): n is a, c, g, or t
  misc_feature (513)..(514): n is a, c, g, or t
  misc_feature (532)..(541): n is a, c, g, or t
  misc_feature (547)..(555): n is a, c, g, or t
  misc_feature (557)..(557): n is a, c, g, or t
  misc_feature (559)..(565): n is a, c, g, or t
cacttctttatgttttaatcaccaaatttgctactgtctctgtctgaatatagatgatgaatgtttttcccaataggtcgagcagattcctcttcctttgttgtttatgcgtaccgtattacaagccattggtgcttttcctgcactggtaaggaatttatttctgctctattattaaatagtttcttccattggctgctctttatctcaagaaaagaataaaacctgtttaaagaatttaacatgataagaaaagatattcacgacttattgatgacttgatcaccctaaattttgtaggtggaattcataatggagattctttctcgtcttgtaagcaagcaagtgagtatttttatcacaataaactgacacatttcactttatggttcatgcttatattgttattaaattattggtttgttgcagatatggnnatacccaaagttgtgggtaggatttttgnnntgtgcactcttgacaaagcctcaatctttcagtgtgctgcttcanntgcatgtttcttttgtcnnnnnnnnnngaaaannnnnnnnngntnnnnnnntatg

SEQ ID NO: 6584 - DNA, 580 bp, Gossypium hirsutum
  misc_feature (549)..(550): n is a, c, g, or t
  misc_feature (561)..(562): n is a, c, g, or t
gaaggttgccaaaggttgagccttaagtaattccatttgagcactttaatgtggcggcattgaggaagatctattaatttcatcgagtcctgtttctatcagctcctccacgcgacccctcgtcccatggtgaatgatcttatttgtgactcttggttgttttgattgacggggcttcgtaactgcaacccccaatccgtttttaggatagaaattttcaatgagcaagaaaagaatctgtaaattgtgaattcaattttccccaccttcatttcaataatcaactcaaccatattgctgttgtagcatcattgtctgtgactatgctaacagggaaaaggaagggtgtaactgtagcagccggacttggaagagtgcatttctgggttcataatccacacagtccctgacattatgtagtgcatttcccggttcaagatcggcacagccctaaagctcgagtctcaacctgtgatattaggttagttggacttgaaagagtgcatttccagctcaagatccgcgcaggcttaaagtctagtcttctcnnggtgagacaanngtagtttttaggctgcct

SEQ ID NO: 6585 - DNA, 578 bp, Gossypium hirsutum
atagtgaagtggtcattggaccagaagttgcatccagacctgagatatgatcttacttcaaaatttgatgaagaagttaatcacaatctgcatccagaaaagcaacatgatcattatctactaaataaccagctgacagacccctcaaaaggggaccatgaatatgttcctaaaccagattcagagaactatttgacgctggaggggaaatctgtttactcttctgctatgagaccacatctgtttgatggttctttagcagaagaaggtctgaagaagcttgatagtttcaaccgctggatgagtaaagaacttggagatgtagatgaatcgcatacgcattccagttctggggcctattgggatgaggtggaaggtcaaaatgggattgatgtttcctctattccctctcaagagcagttagatacctttatgctgggtccttctctctcgcatgatcagcttttcagtattattgatttttcaccgaattgggcatatgtaggctctgaaatcaaggtaggctgtatttttttccatgaaaggcaagcaagcattgaaatatcaacatttcactg

SEQ ID NO: 6586 - DNA, 674 bp, Gossypium hirsutum
agtggataaaatttttaataggactagtttgttctttggtttaatgtacaaagactaatttgttctttctttttttagtagagaaagcaaaatgcagttcgaattataatataaaggctttcatgatacttttatcgccctcttttctctcttttcaactatcaccactcgtataatcctttataccctttggtaaaaccttgtacaaattgtacgaatttacataaattccaggacgaaaaccgaaccgaggaagaaagagaatggatgggggagaagtatttgcttcacttctttgagtatgaaactgagaaggaaaaaaggaagtatataatatggggtttaactgctggggttctggtaagagctgcttcattactttaccagcaacctcctgcttttttggaacaaaatcccaagttcaagttccctaaaatcgttgacagaaataccgtcatgcggtaaatgaaagtatgaggagtcagttgaatcacaagtgaagtgacaaaagatatatgttcgagtttttaattgatattagtctcgagatcgatttctagacgatcttaaatgaaagtacgaggagtcggtagaatcataagtgaaatgacaaaagatatatattcgagtttttagttgacattaatctcgagattgatctctaacgatatttg

SEQ ID NO: 6587 - DNA, 576 bp, Gossypium hirsutum
  misc_feature (55)..(56): n is a, c, g, or t
atctccggttagtccccaatcagtgtgactatctcggaacagataaacgagccgnnttcgagctggaaccgaagaagacaggatttgaaatgatgggtcgtcaccgaaatctgatactgatgtgttggttcttcgggatctcgatttaggtctacctgtatcaatctccacaattttgggactttcttcaatgttaagtgtatcaagagaagccgataatcttctactatgaaaagaaacagtgcgttcactccttgtatcatcaaatttctcctacaatatagattttaattaaaaaacaagaaaaaaaaaggtctaaattaaaaaaagcacaaaaaaaagttgaattattgcaattttttaccatagattttcgtgctttttgggacctgattgtagcttgtgctcttatcaatgcttgcatgccatgaagtgtagctgaagcttgttttctcactaaatatcctctaacaagtgcttgaattttcactaatcctttcaaagctcgtaatgcttttttagcctgttttgaaattcgaaaataaaaactccatgtttcaaaaacaaaacaaaaaa

SEQ ID NO: 6588 - DNA, 260 bp, Gossypium hirsutum
ttattgtggcttgacaagtggcattcctttatttaaatgtgcggtatgtatatcacagaaactaatcttctttttctctcagttacagtgcaaaattccaaaaaagggaacaataataataattggtaaacaggtttaatcctgggggttggattttgcaagaaacaaaaaaaaaaattccaccaggctcccccaaaaaaagaataaaaaaagaatggggcagggaaccaccgccaccaccaccggttggatggatggat

SEQ ID NO: 6589 - DNA, 467 bp, Gossypium hirsutum
gcccttgatggtcgttggttgacaccagctaaggttgcaagagaagccattgccttggtttctggttcctaactgccttttttttttcagttcagttcagttggcagtggggtgtttgggtttttgatctttgaaatggatctcaacaggacacgtggcaaactgggttttctcgagagagatatggagttccatttaggtcctgccacgtggatcaaacccagataaggctatccattttatgatcctcaaaaaactaatgggccacgttcatcgcctcaaagaaccaataagaaattaaatattgctagtgtttagatttttgtatttatatatttaaatttatgttatgttttcttattagacatttttatgttatgtatcttgtttgacaattaattatcttttatatcatattctcatacttctgtatctaatgttaaaatatataatcccacgtagaatta

SEQ ID NO: 6590 - DNA, 686 bp, Gossypium hirsutum
gtttaaggcctttcttcctgttgggaatctggatttgttgcattttcttatggtgtttattttgccaatacatattcctatctagcatatattggggagtagctctttatgttattatcaaaactgattttcctcccttttgtgatcttttcaaaattattcttctcatcttgaggtatatcataaatctcatttatctcgctgtaagttgtgactttataggggagcacggaatatgtgaaacaagttcttcctgccatggcagggagaccatagttatataagctattatataggttctaagtaagcctttttctggaagtagctcatttctattttttttcctattatctgttagattgaagtcaatgatgtgagtaaggaaatggacttggatctaatcaagcaaaatagtcaggttggttttcatctattttctatttcttacattgttatggttggttttcagggttgtgctacaaaacttaattgtaattggttgatgtgtttgtttcaggtggagagagtaattgttgatcgaatcaggaaagatgcctttgggaatgtgatgtcagagtatttagtcaagtggcagggattgtcttatgcagaagctacctggtaatggtctggattgatagtttaattaatttaaagttagtctctacgccacctactaacaggtg

SEQ ID NO: 6591 - DNA, 567 bp, Gossypium hirsutum
aaagcaaaaagggaaaaggggagagtctgtcagacaactgcgtgaccttcccagccgcgcaaggcaagctgagaacgatcctctgcggtcgaagtgaaaccagcaagggaaacaccagaccagtaatcacgctcagatcacatagtcgtggttcatcaactagacttggaatcctatctcctttgaacttgaggacatagaggtacgagcttatagaacatatcctattcaagtaaggtcgtgcccagtcaagccttgattttattttaaataccactggactttgtcttcccttttcgatatgggatactgattagtttctgacaaaaccaatgtttgttttgtctgttccgtaatttctcgccgccatccattcaacaaagttggatatatctattcagcactaaatacaatatagtttacatatatatcatcccagctattacattaacttgagttactggagtctattcacggttcattagcctgtttcatgctttcatcatagttttctctttagaaaatgcttgtctatcgactaagcttataaaatatttgcagcagagg

SEQ ID NO: 6592 - DNA, 612 bp, Gossypium hirsutum
aactttggtctgaaaatggatagaatttggataaaaggagaggtttttgggagatttaaaatgggttttggagattaaatgcaaaggagttgaaaatgctgaaattgttgccatttggtcttcaaaatttgtgcttttggatgagagaactaagaactgttagtcgattgtattatattatccgaattctgaagaagaggggggttttgattttgttttctgttggtggaaaaagggtattactttactgagcctgcttggaccaaccttttggtatgagttggatgagcccattattctgctacgttaatatatgtcataaatttctctactttttataaatttgaaatttaatccttaagttcttatttttcaaaatttatttttaaatatttttttatacaatattagaagtaagagatagaggtaatgcaatctaaagttgcttgtcaaaagctttaattaccctcccattcaaaatactttaagttattttatattttgatataattatatataatattcgttaaatttttatattaactttttatttcatgtttaactttttttttaagactacaattttatctgttacttaacccattactgctg

SEQ ID NO: 6593 - DNA, 678 bp, Gossypium hirsutum
atgggagtggcacaggttatgggcaacagattggtcggcagttttacagctgagtaacttttaactaagtagtgtactgcattccttcatattctagcctcttactgtcatagtatagcctaatatatacattcatttaagtcaaacaggcataacaggcaacatcggacatgacatggatacggcacgaccactatagagtatgtgaatgtctcgaaagctatataacacaaatcattaacatactaaaatttgtgtagacgtaaaacaccttaaacacaaatacatggcaaaatacactttgaaaacctgatttccctttagtatatctttcaagacaaacaatagaataacatttccaattcccaatcctcaaaagaataagggtttaatataccattggtacctgagtttggcttcaatattcaatttggtacatgaatttttttgtcccaatttagtacctgaatttagcttcaatattcaatttggtacccagactaaacagtgacctaatgaatatttgacatgtactctagtaaaaaaaaatacttaggtacttaatcggaaaaaaaccctcaggtactacactgaacattacctagagtttagcttcaatattcaacttggtacatgaagttttttgtcccaatttagtatctgcatttgacttcaatg

SEQ ID NO: 6594 - DNA, 668 bp, Gossypium hirsutum
  misc_feature (660)..(662): n is a, c, g, or t
aataggacaccagtctaaatataaaatttaaggattctagaattcattaacaagaaaagataagtaaatgaccagtttagtcaaacactggcataccactttgagagtaaatatatatgcatgtgaggcctagcatttttatcaaggaatttatgttgtcagattttactttaatattggattttagtgaaatacagagttaggtctggttcaaaagaagaaaacaacttgcattacaaaaaacttcacatatatcctcaataagcttattattcctttaaatattaggatgaccagttcgtcagcatcaaagaaaatacgactttagtctccaaactaaaaattggggtagcacttcttcaaaaaagtgactaaaaatgctaagtgctcctctaacaaacatacaataactagtaaaacaggaaatgaatcactcaaaagaaagagacagggagatattactatattagaattttagacaactcaaaaagacaataaatcagcaatcttcaatgaatcccattaatataagtagaaaaaaccaccccaagagcatatacttatatcagcaattatcaaagtcatataactgaaagaacggtaagaacattcagaaaatcttgcttctaattcataaacaaccggtttattaccaacctnnnatgaac

SEQ ID NO: 6595 - DNA, 644 bp, Gossypium hirsutum
ctaattgcctggttgcactccattgcaagcgcggtaagctccttaaacttctgccctatagcagaatcaagatcccaagacttatcctcccatgaatttcttgccatttctgcctccacaatgtccttctccacagcttgcatctcccttctcatcctctccacatctctagcattaaaggtttgcaactccactctcttcttaagctcctcattctcctcacaaattcgattcctctcctcttccttaacgttcaattccttctgtttttcctccaacaccttctccatagctgcaacccttcccgtaaactccgcgatcattgcatgaaacttcttcacatcttcttccaacacattgttttccttctccaacatttccttctccgttggcccagtctttaatccttccgctttagcttccagttctccaacactcttctccaaagccctgcaattctccaccacattttccctctctttctcaagcttctgcacgaactccttatctaaaacctcaactaaatcatcctctccacatataaatcgtttgtaacactccaatgcatactcagtcatgctattgttttgagcaaaagaagatatggagttctgacataaatgttcattgtagatcgcaagttg

SEQ ID NO: 6596 - DNA, 637 bp, Gossypium hirsutum
tgctatgacagaagatggtaaagcatggcaatccgatgttccggaaatccaggtctgttctaacattcatatcaacttgttcggattaatcatatcaatggtgatcgatgaacactgttacattcttttacagggacatcgcctaagaggaggactgcagatgatccaattgagcctagacggtaaacgattatacgtgacgaactctctattcagcgcatgggatcggcaattctatccggaactcgtggagaaaggttcccacatgttgcagattgatgtcaacaccgataaaggcggtcttaaaacaaacccgaacttctttgtcgatttcggagccgaacctgatggaccttccctggctcatgagatgagatatccaggtggtgactgcacttcagatatatggacttaaacatcaaccagtttcagccatgaagaagatcatccttttatatttgtaggactaaaataaaaataaaataacaatcagtgtaacttgtatgtgagtcaaattgatagataatgtaatgttagggggttaatctagcaatatattttaattctaatcgactgccagttaaatgccttttgacattggacttcactaaattaactggcagctaatccaactttg

SEQ ID NO: 6597 - DNA, 608 bp, Gossypium hirsutum
  misc_feature (479)..(480): n is a, c, g, or t
  misc_feature (511)..(513): n is a, c, g, or t
  misc_feature (527)..(528): n is a, c, g, or t
  misc_feature (530)..(532): n is a, c, g, or t
  misc_feature (593)..(593): n is a, c, g, or t
aattaattgttttactacacacttaacttctgcagatgggagacgtagctgaggacctaatttctggaactgttggaggagcatcacagttgatagttgggcacccttttgataccatcaaggttaagcttcaaagccagtctgctccactccctgggcagccaccgaaatatgctggtgctatggatgctgtcaggcagacagtagccgctgaaggtccaaggggattgtataagggtatgggggctccactggctactgttgcaggccttaatgccgtcctctttatggtgagagggcaaatggaggcattgttgagatcagagtctggtgcctccctcacagttaaccaacagatagtagcaggggctggggctggagttgctgtttcattcttagcttgccccactgagttgatcaaatgcaggttggcatcatggcttttcatattccttttcctatcaaattatagtttatcnntccaattttgttggtccacccctgtgcccannngggaagtttcaagnngnnntgagttttttaaaatatttttctcactttgtcatttgaatgggataactatcaactcatanatcttggacataata

SEQ ID NO: 6598 - DNA, 607 bp, Gossypium hirsutum
agcgctacctgttttttgtaagagaatcaaagaaaaaaaaaactctcttttatcttatatattttcgtaaaactacttagtattctacttaaaataaataaataaatagtttctacacattagactaaacaataaatgattttcttactaaaatttcatccatttttagtattaaaaaatatttcatgaggtacactacatgtaattaactggtaatttcatcgtcactcaagtttttaatagtaaaaatgaataaaaaaattttaataaaaatgatcaatttactttttgatatgccgtacaaaaattagtttacttattttttttaagtgcaggagtgtactatttttacctagatatttactattttttggaatgcaaggcattcatggccaaatcgaataaattttgaatagagtttatgcatagtattaatacatttgatataacacaacctgaattgaaatctaaattttaaattttatccaaatatgtaaataattaatttatgcctatttttaaacctggccatattttaaaaaattataaaaaatattttattttaaatttaataggtaaaagtacataaaggcctctgtataaggat

SEQ ID NO: 6599 - DNA, 609 bp, Gossypium hirsutum
  misc_feature (597)..(597): n is a, c, g, or t
ggctgtacagaagaaacacacacagaaaatactgataactgttttcagtttctttctctctctctcccgattctattctctctggatttcttcttcttcttcttcttcaattcttagatcagctcataacaatctccggcatgttttacatcgtgttgtggttcaccttaccgccgttgggatcgccgaacggagatccagagttctgaacccgaactcagacagataagtcttgctatgtttcgcctccagtcaatgtgcatcgctgcttagcctcttgtttcttttccttttttattgccgcctctactgtctaacctcgatgaagaacatgtttgcaaatctaagatgttcctagatttgttttccccaccccccaatgggtgaatttgatttcggttttcttttttttattggaattccatgtttattatctggttgtctctgctttgattttgtattgagattttgatttgctccgtcgtcaagtactaccgacacaagccatgggtggaaggtttcgattttgatttgcaatgtattaacgacgatcccattacaaataagccctggtttcgaatcatttgaaattggatncaaattttcggt

SEQ ID NO: 6600 - DNA, 672 bp, Gossypium hirsutum
gctattccattgttgcatcagacatcttaggtgtttaggaacataactagtgtttgtgtttgttttggatggcacataatcaataactgctgctgatcatcttaaaggaactcggtttatttcatatttcccttttacacctggttactattctgaaaaatttctaactatgttagccggattcctcaccgaagttgtagtaaaaatattgagtatacacaaatgcaatgatccagactgttcagtggttcaagctttgttccccacacagacagactcgaactcgatagaagaattgtgccttttttcctttatttttaatcttcccttgggatgctgacggtacacagtcacaatcaagtctaagcttgaatctattccaactgtattttcagaaatataaataaataaaaatagataataaaatatgaagggagttggaaaatagcaactgcgaatccctgctacttcttacaagtggggattcgagagcaagagcattgtttgtgttgtgtcctctcaaggctgcttaacacacagcagagagtggtcccaaatgcctgagggaaagcgaaagggagaattgccattgcaacgctttgaagaattggttttgttagtttaatgaatagtgctctgtttctggtctcacatactttcaggatgatggat

SEQ ID NO: 6601 - DNA, 584 bp, Gossypium hirsutum
  misc_feature (528)..(530): n is a, c, g, or t
  misc_feature (532)..(532): n is a, c, g, or t
  misc_feature (570)..(571): n is a, c, g, or t
gccttgctgaagcaaggttttcctcttcttttacttaatcttgctgtgttcatttggaatgattgttttgattgactgaaaaattttagagcctagaatcgatgtatttattggcttgctttgagccgtgtttcatcttttcttcttctttattgtgtttctgggtgttttattgtaaattggagggaaattttcgagtttcttttatcaattccactgtaataaaactgcaaagtgctatttagggctccagtatcatgttgttattgcaacttaagtgtaataggatgcttagtttgaatcatatttctcttggtgaaattctggttttgatccgtgttagatgtattacaaaataattaagggactgagaccgatcaagtttgcgacagcatactctttcaaagtgtaccctttgcattttccctttcatatcattaaatttacgtgcaaactctctcatattctgtggtgcctgtgtctgtggtgtgtgctgcgtgatagtgtgctcatatattctggtgcttnnncntatctgaatgaattttttcaggcaaacccaatcttacnnaggctccctgtcg

SEQ ID NO: 6602 - DNA, 662 bp, Gossypium hirsutum
agagtgacactgaatgcagccagcataggtccccagcagacctccaccataaacctcaagattgctacatctgaaatgtgatgataagcagacctgcaaaagcaaagaaaagctactgttaataaatcttgtgtaatacgtatgtcttccaggatattttggatgataaaagaacaaaaatcaatttaaaacagaagatggagagaatctatagaggacggtacaaggactaaatcctttttgtttaatgatgcatgttgtttatttatcaaatgtttaggcctagggtcaattaaaatgaaatgatgtcccgaccaacatcacaacctatggcatgcaaaagaatgtacaataactagcagctctaaggcaacagtacagctgttatttttgctgctttagctccctccaccactaatattccccatgatttgggtgtgactggttagcaatccacagcaactaatctcaagagagtgaattatatttatctagattcaatttacagctgtgaacaatttttttctttcataagtatatgcttgtagagtgtaataaaccattagtaaaaaagaattttatcattactatgttttatagtaagttgaacaaaaagacaaagtatatatatcatgactgccatagcttcagttacatcgcaa

SEQ ID NO: 6603 - DNA, 605 bp, Gossypium hirsutum
  misc_feature (515)..(515): n is a, c, g, or t
  misc_feature (553)..(553): n is a, c, g, or t
catgcaagcatttttgtgatacatgcatgccaaacatgagagcaggaacagaccatggatattcaagtcaactaacctggtgctgcatccgcacccacaacttgttcatctccgtaaagttttgaagcacaaattccacagcatccacgacagtgtctgcatccctgaagggatcaagaaagtcaaccactggtcaggaaatctcaacagaggaccagcttaaaggttgaaaaagaggattatatgagttatctattaaccaaccaatttgatcagatcataaccaaaatcatagcaggattgacatgatcaataatttagtgaatcaatttggtaaccatatttccagtgagaaagtagcatgccaagaatagtgcataaatgatggaggataaactcaaattttggttttttgatataaacggggattcaagcataaaagatattgcagaaaacataaattaggccttgtttgataatgcattgaaaaaatgatttagttttttaagcacatntgataatccataataaaaaaaaaatggtggaatttttntcaataaaaaagtatggaaaatgataagttaaaatccctatttaaatatcaa

SEQ ID NO: 6604 - DNA, 639 bp, Gossypium hirsutum
ttaattgtaacaaaacgagatattgagaagagatggtagagagaaaatttggagcagactctagaaaacaagtataatggtaggtggtggtaatggatgcaatacagagttaggaaagatgagagctacaatggttgacaagggactgagaaagatgaaagctatggcggttattatgatggtagaaagaaagttgtagagagaattttagggtgttaagtttattagaagatcaaaaaatctcccgaataatatgctcaaatttctatttataaacttaggaaaggaagttatctattatgaaacaagtgacatattttatggaatgtgggagagatgtgggttatttttcaagtatgtattgtgagttattgggtaatgaattaaaataaaatcacgttcatgtcacttgtagtgaataatgaaagagaagttataaaaatagtggatataatgttagtttaatgaaagttactttcgtataactcattttagcaaagagaatgctacttgcaaacttaagtgcaagtccacatcttgataaacaaagacagggagaggtaaaaacacttaatactccaaagaaaggttaaaaaatagaattcttaatcatatatgtatctaagccttcaagcaatg

SEQ ID NO: 6605 - DNA, 568 bp, Gossypium hirsutum
cgaaggctttctgacttctctacttttgattttagtctttcccttgaggcctcacaccctaattaccgaatggaaaagcttgccttcaaggagcaagctagttccttttggcgccttgccaaaatgaattctcctgaatgggtttatgctgtagttggttctataggctctgttgtctgcggatccctcagtgctttctttgcatatgtgctaagtgctgttctcagtgtctactacaacccggaccacgcttacatgagaagagaaattgggaaatactgctatttattaattggactttcgtccgctgctcttctctttaacacactgcagcattccttttgggatattgtgggagaaaacctcacaaaacgtgtgagagagaagatgctgacagctgtgctgaaaaacgaaatggcatggtttgatcaagaggaaaatgagagtgctaggatttctgcaaggctggctcttgatgccaacaatgtcagatcagctataggagatcgcatttcagtgattgtgcagaacacggctctcatgttagttgcctgcactgccggcttgt

SEQ ID NO: 6606 - DNA, 417 bp, Gossypium hirsutum
tatcttctagagttttagccaacttctcataggatccatggggcattcaaatcaaccttccttccaattggaatcccatccatattcaccttcacgaaaagagattttctgagcttagcgttaccattgttctggtagctgccgatggtactcttctcaaccatagaggtctcatttttagggttctccatttttgagttaaacccttcagtgggaagttcttttgcttggttacccatgctatttattctatgagtttggacaggaggccaccccacaagttgactgtttcaaattcaaggaaaataagacatgttaaaaggggaaatatcagctaacataatgttcaaaagctgccaataagtaattaacacctgaccaccacgactcaatagtatgttaacatgaaaaaaaaaa

SEQ ID NO: 6607 - DNA, 571 bp, Gossypium hirsutum
taacatacaataaaaatgtcaggttatgggtaggaaagctgatggatgtcttgtattgcaatacgtcagtggcaaatatatataggtatatgccttgtatttgatgggtaacatgtaccagtaagccttagcttactggcaggaaatgttagatgtcgtatgagaaactgtttaagaatggatagattatgtcatgctgcatgagttcatatcacttgatgctttgggtggtggcactgtgagatatctgaaatagactgattacacgtgtgtgtgtgtattgactactaatttatgttattttggccaggtccgtcttttgggctctgtttggcgcaatatacttgtgttttggcatgccggaagtgtatcgtgttctttttgaagtatttggaatggatccagaagctgaggactgccagccacgattaaggagacaacttgaagatgtagattatgtttctgttgaatttgatgggaataagctcagttggcaggatattgctacttataaggtaagctttgattttttttacccttcatttgtagatagcttattagtaaaatgaaa

SEQ ID NO: 6608 - DNA, 535 bp, Gossypium hirsutum
tattgaaaaaaataaaaacaaaaagtccaaattttttatgctactttaaaaaataataaataaaaggcctaattgcaaattttgctctcaacatttgactttttgtaaatttcgcactgattcttttttttccctattgccaccttaatcttttaatctttatcaaataaatcaggattaaatgtggcagctagttgactaatgcttttaatctttatcaaataaatcagaattagatgtggcagttagttgaccaatggtcaatgatatttgctgatgtacatgcactaaaatgcaaaccggactattttatcatatatgccacatcaataaattatttaaaaattataatttttataaaaagattcaaaaaatgtgaaaaattctgtaaattaaataaaaaaaaaaatttataaaattttaaaaattcctagtttttataaacgtactttcaaattaaaaaatattttataaaaaccaaaaatcagggaaaatctaaatattacagaaaattccaccagatctggaagctgat

SEQ ID NO: 6609 - DNA, 332 bp, Gossypium hirsutum
tatataaaatacttaaaactgcttagtcttgtaatgtaatagtgccgtactaatccttcctttactgatagttttgccattgttgcagttgaaaaatgttttcagaaaaatattgtgaaaaaaaaaatagtttattaattttatgtgtttgattttaaaatttaaaataattcaaatctgaaatgattcgaagatgtaaaatagaatcgatttcctattcggggtacattaattcaagccataatagttaatccatagtttggctacttgtgatagtttaatatttttataatgtggtacttgtgttattttttaattaataattttaatat

SEQ ID NO: 6610 - DNA, 291 bp, Gossypium hirsutum
  misc_feature (240)..(241): n is a, c, g, or t
atatgttgtactgcacaagaactaaagtagttaatatagcagattttctgacaacatctttaatcattaattataggatgatgagactggtcgtgtatatgtagttggtgctcgtggagcagtaggttttgcactaacagttggaagtgaagtatttgaagagtcaggtcggtcaattgtacgtggaacattagactatctccaaggtctcaaggtatattttccccggtccagaagtgnntattttatggtggcatgttttcagttaaagctgatttgatggccaatttt

SEQ ID NO: 6611 - DNA, 584 bp, Gossypium hirsutum
ccgttctcgtaattcaattttaatttcagtttcaacccagtgttgttaggcttcggatttggagtttccgccgccgcaattggtttttccgccttgtttttccttttctttttgtcggctctactggtggtggttattgtggggttggttttgggtgagatttgaagcacatctacggttgagaaattccagcaattcccttggtcaacatgtctcaatgctcctattcctttccttaatcccatggccatggggatgggattggtataccttgaacctaaatgggtaaaccgacatctgccgtttgattcatcatcccatgtgtcctggttgacactcaggttccccataatgctatcgataccttgctcagtttcttcatccagaataatggattccgcatcgaaatcatcttggaattcagtgttaaagtagtcagtttccatggaatctcctcctccatgggaattgacttctccactactagtttgggaggcccaggaggtggtgtcggctttggagtcaatgagggaactgggcttttcccgaatgggtgattgatggtggagcaagaaaccagaatg

SEQ ID NO: 6612 - DNA, 685 bp, Gossypium hirsutum
caagtggattcaactgataaaacagtccaaaagatttagtgaccatacttttggaactcccactcactattatctgcaaaatcgaagcaacaacaatatcattgttatgcagttaacaaaaatgtgaatggagcgaaaataagacaccgggaggcaaaaaaagtgtacccaatggacacacttgacgagtcttcaaccatcgactgatacagtgaaagtgaaacgcatggttgcagacccctacaaacaaaaaataataacaatattcaatcaaacatgagttccggtgttcgtttatatgcaatatatcaatgctgttaaaacaaggctgtactgttcttcatgttttctttaaaacatcatatgaatcttgcaaagaatttgacaaacaagtgaaattgcaatgtgacaagtaattttttttggtaatttaattagtttagtcatggaaatttatatgcatttgaagcaaataaagtgtagggatagactgcttaggtgaataaaccaccaaaggaagagcaaccaattcttgacctaaacttgaaaacttgtcccaattaatctgatccgagccagagtcaacctaaacccgaaaatgacccaaacaagaaatgaacttggaatgaccaaaacctgaaatgagctgagcccaaaatgacataaactcgagaacacaagaccc

SEQ ID NO: 6613 - DNA, 631 bp, Gossypium hirsutum
tagcacgtggttctgtttacaagaaaactagcattagacaatcgagaccattgttgcgagccaattcctggtaggggctaagcttatgaaattttcgtgatcaaattaaagtatttttgttgagacttgggttttacattataacttatacatgaaagttttaggttgcatgtgagtaacacctcatcaagtatggaattcaacaaacatgaaaaattcactttaaaaatccgaagaaggatcggattcatgtagaatgtttcagaagctctataactcttcaccattgtataacatttaataaggttaggtgtgaaggttctagaatgtgatattaaccgtccattaggactaattgtaatcattggataattcaggacttgcttatataagtagagactcccctcactttttttgtatgttcaagctagctttgagtaatatgaacacttccacatgtgtcaagcctttcccatgcgaaactcaaaggctaaattaggcttgttggcggaaaaaatgaatctaaggtcgaatgtgattagagctaaagtctcggtatgtgacacagtgattatcttctttttcttaaatttaaagtcgtcaacaacaatgtattcaaagagattcctcg

SEQ ID NO: 6614 - DNA, 650 bp, Gossypium hirsutum
  misc_feature (595)..(596): n is a, c, g, or t
gttcatcttgttagggctgagcaagaaaaatcaaaagctgactgaatcggggtgtttggacggtttatggaatacaagttaaaaaactgcaatttctcgaaaccaaaccgaattctattttttatttaatttataattaattttaatgatttatgatataaagataaatattttatatttaaaataataaaatattagttttttagaaatatttatgaattttttttaacattttgttaaataatattcaaaagtcataaaacaaagctcattttatcaaaataagtctaaaaatctctaaaaatccagaataaaaaattaatatgaaaaaactgagtactgaactgaatcgaaccaaattaaggacggttcaaagaaatcttaaaaacctgacctgaccgaattgatatctctcctactttttgtatgctttgcggaatagatttatcaatatgttatgttaattctcatgtgttgcaggaagttgctgaatccgttaaacaggaatttggcagcattgacattctggtgcattcgctagccaatgggccagaggtacgcatggcttttgcttctaaatactaattggtttctnntttattcttaacaaacaattactttttaacaggtcagcaaacctctgctggaga

SEQ ID NO: 6615 - DNA, 637 bp, Gossypium hirsutum
cttgagtgccaactaaaacggatcaaaagccaaccaaaatcatgttgtcaaatacccacccacccaccatcacccaattttgattttttgggccgacattgaagacaaagtttgatgatattccctataaaccactgttggcgtacaatcaaagaaaaagaattttacctttctctaacaaccaagttgatgccgttcattcccccttttccccttaatatctgataaaaagacctttcgaaagctttgaattactacaccaacgttttaatcaacaacagtgacgccatcatcaacgcatgtcccacgaacttacgtcttccctgttatcaatcaaaccacaaattcaagaaaaaaacccagtaaatctcatcatgccactgtttgtcattgtcaataggcaaaaagaatccaatgaatctcgtaaatcttaattatataaaacagaaagaaaaaaaaacccacaattaaaagcggggatttttgaaaaagctcttaccgtcgctgaagaaatagacaaataaccagttgatgaactcgtcggagaaaacggcatcgtcacctcattcccgatacttccactggcggtattgttactagtaacaccaagagcataggccggtgttccatcatgaaa

SEQ ID NO: 6616 - DNA, 650 bp, Gossypium hirsutum
catggcaacaaacacataaaaaggggcaaaagaaataaccattaaaaggttctaaaatctcataataatgccgatgcgagtccgagatttatctcttctctattcatgttttaatgatgattcttgtgcatgcatatgccaaaatcaacagaccattaaaccttcaagttctagacttgaagcacatctatggtcatatacctttgtgtaacaacttgaagttcagtaataaactcaaattactgaaaaaataaaaaatcaaggattcaagcatcaacaaattaatgacctcccttccacttgtgttaaacttagctatcataaatgcaaaattacacaaaaaggaactaagtaaatcatgctaggcaatcacataaaaagaaaagcactacctaatgcttgtctccatggccatgagaatggtcatcacggccctcccaagggtgtcgccaaccctacaagtcgagaaacaaagtccacttaagaatgaaataaggttattgtgaataaggctgattatgaagacaactgaaaagagaaacttcttaccaacactacaggaccatcctgcttagccctgtacaggacccaaaacctgaaacaccagagattttgagaaacatcaaaaaagccaccagcattgcagtatc

SEQ ID NO: 6617 - DNA, 621 bp, Gossypium hirsutum
tgcatgagatagaaatacctcatataagcaattgtgtgaacaaagaaggaacgctctaaatgcagagcgattaaaccttttttttatgtactcctggtatctgacgatcacagattgaattcctgataaatcaatgagtaattccaatttcatttcttcatataatatgtcaaaacacatttgagggagtgaaatccaaataccacaatcagataagttatccgcagctgaatttgtgctactagcagcaccaaaaaccatcttagaaccccttgctttattcctgatcctagaaccacagagaaagagatccattgacttgagtttaatgatgccattaattaaaaacgtgttattacacatcaaaggtgtcgctattgaaagctcttcatccttggtagccccagaaactctatagtgtctcaacatttggaaggattcattagcaggtgaaccaaagttgttacaaatatgtgataaatcagacgacaaaccagttagagcctggaaaagggaacatttaactgtcattaatttgtataagttaagaaagcatgtaaacgaaacaaaaggagtaataaagtatttaacttgaatattaaggaaaaagaaaccaaggat

SEQ ID NO: 6618 - DNA, 532 bp, Gossypium hirsutum
tatttcattaagtcaaccaagattaataagcttgcatgttcaagagtcgccgagggtgttcattataatcatcatggatctttcatttcatttttgtttgtaggtagggatgaatatcaaaattatacattaattttgatgtaatatgtaatttgatatatgaactttaatttcatgcatgcatttatacacgtgaaactttgatcatagtttaaatatatatatgaaattttaatttcgattcaatcaaatatatttaaagaaataaatatatcagtttatttttatatggggtaaatataaatatttttatgtgcaatataaacataaaacaatgcaataccaacagttgcgttaataatttgtgaaaattaaattaaatagaaaattcatgcataaaattacacaaaagtaaagttcatgtataattttgatatttatccctttcaccctttatattataattttacaatactttagcattatactggtactacatatgaaaatatgttgttgtaggaagaatttgtag

SEQ ID NO: 6619 - DNA, 676 bp, Gossypium hirsutum
gatgttgatgatgactttgttctgcccaaatctaagaactctgtcgatgtcactcctagtaagaaactgaagagtggttcaggcaagggtgttgcacaaaaagctgtagatattgatggaagtgatgaagatgatgttaaagatttgaagtctcctgtaaagtcaggtggaaaggttcgtggtggcaggggtgcatcaaaaggcccagctggcggaagaggcagaggtggtgatattgacgaaagtgatgaagaggatattaaagatttggagtctcctgtgaagtctggtggaaggggtcgtggtggtaggggtgcatcaacaggatcagctagtggaagaggcagaggtggtggacggggtggatttatgaattttggagaaaggaaagaccctccacataaaggagagaaggtgaagatataaaagcaatttctgatttaatgttataggggtctattgatctcagtaacgctgaatttctgtcctgtcaggaagtccctgaaggtgcccctgattgcttaaatggtctaacttttgtaattagtggaacacttgacaggtattgtatttgttactgatattggtatgcaagtacttattccacttgatgtcctgtgtaaaactattcttgatgcacatgcacatatttctcggcagcttggaccaataaaca

SEQ ID NO: 6620 - DNA, 614 bp, Gossypium hirsutum
  misc_feature (604)..(604): n is a, c, g, or t
tccttatcgatcaaacacattaaaataagtggtttattgaagacaatgaccctaaaaattttttgaaaagatgttataggttccaacatgcctacattgtttgggtattcaaccaagttaatacaaaatgagacactgcaatacaactaacaaaaaggcaagtaaaaatcaagcacttcaacaaatcattttgattttttaccttgttttttcttgataacttcatcagtgtacattatacctttgcctttgtaaacttctggaggcttgcaacttcgaactgtagcggcaaattgatgcaccctttgcttgtcgagtccagtgcagcaaacaacattgtttttgaagcagaaaacgcggacggcaggaggaacggtgagttcaacctcatgactgtatcctagtttcagaaataagagtcttccctcggcttcagctctggctttgtaaccaactccgacaattttaagaaagcgaaagaatttagcttccatgatgatcaaaatcaacaacctgaacaagtgatagtcatttaaaaacccactgaaaagaaaaaaaaaatattcattcaaaggaagtaaaagaagggatgacaacatttagnatatccgtat

SEQ ID NO: 6621 - DNA, 806 bp, Gossypium hirsutum
  misc_feature (614)..(615): n is a, c, g, or t
  misc_feature (618)..(622): n is a, c, g, or t
  misc_feature (626)..(638): n is a, c, g, or t
  misc_feature (645)..(653): n is a, c, g, or t
  misc_feature (656)..(658): n is a, c, g, or t
  misc_feature (662)..(665): n is a, c, g, or t
  misc_feature (669)..(673): n is a, c, g, or t
  misc_feature (675)..(676): n is a, c, g, or t
  misc_feature (678)..(679): n is a, c, g, or t
  misc_feature (685)..(694): n is a, c, g, or t
  misc_feature (700)..(701): n is a, c, g, or t
  misc_feature (714)..(714): n is a, c, g, or t
  misc_feature (725)..(725): n is a, c, g, or t
  misc_feature (727)..(731): n is a, c, g, or t
  misc_feature (733)..(741): n is a, c, g, or t
  misc_feature (745)..(751): n is a, c, g, or t
  misc_feature (755)..(755): n is a, c, g, or t
  misc_feature (757)..(765): n is a, c, g, or t
  misc_feature (767)..(769): n is a, c, g, or t
  misc_feature (771)..(784): n is a, c, g, or t
  misc_feature (792)..(792): n is a, c, g, or t
  misc_feature (797)..(803): n is a, c, g, or t
cgcctccttcattccttccttcattttcgggagaaaattgcttttgtttatcgattttcccgtaacttgtttttttaattattcaatacttgtttttttaacacaattacaaataatttatttgatattaatttttttcaatttataacgattaatattgtagcttaataattgagtattattataaataaatcattgcaatatatgtaaaaataatttaaaatataaaaatttattaatatatatcaatatatgtaaaaacaattttttcgaaaaatattttcagaaaatctgccaaacagccgaaaatattttacacagattcaatcaaacaccagaaaatatttcccagtaaatcattttatagaaaagtagaacattttcccgaaatcattttacggaaaatattttactggcaatcaaacagacccttgtgaaaaaagaatttcatgttttgatttttttttatcagataattttgtattcatgctgacgtgtcatatggcttgtaaattggaccatctgtagtaggtaaaattttgaacactttgttaaaagtatttaatcaataattaacgaatgatgtttagattttttttactttttttttttannctnnnnncatnnnnnnnnnnnnnaaaaaannnnnnnnnatnnnatannnnaagnnnnnanntnncttttnnnnnnnnnnttcttnncccacccccccancaaactttctncnnnnnannnnnnnnnacgnnnnnnncttnannnnnnnnnannnannnnnnnnnnnnnnaaaaattnttttnnnnnnntaa

SEQ ID NO: 6622 - DNA, 465 bp, Gossypium hirsutum
cagaagcctgggctgggacgctgctcggtattagaagcggagttatggcagatcctggatggtttggacttgctgtggaagcatgggtaccggaatatcgtagtggaatcgaacaacgctgctgctgtgaggcttctaatgaacgaggggaatgcgcgacagagcatagctgtggctcggagattccgatctagcttggatcgacaatgagaagccgccagttgcaatggagcatattctggttttggatagtagctgtacagggactactcccgatatttttaacctttgttttattcaaaagaaaaaaaatttaaatattaagatgagaaaaaatcataaatatcaaattaagaaaatatactaaatcaatggtcaagttaatttaagccattaattaaaatatctaaaacaatctatattaaattttttaaaaaatcataaaaaacgtgatactcattgaga

SEQ ID NO: 6623 - DNA, 761 bp, Gossypium hirsutum
  misc_feature (22)..(22): n is a, c, g, or t
  misc_feature (250)..(253): n is a, c, g, or t
  misc_feature (368)..(368): n is a, c, g, or t
  misc_feature (411)..(411): n is a, c, g, or t
  misc_feature (480)..(480): n is a, c, g, or t
  misc_feature (746)..(746): n is a, c, g, or t
ataagaatgggaagtggctgtnggggatatacaagaagcctgggctgggacgctgctcggtattagaagcggagttatggcagatcctggatggtttggacttgctgtggaagcatgggtaccggaatatcgtagtggaatcgaacaacgctgctgctgtgaggcttctaatgaacgaggggaatgcgcgacagagcatagctgtggctcggagattccgatctagcttggatcgacaatgagaagccgnnnnttgcaatggagcatattctggttttggatagtagctgtacagggactactcccgatatttttaacctttgttttattcaaaagaaaaaaaatttaaatattaagatgagaaaaantcataaatatcaaattaagaaaatatactaaatcaatggtcangttaatttaagccattaattaaaatatctaaaacaatctatattaaattttttaaaaaatcataaaaancgtgatactcattgagagagagagtacaaatatttttcagttttcatttaatatatatattctatttaatatatatttgagggtagttgaatattttcaaatatcaaacactaagccttagattaagagaaatattacattttctactcttaaaaaataagcaaattaatccatataggttagatcaatgaataaattatttttttagttttgatttaatatataaagattaatttgtccctttttgagtagatggaggaaaatgntatagattcctaata

SEQ ID NO: 6624 - DNA, 656 bp, Gossypium hirsutum
  misc_feature (635)..(636): n is a, c, g, or t
  misc_feature (639)..(640): n is a, c, g, or t
  misc_feature (643)..(643): n is a, c, g, or t
  misc_feature (647)..(649): n is a, c, g, or t
ttcttctcttgactgataacaaagttgatcaaaagactaattagattaagactaattagattaacaaaaacaagaaagcattgcaaaaataccaagaaccagagacgtctaattaaacccgtagaaaacctaaaacggcaaaatacatacatctataaaatccctattgggcatccattgattctataaataaaaactaaaactaaatgtacaaagagtcatacatgcattatgcatatgactcaattagtttcatatacccaaaatacaaagaaacaatggaaagatcaaattttgagtcattgggtagagcatttaaacagtaaccagaatgttgataaatgaaatcaatttgtttaggttttaactgattcctccaaacaaaaacccagattcctcaattaccccaaaaatcaaaatcattgcatgccaaaacccaaacaaagaactaaaaaagacaacaacaaaaacattcgcagccctaatgaccaaactaattcaaatatcactctgcaatttgaaatgggcggctgattaaaaagaaaatttgaaataaaaacgtactttgtagcgtaggctagtgaaggagataaagcataactatataataaaaaataaatagacgagtgaggtgnntcnnagnagannngtgaatc

SEQ ID NO: 6625 - DNA, 531 bp, Gossypium hirsutum
tagatccatttaaaatatgggctgagttcgggtctcgaacccgacttattttaagtttgtaatacgtaatattatgttatttttatatattatgtatagaacacattaaaaaataaacatatactaaatatataatataatatatattttaaaaaataatatggattgacttaaaatgagcttggattagtcttttacaaatatgggcaaaattttaggctcaaatttctagtcaagtcggacttgcgcaaacataaagtatgttaatattatacttaggcccgacccgacccggctcaaccaacgaacatatctactctcgatataggtagaaaaaatataaaagtaatttttaaaaaatatataaaaaaatattttcataatgatttaatttattttataaaaatattttttaaaataatatccaaataaattagtgttggattatgtaacgatactgatttaattactcacctaatataccgtatagattaaaagaataggcggttaaccgttaaaccaccgtgtacc

SEQ ID NO: 6626 - DNA, 652 bp, Gossypium hirsutum
  misc_feature (98)..(98): n is a, c, g, or t
  misc_feature (176)..(176): n is a, c, g, or t
  misc_feature (219)..(219): n is a, c, g, or t
  misc_feature (259)..(259): n is a, c, g, or t
  misc_feature (267)..(267): n is a, c, g, or t
  misc_feature (430)..(430): n is a, c, g, or t
atgattagtttgttgagtgccataacaaatatgattctgttgggtcaaaggagcctaatgtaaaaaaattagatccatttaaaatatgggctgagttngggtctcgaacccgacttattttaagtttgtaatacgtaatattatgttatttttatatattatgtatagaacacatnaaaaaataaacatatactaaatatataatataatatatatttnaaaaaataatatggattgacttaaaatgagcttggattantcttttanaaatatgggcaaaattttaggctcaaatttctagtcaagtcggacttgcgcaaacataaagtatgttaatattatacttaggcccgacccgacccggctcaaccaacgaacatatctactctcgatataggtagaaaaaatataaaagtaatttttaaaaaanatataaaaaaatattttcataatgatttaatttattttataaaaatattttttaaaataatatccaaataaattagtgttggattatgtaacgatactgatttaattactcacctaatataccgtatagattaaaagaataggcggttaaccgttaaaccaccgtgtacctaatactaatgataatttatgcatttagctgtcaaatgtcaattttatcata

SEQ ID NO: 6627 - DNA, 643 bp, Gossypium hirsutum
tttgtcatcttgagatatgttatgttttactttgaactgtactacagatattttatttctagtgtgaaatctcactaccagttatcaactgaattgtccttaatgccagctatgcttgttggagcacttgatgaagattcattgaagttatacactcttatttggtcaagaacaatggcatgtcaaatggaaccttcaatcctagagcaggttggagtttaaattcccttcttatgtttatatgatgattttttgattcattaacttcaattagaataagctggcttgattacttaccatcttttggtggccattgtgcttcttagcagctgcattgatttgttcctcaggcaaaaatcttctttttctttttttgctttagtaattgcatttacttgcatgcggtttattttctcttctaaaaaaattcagacatggatagattagtatttttctttatctgcatggttgtggaccattatactatcatctatataacattcattgtcctaagcagatacaacttgaaactgggaattgtgatgagtccatcattttccgatcttcatgctcaagagtagagttccttggttatcagtctgcttatcaggtataatatacagtttttcctgtacatttgtgc

SEQ ID NO: 6628 - DNA, 655 bp, Gossypium hirsutum
ccttgcttattgtcgtaatcttcctttaatcttaaattacttcaatctaatccattcttaatgatgcttatactaaaagcatttaattcttcctttttttgtttatattattttacatttttttttactttaatccatgaacaaggcacacaattggtttaaatctctaaaaagctgtaattagggcaataattaagcttcattatatttctcataaacttgctttgaaatatggtcaactaaaaaaccttacaagttaagattgacagatttattttaagtaacccatttttcaacaaattatatacttcatcaaacaaatgggatttgtttgttgacttcaattgtacttcttcaaaattgtgattcattaatgtcatgcttttaatggtttatttatggttgtagcccctctactttaatttgatataatttggaccttctctttgtaatgttattagcatgcacaagttcataatacctatagttgttgcaattaaagtgataaccagatttttttttattgatatttggtctcatagtcgagttcatgtggaaattcaatcaactctgtttaaccaataatatgttttacatgtcatttgaatacttgaggttgttttaaaaaggaaaactcacaacatcgctttagcag

SEQ ID NO: 6629 - DNA, 632 bp, Gossypium hirsutum
acatgttgacaccgttagggaccaaacagttagaagttcgatgatggcatggtccttttgtcttctacggaacatgtttaattatcaagcagacgactttttgatacgttgcaagaaaaagactactcctatgtcctatcattttctgtgacaatttgcttcatgaatttgatcatctaaagtgagtagattcagtgctttttttgcaatgagacctctctgatgtcatgtccctactactgttggataatatctaatagttgggacttgacttatcagagaagtccctacgatcatagtataatagacaaagtcctttaagcttacacttcaccgccatgcataaaacttgaagacccttcaatcccattcagcattcaaaacaacatgcaaatgtaaacacaatagtctaacctgaatagtcaatatattctattcaaagatttgtttcaaaatcaagaaactcaatgatagtcctaaatgtaactgatataattgcagaagtttgaaacgtataggtttattttagctcaactagctaaactaatcatccataatctcggctcctaatgaaacgaaagtgactggacgttgaagaactattgcaaaagttaagcaaatgttggaagggt

SEQ ID NO: 6630 - DNA, 572 bp, Gossypium hirsutum
  misc_feature (26)..(28): n is a, c, g, or t
  misc_feature (36)..(37): n is a, c, g, or t
  misc_feature (60)..(60): n is a, c, g, or t
  misc_feature (62)..(62): n is a, c, g, or t
  misc_feature (64)..(64): n is a, c, g, or t
ttctaccaatctcaattctcaaaccnnnatggtatnnggaactccaaacaaaatcccatntncnttcattgttctatgtttcaatagggagtaaaagaaaatcttcacaatatggaacctgatgaaaaaaaagccatagaaacccatgcgcttgatatcttgaaccccaagataccatgaatgccttgttctgaaagttagattatattttgctccctctattaaatgttagcataaggtacacgtagcacgtcatatataactgtctgtttgttctgttaatcatatcaatttttaataaacaagactaatttgctctttgatttaacataagaaactaatttgtttttttttttttaaaaacgaaagaaaaaaaaaatctaaacccaaaaaaaaaaaattactttttatttttccaaaatttttgaacccgtttaccaccccaaacccccccctttaaaaatcttccccgcccaaaaagaatttgaccccaaaaaaaccccctttgggcaaaaaatttttttttttcttcaaaaaaaaaaaaaaaaacctttaaaaacttttttttgggt

SEQ ID NO: 6631 - DNA, 645 bp, Gossypium hirsutum
atagagaaacaaatatggaagtgaagtttttttaaaaagaaaaaagtgtcagcacagaaagaacttctaaaagaaagttgagattgaaccgtggaaggaactctgtgacaatgcagagacgttgagatgaaaccacaactcccatgaacagcagaacatttggatgccgaagtcttttcataagagataccttcaaagcaaaagcaaaatagttacagcagcatttggaagaggaagagagaaactcaaaacaataataaatgcagtgacttcagtcagttggcgaatggaaagtgctgatggtgcatgaatcatatgattctacaattaccaccaaagagaaaaaaagatatgactaagtatgtgaacacagtgaaaactaatttaacagtaaagcacacctcctctctgaaggcatttattacatcatctgaatattcctgcttcgagaataccttgactgcaacctcctgaaataatgtgaacatggtaatttacacgaataagattattacaatttttttcatgcactctaccatttgccatttaataccaacaaataactacagagtacaaggactcatttattgcaatgacagagcggtttcatgaactagaatttaccacaagaatggcataagaacc

SEQ ID NO: 6632 - DNA, 643 bp, Gossypium hirsutum
ggaaggcaccccctgtctttgtaggtattatattactaaagaatgtaatatcaggccagatgattttatgccggctggacaaattatatgcattaaatagaataatcaacatattttctctagctatccctcttggtatgcttagtttttagattgatttaatcactcctattatttatcatgtatcaatggctggtataatccaatgcacatttactttattgttatagtttacaagctggagtagtgctctaataattttgtacaattcttttccatcaatagaatgtggatggtgtgaactacttccatgtgaaggttgttgggctgttgtttgttgcaaccacaagggttaatgtatcgccatctcttgtcctggaacttctgcaaaggattgctcgtgtcattaaagattatttaggggttctaagtgaagattcattgcggaaaaactttgttcttgtatatgaactgcttgatgaagtcattgtaagttcttttcatactaaacttttcagttggtatatatatatttggtcaaaggcttgctactcttaattaactaccaagggattactgcactgtgtcgttgctcaagaagttgatacgagtttataatagactgcgtgttagaattgacttg

SEQ ID NO: 6633 - DNA, 600 bp, Gossypium hirsutum
tcctttttctcttttgattttaggcatttttttttcgttctagctttgcctttatgaaatcaatatgtaatcttctttatccagtccttaagtacaaattgagaatatttgggcttttggcagatccttgttgtttataccatttttgtaagataaagcttcattattacagtaataatttgatggatgaaagttacttttatctcgcaattctactattatgaactgaattgaactgcggaactgaaatgaatgtgttttcgcaattatttttttcaaaacatgtttaaacttgttaactattctgaactaaatactagttttatcaaattcatttctcaaattacttgtaatataattttccttccttaatacgaatggacttacaaacggctggtattccggccattcaaaattttatttgtgggaccaatgtgattatattgttagaattatacgaaattatgagaatagataaattaattgcaaatttgaaaattatttcctacattattacagtatcatctataagagccatcgttttaattgacgatattgaagatttgttgtcttttaagtcggaatctattaagctgaaca

SEQ ID NO: 6634 - DNA, 576 bp, Gossypium hirsutum
tgttcagtttcgattccaatattccaaaatttcatttctttagattttttaattttaaatttcaaaataatttccttgtagttttgatggacttggcctcagagactgcaaaatacgtgtttccgaagaggtttgagagccagaacttggaggaagcgctaatggcaggttactttttgtattggatttaagtcattaatgttagccaattatagcatcaagattaatagtgtttaatgaacgccttgcaatttgtgaagatgtagcgaatatttcatggacaaatagtagaactgtacccggcaaaaaaaattgtacgaaaatattgaaccctttatggttccgagggctgggtagagattctgtaatccagaataggtcccattttaataaataataatataaaatgtatgttcaatattttcaagtgtaaacttgactaatagctatccaactattaataaaatttgtttgatggttcaactatgaaaaattataaaatggttacttaaaaggtagtattttttttttagtcatctaattatgaaaaagttaaaaaatagtgccctattatca

SEQ ID NO: 6635 - DNA, 581 bp, Gossypium hirsutum
cacatctggagttacagttacagcctctgactcgttagcttcagcatcactctgataaacacccaaggagtaacaatgtaatcagattcaaggggcattcaggattttatcacaatgaaaaaaggtaataaataacaatcatcaatactgttattctgagctagcaaaacctgctcagcagtctttacagttggatccgggattgctactgtagaaacctttgaaaggtctctcaaaacaccctgcaaatgagaacttcccaagtgaatgaccaaagaattacaagcaattattgaagattataagaatcatgaatcatcctccgcaagttactagaatgcagaagacatgatgtattgcttaaaggatatgtttacttctgagtcatcaaacaaattaagtttaagtggtgccagaaacaaatcaactggaagtatagaactgaatattaaggttataatcttgccaaactcttaatatacacctccctgacaatcagaagaactaatcataaatttgtgtgattaaatatcattagaattgcaaagaacgcattatcaacaaagagttagaagatgtca

SEQ ID NO: 6636 - DNA, 539 bp, Gossypium hirsutum
gttttagccttgaataaggatcatcatcataataataatagtatgaagaggaaagtactgactgaagtagtatccacccataattgagacacaaagcctaaggtttgagcagattggatgcttatcacttgcttggccaccatatttgatctcttcatcagttgcttcctgctaaccaatttatccccattcttgttgcccatcttccccttcaactccttgtcactaattttctccaaggtagcatcggtacgacgtcgtttgagctccaattcatcatcgtcaaactccaactgcccatatccatctccctctacgcttgaacttgaagatggggtagctctcatacagcatccaaggaaatgtaatcggccattattcgtgataattgggaaatgggtatctgaaacttgtggatttttgagcaatgggtttctaattttgacgatggaggagggaaaggggatcaaagggacgcaattgcacatgctaataatacttcttcaagatcgaaggctcaagctttatcttcccatgct

SEQ ID NO: 6637 - DNA, 512 bp, Gossypium hirsutum
  misc_feature (500)..(500): n is a, c, g, or t
  misc_feature (502)..(503): n is a, c, g, or t
  misc_feature (505)..(508): n is a, c, g, or t
taagaggaagaactactgaggagttgggcattaaattggtgggactttacagctcaaccaattgatgaaatttatgcatatttcgggacaaaggtgattacaaattcacagctagctaagttttgcatatcacttttgtagtatattgcttaatcaaggaatcttcgcatggtagattgcagtttattttgcttttcttggaatgtatacacgttggatgatttttccggctacatttggacttatcttgcagttgattgattttgggtaagcctcaccatttctctttcttcttggaagttataattgtcttctcagttgttgaattgcttaatccttggttttaatttaattgcttgtgtgtaatgatttatccagatcattaaaattactagtattccctgctttcttcataagcatagtattgtgggctgtgttgtttttccaattctggaaacgtaaaaactctgcactttcagccaggtaaaactgattcctantnntnnnnaggc

SEQ ID NO: 6638 - DNA, 640 bp, Gossypium hirsutum
  misc_feature (631)..(634): n is a, c, g, or t
caaattaaaagaacatgcatatttaaatctaaaaatcttaactttcataattcaaataagtataattatccaacaaataattaaaacataataaatagaaacacttcagccatatcataaatatagaaaatacgtataattttaaggtgatcaagttataaagtaaaatacatagaagcaccgttgatgtgctgctggcttaagaaaataacaaatgttctcttataagttttaatgtattaatacatatcaatcaataaaagttgcattattaaaagaattaaaaatctccggcgttagggtttaatcctagtttttttattttaaaaaaaaatccatttactagtataagcaactggaaattttttcattaaccaaaatatattcggattttctataatatataaatattcggtttcatgcagaatagatatcaccaaggaagtgcagtttcgcggtcgaaaaccatgaaaagatgaataaaatttgaaacaaaggaaaaaaaagaggttactatcaaaatgacaaaatgatccaactcggttcaccatccaacagttctatataaattcatgcaacatcaccacaaactccattaatacctacattgtcttcatagacggtacccagnnnnactctt

SEQ ID NO: 6639 - DNA, 656 bp, Gossypium hirsutum
gatgaccttgagctcatatgagcaggacctcagcatctgccagcttgtatatgtataataatcattaagcgctatgaatggagaagagggtgaaaacctttcatatattttaaaatacgaattgtcattgtcggacataaatgggtgggagcagattagtagaaatggtactagtctttaatacattgttcttcatgcaaagaaaaatgactggttatggtgttcaggttccaagagggctacaatttttagatgtcttgaaatgctgttcgattgtgcttttttatttatttacatacaaggaatgaaaagatatgctggctagttatgcaccactggaaaccgactaaaaaataattcagtccttaaaattcatcattatcgcctatttatcgattcattactgcgaccaacaaagttctttctcttacaggtaaaagattacaaaccttaaaccgacgtccacataaccataaattattgttgtccaaatcctaaagaatttgttcgtcttagggtccttttggttaagcttttatttttagtacggtgtgtttaatttattttttgttttatattacaatattactacaatatctaatttaattgttatcattgtttttacattaatcgtaaccgcacctcccatccaaaga

SEQ ID NO: 6640 - DNA, 668 bp, Gossypium hirsutum
tctgccttgaaacctagctcactttggttgaacagtgcttagatttcatcatcttctttatggcacaacaggcttggccatcattgtcataacaccttagctcgtgcgttgaagtcttgtaaatttcctttcaaacaaagtagtttgcctcgaatatgtacagcttgtcagctaggcaaggctcacaagctccctttttcttcttcacatatagtgtactcttccccttttgaacttatggtatctgatgtatggggaccagctcatatactttcaaatgattcctcttattacgtttcttttatcgacatgtattgcagatacacttggatttattttttcaaaaacgagtttgaggtggtttaatgttttttaaattttcatcagctggttaaagtacaatttggtcattctattaaaaagctacagactgatgggggagagaatatcatgtcttatcaaaagagctctctcaacttggtatacaacacagggtcacatgtccccacacctcagagcagaatggtatcactgaaagaaagcacagacaaatagttgatatggacttgtctcttttagctcagtctgctatgcccttaaaattttggttttatacctttgcacatgcagtttacttaaccaaccaaatgcctactcctgttctccat

SEQ ID NO: 6641 - DNA, 625 bp, Gossypium hirsutum
gattgcataaattaaaactaaactacataaaaatatcataccttatctttcaatttaaacaagacaaagtaaatattactttgaacataaatgtttttcttaaaaaagctaaagctgcataaaatgaagcatcacaaatccttacaagatcaaatgttcaatcttttaattattttcctgtttctctctctgccaactggtcttccaactgcaaaatctaatgatgtatattgatacgtaagaaaacgcatgctggctatacatacttgtttgtcgccttttgaattttatttttggcatatatggatgcttctatttaatcaacatcctatttcagcggaggtgctccacatcttttgttcattttacactgcatctgcaatgattttagatcaaaggggacagataggcagtgattctactaatgtgttagttgtgcattttgccattcctcgaatcttcgctgcagacctaaaacacatgcctcacctataaattcatgcactcttttattaatcaaggaacacattattccccgttcaacattagttttaagcatacaatgaagaactcatttactactacaattttctcttaaaagaaaaacaccatcagacaaaaattc

SEQ ID NO: 6642 - DNA, 667 bp, Gossypium hirsutum
agagtcacaaatgaagatatcagggtaaagtggtacttttatcacaaacttaaggctaaagtactttgtgttagtatttttggagaaataccctgaaacttgatctacatctcaggaacttttctctgagattggagagctgaaaaggtactcggttcattacgataaaaatggtcggtcaagtgtaagttttgtctttatactaattgcttctgataattctattgcagtgattgttttaatgcatttaagtccgacttaacaggatttggcttgttgcagtattgaaaggacataaagttttcctaaagtagtcgtagaaatctttgaaaaacttaaggatatttaaactgtatgaattgtgcactttaatgaataaagaattggtttagtatgatgcttatagtaactacttgttgtaaaaactttggaaattctatcgcatgagttgtgcagattatttagtgaaaattgtgttattttgtattagaagaaaagctcatagaaactgcttgttgctaaaatgataactcttggaaaaaaatttttctctatttcataatgcatttagattttcaggctattttcatgttaactgagctatgccgctatctttctgtcctagatgtagaaattggtgaaaaatctttgggaataatcactcaca

SEQ ID NO: 6643 - DNA, 537 bp, Gossypium hirsutum
  misc_feature (27)..(27): n is a, c, g, or t
tttgtccctcataaaaccaaggttttnagaactggactggtagttgaaccggtcagaccaccagtttttgattcgaccagctcattcgatttaattgaataaattgttaaaacttcataaaaaataaaaaaatattttttaaaaaagtgaaaactggttcaaccagtttttttagctcagttctgagtggttcatgggtcaaccggtgaacccctctctccggaccaataccccggctggtttctggtccaaccggtctgattggtcagttcgttataaacaaaaattgcctagagcgctctaatgaaagttttcttttctgtctgtgctccctgtttttggtaggattttagtaaaatcgttcacattacaactgcttattttacagtgtgccttgccggtaggaagctccatgtcaattgtgtgactcatcgcatatgccatattaagctttcaattgtttctagtgttatatttttctattatacttagtaagtagttcacttatattcttctcaattaaatgtaagatgaaaa

SEQ ID NO: 6644 - DNA, 590 bp, Gossypium hirsutum
  misc_feature (537)..(542): n is a, c, g, or t
  misc_feature (584)..(585): n is a, c, g, or t
gctcacactgatgacagcccaaacaatgcgacgcagttcggaatcaggagcatcccgaccatcatgtttttcaagaacggggaggagtgcatcattggtgcagtacccaagtcttccttggctgcttccattgaaaaatatattgataattgaaatgcatatatatatatatatagcagaatacaaaacaaaaccaaagctggcttgcctgctatatataatgtaagagcaaacgtggcttatgtatgccatgctatggttacttgagtacttggcttgtgatggtaaaatacagtacagtatcttcataccaaaaacaagtgtcaacctattgatccaaattagtatcagaattattgtgtaaacgaattaaacctagtttcagaaaaggcttattctgattgcaaatttcctgaaaaaaagttgggttcaatcctcgtcttcatgcatatcaatctttctttacatctttggcttcaaccatggtgcaaaaggtttgcattaaccctaaaaataaattaaggtaaacaatataannnnnnaatggagcaacttaaagatgagatgcttcaaaacatttcatnngataa

SEQ ID NO: 6645 - DNA, 683 bp, Gossypium hirsutum
ccaggttcccaaaccaacagacggcattttagctccagtgttgagctcaaaataaaaaggcccatgtccagttcccttgtccatttttcccgtacactgattgactggtgctatgatattggtattgcaaatgtgagacgatgatgtcaatgattttactggcagaaaagagagaacagcgattcttcagctttggtcctggaatccggtggtttagttccgtatggaacctatcatgttcatttctattagactcctatacgtaacaaagttcgaaattcccacaactacaatcagaagaccttgtttgacacacgtctttctaaggttcatcaacgattgcttgcaccaaacaattaacttttatcatttttcaatatactacctagtttcaacttacatatatgttaacacacttctcttgtgataaacagttacgagttaaaagaccatatatattgcttgtataataaatatgaggttaaattgataaatatatgtatggtttgggtaggtccacttatttatgcagcagcccttatggcatggaatctgcatctgctttgctaatgctagagctttcttattttagtagtagtctttgattgatcattagacatggacatacacagcttatagtgacaactaaaatctctttcttcttcgttcatttcacgagtgac

SEQ ID NO: 6646 - DNA, 597 bp, Gossypium hirsutum
  misc_feature (437)..(437): n is a, c, g, or t
tgggtaagcagcataccttggaaaatgcaatcctggcgggtgtcgatgacttcaattcccggtaaatttgtaatcccaagtcgccagaatcgtcccactgtcgcgctttgtcggaaccactgccgttggcattggaatgtgaatctgaatttcctttttgcttaccaaagctccttttggacttgagcttccctgaaaatcctgttgtggtcttttgttcaagctttgtattcagctcctttgttccagaagaacaaacacctcccattattcttcaagcacttagttttatctcaataccccaatctatatctcacagagaatttgactggaaaaaaaaaaaaaaatcatccttaatccaggctatgtttgttagggatgaatctctgaatacaaaataaaataaaaaaaaaggaaatttgcaatcaaaaattttntgtataaaagcctgacaaaagctaaaaccatattaaaaattaaataaaaccaaaaaatctttggttttttctaatcaaacttcaaaaatcaataaaaaaaacagcacacggaaaaaaaaaaaacgtttcccctaaaagaattctccatccaatccaggga

SEQ ID NO: 6647 - DNA, 631 bp, Gossypium hirsutum
acgttcgcaccgacaattgtgcctcatccattttgcaagttggcctagaatgttcagtagaggctccagatgagagacttgatatgaaagagacagttacgaaattaaagaagatcaaagtgaagttattagaggatattggacgggttcgttgaagaggcagttactaaaaataaacttgtgttttgttggcttggtatatgcttttcatttaataaagcctgttgatcatgcaaatctaaatgtgtaatttagataagcttataacttagtccttagataggttttattcaatactcaatttagaaaagcgatatattttgaaaaagttatttaaaaacataaaatcaaacactaatacaataggacccaatcatatcaaaagttaagattagtatttgatacactaacagtgtattttttatttcgtaaacagctttaaaaatttttcattttctaaattttaattttacaatattttactatacttaaataaaacatttatcaaccatctaaccttatttgttgagtctaaaaactctaaaattatcaaatattttccctcaataaaaatattaacttctaaaattttatataatacatcacaaatacattaaaggatgcaggttaa

SEQ ID NO: 6648 - DNA, 671 bp, Gossypium hirsutum
cgtgcaactgatgttactttttctccggtgcatgatcttttagcaactgcttctgctgaccgaactgcaaagttgtggagctctgatggatctctcctgaaaacatttgggggccatttggatcgccttgcacgtattgccttccatccttctgggaagtatcttggtacaacaagctttgataaaacatggagattgtgggacatagacactggcatggagttgcttctccaagaaggtcatagcaggagcgtctatggaattgccttccaccaagatggatctttagtagcatcctgtggacttgatgcacttgctcgtgtttgggatctgcgcactgggagaagtattctggctttggaaggccatgtgaagccggtaagtcatcatggttatgcagttctttcactttttattacagtcatggtttccaaatgctacatgcaggagtagcatattgtgttgccctagtagcaagaatacactgaagtacctgacacatacaatatacctagtagtaactaatataaatttaacatggattccttacaggtttgaagtttgtaatgcatggaaaataataattttgattttagcacaaatggcctcaatgcttcaaaagcaagttttttaaattttccaccagattcccagatatgggaggaaatgct

SEQ ID NO: 6649 - DNA, 611 bp, Gossypium hirsutum
  misc_feature (25)..(27): n is a, c, g, or t
gattcatgaaccttaatcatgatcnnncttccccacccaacaacccaaattggctcagttaaaacaaacccatcctttccaaactcataggacatggtagagaaaacagcaaaaagaacaaactagctattacaaaaaaataatccccatagttattgagctgaaagctaaaaaaaaagtagcatttgattttagctaaaggggactaaccttgggttgataaagaatagaggaaatggaaaagggcagctgttatctgtgactgtgatgatgagttgcagaggcagttcgaagtagaacttggaaacatgaatcccaagctcggccagcaaacccagaatccatctccaatcaaattatagaagaaacccaacaaaacccaaaagaaataaattataataaaaaagattaaaaaaaaactcgacaaccgtcttgaaagacaagcagcactttaccaataccaatctctcaggggaccaccatgataacataaaataatactataataataacaaaaaagtagttcatgggggcatgggaccaatccgacatgaagaattgcctataattaaaaaaaaaaaagaaaaaaaaaaaagggggttccccaaaca

SEQ ID NO: 6650 - DNA, 659 bp, Gossypium hirsutum
aagcatccttggcacatccttaaaacgcaatacatgacagtgtctaaagcagcaatacaatatggcattagcggctcaccgcctctttccccggcctcgaccactgccttttccaccactactgccattggatgccttgtttgtatcaggttgcttcatttcatacggcaggatgccaaaaaataaattatttggtctacaggttcgtgttagtagctagaaactacaactaactgagctggaaagccagttgcttcatttttcgaaagaaaaatatatgaagcttttcttcattggttacaggataatattttgaacttttggattaagaaaagaaaggataatattttaattttagctcctctaaaatattaatgatttaaatttaatttttttaacaccttaattaaatgaaaaacattgtatttttaatatatttttaaaaattaatgtattgtgttatccaccttcttttcctcccatatgtattgtattttagatgctcgtatacaaccttacgataatgccagtttatgttgacacacttcttacaggggaaagaatcatgttctcttggcttgcatattgaaatgcaaaatttagaaaagattgcactctaattcgataaccgttactaacccttgacaaattcatccaag

SEQ ID NO: 6651 - DNA, 564 bp, Gossypium hirsutum
  misc_feature (557)..(558): n is a, c, g, or t
atagttgcttaatttatgtacttttgcttaggtgatggcagttagtgagtcatcgaggttaagtgcctccttgaagaaggaaaatgttcctgtgaagagacttattgttaatcagattcttcctccatctgcctctgactgcaagttttgtgcagtgaaaaggaaggtattcatcttttactttcataggaaggttataagtagagttagcaaaataaacagaattcattggattttaagctgacccgatgttaaaatgatgattatttttttttcaaaatcaggtttgggtttcggttgggtttctatttgacttgaccttatagtgacaggttttcttttgaatatcggtttcgggttgtattatttattattaaaagttttgggattggagtgggggtggttttagtcttttaaataaaactttgtcctgacccggtatatttactaaaatacctctctttaaattttgtactaattttatatgttttagttagggttatttttatttaaattttttttatgatacttgttcatcatgtggttgatttagtctnnggattg

SEQ ID NO: 6652 - DNA, 674 bp, Gossypium hirsutum
gaagatgactggacaatcgtagtgcaatcggtacttcaggaaatagaatagagtctgctcaaatgccatataagcaaagcaaaaaggaaattccaaaaagttagatctaggcaacttatcctaagtcacaaagttgcccatgaactgaaagaaattagatattagaatgttaaaaataacacccacatcaccaccactggatagcttcatctaattctattagtgtagaaataagccatgagcaacaaaagggccgaacaagcttgaagggaaattcctctgatgagtaaccaagcaaaccacatagtttaaaaatatgccatcaaccacatggatagttaccatgttccagagggatatcactcctacacaatcagagatttccaaagaaaccaatagaatttccagaaatccctccaaatatgcccaaaatacgaagatacataaaaggacataaaaaagattatttcaagcatcactaagaatgggaagaaaaaggatgcttatgagctttcaaaaattatcacatgataaaaattaaatggcacatgggaatcaaattttctgcttcaagaattgatggagcaaactatatgcatactgctccataagtttctggagagtgcatgttttaacaaattgactatcaagtttaatggtatgatcatgccatc

SEQ ID NO: 6653 - DNA, 597 bp, Gossypium hirsutum
gcttgggttatggtagtaattcccaacaaaataataacaatttcatgggagaggtcgaaaaggttagcagtttattagatcctgtactcaacaatctcttttaactgctgctgtttttttttgctgttcttattgtgttctcatatttgtctccttggctttactttattaacagtgcaccttatactttacatacttgggactaggaagcatggtggtggctttcatgggtaattttcagcaacacattttttccacatttgttgagctttctgaggccaaaaattagtagcataataaggagacagtcaacagaaaggaacatgaaacaagagagttagtttcattttgtgaaaccctagaatgagctaatttgaaaacactaataaattaattagaactagttgcattatatatatatataatatcaatatgagttggactgtaagggataaagtagatgttaatatttgttgcagaagggtactgttggagcaaaaccagcgagcggcaagtgctgaagattcgttacaagtatttcgaagcaattcttagacaagaagttgggttttttgactcacaggaggctaccacttc

SEQ ID NO: 6654 - DNA, 679 bp, Gossypium hirsutum
cagtacagagatatagacagatctaagttatgtaagaatcagcatgaataaaattctgtaaaagatttctctagttatagtagacctagacaattcaccaacaaaatgcaggcagtcaacattataaaaaggaaagaatcaagagagaaacataccttgtataaacaatccaatatcaaaagatccaattgtccagcaccatttttggaaataactgatcaaatacaatttatgtcatagtttatttaccatgaaaactcagatcaaaagcaaatcattcagaaaaaaggaaaagtctcggaacaccaaaaacttagaagtgagagaacatgtgctttgctttcaccaagtccctcttaacgtaaaagatgaccagaacactcagtaaaaggatgatctctaagcatcttatcttcattttttaggtcaagtcataaaaaggtttcctgtttgtgaaacttgctggaaagtggtctcactaagaatacaacctattatcagtaaaagaaagactaaagaattaaaagcttgaaggatatactgatgtgtgaagctagctttacagcaatctatattgattattaacacatgcaacaaaatctaacatgcataaaatgctaaaatttacaagctcatcaagatgacaaagtagcagatagaagtctcatccctacattta

SEQ ID NO: 6655 - DNA, 456 bp, Gossypium hirsutum
tggagcgagagatagacgaagccaagcagcgagcttgctgttgagcatcgcgacgattctgcgcttgacggagcagcgagagctccctccgcttctgctgatcggatatcgccgctcgcttgaacggacggcgaatgtcgtgcggcgccattgcttattgaacgatttaaaccttccgctatattctcccccgtttcaaacggttcaaaagagtaggctcgataaggtagtttcttatagggtaaagcaatcgatcatcgaattatttttcatttatattaatcagccaattataagtacaattatatttataaaaaaaagtttttaaatcatgctacttaaaaaaggataaattgacttttttacccaaatattataaaataaaataaaaaattcgaaaatggtatcccaccccgattaattacgggaatggcagtgacaaaaattttacctttt

SEQ ID NO: 6656 - DNA, 157 bp, Gossypium hirsutum
tgttgctttgcttttgcacattgattgatggataaaaatgttacttttgaatttggtttgaattatctggatttcatccatcagtagatgcgttgaatgatatttcttagttgtatatagttttgccctttcggcttttttttttttttaaaaaaaa

SEQ ID NO: 6657 - DNA, 653 bp, Gossypium hirsutum
ttaggattaaaagcacacatggatgaccgggaaaggcattgaataaaattattcgtggactcgagggtcgttttaaactcgacagcaattctcgtgtttcactaccaccagaagccatgacttctatgattaagctcctcagtgatcaaatggtttcctcaacagataattctggcgctcaagatggtggtgatcgaacatctgatacgccttaaaggttcgttacttctccacttttttaattttatttatgaattttactattttatcttggaattgacaaggttgtgctagtttgaaatttctctgtgtttttcgtgaatacaactgtaagcacaggtcagatttaattggtcttttagagacgagggttagtggtgagaaagccaattcaattatcttgaagctcggttttcaacagtctcatcatttggaagcaatagggttttcgggtggtatttggattgcttggagagactccttgtgtgctaagattatcaaaagtcacccccaatttatcattttaaaatttctgggagtaacttcagacagtcttttctcaacgcctttgtttatggtagcccaaatagtcataaaagaatacatatctgggggacattgcacagtacgatcccgatggacgattctccatg

SEQ ID NO: 6658 - DNA, 409 bp, Gossypium hirsutum
  misc_feature (16)..(16): n is a, c, g, or t
  misc_feature (316)..(316): n is a, c, g, or t
  misc_feature (374)..(374): n is a, c, g, or t
  misc_feature (376)..(376): n is a, c, g, or t
ttccagggccatttcnccattttgatggaggttcacatttaacccctggcccttgcttcggcccacatccctatagcccgtatcaacctaatccaatcaccatttagaaagtgtccttgcgtttattttggttgacagcattttattgacccaaaaaaaagtgagattttccagtcagaagaggtgatattttccaacgctgatttttacaaatttaatcttggatgaaaatataaatttatgtacgaattctttttatattttcatccaacttttttttttatctttttaaataatttttttttataaatgttgnaccattaaaaaatgggttataccaaaaaatttttgaggggaaaaccccgcccaatttnancagttttgagtggtatactccgtccaatttcca

SEQ ID NO: 6659 - DNA, 596 bp, Gossypium hirsutum
  misc_feature (554)..(556): n is a, c, g, or t
tgtttctctcacgaacagttgaagaattttgtctgctcttgtaagttgataatttgttgttgtttgttatcagaaacattaatatggtgctttcatttaatatttttcttacacatgtttcaaatttccctgcaatttgttataccatcagtatatgccacctaaaacaaaaatctgtgaacatatgcttacacaggagagggaggttgttgaccaaagggacggttggatctctgctaccattcaaacactgaaaaaggcttctccgactagtcttaaaatttctcttagatcagtaagttgacattttcatatgatcgaaacgtgccaatcatattatttgttgatatcaccttagggttcctccttggataaatttatcatattttttagactagttcattttgaaattcacccttaactattataaccataaaaaatgtatggcacttgtcaatgtcggcatatgaatatttttctcttatgctggtggtggcgcaactgaaatgagaaacataatcagccttttttttcaaattatattttttacaaannngttatttccatacatagtagtcaatagaggatcctagata

SEQ ID NO: 6660 - DNA, 639 bp, Gossypium hirsutum
ctcgtcacttcaagttctggttctttaatgatcgaaggcttaagaggaagctggatttgtttaggcttttgagaagcggatctacgccagatcaaaatgacgacgcagccgatgagcacagcaatggaggtagttaaaatcataacgaactctctgttctcgaaaaggacggtggttacttgagcagcagagtcggaggaagcgttggaagggtccattttggccttgactaaagccgacatgagatcgagaggtgagggacctgaagatgatgatgatgatgaagaatccattgtttgagagattagagcaagtgtataaatgaagaaatgaagaattggcaggggagaagctctctcagttttgtttgtttaaaatgaaatatgggaattccgtggtggttgagacttgagagagctgcgaatgggagagagcaattgtgttgaggggttaaaaagggtggcaaggcagaggaaaatgagaaaaacaagaatatatctttgaaggaagctaccgccactgcaactgcaacaacaacgcctaccaaaccagactagtcaaacccacctaacacctttcttaaccatggttaattttacattcaactcttctacaccattcattctcttaaatttacca

SEQ ID NO: 6661 - DNA, 590 bp, Gossypium hirsutum
  misc_feature (577)..(578): n is a, c, g, or t
  misc_feature (582)..(585): n is a, c, g, or t
ctttggctgcttcagcttttcacaattatggaactcgagagaagttatgttgggaggcaaaccaccctctgggatggatgtcagagccacacagtctgataaactcagttcttgaagagagttgaagttcagcatatggtctggcaaggccctgagattcatacaattcgatagccggaggactttaagatcgagcaatggcaacacactttccaataaggattctgaagcaagaaaatcagctaaacacaaatattcaaggcgcggtgcacaattctcattgccatcacgttgcactcgtccaccgggaaggaactctagatttctgcagcttttgattgtcaagctcttgagtgtcgagggcaatttgggttccgggaaggatttcagggaaggacagcttaccatctttaattcttcaagaaggcagcagtcggaattgctgccattcatgtcaggtaatgactccagagccttgcagtcaaggattgtgaggcactttagtgtatgaggcaaccctgttgctggcaaggacacaaatttttggcagctttcaatcctgagatcttctagaagnngaannnnagatg

SEQ ID NO: 6662 - DNA, 586 bp, Gossypium hirsutum
caaggaccgaaggcattagcaatctccagaaactgaacatggcatacaaatcctagtcagtttaaaagtttagaaatgaaaattagaaagaaaaaaagatgattagtagagaagaggaagataatgcagaaatataatagccctaggtaatttcaaagtagcacttagaattttacaatcatattaccatttcagatgaaagagcctttgaaatcccaccaatgaatatctgcaccaagctcgcgataaaaggaaataatatataaagattgccacagaaaacagtataatgccatcaacaagagcatacggtaatatgatgggggggggggaaagaaagaagggtatcaataaattagaaaaataatggtagtgagtaatggaatgcaatacaagtcaattaaagcttagcgtagaagagcctcaaattatggatacataccttgtcatgtgaaccctccacaacatcattgactgtagtcactgttgcttccgatttctctggttcaccagtctgcatgaaaatagcaactgtctgaaacctgctacgatggtaaccacaatatacctcagacacagcaaagca

SEQ ID NO: 6663 - DNA, 652 bp, Gossypium hirsutum
tgaaagccctggtatcttctttttttgttaagactaactttcactaataactgacaacacacacaaaagcaaacaaaggacaaagacatttcaaaaccaatatgtagaattaaaacatcagtagcacaagtcaaccaaaactcaaacaccaagtaagaacagacaacgccagggcatggaaataccaatgatcgcacagagaactaaataaaaaagaacaaatatcaccatcaagacatgaaaatactttccttcaaatgcctaccttacctaatacatctgctatctcatttccctgaaaacatttgaccagctgactgaccaattaatgaacctaataatttcaaggcatacggccacttccacgttcattccttagaatccatcctcttaaatacaatcagcatccctcaaaattccaaaaaattctcatctattacccttagcaagaccgctagtgaaaacaaattaaacaaaaataaaaaacacagccctttatatagacagctcttaacacaaacaaaagaacctctactctctgttgcactgatttattgatttattgtaatagttaaaaggtaacaactggaacttaaaggggaaaaaaacaagaaaactcagctgtaagtctgcaacacgcagcttaaattaa

SEQ ID NO: 6664 - DNA, 719 bp, Gossypium hirsutum
  misc_feature (564)..(565): n is a, c, g, or t
  misc_feature (567)..(567): n is a, c, g, or t
  misc_feature (575)..(577): n is a, c, g, or t
  misc_feature (579)..(580): n is a, c, g, or t
  misc_feature (588)..(591): n is a, c, g, or t
  misc_feature (596)..(599): n is a, c, g, or t
  misc_feature (626)..(626): n is a, c, g, or t
  misc_feature (645)..(645): n is a, c, g, or t
gatggttcagattttgctttgtcttttctttccttttttaattctgctgggccttctgctgtaggcctgttatttatttcattgtttttaccttagcccgattaattgaagtgtacccaattcagcaaatgggtcttctttgttttgagtttttattataataataatctagtcgaatttcaaaaaaaatattttattaattttacatttttaaaaattctataatttttatgagaaaaatataagattaaatcaaaagttgtgtccccatttaattggtcattcgattgattttaatgatcaatgaggtcaaagaaggaaaccgttaatgtagaggcttaaggcaccaactcacccaagtgcttaaatattagtatagatgatgttatatatatatatatttgaacctaaaacaccataaattttaaattttaaatgttatcattccaaccatagttgcatttagtttttatataaacttataataaatatattttttatattttttttacccacaatgtgggtgtaccataatctcgttataataaaatcccttgttgagannantgtctcannntnncgagagcnnnnttaannnngagattatggtacacccacattgtggnaaaaaaaatataaaatatntatttattataagtttataataaaaaactaagtgcaactatggtgggaatgataacatttaaaatttaaaattt

SEQ ID NO: 6665 - DNA, 599 bp, Gossypium hirsutum
attaaaaactcttaaaactatttaaatatttggatttacaaattttatgtaactgaaactttaattaaaagaataaatatataatatctttaataaacttttaagcaatataaaatgataatttgacttatgttcttaatgcccaaaaatatttggataccattcaaaattaggtcacgaattagttcatcttccaaagccttgtaagtttgtaccatcctcatagtgggtgttttagattcttctgcaaccaacctttcgtttcatatttttgggttaccatttttatttttgaatttttataagtttttctatatattttttatatttttaaacattttaaagttttttaaaatttttatgtatatatatttttcatttttcataaattttaatattttgaaacttttttttacaatttttaataaaatatttttttattttttaaaacccttttttttaatttttacaattttacaatatttttaataatttctttataattttttataatgttttagataatttaattttcttatttaatataataatttttaatttttttgaatttgatttagaatttttctacttacctggca

SEQ ID NO: 6666 - DNA, 461 bp, Gossypium hirsutum
  misc_feature (436)..(436): n is a, c, g, or t
aaaaattcaagaagaaaaaattaaattagctcaaaatgaaaaaatataaggaccgattgtataatttaacctaaaatttttatttgaaatgatgatttaacatgccatgtcagcttatcgttacaccgttaacgacaattaacactcaatgactaaaatattataacacgataacgtaagtgactaaaacataatattttaaacataaataactataatataatatgaaacaaataaaaatgactattttaatagtttatctgatttgattctattttatttatttatttactctttccaataacttgtcaatctaagatttttcaaatatcttccaaatccttatttggttatttttttaattatttatttaaattatcctatcacattttttctaaattaaaatatagttcatgttccaaaataagtaaaaaanaattaaaacatataattgatgattt

SEQ ID NO: 6667 - DNA, 647 bp, Gossypium hirsutum
tcaggtcggctcatccgttgttcaaagtcattatcacaacaaattttctgcagagagggtttccggtaaagatcttattcccgtaaatttgcatatttagcttcataaagataaaaaggaacataaaacttagcttcaatgcatgtagtcctttgaatcttgaaatatcgaatgttacgatcatataaacatctactatttacttgggaagcaagaaacaatcagacatcaatctaagaaaccagcatacaacttggcttcaatgcctgcaatcagttgattctcgaaatatcgaacatttcgatcacatcaacatctcttacttgctaaacaagcaagcatcaatcaaccatgaatcagaaaaactcgcatacagcttagcttcggtgcatgcagtcagttgaatcttaaaatatcaaacattttgatcatattagcatctgctatttacttgggaaacaagaaaccatcagacatcgatctaagaaagtagcatacaacctagcttcgatgcctgctgtcagttaaatctcgaaaatttgaacatttcaatcatatcaacaaatactatttactttggaagcaagaatcagcattaaatctaaaaaactgacagtttattagcttcaatgccatcagttaaatct

SEQ ID NO: 6668 - DNA, 628 bp, Gossypium hirsutum
atgtctaatagctgttctgtgtcacattcccaagatatagagggtgctgatgaaaacaagtggcaccatgttcgaaagggcaccaaaataattgtgcaagttgtgaaagaaggattgggtacaaaaggtcccactctgactccttatccaaaattaagaagcagattctgggtattttctctcctttctcctacttcaattccatctctgctctgtctaaagcttgactttataagttgcttatttttctgaagtagttttcctgggttgcagatattactcacttgttgcgacagaattggagtctcaaaaaagataactggtgttgagcgtacacgcctgaaagtcatagcaaaaactttgcagccgcaggggtttggtctaactgtaaggactgttgccactggacgttctttggaggagctgcagaaagacttggaaggtttgctttcgacttggaaaaatatagtagaacatgctaaatctgcagctcttgcagcagatgaaggtgtagaaggggcaactcctgttttgctgcatagagcaatgggtcaaacactctcagttgttcaggattactttaatgataatgtaagtctgtcatttatcttgtcttccattcttccgt

SEQ ID NO: 6669 - DNA, 572 bp, Gossypium hirsutum
ttctatttgatccccagacttttaaatattgtacttagatcctcaaactattgatactatatcaatcaagtccttcaattattgacatgtgaaaccaaaagaaaaaaaaatgataatttttataaaagctttgaaaacctcaaaactaaaatatttatatccatttttacaatattcattttccttcaaaatttgtatttataggttaaattaatgattttagtaacaacactttattgatataatatagaataaagggcgtagtttgaaatataattttcatataccagaactcaaacttgaacacttatggtttcaaggtctcaatatttactaaaactgccaacagatgtctcattggtagaaaaaaaatgttaaatcgtaaatttatcatatacttggtaaatttatcatatacttggattgcattttttaaaaaaaattattaaaagggataattttaaaaaaattattaaaagggataatcatgaagcccgaaaggtttaatcttcatgaatcatgaatctgacataaaatatatattcaaaaaaagaattaattcaagcaatgat

SEQ ID NO: 6670 - DNA, 639 bp, Gossypium hirsutum
aattggagctagctggttatgttccggacacaaacttcgtgttacacgatgttgatgaggaagttaaggttggaatgttgtatacacagtgaaaaactggctattacgtttggtcttattgccacacctgagggaactcctatcaggatcacaaagaatcttagagtttgcggtgactgccacacgtttataaagttcgtatcagctattacaaagaggtcgattatcgtccgagattcgaatcggtttcaccacttcattgagggggcttgttcgtgtggaggctactggtaattggcaggatagttttcttcctaccaggcagtcccgggttttcgaggacattgtaaatgatagaattcagactaatcccgggtttcttttaaggtttacgaaactaaaacatcaatatcttatcaacaaatcacatgaccgttgacacccagatcggctattacaaaaagtggttgatcatcgtccgagatgcgaaccagtttcaccacttcaatgaggagactagtggtaattggtttacttgatatattggcaggttgtttttgtacctatagctacaattcttagtcattgtttttgatatatatagctcctctaaaaggggcaatgcatttcaaggcactc

SEQ ID NO: 6671 - DNA, 657 bp, Gossypium hirsutum
acatttacaacgacagtttaatatcgctataataacgaggataaaagatgatggattgtttctaccatagcaacaatcgggatcacaaggatgcagaaacgacaaaaagctacaacataaaaatcagtaaagctgaattatgccatgtggtggctagagctgatacaactgatatatgaatcattatcggtactaccattatacattcactaaaacgacccgacaaatcaactaacaaagttcataaaccaggaagtcgacattacctcaaatgttgctggggtacatgaagactctgactctatctccctacaaaggaacgaaaacatgcatacatgtaagactaaaagcagaatgtacataaaccgattaagtaacaacagatatatcacacttaccatagatttagggggaaggttagacttgaacttagcacgaacgacaccactgttaccatgcggtctagttaccttgccccaaatgcagcgataatgcgaaccattcttcttcaccttagccttgtaaatataagccatacgcttgccggcataccaagctacttcctctttggtgttaactccctcaatttggattaatgaagtgttaggatactggtttgacttcgacctaacacccatcggcaccgaacaaatcata

SEQ ID NO: 6672 - DNA, 618 bp, Gossypium hirsutum
  misc_feature (597)..(597): n is a, c, g, or t
  misc_feature (599)..(601): n is a, c, g, or t
  misc_feature (610)..(612): n is a, c, g, or t
taatagtaatgatcttctgcttctcatgaatgataggtacgtggaagtgtgaataaaattcatctttgatatttttaatgatacaatttctaatcacattgtgattttatacggaattggttgtagaataatgattggcttcatgggaaccagaagaactgagcctctttcctaacgagttgatacatggaattaatcataagattgttatgcccaagttttacggcctagattgaatataagaattaatatcatgatttcatatatgcataatgcattgcattttgtgttattttacatgctagtacactcggttgaggttggatgggtccacttgcagctttgcaccctaagtgcttaagcatgcgggtccttctttgacataatgagcatgacctccacattctagtgcagccactgttactctttggaattattattcttttccctttttcctgttcaatacttgcattttttccctttaataggaaattgggttttatttcatttaatcatcgacgtcaacattgatgtgaatgatgaaaatacaggttctgaatgacggtatacttacttggaaccatgttgagtggcatncnnnagggaatcnnnaataaa

SEQ ID NO: 6673 - DNA, 579 bp, Gossypium hirsutum
cctcgagacttgtaactctatatgccacgaataaacttgtttgatcatccttttcttttctggtggaagaactgtctttgaatatattatgtgttattcttccctccttccttgcttatggataatttcatgagagtgacatacttttctctagaattttaagtttagtacttactttgcacacctgttgtccactttagtgccatttgttttaacaaatatcatattttctttctgatgcaataatgtctgtgttgtttacacaatatgataacgtgaatcaaattgcttgatgttgaaatctgaaatatggttgtttttcttgaataattgttaaatattatagacaaccttcttgtcacttaatgtatgaacaacgggcttatgttgttggaaaacaccacaatattgtcaatgctgaatgatatgcaataaattctggttacctgcttatgggtgattattggctttgactcaatattctaatgctggcaatgaatataatattaacgcaggcacacagcttctgttgctgcaggaaaccatgggattcctgtggtggtagctggcaccacttga

SEQ ID NO: 6674 - DNA, 637 bp, Gossypium hirsutum
  misc_feature (50)..(53): n is a, c, g, or t
atactgtctatcaagcttcaagttgatctgcactaatgttcttcattacnnnntttgcaacatcaactgttgattttgtacatatgtttgttctattgaaatctaacacaaagggcgatttgttagaaagaaaatttcaagaatgtggatttctattattatattccttacatgactagtaatacttttctgctatgtcactccgattccagctctttgtttttcttgaaatactcgtctttgatagaccaacactcgtctcctacgtgaatctggacgcgagtgaattcgagtttcaatttctattcatcaagtcatgaaacaattttgttggaaatttcaattattctggcaaagatcatacttggatggattgcattcattacagggtagagatccagaaaaactgtatttcatctctttacattccagattcccccattgcattcacacatattcctaaactaagttccaggttcgaattgtacaacatggaaaaattatacaagtggctcttaggtacgagattcgtgcagtcatgagtcatctttaaaagttgatttctagttgatctatgttcgaatctcgacatttgcagagtcgatatttcaacttcttttcctattctgaattcttg

SEQ ID NO: 6675 - DNA, 650 bp, Gossypium hirsutum
tgattgctgttggagatttctctgatacaaaggttggtctttgctaattgcaaacttctcctacttgaattaccaattgtgtgaaattaatgaactttttgtctttctatctagagtgtcattgagttaataaaaactcattttgggcataaatactcagcattggaccctccatcaatacctcattttaaagttccttctcacgaggatcctcgcttttcatattttgtggaacctgaagcatctggggttagtaaactcttaatcctttaaactttttcatgcatgcaaacatgcatgtctatatgtatggatgaatgtgttatgcatttgttgatgagaatgtttgtttgaaaaagtgtgcagtgatgattagcaataaaatgcaagtagatgaattaaagacaatgaaagactatagagaaatgcttgtgaaatccatgttccgaatcgctctaaatcgaaggttgtttcgaatttcccgaagaaaggatccgccctatttctcgtgttcagttgcttcatatgttcttgttcgcaatttaaaggcttatataatgagttcatcttgtaaagagaaggggactttggaggcccttgagtccatgcttattgaggtctgccattattctccttcaacagcaatcact

SEQ ID NO: 6676 - DNA, 676 bp, Gossypium hirsutum
agatgaaactgcatatcaatgcctgatcaatactgataacaaacttcataaaactgtcaacaaaattgctcgtctctacgatgatctctcaactaatgaggtatatccctcgccttttctttttcttctaaaaactcttctagcaatgtaaccaggaatgtgttaatggtgaaattaaggctgaagaaaagaggggactggtttgtggaactagttgttactgttgaaaagtcaacaaaggtaggaagcaacttgttaaaaaggtgaaggggataattacaattttgatctctaattttttaggccatttgcaagttagtccctgaactttaactataaataggcattttcatttttcatttcaaccatcccaaccaatctttctctcttagttttctctcttctctcatttgagaattcttaaggaattctatttgtttgtattattttggagataataaagttatcatctggtgttagtgcccgaggacgtaggtataatttaccgaacgtcgttaaaactcttgtgttttttcttgtcctatttttctttcaatatttgagggtataatagcagtatttaattgtgctattaaattactatagaaggaatattctgattaaggaaagacttggtatttaggagatccatgtgatccacctctcttctcaaaaa

SEQ ID NO: 6677 - DNA, 721 bp, Gossypium hirsutum
  misc_feature (17)..(18): n is a, c, g, or t
  misc_feature (630)..(633): n is a, c, g, or t
  misc_feature (640)..(648): n is a, c, g, or t
  misc_feature (650)..(657): n is a, c, g, or t
  misc_feature (659)..(661): n is a, c, g, or t
  misc_feature (663)..(666): n is a, c, g, or t
  misc_feature (668)..(672): n is a, c, g, or t
  misc_feature (684)..(688): n is a, c, g, or t
  misc_feature (698)..(700): n is a, c, g, or t
  misc_feature (703)..(703): n is a, c, g, or t
  misc_feature (705)..(713): n is a, c, g, or t
  misc_feature (716)..(716): n is a, c, g, or t
atgtatgtggctggccnnggaagacaggcactaaaatctgcataaaatgtcatcaaaagacacttttaagcaatcgtagaagaagctaacctatgcagaatcatcagaaatattatgataaattaacatacttcatttatattattcctccatcgcctatacatagcatcctcctccaagttattgagataatggacatgggcagaacgaaaatcaactcggaacatattcaactcaggaggagtcacagttaatagaaccttccttacagtgctatgagggatctgaaaagtaatagaatcaataaatatacaagaggcataaatagattactgttttgaagccacacaacaatcagttcattgaaagaaaagaacagaaaagagtaacagttacaggaaccattacttttgagagagaatcaatttgtttttcacagttgataagaaattaaacagtcgtgcagacaagaggcataacaggtagattagtacaacagatggctctgatatataatgtgcatttctctcaagcaatacccgatatatagtttattttattgaatccacccaataatcagttcattgaagtcagttacaggcactgagatttttggacaggtactaggtnnnntatgccnnnnnnnnncnnnnnnnntnnncnnnntnnnnnccttttcttttnnnnnttttcctccnnnttncnnnnnnnnnttnctttt

SEQ ID NO: 6678 - DNA, 642 bp, Gossypium hirsutum
ttcgcttgtcctcaatggttaagtgcttctcatttatccttgagaaggatcgagagccggtaagcataggaaatcaaagaaaaccaaaaccaaaattaatatacgaaatgaggtattctaaaataccttttttattttctttaaaaaataaaggaaaatgaaaagaaaaatcatttatatgaactgaagtaaaaaatccattttgttttctttaaaaagtaaacaaaaaatatgaaaaagaaatcatttatgagaactcaaggaaaaatccattttgatacgagtaaatgtgtcaaagtttagtgttaatctgatggttctaaaattgttgccataggctcatgcccaacctaatgtaatttgggctatggcctgtagtattttcaggggtgagccgataattgattccatcggttcatttattcttttatatttaaccccccatcattctattataatccattcaatcaaaatttggggtaaacaaatttaatattggttggttttatccgtgacgttggttaatcgatttatttaaaataattaaaaaataattttttgtaaatataaaaagtttataagaaatttctttttaaaaaaattaagccactcaatctaattcacacccaattgagttcttat

SEQ ID NO: 6679 - DNA, 704 bp, Gossypium hirsutum
  misc_feature (653)..(662): n is a, c, g, or t
gtgtagcatcgtcaaccaacaaattagcatccattaattcctgcctctttgattcagcttcatcaagcaatgcatcagcctctgccgcagatattattgcttccaactcttgcttttgcctcttaaggtttgttgtgagattcgtctcaagttctgcttttcttgattcagtctgacaatccaatttgtacatggggaaaacatgaaaatgcatgcatgtcatagcaaaagaaatcaaaaaaggttcagtgtgtcaacctcaatacgatcactcctgcaattgataagttgctctttaagatctgttatctcagggttcaatctcgacaaaaggtccttctcttctggtgttaagtgatcaataagatctgtgcccatttcagcacgtttcattgccatactagctctaagctgatcaatttgcatctgcacatctgcaagtgattttctctatgaacaaataacaagagtcagtgcagattgaactagataaaataattacaaatagctaaaaaggaataatccccataaggcacaggaagacaattaaaagtttattaaataccttattttcaagagctttagatgtatactgtttttgcttattagcattagcaatgtcctgcttatgctgctccagcactgatttgtcnnnnnnnnnnaaaagtatacatctaaagctcttgaaaataaggtatttaata

SEQ ID NO: 6680 - DNA, 655 bp, Gossypium hirsutum
agtagctgatgggatgttccattacgatccttttacccattctcctttctcatttaggatgattgttgtagcagtaccacttttgtcaggatttgttaagtttgaagaagcccattgtcaccatcaataggacaaaatagtgtcacttaaatttaagaatatcatttttttaaatatgtgataatcagttatctatgttttgattcgagtgtatttaatatagcctttaatatctaaacagatgactaggctagaaaaaccctaattgataatatattaaaatattttaaaacttaggaggagtttaaaattttcatcataatttttaacataattaattggataaattttagataaatgaatattgtccctggaaacaaattttaaattttgaacatttgtcacacttatccgaattcatttagattgttagagataaaatctagttttccttatttgtgtgagaaaagcatgaaaaattttaaaatgaataaatgatttaaaatagaaacacccagtacagacaacgcattcatgtattaaaatataacattcattattaatatataaatttatataaaataaaaatacacaatatctaaaaaatgaagtaaaaagaattcttcatctcatttcttcttgctcctttaccata

SEQ ID NO: 6681 - DNA, 577 bp, Gossypium hirsutum
tgggttttctagttttaattgctattttattttatttttaaattaattgtttgaatttctattttaaatttaatcatctacctttacatccataaataaaggttttattaataaatcaagggtgctatttcaaaagccttccgttactctaattattagagctttcgtctaatgacatagttcttgatcttggcctatacacgtttcttatctcttttctcaaacaagcatatccttatcacaggccacagttcaaagcccgtaactattgcacacaatgcatcccgtggaggcctatcattgacatggggataatttgacccataagaactagctcgatttaaagaactattggagaagtctatccatttaaagattgggtggcgcaatgatgcagatatgaaaacataaactaccttattaaataagaaaactaatcttaaaagattgaagggaataacatctataacattaaatttaatttgattacataatcttgtaaaatcccttaattttagggataggcttaatctcgtccgtcgatataacttaatctaaactgttggtttggagagct

SEQ ID NO: 6682 - DNA, 595 bp, Gossypium hirsutum
agcttaaattatttaattggaactattacttagtgcctttctcccttacatttgattaagggaactctattgtttaatgcttttcttaagtcaaaaggagatagcattaacattattgtaataactaatagtctttgttttcatatatttatagttttgatgactgttaaaataccttacatgtagaacaaaagaggtttgaaatagaattttagtgtaggaagcaagaagcttctattttgactgccaaactgactaccactcaaccaacacgtccatcacttgtttttcttgtttctatactaatatctttaaacgcaaacttgtattattaatacatgatttttatacttgtgatagaatttatagtaatttataaaagcgattttaatattacgcgtaagaaaaattgcaattgttaatccgggggttcttccatcttcctcttcatttaaaaactgcaaaaggcttaggctggggagcagataactgatttgatactgataattttatatgaaatggtagggcaattcatgaatattatagtcaatagcacccttatctgaatttacaaaatcatccttcttctgctgat

SEQ ID NO: 6683 - DNA, 656 bp, Gossypium hirsutum
tgtttgaactgctaattttgtttccttccatgcaggttgacctagagccaggccttgcaattgatttcaacattaaagatatcctgctgatttcattttacctttctgctggatttatattttgttttccaatactaaaagtcaatatgcttctagtgtttacatcatattggctttatattcttcttcatctaatcttgactttctttacattgaagaaaatcttttatgatgattcagtaagaaaattttgtctctatgaatatatatatcaaatatggatggaaataactgactaagagtttggcatatttttgtaaattgctgatgttttggacaattttatagcaccaatgagattaattccctagtattatgtaagtgaattaaaattaaggagattctaccatggaacagtgtacagatttattctccaaactccatctttctgttggacttagcattcatacaggttcctaagaatgtgaactgggaggaacatataacccaggactcagagcagtgggagtggcagatgactgtatctaagctatttgaagaacggcctatatggcccaaggaatctgtaactgagcgcttgcttcagaaaggtctaaaatttagccatttggtgcttaaaaggtcttacctgataa

SEQ ID NO: 6684 - DNA, 576 bp, Gossypium hirsutum
ttttgaagtttggtttaagttatcccccaaaacattatacctgtgttttagcaaataagagtattacacctcaacctagtgagtttggaagtaaaatatccaacaattaaaggtgatttcagatgattagggtctaatgtcttttataatcaccttgcttagtgttttaaaattcaagtttgcactctaatatctaatacttatcattgtgttgaaacctgtaggtgatttgtactaattgcaataagatttcaaatcagtatgaaaatatgatggatttgactgttgaaattcatggagatgcttcatcattggaggaatgccttgaccagttcaccgttaaagagtggcttcatggagataatatgtacaaatgtgatgggtatgattgctctccatttgatctcaagatgtttatagtttagtttgcatgattttaagttatacagccagaatctttacccatattttatatatttttattgtactttgatttctaactacattgttattcacatttttggatctggtgttaactatgatatttcgtttctcgttcagctgcaatgactacgt

SEQ ID NO: 6685 - DNA, 506 bp, Gossypium hirsutum
  misc_feature (492)..(494): n is a, c, g, or t
tttttttatgtgacaaaattttaattaccgctagcggtgcaataagcagctttcggttccttccagggctgccatgagacggccaagatttaagacggtggggttaaaatgacggctatagatgaagaaatcacgatcaggaccgagttcaccggcgaacatacggcgcatggtctcaggttccatgacggtgaaggtggcggaggcttcaatggacatgttaacaccaccatgttcaccgaattcatggcgagcgttggctaatgcagcggcagggtcgccttccgatgccatcgtaggcaacattgatttcttggccacgaaaatatcatccccgtcaaagtcatcggttcctgttcctctcttcttcccggcgaaaacaaggccacggctctgggtttctgccatagttaaatctccccttcttcttcttcttcttcttcttctatttgttatgtggggggccgaccttggttgctggagagataatannngagttaaaaagg

SEQ ID NO: 6686 - DNA, 625 bp, Gossypium hirsutum
catcagctacattaataagcaagcaattgcagttcccaatctgcaatatgttcaagacattaaagaaactcttagtaagagtagataaaaataacatacatcgcctgcatgcacatacatacacacacatggaacccaaaataattatgatttgaagggggctctaaccttcatttagggcatcaaaaatgtatgttcaaaggattaaaatgaagcagaggttctatatccaccctctccagccgcataaatgcctccatgcctgttgcgccacattctcaatataaggtactcaaaacagttacgcgtataacttgctttgctgcatcccgcagagtttggggagccttgtgcaacaagggcctcgggcaaactccaacggtaccgcatagaagtaacttgttcccacccacgttcagcgtgcttaaaatcaaagcagaaaacatcgcttgttgaatgatagttacgaccccgaccgatctttcccccaatgacgtaagcatggttgccagaggtaaccacagagaaaccaaaatgaacatcaggtgggatcgtactcaaaacttcagtgatttcacctctttccaaatccaaaaagcgcaaatcactcctgcgtctaccttcg

SEQ ID NO: 6687 - DNA, 731 bp, Gossypium hirsutum
  misc_feature (519)..(521): n is a, c, g, or t
  misc_feature (523)..(533): n is a, c, g, or t
  misc_feature (537)..(548): n is a, c, g, or t
  misc_feature (552)..(552): n is a, c, g, or t
  misc_feature (560)..(560): n is a, c, g, or t
  misc_feature (562)..(571): n is a, c, g, or t
  misc_feature (573)..(573): n is a, c, g, or t
  misc_feature (578)..(602): n is a, c, g, or t
  misc_feature (604)..(607): n is a, c, g, or t
  misc_feature (609)..(626): n is a, c, g, or t
  misc_feature (628)..(635): n is a, c, g, or t
  misc_feature (637)..(643): n is a, c, g, or t
  misc_feature (645)..(654): n is a, c, g, or t
  misc_feature (660)..(662): n is a, c, g, or t
  misc_feature (664)..(666): n is a, c, g, or t
  misc_feature (668)..(669): n is a, c, g, or t
  misc_feature (671)..(698): n is a, c, g, or t
  misc_feature (700)..(711): n is a, c, g, or t
  misc_feature (713)..(727): n is a, c, g, or t
aagggaagtactaggaaaataataaaaagaaaatctgctgaagagagataaacaagcataaagttccataatgatatatgttactgtttcttgcaagactgagccccagttacacagtcaccattaccatctcgaatcatcattcaggttccagctttccccggttcaacaaggcagattcatctatgtttaacttgtgccatctaggagggagaagtttccattgaatgcctacagcctcagtaccccataatgcctatgaggcaccgatagagcatggaattccgctgctttggtcatggctttgttccactactcgatccgagttgaaactcccattgagcacaacagagtttcttgataaccaaatctaccagagcacgaaagccaaacagaatggcatgattacatttaactgactaaaaattggcttcaaattagttcattcgactttgacgaagaagatacacacaaaccacaagaaggattagtattagtagggaatgtatgccctcaaannncnnnnnnnnnnnactnnnnnnnnnnnncatngttgctgnannnnnnnnnnantcttnnnnnnnnnnnnnnnnnnnnnnnnncnnnntnnnnnnnnnnnnnnnnnntnnnnnnnnannnnnnnannnnnnnnnntccccnnngnnncnntnnnnnnnnnnnnnnnnnnnnnnnnnnnnannnnnnnnnnnntnnnnnnnnnnnnnnntctt

SEQ ID NO: 6688 - DNA, 672 bp, Gossypium hirsutum
tgaagttccttcttccactcactatttctaataaaaccatcccatagctataaacatcacactttgaggttattggatgatgtgcaagccactctggtgccaagtatcctctagtccctctaatgcttgccaatgacaagtgtctatgatcctttggattcgtaagccttgcaaggccaaaatccgacactttggcagtgtaagattcatccaacagaatgttttccggttttatatcgcaatgaattatgcagtctcgacattcctcatgaaggtaggtgattcccctacccgttccaagagcaatgttgaatcgattttcccatttcaatgattttccggattggtctttcgacgtaaaaaggaacttgtcaagtgaaccatttttcaagaattcatacactagaagcctgtgacgcccttcacagcaaaaccccaccaatctcaccaaattcaaatggtgtgtactactaatagttgcaacttccatcctgaattgcctctcaccttgctcaattccctcgagttgcttcactgcaaccaccattctattagccagtgttcctttgtaaacagccccaaaaccaccttctccaagcctctctgaaaagccctttgtagactgttgtagctccttgtataagaacttcactggtgcaccagatgcataat

SEQ ID NO: 6689 - DNA, 639 bp, Gossypium hirsutum
aaatcgggaatagaatgcggactatgcaagggcaatgtagattcgacttcaggatggtctgtaggggactcaagcctattagacccaacgtgagcaggagagtcaacattaggatgagggtcaacaacgtgagcaggagagtcaacattgagatgagaatcaactatcggcaaggaagattgttgatgacaaaatcgatcccgaggtatcaccgttgaccgaggaaacccatgttgaaatggaaatcgtgtctcatcaaacgagacatgtcttgacacaaaaactctaccatcatcagccagacatttgtagcccttacgattagaacacactccaagaaatacacactgttgagaatggaactgaagtttatgctgttgaaaaattctcaggtgtggatagtaggcactcccaaacactttaagttgagaataatcaggttgagttttgtacagcctctcatatggagtttgtcgttgtaacacgggagttggtaatctgttgataagatgcacaacatgagaaaaggccgatgaccaatgttctaaaggcatggatgctcgagcgagtagtgtgagccccatttcaactacatggcgatgtttccgttcaacaaccctgttctgctccaaagtgtag

SEQ ID NO: 6690 - DNA, 551 bp, Gossypium hirsutum
  misc_feature (380)..(380): n is a, c, g, or t
  misc_feature (385)..(385): n is a, c, g, or t
  misc_feature (392)..(392): n is a, c, g, or t
  misc_feature (395)..(395): n is a, c, g, or t
  misc_feature (403)..(403): n is a, c, g, or t
  misc_feature (407)..(407): n is a, c, g, or t
  misc_feature (413)..(413): n is a, c, g, or t
  misc_feature (428)..(428): n is a, c, g, or t
  misc_feature (430)..(430): n is a, c, g, or t
  misc_feature (436)..(436): n is a, c, g, or t
  misc_feature (448)..(448): n is a, c, g, or t
  misc_feature (456)..(456): n is a, c, g, or t
  misc_feature (459)..(459): n is a, c, g, or t
  misc_feature (468)..(468): n is a, c, g, or t
  misc_feature (479)..(479): n is a, c, g, or t
  misc_feature (487)..(487): n is a, c, g, or t
  misc_feature (490)..(490): n is a, c, g, or t
  misc_feature (502)..(502): n is a, c, g, or t
  misc_feature (513)..(513): n is a, c, g, or t
  misc_feature (524)..(524): n is a, c, g, or t
  misc_feature (529)..(531): n is a, c, g, or t
  misc_feature (534)..(534): n is a, c, g, or t
ggctctttttggagagctttatttaggtatggtatccccaaagccctgtgatggctttcttcccttttcttattaataaaaaatatatattgtttctttaattcttcgtcagttttgtggtttctttttttctaatttttttggggtttctgttgaaggggtaaatgtgcaaactaaagaggaagttgctgtcaaactggtatgctgatcttttcttgagatagtacttttgctggtctgcttctagctttggtatttataatgatgattttggatccttgaatacctataaataaagcaagctttattattattttttggcttatccttgctttgaactttaaatgcattaaattttggacactgaccaaaaaaaaaanattanaaatatnatntttatttnaggnattgcntttttttcttaaaangnaaaagnggtttttactantcaacaanttnttaatttantttgtaaaccntgaggttnggngattgatcgttnattcctaaccntgtggtcgggnatttnnnccngtttatagaaatggggc

SEQ ID NO: 6691 - DNA, 616 bp, Gossypium hirsutum
attattacctgtgcaaagcataaggtaatgcagaataaaatccagcagctctttctctgtaaaagactgttctttcagctattataacaggtctcactgaagcagcactttgtgttcccatgaatgtaattgcagtgtacattgcacccattgcattgaaaagatcctgttttgttcccctgtaataatcaaagttagtatcttttcttcgattcaagcttgagcttaaaatgtttaccttttgcttccaaggttccagaataaaactccgaaaataatgctcattgcagtactgaaataaagcctcactgcattgtatgatgtgttcctccaatatgatctgtgttgtttccataaacaagctatgaattgtgtaaggtagggttgtgcatacttggtcggaaaatggagatcgtgtgagccaggaggtggtgtgctcaactccgaaatcaaggccttgtttcttctgcaatattagcttggagtataagttttaagaagtagcaaggattgtgattacattatatgtatatatatatgagataatcaacctataaagatcggatcttttgtacaggtcagcgaattttactcctacaatctcttcttgaggtcg

SEQ ID NO: 6692 - DNA, 614 bp, Gossypium hirsutum
tatgctggtgaagactatcataaggagcaggcatagtgctgccataaaatttgagatcaccagcagaactacttagatcaagcttcaaaatatcagaggggggatgattgtgatccatcacctcagttctcttctcattcatagccggctggaaaacaatcacttcatcgtcatcgtcatcttcttcaccaaccattctaggttgtgggattggctgaacatttccaatattagttatattttcagagggggattcatgcaccacactattcgttaccacaggggtagcggagctcactgtgacatctgcaaatggctcaacaccaataagaaatttcttagcttttgaatcaaaacaaacagttttctgatcaaccctaatgacattagctagagccttcccagcggccaaaattctcttgacacgggctttcctttccttattgccatcgcttacaaaggaacatttccttgagaagtccaaaatggagtgtgcaggagcaagaggcaagaaccctcgcaactcaaagttctcccacaatgcaagacggttttcagtctctccttcatacctactcatattgaaaaagcaggtctcatcttcatcatcatcc

SEQ ID NO: 6693 - DNA, 620 bp, Gossypium hirsutum
gttgattcattttagctgtatgcttcccttttttatggtttaagaggatatctatcttcctgctaaaattatgttaacattttcccttttgtgaataattatttcatcagggcattcgagctgtgactggtcccatggggtgtcttctagtagtcacggtatttctctatcctgaatcaggttataggtttgtttttattggggtatgcggtgctttcaagatgtgtgctctaatattattattattattattattattattattattattattagaagatacctctctttagttctccccgacccttatgaaaatacattgttagacttgttaagctaaaggttagaagcatctccaggtttgaagcaaggagcatgttttgagggttttatttcttgttctaattcatggtataacctggatgttgacagaattatactggtgaccgcttgaatttcggtttagcagctgagcaagcaagatctgaaggctataaaatagaagtatgtttccctgctaaacatgatctttttaaaagtaacattttatttctttgactgcccagaatcattgtaagggagaataaaatcaaaatgtggataaaaatccttttttttgc

SEQ ID NO: 6694 - DNA, 610 bp, Gossypium hirsutum
cttatttcacacactcaaatgactttctggattgtacgctaatgccacctgtctgggccgaggttatcttggaagttatcaagatttcattttattcataaaaagagtgattagaataatttattccattttaggaatatttgctaatttctactttattaacttgtaggtatcttgccctcaaacaaaacgtccattgctttgtgaagatgatctctatgatgacttcaacatggatgaagttgatttgaaccttgataattatgaagaactctttggagtagctctcaatcactcagaagaactttttgagaatggtggaattgacagcttattcaggacgaatgacttgtctgctgctgattccgactgtcgtggtgctgtggctgctgaggttctctcttctcttttgatctttctttgtggtgtctgaattgtctttttctgatgatagtattgtcatttttctagaatatttttgtgttgttatgatgtagaacaattactatattttcggttatcatttttttttctcaatttgaaaatggaagtattccttgccaattttaaaatggagaaaggttttctgatatggtaccgagatctcaat

SEQ ID NO: 6695 - DNA, 547 bp, Gossypium hirsutum
atggatttaccaccaacgtagtaaaatattattgtatttaatgaaagcgtaaattcaatctcaagtaacatagggcctatttgattaattgaaaatttaattgttaagtttaagttataaaatctttttgatatattacttaaactggaataccgggcatatttaaattgtctgataaagaataaaataatatttaataaaataaaatagttgaatctattctctattaagtggtaaatatagatccctatctatttattttctacacttgcttgtagaaaaaatcctatctaatagttttcttttataggtacaaaacacatttaaaaaaataaattaataaaaatattaatttttaattaattcatttgttcaacacttttatcatttctctaattgttaaaaaaaaaaaaacccccccgaaaacaaaaacccccctttaaaaaaaaccacttgaattttccggaaatttgttttttttttccaaaaaacccttttaacttagaatttttttccccaaggggaaaaatttcccatcaaaggccca

SEQ ID NO: 6696 - DNA, 382 bp, Gossypium hirsutum
tattcagttgtctccttttaaggttggtttatatttcatccataaccttttaaattcaacattatacttcatgacctttcttacgtgtgtcaatttcatcctttcattagttaaaagtaagaagtcaacaaaaagaccatgtaaactagatgagtcatgctgtatagcaaatttttgtcaggaaaaaattatgtaaatagcacttatcagtctgtgatctttccactgaatttcattttcattattattattattattatttcatcatattcatttttctgctatctttctctatgctccatcacttttacttaaatctccaaaattccttccagtattttaaaacgcatatttttgttatgataaacttcttttttttttt

SEQ ID NO: 6697 - DNA, 246 bp, Gossypium hirsutum
atattaagattattttatatatatttacctactaaacctagttaacatatttacctatctatctatcttcctatctcttttaacatttccactaatttcctaaaattttctcaagctgaataacacccaacacttgatttttttttattgttattttgattccaaaatttttatttcttccagcctaaaaaatcacattaattctcgaatattacccattttgctcagggataagacttttttttg

SEQ ID NO: 6698 - DNA, 646 bp, Gossypium hirsutum
atttacgtggctttaggatttgaaacaactagaagagcatttggtgcagctcctgggagcttgtatcctgatgaagagcaatgtaaagaacttggtttgttcactcttatagggagagtagggtccaaaaaagataattgattgaaacattctttgcaattcaatgcagtccaattacattgtcgaattatttatgcacatcatttattggtaaaatttctttttgaaggtttttactttaaacagggtgaaaattgcttaacagatgaaagtagagttctccattttgatacgattttgaaagcccgacttcattgatctgaatttaaattttatttaatttgataaagaatcactggaactcggggaggaagagggtagatgctatggctgcatctcgaaatgattgaaaagcggagtgcatattgtcgaaaaaaacggggatcaactttggttttgaaaatggaaatgaaaattaggagtcatcaccaatcttttttatttaggtgtgatcggatcatcgagaagtttggtcattttaataaaacattttactaaaacaacaattttggtctacgaattttgagaaaacgggatcgggagtcggttacgtacgaggaaggattaacaccctcgtaacgcaaaa

SEQ ID NO: 6699 - DNA, 647 bp, Gossypium hirsutum
aacgtctctctcattatggatttctaaggtcatgtggagcattcatggttcatctcactacaccagcaatgattttttattcagtttttgatagcccttcttctccaccaaaaagattaatatccttcttgatgactccaattatttgctatgacatcgtgtagacttaaaatgtgccttaaaacacaagtttgccatttctacttgcttgggcattaagcaattcaaaaaccaatcgtttaacctattcaaaacacgatcaaacacacttgaaacgagccaaaacaatcattctaggtgtctaaccaatgtaccatcattggtaccacatttatatcgtcaaaacatatcatcaatgcataattataaacatgtcaaaatccatcaatttagcctagttcatatctacctaaaacatcaactttaattcgcatacacataacaagcattgattcaattcaatataccatattatggcttcaaacacaaacacatgtttacatatatgtcaaaccaacataatacttataacttcacttacaattcatctgcagaataactatcaactagacatcctaggtacatgccaacacaaaaagataaatatcagcacatttgagatcgagatcgttgttggatgttgaatc

SEQ ID NO: 6700 - DNA, 618 bp, Gossypium hirsutum
aattctggactggaagcattatcaagatattcttgaaaaggttccttctatggctgggcctaggttctggatgtgctgaggcactattgtaagaccttaaaaaggagattggctatccatgatgatggatttgcattttgagggttttgggatacacacttctgtatatactaaaaagtttatctcataagtgttacattatttgtttttctttacattgttctaatattttctgctcatgtgcaatttgataaagcaaggctctctaggttatctgaagagttacttgttagttactacttgtttatgttgcattagctgttgataaattccccgctgtttattttttggctaattctgcatgatctaagattgatgccaatgttggccaaggaaatggtgcctgtttgttgttattaggcctttttcattgtgttaccccactaatctgatgagtattaattaacattatgcctttcgaattacatatgcctattaagctttatagattagagggcaatcgtttcacgtgtgtgctgctgaaaagcgtacatttcatatcaaataaaaagaaaaggctgctggtaatgaagtaaactctgaatcttattgtatcta

SEQ ID NO: 6701 - DNA, 634 bp, Gossypium hirsutum
cgaggtatagctgttttgaaaaaaatccccggatcattatattataacaacaactattaggtaaacaactagtatgcttcatcagaaaatccctctctagaaaatctattaatcaatatagagtatgtgtaaatattgggttttaaaccagagctcatattaattatttatattctttaatttgaaatttagtcatattgccaagaatactttaatgtggctgtttttttaatttaactttaaaaagtttattaacttgacttaaatttcacttaattcgattcgatttaaaaaagtttcaaatcaaattaagacaataaaataaaactcatcaactttcgtctctattaaatcccagataactgcaagccacgatgttgctgccatgttagcccttaagaagaccctcggcccccctcgaatctctcgggtgaaccgaccctgatccatgcaacaggaaacacgttttctgctcagaggacaagcacgtcactcggatccaaattggtcatcagaacctacaaggtacacttccttcagatcttcagaaccttgttgaacttgagcgtttagaggtacaatgaaataacatttcaggtcctgtacctaccttaaacgggttaagctaactcca

SEQ ID NO: 6702 - DNA, 669 bp, Gossypium hirsutum
gaaagcagtggtgagtgccgtccatgatgttggcgccttctgatgatatctgctcaaaatgggcaactagtaagcacttctaaaaacaactgctttcgttctgcgaatcttgtgaataagtagctggtcatacacttacctacatatcattgtatgcttcctgaatggatctccaaaatcgagcttactttcatgcaacaaagccaagtcaccatcttgattttggtgaccatacatgatcaggtgatcagaagagttagtaacatcatacacattcactagtatcgcctgatttccagcaagttgcccgagcagattctcaacaagggactccacatcaaaggctccaccaaggtatctgtgttcagttacaagtttatttttaatgcacaagaaaatccactatacacgtaaaaatatgaataaaccacagcaattagcccagttaatgcataaggcatccatgttcatccagaatcccggaggcaaaatgaagatcaagatttctaggtgtctactaaacaaagaacagttgcttttcaatttgaccaatgaacgtcaaaagcatttcaattatcccagtttatgctatgcataaggcactcataaactatcttttgttgcttttcaaattgaccaatgaatttcaaaattacgttgaaaaatgca

SEQ ID NO: 6703 - DNA, 643 bp, Gossypium hirsutum
tgtaccttcctgcctaagggatatgaaataacccttcatgaggatgaggctcctccgaaaaagacggtggaatttgacgaagcaatcagttttgttaacaagataaaggtgaaaccattgttccataattgttctccttatcaactccttgtctagccatctaaattatacattttattttgcagaaacgattccaaaacgatgagtatgtttataaatcattcctggatatcttgaatatgtacaggaaggagcacaaggacataaatgaggtctataatgaggtaatatgtcttattttggtttgtaccagtgttcattggctctgtggtgctttctgaatattaatctctttgaacttttattaccagaaaatgttacttgattctttttctgttttctttaggttgcttctctttttgaggaccatcctgatctgctagatgagttcacaagatttttaccagattcttcagcagcgcctttgactgaacaagttccatatggtcgaacttcaactcagcgctataatgagcaaagctctgctacacccaccttgcagcatatacaaatggacaaggcaactgtcactgtttttaatatacaatttttggtacttgttactttgaggcatttgcgatag

SEQ ID NO: 6704 - DNA, 573 bp, Gossypium hirsutum
ggctctagttctgaagcattggtgcaattaggtatcatggtatttttttccagtaatcctgtaataaatacaaagtctactttgtatttgacgtaatagtgctcaatagcccttctgaattatcattattatctttcctcatgattgaagaattatctaaagtacagttggggttgcttaagatggtttgtatagtgcatttttcttatatagccaatttttatcctctagttctgaaccaaaatatggagtaataatcttcttgtttatcactgatgtttttggccggtgttttctgatgtggtagtataatgtggatgctatttttttcttttcccaagaagtaaatatggcacatggcatgctgtagtcacatctcaaatgctcacatgcatatacttatttaatttatattgtagtagatagcagcattcaacgagctttcttttacaagatatttactccttctcagcttctcttgttatcgaagagtttggtctcaaagaggggtatggtcctttgttcattagcacatttgaacgatttactcgagcatcttcagtaagggcccta

SEQ ID NO: 6705 - DNA, 622 bp, Gossypium hirsutum
  misc_feature (472)..(472): n is a, c, g, or t
  misc_feature (505)..(505): n is a, c, g, or t
aaccttaagtggtcagttcaaagtaaacaatatcaatatttatcttaaacaagtggtagtaccttgccggtcgatgaaccatagcatcaattaatttaaataatctttggtgggtctaattcgagctgtaagttcaatatacatatttaaactataacccaaaaagaaagaaatgatgtatttgatacatacagtatcttcaattggcactgaagtatccacgcgatgttgaaagtaaagatcaatgtagtccacatcaagcctctcaagactagattcacagcaagctcgaacatgttgagggctacccttcacctcaatcaaaggacgcccctttgattccaatttcacaaatccaaatttggtagctacttgaattttttctcgaggaagctgcttcaatgcctaacaacccaaagaaaatgaaatttgtcgatgaaacccacaatctaaataaaaaatgtttgctttntgctataatattaccttgccaagcatgatctcnttatcatgtttttccccgtaaatgtcagcagtatcaaagaatgtaattcccctatgaaagcttcttttatgattgaacatccttcttcatgggataaaggagcattgtatactcctg

SEQ ID NO: 6706 - DNA, 609 bp, Gossypium hirsutum
atttttgttttgatgaggttagatgattacatgagctgaagcaagcatgctccaattaggtacatgcgtgcttgccctaatgtaactttgttttcactttctttcttttagcggatacctacctacacggaaatcccaggattaatgaaatgtaaagactaaaggtttaatcacatttgccctcatccaggattaatcatcatcatcattattattgattgttttcgtttggacaaacacagtcacgaaacaaaagcaatgtaataaatggaaaaagaaaaggttaaaattttattacacgtattaattatttatatttacactcgacaaaaaagaaaagagtggttttttttgttgttgtggaagtggttctaagtggaagaaaaaagatggtttaagaagcccggggggatatgattgaatgggaaatggcatctaaggcaccaaatttgttggtggtctcactttgcttccaatgcaataccagcacaaggttggtggagttgattggaatatatcaaagccaacacattatagttgaggtcccgtaggacctatctttttagtaaacccatacatgcctttgcacattgtggaagagggtgactt

SEQ ID NO: 6707 - DNA, 599 bp, Gossypium hirsutum
ttagagaatattgttgcaatttgcactatttaccaaaagtccactaaagtcttactgctacttgtagcaccttccatcccagcttataatttcctctggaaacatctcgtgatagtatttgtttgtaagctgttatttttatttgtttatgaggacaagcgccacctaatctgacttaccagactttgctccagaccaaaagttccagcactataatctgaattttctgattctactcggtctacatctagattataatgggaaaatattcaccattaatcaaatagggacatggcttgcttcactagttggctattttatgcatgcacagatttcttaatttgtttattcacatgttggcacgaaccattcgattcttcttacttgtcaactttactacatctacatagatacaaaactattgtctttccctttaggtttagaatttgtttttttaatcagttctattcatcatcttagctattgacgataaactgtgagatttcactaatttgcttctctttaaaattacaatggagttcgttcacaggaatgccccattggcacttacaaagatattgatggctctgatgaaacct

SEQ ID NO: 6708 - DNA, 628 bp, Gossypium hirsutum
cttttgttagctcatacaattcttgaacgctgcagatagcatcaattaatgatatgtacaagctactacaagagtacaactcgagtttacagttatacaacagtaaactccagactgatcttgatacagcccatgaaaccattaagcgtggagagaaagagagatcagccatagtggagaatcttcacaccttaaggggtcaacataaatcattgcaagatcaacttatgtcatctatagtgagtttccatgcactggaaagccatctcttatatgacatatttttattgtgtctagtaatctggcctttctattgcacgttaagcacgtagttaggccttcactagtgaattttctagccataacttatctacattttatttttatcaactcatcaaaaaataaaattcttatcatagttgagaattttgtttcaagaagatgtttgatttctttaaagttctaagatgctgcaagtttcttggaaatgttataaataggtgataagctttgttgagttgaatatattgaaatgaaaatcatatgtttgttaaaagatttaaattggtgattaattaggtaatttacgggttaaaagaagctcaaatattgaccatattggttgctg

SEQ ID NO: 6709 - DNA, 649 bp, Gossypium hirsutum
atcacggtaaactacttctcaaccaaatacacaaatcattctgctagttgcccaagcttgccggagcagatgagagtttaagtttcaccaatggatgagctcccctgctatagtgaaccaaatgagtttgaatacaaagatgattgtgataacttggatgaatatgacgaagccagtgatacatgtgaaactgttccagaaacatatccaaatgaagtggttattgtttcagcagataatttgcatagcatcattcatgaggcttgtcatgaacaatctgaacacattgaagaatatgggacaagaaaaccagggaagtcatccaatcttggagtaggtaatgtagagtcactagttttctttcatccccctcctagcaaggcaacctcaattgctactggcctcaccatggtaaatgctgctgaatgtgcagatatgagcattgctgggaaggagtctttgaggggcatgcggtttaaatatgatgtggaagctgatgaagatctacaaccattggtaaaagagaagccatcaactattgacgaggaatatgaaaagctaggggacacttgcacttttggagtatatcactggcagccatttgatgtcatttgttcaccagtacgagcatcttcctcagttgttactg

SEQ ID NO: 6710 - DNA, 632 bp, Gossypium hirsutum
atatgattttaagtttaaactccgcagggcctggttttcactcttttaattactggcttgaacccgatatgctagcattttctggttgttacattggtggaggagacaaggaaagatacgagcttagagagatacgatgggaaacattgcctgtaagattccctcttttataatttcagaaccatttataaacattgcctgcatctatttagttaaactgcatccatcctcatattcatgcaggatatagatgctgttggagagagaaggcgaggtaaatgtccacttactcctcatgaagtaggcttgatgttaagagcacttggttttgaaaacgacgcatacatctatgttgcatctggagaaatatatggtggagaagagactctggaaccactaaaagatctctttccaaacttgtatacaaaagagatacttgctaatgaagacctgaaaccttttcttcctttctcttcttgccttgctactattgactacattgtttgtgatgaaagggatgttttcgtcaccaataataatggaaatatggccaagattcttgcaggtcgaaggtgagaaatctgagctatttctttcttgctaatttttttaagttgatctagaaaggctcc

SEQ ID NO: 6711 - DNA, 671 bp, Gossypium hirsutum
gtggtgtgtaaggtggactcactaaatgttcaataccattggtttgaaggtatgggtctaggctcttgtattcagtccctccatcagtgtagagggagagaatggttgtggagtagtgtttttcaagcaatggtttgagcatttggaaaatggttttgacttcacttttgagtttcaaagtaaataaccaggtatacttggtaaattgatcaacaaagatacaataatataacttgttgtcaatggaaaggactggagaaggaccccataaatcactgaaaatagtttgcaaaggttttgtacttgtgagagaaaactctttaaacgtcaaacgatgggatttattgcattaacaagaatgacaagtcataaaattgtctttgtttgaaactgataactggaacttgctgcaaataaaattgaaaagtcttaaatttggatcggttaagatttggaagctctgattaccataaagaagcagagaattgtggaattagtttttctgtctacaatgatcaaagatacagaggaatatatacaacctatacacgagctaatccctattctttaggagatgagatcaaagattaaactacctaaaattaagctaacaatacagatatagtgagtttaaacaaccatatgaaatggtcaaagtttaagcatgtgtc

SEQ ID NO: 6712 - DNA, 678 bp, Gossypium hirsutum
cataggattaagcgatgttgttgcttaaagtggcctaatttttaaatccaaaataaataaattgaaaattaaattaaactatatatggttcagcgccagaaaaggaagtttggtagtagcttgaattaactagggcggtggcagtgataaagaagaaagagcagtaatgacagtttgcctttgtttccaagggcagtggtctagtttaggttgaatggaaacagtcagattagctaacaacattctctgcactccctttccattttcgaaataaaacaggttagacttctggtttgcttaactccactattcaatcatcttcaaaaattaaataatataattaaaataagttacaaaaataaaaaaaagtaggaaaattatatttttaagaaacgaggaaaaattaaaaaattaaccgattttttaatacagtattaaaatagagatagagtcatatgatttgagtctatgttaaaacaattatctataatagttttaactatattttcatacaagagaatttattatatatttttaaaaattttattgaatttgatttcaataaattctttttttctcaatttaatttataaatttaattaaatgaattaaagtaatttgattttttaaattcttataatgtaacaatgttgcagttgcaccttgctccaccttgct

SEQ ID NO: 6713 - DNA, 647 bp, Gossypium hirsutum
caattccctgttacaaaaatcgaaaagcatcgaaccaataaaatgagaactgagaagaagatgggtgaaatagctgagtgagggtttcggcttatcgattagtcgcagcagaggagtgcgacggtgatgcagcagatggtcaagtcgacggtgatgcaatagatggttgggtccggcgatggagagatgggttgggtttggatttgctgaaaatttagggttagggggaaaattttaggggaaaacacttaaacttttcgggtatgtcttttgggataaaagggtggaaaaaaaacgatgtcgtttatgtgaatttaggggaaaactgatttggtgttttgggggaaaagcctaaggctgctgggcatgaaagaaatgaaatttaacaaattaaaacgacgccatttcggcaaaaaaattttgaccgtttgcggtgctttagaaacacacagctaaaagctatctgttgcggcgtttctaagaaagcgtcgctaatatccaacaaaaacgacgtcgttttctttaagcactaatgttttttgaaaaaacgccgctaattccctatatattcaactaaaacgacgtcgtttccataaactttaattctttttgcggcgttttttataaacgccactattccctatcca

SEQ ID NO: 6714 - DNA, 575 bp, Gossypium hirsutum
ttaatgttgatccccacgtggttattaactccgacccagagctgagacattgtctgtgatgttaaaaacataataaaatttcagtttcgcttaaatatcgttagaagaacttgaaatgcgatgatgatgacgaccatataataataataataataaagttccttcttccacgaccttcaataatctcaccaaactaacaatattttaaagaaccaaatttagataagattttttctcccgttaagtctacaacgcgtattggaccaattcaaccaatccatttcttttaagaaacctatatgtgaccttacctgccaaaccatccgcatggggtttccatcaaggttctgtaccggttgttttttctgaactattggtacattgaggtttcggtttgtttcagttgaagtttctgtatttttctctctcgcgcgcgcgcacacacatatatatataaacgaatacatatacgggggcatacatataaacacacatatatatataccgtaatttaattcaagatatacggtacactttatgtttcaacagtagataaaacaacaatttttgtgcaa

SEQ ID NO: 6715 - DNA, 617 bp, Gossypium hirsutum
cattaatgtttatttgtttgtgcccttgtatcgttttttgtttttaatttgattgatttgattaacgttaatgtaaaaattaaaggggaaggtatattaaatatgtattgattattattttttaaataatttttatttacatttaattatagataacaatataagtttatttattttaatatttaaaattataaaaaaataaaatagaagtacaacaaattttgtttttaccaaagattacaccattattttcttctaaacaaaaataagtaaaataatatattttattgttttaaaaaacaaatgtaaatttaaaaaaattactttattatatttattaattaatataatttatcattaaaatttaattctccactttaaatataactaaaaacggaaataaatattttgaaatttaaagaactaatctaaatttcaatgttttcatatatacttttgtttcttattttatatattagagtaaactatacaaatgatcactgagttatgctcgcgttcttgttttggttaaccaactttaaaaaatttcaatttacgcactaacgtcaaaattcgttcctgttttgatcacccgccattcaactgataatggaaag

SEQ ID NO: 6716 - DNA, 612 bp, Gossypium hirsutum
attctaggttatttgataagtgaatttcatgataaattcttcaatgttctttggtttcatgacattttctcagaacggccaattttctagtgaggtaaagtctcaaaagtcatctttgattccaaccatgtctgagaggtattatcatatacattttgctgggttttaattgttggaagctataatatgccactcaacatgcgtcttttatctcagttcaggtttatgggaatgaaagctgctatattgagtaacaattctggtttgaagtctttcggagaaaaacttggcttcaatgtattgaacttgaatggattgtttggaaatagtaatactccccctgtttcatcgattgataatttggcttctaagttgctgtccttacttgcattccaggaagggaaggtaacggaatccaaccagtttgatttagtgattttgcatattgggtctggggagaacttgaatgctaatagtggcaatgatgtggaattcttgaatgctttgcttggtgctattatgagtatagctaagcctggaactgaaattcgttctcgtctactcttgtcccttgtaatgagctatgggtctgtgtcaaaggctgatgagctg

SEQ ID NO: 6717 - DNA, 351 bp, Gossypium hirsutum
cagatgcttatcataagcggaatatttgtataatacatcttacttctgatcaaatgacccctttttgaagttttgtattgtcgtccaccaccaacaatcgcccacgactctactgggaactccttagttgagattgtatgcttaatggtgatgaagtgttgtcttcactgaagcataatttgcgaacatctcaacctcggatgaaggctgatcaacatcaacgtgaaatttactttgaggaaagagattgggtaaatgttgaacttctactttctctctcatctttgcatactttttgcacttcaattttcctctggggcaattctaaatttctttcagctgttttttttt

SEQ ID NO: 6718 - DNA, 669 bp, Gossypium hirsutum
aagctaaagctcacgtaaatagcgatggcaatggcaaatatggggataatgaccgatttgtatcccagagccaacccaaaaatcacatttgttgcagctcctgtcctgcaagcatctgctacatcctgcaccggactggaaaaatattcaaagaggacggtaagcataagctttatatcaattctaatctaacaattacaacaccgatgaagactcgcaagcatcctcacctgtaagcattgctagtataatattctgtagtataaccgataatgagtccagcccacaatccgatagcaacacagaagaacaagtgcctgcattatacataatcattaaacagagcaaaggggagtgaattcaaatgaagaggaaaacagtttacaggttgcataccaattcttcacttccttttcagttccaaaattgaagagagtgaattctgacggcaatgcaaagaagctaacgacagcaatcccggcagtcatgagaacggtggagataagcagttgtcgttttaacgacggttcgatgtcacttactttcttgatctcaaacagatcagttgcaaaaagtgtagttatcaaacataccacaattcccattgagctaatgagcaagggataagacattgctgtaaactcatggctgataccaaaggatgatatg

SEQ ID NO: 6719 - DNA, 623 bp, Gossypium hirsutum
tatttatgattcatttctatcttataggcctatgttcaacaattagaatcaagtcgtttgcaactagctcaactggaacaagagctcgaaagaactaggcagcaggtgaagtgaaaactctcaaaggcattcatttattttccaagaaaaagcacatctctgtcaatcatgttcacatatgtggcatatctaaccaattatgcaatgccttaattcagggtatatacataagcagtccatcagatactggttattttggactgcctggaaccgtaaactcaggtcggttcatcagattggctcacagagtatttagtctcccaacatcttaatgcactgcaaatatttactttgtgataaaagagattttgtcatcttgtttacatgccatttgcatagtcttctcttttactagaaaatgatattcaaaggtcttacaatgcagaaaacatcagttaatgtattttcatgatttttcttgaaactagacatatttttaacttattgcaattatcaatcttgcaatatcacatttttctcatgcaaatataaggtacctacatcttggtttcttctttagattagcttcatgtgaatattgcagggattactgcatttgagat

SEQ ID NO: 6720 - DNA, 642 bp, Gossypium hirsutum
tggtatatctagtccgcaaacacctatatttacttaggcacagtatcaacaaatcttgagtttgttgaacaaggagcctacaagtgaacctactacaagcctaacaggtatggttgatgttggtcaaaattggattatggatactggagctactgaccacatgctttctaatttccaattcttagaatctcctattgcatgtgtattgcattcaccctgtgttcaactcccaaatggctcttctgtttcaattactcatgttggcatctatactattcaacttggtcttcagcttaccaaagttctctatgttccaaatttctattataacattttttctatttctaaacttactaatgatctcaattgtgttgtttcgttttccctcatttttgccttatacaggatctctcaagtggaaagatgagggagattggtagggagcaaggtggtttttatatccttgaaccgtcttgacagactagtgtggctttgactccgtctgttgcatctgttacattcgttggaccatctttttttggcacactagacttggccatacttctatttcaagattgaataagatgcttaatcttccctgcacagttttgaatagtgatagcatacaacaatgtcctatgt

SEQ ID NO: 6721 - DNA, 588 bp, Gossypium hirsutum
gcattttcagtgagtggacagactgtgatgttgatgttgatcattttaaccagcattatcgggatgaataacaactgacggggtagctttaaactcccatccaatgttttgctcgagattacattgttaccgagatgatgttataataccgctgcacagctccatatttccttcgaatccgatcagaattcagtacaatcattgacatccattgttttggttgaagagcattacgcgtgcctgcaattgctggtaacgggaagccagttaggcagaagacactagcttatgcctaggctcaattagtccacccacttcaatgatttaagcttctctttgatttttattttttttttgtatgttagagactagagagaactcaacaaacccccatgacctctcgcttcaattttggtttgactctgtatttttttaaccaccaaagttcctcattttctctaaccctcctttgatttcatgtcaactcctcattttcccctctttcacccatgatacgtaagcacagagtaattattcaatcctgactagacctaatccaagaggatcggtctaatctccaatagtcac

SEQ ID NO: 6722 - DNA, 617 bp, Gossypium hirsutum
ggcatgtcatgctatcttacttttataactatttgtattctgtgaaacagattttggaactaaatcagaagttatgacatgatttatgtagaataagtatagctgttgctagaaaacaatggcctttgcccctcctaaaaaccaatttaaaatttcctccggctaaggaatgggccataatgaatgatagacctagcttgtgggaggtatcttgcttgctctctcccaccgacacacagactgtttttttttcttttgggcccccaaaataaaaaatcaaaaagcattaaacccaatctctgaaagggggataattaactgccattgaaaccttcgggaaattctttcaaaactttctcccccaaaactttcgggcacctttttccggcatgcatttgaatgaaggattctgtttttttctagggcctgcctgttttcaatgatccatcagctccaagtaatattagctttaatgactgccactttggaacggaatgctttcagcgagtaaccaaggtgaaatccagattggttttaaagatactgaagctaggatacaatgtacttttgagtgatgtggatatatactggtttaaaaatcctttgccattgcttcc

SEQ ID NO: 6723 - DNA, 609 bp, Gossypium hirsutum
ccaacatggcagcaacagttccccttctattgctaaaaaaaactctgggaatgatgagatggtggcaataggtttaagtctaagtggtgcgactcctcactttgttaaaaagtagactggtgtagagatggagggataaagagacaacggccattacaacaattgcgatgaaccatactcacttgagcatcaatgtaaaaagctattttggttagagataaaggattctaacaatgttgtgcaaaaccaagatgagtaggggaactaaaatatccttgcatgcagtaaggggcaaaaaatatgcacaaactatgcaatcactagcttgcgcaagctctttttccaggatgagagtaatgttatgaatgccttagtgcgcaagacaagaagtcagatgtgccaaagatggaaagagcttcttacaaatttttcatgctctaaaataataataaaagtatttatatctgtctatctgtctatctgtctatctgtctatctgtctcatctgtctgtctgtctgtctgtctgtctgtctgtctgtctctctgtctctctgtctctctgtctatctgtctatctgtctatctatctatctatctatatatatat

SEQ ID NO: 6724 - DNA, 628 bp, Gossypium hirsutum
  misc_feature (573)..(573): n is a, c, g, or t
  misc_feature (575)..(577): n is a, c, g, or t
  misc_feature (585)..(589): n is a, c, g, or t
  misc_feature (591)..(592): n is a, c, g, or t
  misc_feature (610)..(615): n is a, c, g, or t
ttcttcatgttagattttggggattggaggtaaattgtctgttctgtgccccctttgttctgtctttgttgtcatctgtttccagtaaagtagagcacatgcttactttatggagtgtctctgggaaaacttaatagaatgagatagtctcataatcatatgttgcgagcgaaagtataaatgctagttttggctgccctttcatgtttcatagttttttttttcacttttagttgaacattttgctcctgtcttgggcattatatgcctataacttaggcacatggaaaaacacaatactgattagggatttggttgacattggcttcttgtggcataaggaaaaaccaaatcaggagttccacggattggtctgtgaaggagccaatgttcttccatcaaagtttcttgaggatgcttttcgtgatggacatggtaagtttttttttttttttttttttaaaaaggggggggctttcccttaaaaaaaaaatttggaaaacctttttttaattttgggaaaaaggggccttttttttttttctttttgggggcaaggggggggaaaaaaangnnnaacccccnnnnntnnggaaaaaaaatttttccnnnnnngggggggggaagg

SEQ ID NO: 6725 - DNA, 642 bp, Gossypium hirsutum
aaagtttatataccagcaatcaattacattttgatgttggcttgtatcggtgtcactgcgggtttcaaatccacagtaaagattggcaatgcatatggtaatcatttcaacatctctgcattttatgctttagcctcttctcaatttacaatgctaatgaatttccattattccttttcaatgttattacaggaactgctgtagtgtttgtaatgactcttacatcatccttgctggttctggtcatgatcatgatatggaaaactaacatatttttaataatcttatacattcttaccattggattcgtggaactactctatctgagttcagttctctataaatttacctccggagggtacttaccgctggcattatcagcagttttaatgattataatgtatgtttggaatgatgtgtatcgaagaaagtaccattacgagcttgaccataagatttcccctgcaagattaaaggagatatctgccaacaaaaacatgtctagaattccaggacttgccatgttctattcagagctggttcatggtatcccacccatattcgagcattatgtctcaaatgtaccagcattgcattccatcattgtctttgtttccatgaaatcactacacattaacaaag

SEQ ID NO: 6726 - DNA, 604 bp, Gossypium hirsutum
cgagatttatatttctcatgcggtctgatagctccccaaaaacgccatttatgatctgcaccaattcttctggaccttccttatcaggtgttaaacgagaataccatagatctgtcacccactcagaaataagatgtcttgtgaattgatctattgcattttcaactacaggagaatttactttacgtctccaatcacaatgtccaacaactttaggaccttctggtggttgctttgaagttgaggcatctgtagcttcagatttgatgttgtatgcatcagctttcctccgcatttcatattcgagcgagaaataccggaggagaatgattaaggaggcagcagcaggcaaattaaccaaaaccgaggagcttgtcactgatataagaaacaggaaattagtaaatatcaactgaaaaacaaaaaaaaattgaaaggaattaatggaaatcatataatgaaaatgtcattttaaatatcttaaactccaaatccaaattaagaaaagaacttcatgtgtttcaaattttcattgccaccattggttgatagcattgtactgcactagcaggcaattcgaagaaaatgtaaagagaggagtggg

SEQ ID NO: 6727 - DNA, 651 bp, Gossypium hirsutum
  misc_feature (28)..(28): n is a, c, g, or t
atttttactacttcagctgctatttctnggaactccattgccaactatacaccggatcattgtgctccattgtgaaaaaccatatttttatttatatatatatattaaattatttatgtatttatatattttttaaagtttagaattaagagaaaattaataatattgtttttataatatataaaaaaataaaaagaaatgtttattttatatgatgattaaaaactactttattggattaatatattttatataatgatttggttttgattattgttacttgtttaaaaaaaattattgtattgataaattttcaaaaatataaatgatgtaattataatttcgtactatcaaacatgatatgtggaattatgatgtaactatactctattaattaaaattataatttttttttgtaattacaagataatataattactaccctaataatttatattttaattcaattaatttgtgttgtacaaacaaatgaaataataaatgtgtataataagaggtgttaaaagagagttttattatgtagtgtagacatgttaaatcaaataaaaaatgatgggaagtagaaaatatatataaataatagtaaaatttaaattctccattttgagaatgggagaagaatgtggcttt

SEQ ID NO: 6728 - DNA, 401 bp, Gossypium hirsutum
gatagcctctgacttgggaaatgtaatcactagatttcgactttaacatcattcttcttaaaaatatgtataacaatagcggatgaattttatatgtataacttcatcaccaatgcttgtactagcagtacaaaatgccaagaacatggcccatcgggagagagggacggggtgaagcagcttttttttaatattaaatattaatataaaatttaaatttattattatattttttgaaaatatttatatatttttatatatttctttgaataaaggttattttttttaagattatgactaaattgatataatatataaaagttgagagctaaatttattattatatttattttttaactgccacattagtttgtcatttgtaattttattgggagtggcca

SEQ ID NO: 6729 - DNA, 547 bp, Gossypium hirsutum
ttacggaaaagaaatgaaaggtaacctaatattgcaaattgaaatcaaatatgaatgtcgattgagattgtattatatcaatctcattggtatatatgcatatgcttatgtcattccgactttttatttttctcgaaaaattcgtgttcaaaaactgtgtacaatgcatatctagactcaacagtgaatcatgaccttctaaatacatgaaaaaaagacctcaactaaaatgatatggctcctgggttttagcagcagcattagaattatttaggttaccttatgacctacctcaaattaccttatacacaaagcttttgacaattttaatgacaaaacacacacataaaaaaaatgtgttcgatatgaacatactcggtttctttataaattttttcatatatttattggatcatatagtgtcagatattaatatcttcataaatttctgaaaattccaatccaaccatcgaaattcaacgaatgtaacaaaaaacaaaaaggaaccaaattggactaaaattaaacttagataatgaatatccag

SEQ ID NO: 6730 - DNA, 404 bp, Gossypium hirsutum
tcagaataagaccttttgctttattagagcaaacaactatttggattaatttaaaaatatcaaatttatacggactaacttccaattttgaatatagtatagggaccaaaatataaatttgacccataaaaaatacctgctttgtatctccttgaagttcaactgaagctgagaacctatcttccatggcctctctcctccctcttttacagtatactgaatacccatctccctctctctccaactctttcccgacttcgcacggcgtcgccggaatccccaaactcatggcctccgtcgcaaccggtatttccagcctcgccggtctcttcctctttaaaaccgttgataccggtcccgatccaagtcctggagccgaacccgaaccggaggaaggcgatgaa

SEQ ID NO: 6731 - DNA, 618 bp, Gossypium hirsutum
tttatttattctatttatttagaatttctcaacaaagttggaaacagtaggatggtatgtgtttattcttttccattgaccatttggatcttggtgctgcttgaaactcttatcatgcaatatatttggaaaagcacctgtttgtcagacaatatgtctagctttgttgaaactctatccaaccttcctaatgctatttgcttgggaacttgaaattctataaatgtatgaatgcactattgactccccccccaactgttttcagtggatgtttaggaatgtaaatggagatgacctgaattagattattgatattaagttcgaggaactattcaagcctttctggctgttcaactcggagaactagttttctattttcacattctttatgcatcattactccaccccccttcccccttcctatgtctccagagatttatctagctttcaatttttctcactataactgtttgttgcaccaataggctctggaaacagcccggcaagttgtaagcttttcggtttccccagcaccgattccttatgaccagatgaagagtcagtgtgaagctagtgtaatgggtaaacagcagaagatgtcaatacttcatcacttca

SEQ ID NO: 6732 - DNA, 889 bp, Gossypium hirsutum
  misc_feature (600)..(600): n is a, c, g, or t
  misc_feature (618)..(618): n is a, c, g, or t
  misc_feature (763)..(763): n is a, c, g, or t
  misc_feature (865)..(865): n is a, c, g, or t
  misc_feature (884)..(884): n is a, c, g, or t
  misc_feature (887)..(888): n is a, c, g, or t
agtcaggtcgcaaagcatcattatccataagtaaactagatgtcttaagtgccaatgagctattggattcagtaagatgagcggttctatttaatatatttatttattctatttatttagaatttctcaacaaagttggaaacagtaggatggtatgtgtttattcttttccattgaccatttggatcttggtgctgcttgaaactcttatcatgcaatatatttggaaaagcacctgtttgtcagacaatatgtctagctttgttgaaactctatccaaccttcctaatgctatttgcttgggaacttgaaattctataaatgtatgaatgcactattgactccccccccaactgttttcagtggatgtttaggaatgtaaatggagatgacctgaattagattattgatattaagttcgaggaactattcaagcctttctggctgttcaactcggagaactagttttctattttcacattctttatgcatcattactccaccccccttcccccttcctatgtctccagagatttatctagctttcaatttttctcactataactgtttgttgcaccaataggctctggaaacagcccngcaagttgtaagcttttnggtttccccagcaccgattccttatgaccagatgaagagtcagtgtgaagctagtgtaatgggtaaacagcagaagatgtcaatacttcatcacttcaagcatcaacaggaagccagtgcaacctcagaggaaattgaaaatganattctctatttaccaagtgaggtatgtttggcctgcatatgcatgataaacatctgtaagaatctctctagtttttttaatggaacctttaattatcatttnatccttttcactttctttnctnna

SEQ ID NO: 6733 - DNA, 685 bp, Gossypium hirsutum
attcagctaggtgcctccctgtgccattaatcaacttgctttcaacatgttcaaggacagttgaagcttctttaccattgtgaagttcggtttgagcaaatggcttctgtgactcatcctcattgtgaactattacagtgccaaactcccctgttaaacataagatcagaaaaagagagaacaatttgacaaataaatcttattcaaaaactaaaaaagaaaaagctaacagctctatgcaagtatgtttatcctagttccagtctgctacatttgaaatgacaaccaacaaggaatacctcagaactttctattgcctcctaaaaattccttttcattttaaataaatgcctctcattagtatccctaagaggtttgagacaaggtgatcataatgaccagatattgtcaaccagaattaaatttggaaagcaaagctttcactgttactttccagccctcaaagcaaaacaatataccattcacttctacatcaggttcatataaaacataatgaagttgtcacctacttaagcattcttacaagtaccacaacagccaacacacagtacaatccattttacccctggattctgtacgagatttatgcaatacaagagatccattgagaaatgaatatatttctgacttcataacttcaccattaattggctaccttgcatat

SEQ ID NO: 6734 - DNA, 614 bp, Gossypium hirsutum
  misc_feature (52)..(53): n is a, c, g, or t
  misc_feature (488)..(489): n is a, c, g, or t
aacctggtactgttgatggtaaatttgtacatttcattgcactaccgtaagnncttttgggtggttggagaaacagacctggttcctgtgtttccgaagttgccaacgaattaggatctattcgttgtacatgacttggtgtctgatttctgtcttggaatattgttgaatccactgactaatccattctctaatgtctgttacaccaagttaccccgaacgaatagagtactgagatccaaatcatgtggctttagcgaaggggcattggttgacgtgataatttatactgatcaattaacgtttacgaaaagagaaattgattttttttatcactaaccatgaattagatgtaaatttttttataaaggctcagtttttaaatgcgccttttttagtaaataaataatgggaaataatttgaatcccccgcaaaccggggttgttgatactgttcataataaaatgtcatcaaaggttgaactgannagaaataaacaatgccactttatgatgtgtaggtttcttcaaccacccatgcttccatacgttaacctccatcctatccctccacgccttcctcaattaccttccttctattaattaatcaaggg

SEQ ID NO: 6735 - DNA, 559 bp, Gossypium hirsutum
  misc_feature (555)..(555): n is a, c, g, or t
ctgcattcacaattgacatcaaaaccaaaaacagaaattggaacaaaatacaatattttctctagattgaccgaaagttaatcttggttaatgcaaaaaaaaattccatccaagttgccaatgaatgcaaaatgacatatggatatcctagaaactccttaaaacttgaaaatgacaacacgaacaaacaattaaacaacaaaaatagacacgatcagaccgtataccatggattaccacgtttaagaaatgcccaatagtttgattaggcaaaagccaaacatcgaacatcttattttcaaaagtaaaggagaactataaacatagatgccgagagctacaatatctattctacatgagctgaaagttaatctcggttaatgtaaataacttccgcccaaactgacagtgaattacatgttacaaaatcgacaaatgggtatcacagaactacctagattttgaaaacgacaacacgggcaaacaattaaacaacgaaatacgcatgatcagaccatatatcatggattaacaagttcagaaatgtcaaagtcntcag

SEQ ID NO: 6736 - DNA, 561 bp, Gossypium hirsutum
  misc_feature (549)..(552): n is a, c, g, or t
taggttgtttgttgacaatcgagcgattccacaccttcaattggccaatctcactaattatgcatctgctcaacgtgtttcttgatagattcagagtaatcaacccttgcagatttgctatttctctagggatttccccacttaatttgttgatagacaagtcaatgatctttagtaatccaagaattttcccatattctttttccgcatcttttcatataactaatagatgatcattgattaattcggaataaagccttttctattaaatttaatatagttaagtaatgtcttaatacaacaagggatcgtgttttaaattctcttcatatttttaattttcgacattaaggcatcaagtaatcaactaggtaccaactttgggcgttatgagggtgctaatccttcctcgtgcgtaaccggctcccgaacccatttcttggatttttataaactgaaaatcattttaataaatcaaaccttttattaaaatgatcaaattactaggtgacccaatcgcacctcataaaaatgattagtggcgactcnnnnttttcgttt

SEQ ID NO: 6737 - DNA, 645 bp, Gossypium hirsutum
atacaaggatttcaatccctagcaatatgaactagcaccaattcttaccccattaagggtaaaataatttctcttcaatcaaaaagaaaacctacctgaagccatcgtggaaagccaaaggaacctcttggatgatgatatgatgcctgtccatcatccttgattgtagattcaccttgacaaactatttcaaacaaagcaatgctttctgtgcatttatttgtgatgcgcaaaattgatgtgtcctggttttggaggataatattgttggtgctgacaattgtttctggaattttgcataattcttgaagcttgcatctaacttcctcatttgatctcactatatctccaaattcttgtctccttactgactcatcaatatgagcaatttcaacagaaaataagcaaatgacaggtttgtgatcactgtctgtcacatccatgcaagactcgtacctattcaagagatatatcaggatttattcaagataattattgataacaaaataatagatgataaggggaaaaaaatggcatctggcctgaaaataccaaatctgtggattggaatggtaatattaacaaacatacccctttttcccccttccaccaaaaaagagaaaaaaggagacaagagacaaggaa

SEQ ID NO: 6738 - DNA, 646 bp, Gossypium hirsutum
agagatcagcaactatgaaacatttcaaaatggcttcaaacttgaacaacagtagatacctttgatctcccactcttattgtaattaattgagtacctcttcaagtcaccaacctcagagaaaagcacctacaaatcgaagaagccactatgacaaaaccagacaaataactataaatcctctaatttgcaacaaagagaacaacaacaaaggtaaaccttttctcaaaaagctggttgggaagaaaaataagccgcaggataggtacagtacattgcagagagaagtttctagcagcatttccactaaaatatgcatagatagaccataaaaaatggtttcaatcaattcaaattcatattatcataattcatctccaaatctcaactcccatattcctcgttctgcagcaccatttttatcttaactagcaaacaaacttctgaaagaagactgccaactgttccttgtaccagaataacattacagaggaaagataatagaaggaaacataatacattcaaaagacaattgaagtttctagcaatgtttccagtaaattaagaatggacagtttcaaagaattcaaattcatctttttgcaaccatctccgcaatctcaacctgctatataactgagtcccaa

SEQ ID NO: 6739 - DNA, 712 bp, Gossypium hirsutum
  misc_feature (7)..(7): n is a, c, g, or t
  misc_feature (522)..(522): n is a, c, g, or t
  misc_feature (544)..(555): n is a, c, g, or t
  misc_feature (560)..(566): n is a, c, g, or t
  misc_feature (570)..(571): n is a, c, g, or t
  misc_feature (580)..(585): n is a, c, g, or t
  misc_feature (589)..(589): n is a, c, g, or t
  misc_feature (591)..(595): n is a, c, g, or t
  misc_feature (623)..(650): n is a, c, g, or t
  misc_feature (653)..(654): n is a, c, g, or t
  misc_feature (656)..(660): n is a, c, g, or t
  misc_feature (664)..(673): n is a, c, g, or t
  misc_feature (676)..(687): n is a, c, g, or t
  misc_feature (689)..(690): n is a, c, g, or t
  misc_feature (702)..(703): n is a, c, g, or t
  misc_feature (706)..(709): n is a, c, g, or t
taatacnattgttttaattttacattagatgaaatagtatgaactttacaggattgcatagtgaaaacttctggttatcctaaatttggatgagatgaatttcttcctatggtaacgaataaagtaaacttcaactaaactatatttggatcattttctctcccatgtatgtgccagttattagaaagtttatacaatcttctgatgagtattttaatgtccataagagctacagaatagaaatatagcatgcacatagaacgactttgatgatcatgcatatatagaaaaccatgaagccaaatttcaattattttggaacaaagagaagtaggaaaggaatccaatgggccaacggtatttctgaaatatgtataacattaatggagagcctcaggcacaactccaccggtataaagatagatttcaatcatagctaacaggtaacaaggctgacaccaatacagaacacatacttcaacaggatgaatggacacgaaaggaaagagagatagagagagngatgcatgcatgggtggtaaannnnnnnnnnnncatannnnnnncccnnctgaactcnnnnnntcancnnnnnacatgacatgagttttgacctgatcttnnnnnnnnnnnnnnnnnnnnnnnnnnnnggnntnnnnnttgnnnnnnnnnnttnnnnnnnnnnnngnnaagggttaaaannttnnnnttt

SEQ ID NO: 6740 - DNA, 604 bp, Gossypium hirsutum
gaaatgaaacaatgtaccatttagaattatacttttgaatcatcttttgcatcaagtgatttatatgaattatgattaccacatccacaatgtttggaatggaaacggattctaaacatatcaatgttggataggattagatgataccttctccagaaagcaaagtgcagatagaccagccgtttgattgaaagagatgtccaccggtatgtcattcacagtgcatttcactattttaacctgaaatcaaattccaaaataaccgaaatgagctcaagatgattttaagctatatttgctgcttacgtacatatactaatatgcaataaataccatttaactgcacgggaacaacgacaaagatgcagctgaaaatttaatatcagcataatagcacaaatagaagttgttgccaagtgtccaacaacatatgacttatgtggttttattcaatatcagttaagcgcctagtcgtttgctaccctaatttccgttatctacattacaggaacgtcttttaaatttttacacgtgacagaaagttataaagggtgctaccttaatcgattagcattgggatgcagtttcgatgctatgtccaata

SEQ ID NO: 6741 - DNA, 648 bp, Gossypium hirsutum
tttgttatgattataaattaataaatttaagaatttttttatgtcgttgtgttagattcttcatttgttttgagtgtactctaaagaaattatcagcttttcttattaagagggacaactttttctcttaccttttattaaatgaaaattactaaattattttattttttctaaatagattcttttaacttttatgatatctaaataaaatttcttaatttttgtttctatttaagtttttatttcaagctaatatttatttaaatacagtaatacaattcaaacaacttatatatatatatatattaaattatttctaaaatattttttacattattcaaatatcataaattaatttaatccttaaacttttatttttaaaaattaatcattttactttttaaatttcaaaattcaaatctaattaaatattattaaatttattaatttgacattttaaaatagaaaaatacttacttggtaactatgtttttaatgataaccaataattttaatttctagactaaattagtgattgaaccaacgaggcaatcaatttactaatacaggcaacaaaccagtaacctaatcggttcgatgaaaaaattattaaaaattaagataataaaaagctatcactctctccca

SEQ ID NO: 6742 - DNA, 573 bp, Gossypium hirsutum
tgtgagttgctttctttcttcatgaccttaaaagatggacccattcttgccattttttaaattaaataaatttcatgttctaagaaccttctgaattatttaaactcaaagatacataaacattttcaagagcataattacaagtaaccaatagaactactgtgttgccaaaacaagtcgtaccacacattgcatgtaacgctgaaaataaaaaaatttgaagtttcaaaccacaattttagacaaactgcgtttaatctctaatttctaggaacaaagcatggctagaaagtacaaattacaaaatgtaaaaaaggataaacataataatattgctttcataattaattgttccatgtttgtcaatagatataaaaatccatgcttccatttctccatttttctcctcccacaacctagtgaagtggattcaagaagcaggtagagaggaagactgaacaagggctgaaccaaggaggttattgcaaagactagcaccttcatgtgtcttgttgtgctccgctgttggactgcttcccgcactgctattagaaagagaaccgaaggaagtct

SEQ ID NO: 6743 - DNA, 629 bp, Gossypium hirsutum
ctctgtctccccctctgtacagcttggtaggctttgaaggggtggaagacacatgtttcatggttacagcttttggggaaagaaagttgaacctttggttttttagggatgcggtcgtaggcctggaagcaacctgctgctgctgctgctgctgctgatagacttgagcttggatttggaggatttgagaaggggtgagttggtttagcccaattgaacctgtttgctcaaaacccatcaagttttgatagttacagaacccttgttctgagcacaaatgggtcctccatggggagaaaaattcaggatacaggttagactgtgaatatgaagaagaagaagataaaggagaggtagatgaagcacttttcataaaaggttcaagcgctttcatcaactccgcactaaaaggatctgagaaaactgagctgttgctgctgctattatacatatctatagctgctgccatattcaataactaggtaaaaacctggatcttaacccaaaccaaagaacaggtactaatttgattaaaaaaaaaacaaccttgagggacccaaaataaaccctcttaactgatgataataaataattgaaaacaaaaaacaaaaaagggaagtctggttctc

SEQ ID NO: 6744 - DNA, 634 bp, Gossypium hirsutum
  misc_feature (14)..(14): n is a, c, g, or t
  misc_feature (16)..(16): n is a, c, g, or t
ggctttagctgttnantcaaatcaagagcccatcccattgacaatttggaaaggagtttttaggtaaaataattaagagaataaacgttatgatcggttaccataatactttcctaatttatgcatattaataattaaagagtaatggaatagatagacagttatttttgtgttaagaaattatctttatttgctccacttaaccaaaatgacatgcattcttctcttttggatattgcaaaattatttatttaaatagcagaccagacgtagttttggtttgggaatgggcagtctcgtattaacaaccccatagtgattgcaccacgtgtagtaggaagccaaagacaagacgaccatcccccgccattaatttactgtccaaaaacaaaaattgagagaagctaatcaacctcctccacctggctaacgttaataataaaaaagaaacaaaactcgtcttgatttgtccgctttgaagaaactgtaatcaaccgtccctcccctcacctgacctcatcaatcacctttctaggaagcttttaaaagtcggttttctcaaagcagaatttggagttacatacactttacttctgcaattggccttgggattcaaacgctgttgttggattag

SEQ ID NO: 6745 - DNA, 515 bp, Gossypium hirsutum
caaacttcgcttgctgcaattctccgataaattttcaactctataacaaccggaaagatctagagtttttagacattccattttcccatcaatctccggaaaccttacaagacttgagcaacccgaaagaattaatgtttcaagagattccattccaattttggtcggaagactcctaagacttttgcaatctcttaaattcaaaagtttaaggctcttaagcactgcgattgatggatgaacatccactaatttggtacaaccttccaaaatcagaacttcaagatttgatgctgttgtgaagtctggtgtcttgatcaggttttgggacccttcaaggttcatcattttcaacttacacaagggctgttgaagatcacaataaattagaaacaaatgagaaaacataataatgcttatttttgttacttacctcaaacttaattaaatcatataaaaataaataagctcaaattgattgaagaaatgagttcttactcactctccctcccttc

SEQ ID NO: 6746 - DNA, 609 bp, Gossypium hirsutum
gccgtcgtcattactggaatcttctaattctttcattttattaaataaaaagaaaagcaagttcaattctatgcatcctctctgttgtatttccaccgtatcggatcattccccagtcaaacctttacccgacaacgtcgccatgcctcctcatccacctgtaactaccgtaacgaccacttcctcttccggctcttcatttagatccaactcggttcgatctatggtccaaatcctgtgccagtccgatcaaaatcagaacaatcaacatcgccgtactagtagcgtggatttgaatcggatgagccagagaaatgggacaccgttgggaagagaggtttcgaaggctctgaatctggctccggctccggctcctccgccgcaagtggatgtgaagataaacaacatcgtggggaacggaatatcgggagtgctttacaaatgggtgaattacgggaaaggttggaaaccgagatggttcgttttgcaggacggagttttatcatattataaaatccacggacctgataaaatcgtcgttagccaagaaacggaaagaggatccaaagttatcggcgaagaatctctccgtcttatctcccgacatcg

SEQ ID NO: 6747 - DNA, 609 bp, Gossypium hirsutum
aatagtcgcacagttgcaccatataagaagctgaattaaacaatcacatcacttgtgcaagaaaggaatctttaatataacaacagttgcaacttgcactttcaaagaccataattaactgaataacttgcatacaacagtaatcttccattacattttctaaagacaaacattcacctgaacaagttgttcttcagtcagagccaataaactgacaagaacagggaatcgcccaacaaattccggtatcaaaccatatgcaacaagatcagtactttcaacctgccaaataaaaatgtttcacatagaaatgtgagaatctaaaatggtatgtcatcccaaatactatatagagaacttacggtctccattaaagatgatgtcaaggcagcatttgtaacaccgccagctctcatgtttgcacgcaccggagctccaaaaccaattgaagaatcttgaagtctgaaatccattcaagaaactttaaattgtacatgttaaaaagtactggagacaaatacagtaatttctatattggtataacctttctgaaattgttttctctatgtcaatgaaagcacccccacatatgaagagtatgtcctttgt

SEQ ID NO: 6748 - DNA, 763 bp, Gossypium hirsutum
  misc_feature (631)..(631): n is a, c, g, or t
  misc_feature (636)..(655): n is a, c, g, or t
  misc_feature (659)..(666): n is a, c, g, or t
  misc_feature (669)..(671): n is a, c, g, or t
  misc_feature (673)..(673): n is a, c, g, or t
  misc_feature (676)..(679): n is a, c, g, or t
  misc_feature (687)..(689): n is a, c, g, or t
  misc_feature (691)..(693): n is a, c, g, or t
  misc_feature (696)..(700): n is a, c, g, or t
  misc_feature (703)..(705): n is a, c, g, or t
  misc_feature (710)..(710): n is a, c, g, or t
  misc_feature (712)..(739): n is a, c, g, or t
  misc_feature (744)..(760): n is a, c, g, or t
tgatctgttgcctttgccgcagcctttatgaggcagtagctaattccaccagttattgatgaaaaaaaaccaatcaaggctgcatatatatggttacttcctccgcaacttgaattgcttgcttcctcagttttctgtagccctccttccacatccagcaacaggtttgccatcagtaatgcacaattataggaaactatgtaaataattccatgatccaagaagagaaaacaaaattgaaggacatggttttgctcatggcactagcttcatcataatcattaaagaaaaaatgtgcatatgcctgcactagaatgaaaccagtgtttttaaacctttttacatgaaaatgcaatgtactcctcaatgacctcaactctgaacttagaataatttcatagaaaaaagaaagaagataagtacatgaataaaaaattgagtctaagcgtcacctaggaataaattaaaatggatttaaactgttgcctcaaactgctttgttgtggtttgtgatggtttggtataaatggtatcaagggttactgggttagagatgacaattcgtttacagaaagtaaaaatgataacaaaaagttgtaagtaaaggtttgatccatgccagtagttgaanttccnnnnnnnnnnnnnnnnnnnncaannnnnnnnacnnnanggnnnnaaaaaaannnannngtnnnnnccnnnccccntnnnnnnnnnnnnnnnnnnnnnnnnnnnntatcnnnnnnnnnnnnnnnnnctt

SEQ ID NO: 6749 - DNA, 607 bp, Gossypium hirsutum
ctgatctacattgtatctaattaaaggggaaaaagcacattacttttcccggcagtgttaaaaacatgaatggtcaacagccccacaaattataaaaggtgaaatattatgatgacatttacaatcatggtgtcatggacaaatgacaatgttcaacagactcgcatcgattttattgtagagaattcgtggcccaactaataaaaaacccgaatttaattcaaacttgttgatttgggcgcctcaacttgatgtgcacgaattcaaaactttgataaaccagaaacgtgggcagttttgttcccgcaataatctcatcagtatcatatttcaaaaccaacgtctctaatccatttatttaaaatccaaatccccacaaagtgcgcagagtaatgatcgaagagaccccaccatggaaggaccttgtactgacgaagaacaagccggagaccaaaagcttcaacatcttttaaagaacttggaacatgaatgggacttcataaagaaaagacctgaaaaaatcctttatagaacttcaacaggttcatcaactaaaatgattaaaacccttggatcactcaaccaaaactcccccagagaactcatc

SEQ ID NO: 6750 - DNA, 646 bp, Gossypium hirsutum
tgcatctttggaccggaaattgtcacgttcagatagtaagaagaatttataacgacccgaataccttttgcgaatcggtatagtttaactgttgattgctgttttagtttgtcaaacattcatcctttttttgaaagtgttctaaaacttttgaggtttagagaaattgacctttatgtgtattatggaatcaaatgttgaatagatgagttttggagaacattcttaaagtttttttcatggtgaaaaatggttttgctactcgggttttaagttcggtctagatcaggtgagtttgaggtcgaggattggtgatagaatccgttaaattatcgatttttattcaatcggttcaattggtttgaaggtcgatttaacaataattaaataaatatttacaaaatttataaaagtaaactacaccaaggtcactaaattattagtaagtttacattttggtcacttaactttaaaaagttatagaatagttatcaaactatgtgaaagttttcattaagtcattagcctttagtacgactgttgtatggctttctttgttcacaccgataaaaaactctcattccccttctcttttacaattaagtgttttttttttcccaaaacaattttgaacgtcacgaatcta

SEQ ID NO: 6751 - DNA, 670 bp, Gossypium hirsutum
catgagatgcttgagagtgtccattttggcccagatgcttgtgagagaataagcagtgatgcaatcaaagcacttgcatattgctgccgaaggttgcggaggctctggatgtcaggtgttaaggaagttaatggagatgctataaatgctttggttgaacattgtaggaagttaaaggatgttgggttcatcgaatcagacaacattgatgaagttgctcttggaaacttgaattctgtaaaattttatcagttgtggggactagaaacttgaaatggggatctgcggcacaagttttgagtagattgccttgcttggtgtgtttagacatttctagaactgatgtaaatctgagtgctattacaaggtttttgtcatcatcccaaaatttgaaagtagtgtgtgccttgaattgccgagtttttgagggtgaagttgacagtaaccctatgcaaagtcacaaaggcaaagtactgcttacttttctgaatgacattttcaagggagtgacatcattatttgctgacaattccaaaaatgttactgatgttttacagtattggaggagaacaaagaatagagataaaaacttggatgagattgttgtttggattgaatggatcttttcatattcacttttgcgtattgctgaaaataatctgaaggagtg

SEQ ID NO: 6752 - DNA, 659 bp, Gossypium hirsutum
tacattgaattccgacatggataagatacatctctgtatcttcagtaggtgaaaaagagttgaaaagaaggggttgatatcaggtaataatatataacttgtttcgcagataattttagcaatcaaagaaatatacattaaagccaagaaatccaaacaatgtacagtgcatatattcattgtgcagtttataaaaaagaacaaccacaaattcaagtgagatttgcttacttgtacagaaaataaaagaaaaacagattgtataaatatatctttctatttattcatttattttaaagtattggatattaaaagtttgctaatgatataaacaaaatttaaaatgacaatttcaactgataactaactattggactcagaagttggagcccatagacatagaagatagtaccatggaggctcttgtgataaaaaaattgggtaaattaattttgtaagttagattcatttttgtatctttggtcttgttgcatggtgtttatgaaagaacataaacttgtttattttccaaggtgtttcatggagtaatatcgatatcattaaagtatcaattagttgggcaaagcagtgtttttttaacacccaaaggtgggattcatcgaaagattacaagtttgactttgatcgctcattaagag

SEQ ID NO: 6753 - DNA, 675 bp, Gossypium hirsutum
cagtgcttgataatcgtacggtggtgacggtcaagaggctggatgccgggaaattagcagccacgacgaaggaaatgttcgagcaacacatggaatcagttggcggtttaaggcatcccaatttggtccccctcagggcttatttccaagccaaagaagagaggcttcttatctatgattttcagtccaatggcagtcttttctccctcattcacggtaataactttatgctttcattttcttcaattattgaacgatttgcattgtttcggagataggcagcgatttcagtcggtgttaactcgggttgccagccattcagggaaaggcacacgtgtaagagaaaatgctttgcttaatcttagtaataaattttcctaatcgtagattccttgggtttgtagtaaaaaaagaataaagatacatgctttggtcagttacataattttcatttatgaggtatctaagtatcctgcaaacaccgagaatctagctgacccccactacatggggaattgatatgattttgatgtcaattaattagtgttaatattattagttagagttaatttaataatagagctctttttttttctattataatggtttgtcctttttgtctctacgtgaagcactgttactgtaacatgatagtcggatcatattgacattctg

SEQ ID NO: 6754 - DNA, 558 bp, Gossypium hirsutum
gactagttttccttaaagttttcccatcagattatattactactattcttattttaatgaaataagttaaatctttacaattattagtgaaatgcatctttagtttgtttctaaacttttcgattattgttaatctttctcttctattgggcttttagtagataatggtattggtgcaacaatttatagtattttatttgttgtttgtaatttgtatcacgtctatgtattattattgtttattgttcatgataaagaaaataaggctttctttgatttccttaaacatatatacgtcattcttatttttgttttcctcgaaaatggaaaatattaaagagaatatatctgattgaaaattttaaaaataatttttagaaaataaaaaaaattgtttgaaaattaaaaaataataagaattgtttttgttttcactaaaaatgtttgtaaaagtaaaaatggttaaaaaaaatttaatgaattcgtacaagttcaaaattcaaaaatgttattttttaaacaatgtttcaaatattaattcctgtaccctgattcaaa

SEQ ID NO: 6755 - DNA, 599 bp, Gossypium hirsutum
atcttgactagggtattcaatgttgtgatgttgtgtgaaacctgcaatattaacttcttaaactttaaatttcttaaggtatgattatttttcttaaaatatttataatcaatacaaatttagatatgaatatttgaggcttgtttgttaaacaaatcgaacacgaataaaacttgttttgattatttatattcatatacaagtttgtttatgttcatttatgaaactgtttaaaacacatttgaaactcatttattgttctattattatataattaaaaacattattatttatatataaaataataattaaaatttatacttgattaatttacatctaaaagaatatgtagttatttattttatttattattattcatgaacattatttgtgaacatgcatgttcataaacatatttattactatatttaatgttcacgaataaatttatttaacttaaacggatgaaagtgaatataccattttaaataaacgaacacgaacataatgttaaagtttttaacaaacacgaataaatttaaaataaacaaataaacataaatagagattcatttattctgcctcagttcatttaaaaa

SEQ ID NO: 6756 - DNA, 528 bp, Gossypium hirsutum
tgcagattgtagtctgtatattaattttaagtcagcaaatagagtaaggaaatagaaatatgaattttctcaggcttttttaggtttgggttgagctggcgctgcatatcaatatactaggccaattttctgtttatagtttcactaaatattacaattgtaagaatctaaagttgattgtcatgatctcacttctgtctgaattatttggggcctgtctattgctgcctgcttatgtcaggattttctgtttagcaaggtgaagtgaggcatattgttatatctggtatttgtgctactgttgaaaacagtattgggttaatgcaaactattggtatttgaattcatgcagtgtattggagcaacaacactggacgaatacagaaagcatattgagaaagacccagcattggaaagaagattccaaccggtcaaagtgcctgaaccatctgttgatgaaactatacagattttgaaaggtttgcgagaacgttatgagatacaccataagcttcggtacacagatga

SEQ ID NO: 6757 - DNA, 671 bp, Gossypium hirsutum
cactcacaactggctggaaaacaatcacttcatcatcatcatcctcttcctcaaccgttataggttgggtaattggcagcacatttccaacattaactgtcttctcaaaaggggtttcatgctctataccgtttgttacgagtggggtagaagagctgaatgtgacatctttggaaggttcaacaccaataagaaacttctttgctttcgaatcaaaacaaacagttttctgatcaaccctaatgacattagctagagccttccctgctgctaaaattcttcttatacgggctttcttttccttactgccatcgcttacaaaggaatgctttcttgagaagtctaaaatggtgtgtgctggaacaagaggcaagaaccctctcaactcaaagtcctcccacaaggcaagacggttttcagtttctccttcatacctgctcatattgaaaaagcaggtctcatcttcatcatcatcaatgcacatcggtctaattgacaagatcttattcagaaatgatatgcaatgtttccagaaatgtgatctagtaattgactgtttctcatccacagcagagcttgccactgcaacatccgggcagcaagctagccattcaacaaaaaccagaatagcaggtatggtgtagctggaagaacatcctggagttgagaca

SEQ ID NO: 6758 - DNA, 622 bp, Gossypium hirsutum
tcgagtcattgcttcgcaactttgccaataagaacaagatattcaaaacaaagaaataaataaaaagtcagttgctttgcaagccccaattgattgcattatttctttacttaaacaaatcatttctatatttatatttttggataattataagtaaaatggatagaaaaatgataacctaaaagaatgagctctgaaaaagcatacacaacatatggacggtgagtaaacgtataaggcttttgtggattaacaaatctagggtatttttttttatattttaaaataaaccatttcagtatgagagaaaatgttattatactaccggtcttaaacgctattattacatgaaagattcaccaacttttttttattaagctttaaatcacggatataaaatatttaatgtgttaaaattttttcccgggatttggtaaatctcggaaaccaaacataccgtgacagctttctaaccaaacagcttttgctttcttcaagtaatgcccaaatgacgtgtgatcttacttctgaatttgcttcagcagatgacagccgtttgattgaaagaccttatttggtcatttttcttttgactcctttttgttacggacccaacaactct

SEQ ID NO: 6759 - DNA, 605 bp, Gossypium hirsutum
  misc_feature (505)..(505): n is a, c, g, or t
  misc_feature (539)..(539): n is a, c, g, or t
  misc_feature (558)..(558): n is a, c, g, or t
  misc_feature (595)..(595): n is a, c, g, or t
  misc_feature (598)..(598): n is a, c, g, or t
  misc_feature (601)..(602): n is a, c, g, or t
cattcttgcagaactacatagacctcaacttcatccggcgatggtacctctggtacaataatacaacaaataacaaaaaacagattggcaaattgtacttataaaacctgacatcataaaccttaaacttaaagataggactttgcaatctttcaaacaggggaataaacatatacactatcttaggctatttgacaaacactaaaaatccatttaacttatattttctaaaacaatgctaagcatgtcttaaaaaatcatgcaggaatggattttaggtctactttgaatgttagaatttttagttaaataaactgctaaataattaacatgttgagaactttaaatgcacacatgatttaagcattagaatacaagtaatggtgaaagggccgtaagaagcaataataaacattatgatgcaaatctattacttagaagcctatagtcacacatatcacaaagagtcaaataccaaaagggaaaattttaagccgggcaaaanttcctggtccggctccttccttaaaatatcaccngcaaaagaatcaggtgaancccatggaaggcccccggttatccaagggaaccaaancanacnnaaa

SEQ ID NO: 6760 - DNA, 686 bp, Gossypium hirsutum
gctataaagccatcttcatgaataaaattcaaacaaaaccacaaaaaagaagaaaaaaaacccatacaaatcaggatattctagcagattcattatcccaaagacatatagtaagatctagtcaattttatacaaagaaaattctattatgttcaaaggacccacttctcagacaagcacgtatgtatgcacgtaaatcattgtttcttctaccaaatttataaaaagaactggcatataaaacagcaaaaagatgtcataaacagcatgctactattattattgacttgattgcttaaatctctgtgccaaaaagaaaacccaaagttccaggcttgtgactatttaatttaacatcctaaaatttctgcatgacaagaaatacttgagtccctcatgatgcagcagccatggcccacagcatgaagtgttaaatgatgtgcagatgagtggcatcatatcactcaaaaataaaatgaatccgaggatcaaatgttacttagaatcttagttaaagaaatgatatatcataaaattttgatgatacaaggagtgagcaagagccacgattaaatgagactagaagagcaactctaccttcacaaaggaatttgatggaatactcaagattccaagtgcaggctccattttttcatcacttgcaaaagatacttcaggtcaaaacc

SEQ ID NO: 6761 - DNA, 671 bp, Gossypium hirsutum
acagaggtaatggtcggttttctaaaggccgtggtcgaaggagaaagtttggtcatactaagctcaatgccagttgtgtggccgtgttggtcatactgttcataaatgatattatcggtttgatgagacttttaacggagtttctgatcagtctatgcaggctcactgccattagtttcaaggttcttcagatttgacttgtgcatattgttctcataaggctgattcagttcctattgattattccaaacaagaacaatgtctctcgagttctctgaatacaaaagcttagtatcccgattcaggagcgtctaatcatgtcactaatgatttggataatttgaaggatgcagcaccatacataggtaaccataagctttacatggggaatggactgcctgtgcctgtagctcatgttggctcaggtcattttactgctgctagtcgagtatttcacttgaaaaatgtcctgcttatttctcgaatttgtaaaaatttactgtctgttgcttagtttaccaaagataaccacatttattttgaatttcatccagttcgttgctttgttaaggatatcaagacagggagcattttgctggtaggccacattcataatggtttgtacaagtttgatctatcagtctctccacggttcagtactgccttgtctc

SEQ ID NO: 6762 - DNA, 673 bp, Gossypium hirsutum
tcaagaatggaattccctctatcaatcaaatgctatgcattgctcaatgaactcttcaatccctattagtggtactatggtttagtttggccagtgcttggaccaaaataactcgatggactcggattctatcggaccgtcgagtttcatcaacaactcagctatggaacaatcagttattgaaaaggaagggtacctaatgtttggaacaatagggacaagggagtcacatacttgataacagtggttcattggaagatctctgggaattccaatgatgaaacaggtagattattattagtcatttttttagttctattttttctagctagttagagtacataaaggattgactatcagttttagactttagaagtaaatttgtatatatgggtgagtaagtagatctaataaaagatttcttgaaactgaggcttgatcacttctctcatttcatttgagatgtaaaagttgagttttggttgaatttgtttggtcaaatttttagtgatatatgtacagataggatgaaatttattaaattttattcaccgaagtaatcaatttttaagtttgaaaaataaatcaaattgcagtgactttttggatgggatccagacatttttgggttgatatgtctcatagtgtttgaatatgtatctcttatcttcga

SEQ ID NO: 6763 - DNA, 643 bp, Gossypium hirsutum
cagaagctgcttgcccagaggttgaaggagcagcgtgagcgcaggagtgagagcttagccaagaagagatccaggctctctgctgcttctaagccttccattgcagcttaactgtggtttggcattttggtcagtagttgaatgtttgattctgaaactttttttatttgtcgaggtcattttgattattcaattttctagagtccgccgatggttttttggggtattgtttttttagtgtatcagtatcacatgaacaatatgttttgaatgtgttatgactatgttttggatgtttacctactcaattactttatgaatggttaaatttactgattagattacatcatgacacatttatatagacagcaaaggaaagctttatatagagtctgagggaacgtgaagaaggcttttggttccagttcacaagtccttgggttacattttcatctccaccaagtagacaaagcttgtctagctttcctctaaaccatcaatttggttagatataaaattgataactatgcagatctttgattgattcggtacacccttgcttgattaaagaagtgaaagataaaccaagttagtaactgtctttttaaacaaggaattctcgaaagcaaaaatacctgcacag

SEQ ID NO: 6764 - DNA, 603 bp, Gossypium hirsutum
  misc_feature (577)..(577): n is a, c, g, or t
  misc_feature (581)..(583): n is a, c, g, or t
tattactttaatgcactcttatgatgttttcttgatgaaacgaagttcatatatgccagcctcctcctcttgtctttgttgttgacatgtttgatgtattataatgcactggaacatctcagttaggaaattgcagggacaaccttaaatttattgcttagttgtgtttaaaggcttggtgtgtttgttgtttcatacttttgtgcttagcttcttgcatattgtatttttatattttctgctgattgatagatcctttctttgggtcctcttgcccgcatatcattgatctgctttatacaattcttaaccttcactctttgttcattcacataagtaacgtccaggtccagacatggtcgaaatttgttataagtgaatgttaggcctagaatcaagtctgaaaagtgaaaaccaccaaagccttgctcaaggaacacctagatagatagccaaagatgaaggcactcgacaaacatggtgaaggccaaggatgctacgccaaaacttgaactgccctgtggatttcaaaacaatttgcttaaaatggtggatttttttttttttaaaaaaaaangggnnnaaaaaaaatttttttttttt

SEQ ID NO: 6765 - DNA, 639 bp, Gossypium hirsutum
ttggtgctttatggctgaaaatgaaagaagaagcaaggttagatgctgagcaagaacccatcttatccaattattattacagctcaatcttttctcataattcatttgaaagtgctttagccaatcatttgtctatcaaattaggcaatccaagtctttctagcagtactttatttgatattatcatggccgtgcttgtggaagatcaaggaatcatgatagctgttaaggaagatttgaaagctgctaaagaaagagaccctgcatgtataagttatgtacattgctttttgaattttaaagggttcctagcatgtcaatcacatagggtagcccataatttatggtgtcaagggaggaaagttttggccttgctgatacaaaatagggtgtctcaggtttttgatgtggatattcatcctggagccaagattgggagtgggatattgtttgatcatgctactggagttattgttggagagacagcagtgattggaaacaatgtgtcaattttacataatgtaacattaggaggaactggtaaggcttctggtgatagacatccaaagattggagatggggttctgattggtgccggtacttgtattttagggaatattaagattggtgatggagcta

SEQ ID NO: 6766 - DNA, 654 bp, Gossypium hirsutum
tgctttttatttttttatttttgaatgttattttcttattattttctccatattttgctaccattttactattatgttgctactattttattgttattgtttggatattgtataaaacttattttattattaattttgttattattttaaagtaaacttgataatgagtcgggccacccggcccaaattcacaaaaggacaaaaaaatctgttcttttttgtttttgtttttgaatgttattttcttgttgttttatctctattttgctaccattttactattatgttgctactattttgttgctattgtttagatattgtataaaacttattttattgttaattttgttatcattttaaagacatttgttaattttgttattattttagaggcatttactttttaagttacatttatcttagtgttatttaagtctacatattttttaaaatttattttcaatttgttgggaaatgtgttatttaagtctacatattttttaaaaattattttcaatttgttggaagatatttattttgatgtttttagtatttttgatgtattatatatatttaaaaattatataaaaatgatatgaaaattaatacgggcgggccggatcgggccccaattttaacatttttattctggtc

SEQ ID NO: 6767 - DNA, 663 bp, Gossypium hirsutum
  misc_feature (237)..(237): n is a, c, g, or t
  misc_feature (339)..(341): n is a, c, g, or t
  misc_feature (506)..(506): n is a, c, g, or t
  misc_feature (509)..(509): n is a, c, g, or t
  misc_feature (515)..(518): n is a, c, g, or t
  misc_feature (520)..(521): n is a, c, g, or t
  misc_feature (539)..(539): n is a, c, g, or t
  misc_feature (542)..(544): n is a, c, g, or t
  misc_feature (561)..(570): n is a, c, g, or t
  misc_feature (583)..(587): n is a, c, g, or t
  misc_feature (589)..(598): n is a, c, g, or t
  misc_feature (600)..(605): n is a, c, g, or t
  misc_feature (607)..(611): n is a, c, g, or t
  misc_feature (613)..(615): n is a, c, g, or t
  misc_feature (617)..(622): n is a, c, g, or t
  misc_feature (624)..(629): n is a, c, g, or t
  misc_feature (631)..(632): n is a, c, g, or t
caggttactaagatggttatggattgaccaacatgtacatcaagagagtcatataagttctgaattacgtgagatccttcaacctcgactagcttcatcttatgaccctgagatcctaaaattgagggaagtggataatccaacatttgagatcctgaacatgtaagttttgcctgaaacaccaaaatttgttgcacgaattaataatatgctatgaattaagcgacaaaactcagntatgcaataaaacaataataagacagcatgaactaaagttaatgatgaccttgatctccggcgaaggtagcttgtgtttggccatttatgaggactccatcnnncaagggcatagacttgcctgactctaaagattgctgcgatgtctgcaaaagagaaaaaaaatttttaagaatcgaattatttctgtggcgggagtcaaaaaataaaggaaaacaattccctacaaatatacattaccgggaataactagccttatggttggcctntgnacaacnnnncnnaagtgtaaagtgaaatcnccnnnagggttggcgtacggannnnnnnnnncacttctatgatnnnnntnnnnnnnnnnannnnnncnnnnntnnntnnnnnnannnnnnanngagtgctccaaatctccagcagctctatgca

SEQ ID NO: 6768 - DNA, 658 bp, Gossypium hirsutum
tatgtcctgaggagtctttgatcggctatttcccaaattgtctgctgttgatacttgaggggatgtcacaaaaaatatgttgatagtaccttagaaaggacgattagtcttatttgtttgccattatttagttgtttaatttctttgtaatttatcttttgcaatatttcttcattggttattttgttgatacttttgcggatatagtagagttgtctttatatatttcactattgttgaatgaagaaaattagagtcatcattttacatgttttattagctaattactacgttgttccaaatttcatattttgaaacatattctatataaatatatattaagcgtacccatatttggtacccacaagaactataggttcacatatattgtatgaaagttgaaaatacagttggatatgattttgttttcttcttcaattaaaaataactatatgatgacttatctttattgattttaatttatatttggttatcttgcatcaatcatcatatacaaaatacaaaattaacaagggaatgaatgtatatagatacaacttacctttgcggatggtattgccttatacataaaaaagtaggaatttattatcagatttgaaaaatcaaaagctcatattacaggaactgccatctacct

SEQ ID NO: 6769 - DNA, 642 bp, Gossypium hirsutum
gcggaaatgaaaccccaataaagaatccaatcacaattccaagaattgttgcgataacgagcctggctttatcatttgttttcttaaaaactccactgtaaagcacagaaatagtttagtaaaaggagccccaaaaatctgtcatcctaagcaataaaccagtaaagttgagaaattcaaaaatcaaaacataataatgttgtaaggttcaaaacagttatctacaaaagaaaaaaagaaggaaaacaaatcaaagaatggatttccaaagattatgcttttcaccctacctcatctatttgttttatctttctagtgtctgatagtgaaagacaaaaaattaataaaatctaacctgcggtgtatggtgcccatatctgtattctctcttgtaattgatttaaaaggtcagatacccacaaaaacaattatctcccataagcacctttgggagcaaatgggggaaccttcaagaacaccaatgcgaagttactctactcttcaactgagcttgattgtttatcagtgcaacgttccaagcttcagtatatattacaaaaggaattaaactaaaaaaaaaagaactgcaacacttgatgttttaaaagggcgcctcacattaaaataatataataaacgtac

SEQ ID NO: 6770 - DNA, 592 bp, Gossypium hirsutum
aaaccttcctccagcttaggtttctcactgttagatgctctctccctctcacctctgacgatgccgccactggtgaacactttctttttctttaaaaaaaacttttccttgtatttattctttacttttcatctttttagtctttaaaataatgcggaaaatcttttgttccgggcggcttttagggttggcggagaggccatggaaggttgcggatgctaggctggttcttgaagatggttctatttggaaggctaaatcttttggtgcctctggaacccaagttggtgaagtggttttcaacacttctttaacagggtaagatgattagtaatttgaattttagtttcttttagtatttaaactaaattaacgaagttttcactgtatgtcgatgtgtaatgtgggggtattgaatgatgaaatgccgaaataaggtgagtttgggtaaatctaaagttctggtaacattttgaaattgaaatcttattcgataagattatgtagagtttgcacaataaaggaataattgaagccacacattttaattcattgttagttttaattggacctggtggccaaaaaaaataat

SEQ ID NO: 6771 - DNA, 598 bp, Gossypium hirsutum
caccgctcggctcgacgatcaatggtaagttgtagccatcaactaaactgacatcgtaaaagtcctgggtgcttgaccctgtcgtgaactcagctaaggtggcagggggagtggcgcctctaccattgcattcaatttggctagaaccacagtcaccagtttggcaaatgagttggcctgtggtttggtccgatgcgcaaccggttctcccccagaaccgacctgaccaactgggcggcgcctgtaaggaccgtgaccccccggatggtagctcgaaacctgtgctatctaactgggtgttgccaaggataccaggccaaactgtgtaatcacatttatttacaagtgtaaatgtagtccctgaagtgcctgtaatatatacagaaatgcaggctccatcaatattaatgttataaatcatgaacataactcaacgttgaaggttggaagaatagtagaaaaccgtaccatggaagaaggagatcaaacttactaaataaatggaaaagaacagaatatccatctgcactaaaatagagtttatggttttttttctatgagaggagacagaaacggaaatgaaaggaggtgaatttga

SEQ ID NO: 6772 - DNA, 683 bp, Gossypium hirsutum
catacttgcctggttaatctgataatccgccaagtctgaaatatctctagagtataagcggttccaaacaacgctatcatagccttttgtggctatgaagggcatgttacgattagtatcctcttcaataaggcctctcatccactgagatacttccttgttcatcttctctatgccataagcaactgtgcaagtaccaagactcctatcagagaattcaaaacaaaagaaagagaaagaacttcttacggtattatttgatgaatgataatgattttactaaactggttcatgcaaaatatgcaagttgatattttcttaccatggtgaggaaggaggccaccatgacagaagatccaatcattaaccttaagagctacagcatgtcgtgccaactcacacgctagtggaccacccggtctaaacagaactgatctggcaatcacccccttttgtctctgtcctaataaataatttgagatctttatcagaatggtatctaataaatagggaggacatagaaagtgtccttttaccctacattctgggagtatactagtaaccaactagaaagaaacactataacatggatttagatgaaagaggaagtgcaacatatttatgataaatgaacaatacttaaggaacaagaaatgtagtagttcagtcgattgacaggaatg

SEQ ID NO: 6773 - DNA, 613 bp, Gossypium hirsutum
tctcctttcgcctccaaaaatcctttttcttctcgtaagagaatgcaacctttgcacatagtcctggcattaaagcagagggtgcctcgctatctaatgcattgaaagaatgggggagccactatttttgtgcatgcaaaaacgatataacaaccctgaatcagaaggaagagaagacatgtctaacgatattgattctggaacctcctaatatcttcctttatggtccataaaaagctcaggccatgcatcatccagtgtgatatcatgatcaggaagctgtaaatacacaacaatggttcaacaacatagttttaaaacctctcgttcacgatcatggaaccaaaaagaccagcattattgtttacgcatttttggtgatggaccaagccgagaaatgttctttgaagaagaaaaaatggggttttcgggttcctgcaagaagaatgtgagcttggagggcgttagaggttatgctctgaaacgctctccgatgcttaagttagcataattttgtcgtgaggaaagcaagaagcttgagctaataaagaagctgaaggagggagctcccttggaggcggaaaatacattatacatgtgtatttatgcttgg

SEQ ID NO: 6774 - DNA, 676 bp, Gossypium hirsutum
aaggcatggtcatattgactaaaaacagtaattgtgagcttagggttgatctgttcagtgttaatgtgggaaagggttatttagagctatgttgatcagactatttgtatgtgtttgacatgagtatatccatttctctctatcttttttcatatatttagagggtcatatctctacgtccatattctgagattttttagatacgggtgttgaaaatgagtacatcaagaaaaataaaatgttagtgacagagctctagtgggttgcttttgtgatgatccctaacaacagatgtcctgagcaccatgaccatcccaatgaaatgtcacaaaagcagaagaggtagtcccttgagatctttgcggttatttctctaagtaaattgtcattatctgcatttgtaagagtattagctctctatttttcaatgagaaagccctcgaagtttctgaaaccatgctgtttctacttctatgccttgtatatcagatagcctgcacttgaacttagaacactgtgatcctatgatgtacattttgtttcaaaactgttgatctgttgagaatttatgtttttaacgatgcatgggtaaattttttatgcgttttaagttataaacagttggtttggttttattacagggaacccagtaccacaatgctgttcagaagttcat

SEQ ID NO: 6775 - DNA, 637 bp, Gossypium hirsutum
catgtattaattatcacctcatttgctggtctgccatagtcaacagggtctcttccagtgacagcttcaagcagaagaacaccgaagctgtaaatatcactcttctcatttaacaagccagtgttagcatattctggtgccacataactgcaagtcacatacaaaatttttcaatccgcagatacttgcaattcaaataaaataataaataattgctggagagaacaagaacttaaaagagttacccaaaagtccccataactctagttgtgatatgactctctcctgaacccaagagcttggccagtccaaaatcagaaaccttggcattgaaatcatcatcaatcaagatgttacttgattttatgtcccggtgaacaactttgggttctattgcttcatgcaaataagcaagtctgcaaccagaaacaccagctttttgtcacacttcaatttttaactaacaaaaagtaaacaaaacaagaagcttcaagtttgaatggtgacttacgccttggcagtaccaataataaccttcatgcgagcctcccaagtaagggtcccatgctggcgcattgccccgtgtagccattgttccaagttaccattattcacatattcatataccagcatccta

SEQ ID NO: 6776 - DNA, 602 bp, Gossypium hirsutum
cagtatagtcctttatgggtgttaaaattattaattaattttttaacatatataatttatattaaaatttggaaacaaattatttaatatatatttttaaaatttataatattagatatttaacttttaaataatataaattagaaaccgaatcaaagaaaacttaagcattgagatcagtttagtattactttttaaaattcacttttgagataaaatattactaaataatatacttttgagttttttaaaaatatttttgaggcaaaaatattttaaaaacacttttttaactaaaagcaaaaacaaaaaaaaatttaacttttagtccaaaagtaattttgaaaagtaatgataaataatacaagatttaaatagtaaaatatgaattaattttcctgtttcaccttaaagctaaaccactcgtttaaatgaagcagagtcataaaagagcagctggatcttttggaatgacaccaaattagcaacatgcaatgaaagtgacagggacaaaatctagttcctcaggcaaggcaaggatagttcattgatggagtgacaatggctgggttcattgagccctttatggaaccgtcagaaca

SEQ ID NO: 6777 - DNA, 588 bp, Gossypium hirsutum
cacggcttatctgcttgcactgaatcaggtttttcattaccagattccacgaattcagcttcagatttgttttctttatcactagaattttctgtaacaggataagttggtgatggaatctcatcattctgatattcatctgaggttgtctcccaattttggcctggtttgcctctaatctgttcattgaatgaaaatctttgtttagatatgttgtcaatgagataacaaataagcaaaaggacatgttaggtgacaaacctttgcacgggctttcttttgggcatctctcactctcatatctgtgtccggggttatataatccaaaagatctgatacactgatacaaagtaggaaaccaatgtaaataattcttaccaacacctacaacaaatgagaggtgcaaaaacacaaggtgactccgcaattaaatctatctctagtataaggggtttcctttgaagaagttcattcttctcaaaaggttaacaacaaaaaactgtccaacaattataacagcaaaatacaagtaaagatcaggaaaactttcaagcccacagttcaaacattttgaattgtctgaacaaa

SEQ ID NO: 6778 - DNA, 581 bp, Gossypium hirsutum
aatcatgtttatcaagaacttcctccaaagaggatgcagaggacatattttctgttggttgtctcttggctgaactttacttgaggaggccacttttttgttcaacttcattaggcatgtacttggaaagtggtgtttttcctggacttatgcaggagcttccatctcatattaaaatactagttgaagcttgtattgagaaggactcaacgaggtattgcttttcttttttagttttacttttcctttgatattttgttctaattaagttgatttaattatgcttctattgattccttttctatgttattctattaattttgttaggtctgtccatcaactatttgcatttgtttagctaaactaccttttttttctttatttaaaacttacaataaccaggaggccatctgccaaaagtctattggaatctccattttttccttcaacagtgaaatcagtatacttgtttactgctccgcttcaacttatggcaacaaatggatcccgacttcaatatgcagataattttgcaaagcaaggggcactaaaagcaatgggaactcttgcagctgaaatgt

SEQ ID NO: 6779 - DNA, 396 bp, Gossypium hirsutum
  misc_feature (53)..(53): n is a, c, g, or t
  misc_feature (314)..(314): n is a, c, g, or t
atatcatcaatctatggcagcaaagtggtggcaaccttgcccagagctagatngtgcatttttttatataatttttttttgtcttagctatgcaaaatggcctcggttaatcaactgaatttgagaatgtttggtttgaaacctcttagctctgaactaagatatgaattgttggttttaatacgataacaaacactgctgaattgttggtatttccctagagatccacatatttgtatatttttcatccttgttagatatgaatctttaccaagttagttttttttcatgatcattacatgtcattgatgtanatggtatacgaatttgatgctagtttttatagaattaccttagctttgtataattttaccagccaaagcattgtcgaggaaa

SEQ ID NO: 6780 - DNA, 630 bp, Gossypium hirsutum
agtctttagaccttattgatctttttcaaggactaataaattatcatttggagtgtgattaaatcgaagttttcgacatgtattatggcaggttccttttgctcgatccacactcaaccatgaaaacatctttatactggatacccggtctaaaatctttcaatttaatggttccaatacatccattcaagagagagcaaaagcactagaagctgttcaatacattagggatacttaccatgatgggaaatgtgatatagctaccattggtgagtgaattaacagattggatcacgaaaggataagatgaatgaagtaataagtggctaattgtatatagtctaatgatttcagtctaattactctatgcagaggatggaaagttaatggctgatgccgacagtggagagttttgggcattatttggtggctttgctccacttccaaggaagactgctgctcgtgatgaggacacaactactggttctcatccaaccaagaaactactaaggtaaaactttgtctctcatttgcttttttggaactatagttttgtaattcaaagaacatccttatcgggttatgtttgcttgtcaagtgtcgagaaggggaaggcagatcctattgagt

SEQ ID NO: 6781 - DNA, 660 bp, Gossypium hirsutum
ctttaagattcaaattaaaatttaaacatttatatatactatttaaaattatttgaaatgaattttttataaatatttttatttttaaaatttcaaaatttttatatttttacccaaatatgaaaaaaattaatttaaaaaaatgtaattgtgtatataatttttaagagtaaagactaaattgataaaaaaaaattaaaaatattgaggattaaaaaattttaatgaaaaattagatggagaagtctcgaaattaaaatatagggactaaatattaaattttagaagagtatagggacttttgacagaattaaacttttttatttatttatttcttctcttccataacccagaatcctgaaaaaagaaaaaaaagttgaaatcgtcacttcatgtagcgatttggtgtaggaatttaaaaaactgttaaaggttatattattttggtaaaaagaaaggaatttttttcagcattcactttgtcattttcatgattaagaaaatactcaaaattatatataaaaatgaagtctgagtggtcagttcacataaaagaatgtcaaaaggcattacactgattctcagcttataattcaaatcctttatcacttcaattatttaattaataggtccaggggattccccaaaccccttacctct

SEQ ID NO: 6782 - DNA, 503 bp, Gossypium hirsutum
tctgtaaatcccatcacagcaaagttcatcagtcaataaactttgttggcaaggcaggcacccaaatgattgggaaaatgaaatccataaacaataataattaatttatagaaaaggagcaaaaaagccttaatcacagccggcacatacgattaatggagaaataaatgcttaaactaacttttaatctgaacaactaaatgtagtaaccatcatcatcatcatcatcacttcccaccattaaacactatttcttgtctgcaattaatatttttttttattataaatcacaaagcatgctctaccctttttattctcgataatggctgttaataatctttcagttaatcattaatgatgataattagtatactttaacactagtgacaaaaagagatttgaaaatgcatgcacatattcgagttaaactcttggcctttccatgtggatcatcttcgattctgcaaggttatcaatttatgggagagttgaagtaagctcaa

SEQ ID NO: 6783 - DNA, 662 bp, Gossypium hirsutum
catcttataatgatggaattcaatgtaaagctgcaattatggatgtataaaataaactccacctcaaggccaatattgaatagcaagaaaacaactccaaattcagctattgctttggtcccatgcacatgacggattatggaaagaccataaggtccaatcaagatgccagcagccaaatatccaagaacgggactgcctaaaaataggagcagatagaagaaaaacatcagtaaaggaaaaatagaacaaataatggtaaggagaaggaaagagaaaaaacattgttttctccagactgtgaggaaacatcataaaaagcaaatagagaattcaaacatgagcaccaaaagtctttgcaaaagttcatattgacaaaagatcatgcgttttttaagaacgccgactcgatgctgcatactaaaatgagctaaaggatagagagtttagtcacctccaggaattttctgaaatataggcacaaatattacacttgcaagaagtaaccacagcacatcaaagagagaagcctcctcctcattcatctgagaaattcaaagattgaaataagcttctgacaagctgctatattcagtatgattacaatcataagaaacaaatggagaaactaataaatggtgtaggatcacacacctcttgat

SEQ ID NO: 6784 - DNA, 635 bp, Gossypium hirsutum
tgtgatgcatggactaacagagaggaacaggcaattacattttcatgacatgtgctatcgcctgttgtatcttttactgattgttctgggagcaattacagctttacaatattattatgtagcgtgttacacagatattataggcttaattagagttgacatatgtatggttgcccccacctgatttttagcagactcgatagccatgtattacaagtttgcaattaatatctttttcccttactaaagctgtgactgagaatggttactcaacatatttgcatccaaactaccaactggactagtattaaagtgtatttaatctcatccaatccctgtttaaagaagctcgtgggcatgagattgactagtttttaagtcgtcctttgttggcatgtgagccatttgggccacctagacaccgaccctatataaaccggtaagataacaccaatcgagttgcttccacccaggagaaattgatggctcatgccactagacagacaaaattccatgattgcaatcctccggctcctaaacaaaaccaaaactattagaatcatataaaattagattgcctaaaataaaagtctattagtttagcattaaaatcaaatgacgaatatgactggatg

SEQ ID NO: 6785 - DNA, 402 bp, Gossypium hirsutum
  misc_feature (378)..(378): n is a, c, g, or t
caaaggggaaaaaacctaaaagaaaattgaaaataaaaattaaaacaaatgataacccaatgtaggaaacaaaataccaaaacaaacccagaaatgcatacctgttaaaagaaaagttattgtggtttttgaataaaagaattcatcatatgatcctttcaattttttttttttaaacttgacaccaccgcctcacatgaaataaaccatttaaagaattaaaaaatgtatatatctgtaagattgattatatttagataggaaatgatgatgtacggataggaaatgatccattttttctcctaaaaaaaaaaagtgaaaaataggaaaatatgaaaaaaaaaaaaaaaaaaaaaaaaaagggtttttttttttttncctttaaaaaaaccaaaaaaaaaa

SEQ ID NO: 6786 - DNA, 604 bp, Gossypium hirsutum
gaagctgtcctcacctcaacttctgagcatctggcagctgttgaaatcatgcgactccagtatattataattcttcaaaacaaggttgatcttattcaagagaatgtagccatcaatcagcatgaagcaattcagaaatttattcaggtttacccttttttatttacaacaaaaagtagatgggatatttcattcttgtttttcttctatttctgttggctaaacatattcattgcagggcactgtagctgatggcgcaccagtggtaccgatttctgcacagctaaaatataacattgatgttgtgtgcgagtacattgttaagaagatccccattcccgagagaaacttcatctcaccccctaacatgattgtcatcagatcatttgatgtcaataagccagggtttgaggtggatgagattaaaggtggtgttgctggtggaagtatactccaggtatgttttggtttgggatgttctctttttcttcttgttcctttcttgtcttttacagtgtttgaggtctatgttcaaagaaatagcatcgatttaaatagtaaattttcaaaataaggaacttatatcatttggtagttgccagag

SEQ ID NO: 6787 - DNA, 669 bp, Gossypium hirsutum
gagtgccatttgttggagaagcttgacctttgccagtgcccttcattttcaaacaagggtttgattgcaattgcagagaactgccctaatttgacctctttgagcatcgagtcttgccccaagatcgggaacgaaggccttcaagctatcggaaagctttgccctaagttgcagtctgtctccatcaaggactgccttcttgttggggatcatggagtttcaagcctgttgtcgtcaacatcttctgtcctttcaaaggttaaatttcagggtttgaatatcacagacttttctcttgctgtgatcggtcactatggcaagtcggtgacaaatctaatgcttagcggcctagaaaacgtgagcgagaagggattttgggtcatggggaatgctcaaggcttacaaaagttggtctctttgacgatcacatcctgccggggggtaacagatgtgagtcttgaagccatgggaaagggatgtgcaaacctgaggcagatgtgccttcgctggtgttgctttatttcggatgacggattggtggcttttgccaaatctgcaggttctcttgagtccttacagttggaggagtgcaacagaatcacccaatccgggactattggtgtcctctcaaactgttcgttaaaatcccttaccgtagtaaagtgcatg

SEQ ID NO: 6788 - DNA, 601 bp, Gossypium hirsutum
taaacagtcttcactttacctgaacaggagaaagtaactttaccaactcccttggggaatcacattccattggaggtggcaatcgggcatgttgagacatttctgatcaaagagaattttggtcgtttcgggactgtgtcatttagttaggtgctctgattatttagttttaggtcacttatggtccattttgttgagttttagagtcatgaaaattatttcaggtttgtcttttggatcatccaagtacgaactagtttcgatttaggcttacgtggatttggatgttttctgtttgggctgtatacttttctcaaattgagtttggtcgggttttggttaggttgggcaggacggtgttgtcatgcttgaatacttttttccagctctatattccatcatttgaaggggaggagatgatcatgataagttgtttttcctagaatgagcctaaccacacatacaatctccttactcctattttaattttgaggaaagtgcctagctttttgcatgccaaatattagctaaggttctagaattttgatgtatgcttaaggctttttaacaaaccttttatgttaggtttggctaactaaag

SEQ ID NO: 6789 - DNA, 625 bp, Gossypium hirsutum
  misc_feature (535)..(536): n is a, c, g, or t
atcactatcttacatgctcatttttctttggagtaataagttatgacatcaaaatttcgttatccctcagtccttgattagcttagtctcggagctcaagtcactaaaggttaacgtataaatctggaaggtatttgaagatgcaaagatgatttttgtgataatatcttcattatattgcaatccacggaaagaatgtcattgttatgattaactgcatgttgcatctagtattacagttgtcaagcaaatagtctctcactagaagcccgtattttatcttaatcaggatgcaccaaggctttgcttggtagggtgaagagaaaattagaaagatgaaaaattagaagagaaaaaatagattttccattagtatatgcgtgatagaaatgatgaaaaaatggaaagaaaaaaaaaagtatgtttccttctatggttgcttggtaaagttaaaaaaggaaaaaaaaaaaatggaaattttgaaaaatgcttaatcttgtaaacatgcacatttaacttacctctctctcatttnnccccccctaataataataattggaaatgatttgttatcacaaaaggttatctttcctattttctttacttcaattctttttcctactaa

SEQ ID NO: 6790 - DNA, 622 bp, Gossypium hirsutum
ataacagtcattactctgaagcattgtacggacaaaccatgcttctatggagttcaagtgcacatgcgtctcctctgtccatgtctcattttgtttgatgggcacgtgcgactccatgctcaccctcacaatgttcttttactaaaaagggtgtaagttgccatagtaaggcaccaaaattttttttgaaaataggtgtcggccatctgctacacgacacccaaaaaaataattttttatatatggtattacatgtattgtacaaaatacttgtaaaataatacacatgggtgtcggccattgcattgctggcacaaaaaaaatattttttaatctttgctccaatcataaagtaattattaagaaatttctgacatgggtgacggccatggggtaccgacactccgtacaccgttcctgtaaaggttattctataaatatttttgaacttcaataattttgtaaatatttaattattttgggttaatttagtaaaatagcctgtaataaatgttgcacactgctctgtgaatttgaaaaatggcaggtccatacattttctgactacctgaagaattccagcccattccttctcagccagctttggatgcgatctctttac

SEQ ID NO: 6791 - DNA, 608 bp, Gossypium hirsutum
  misc_feature (34)..(35): n is a, c, g, or t
ccaaattgacctgttgaacagcagcatcaatgtnnggatgatccatcaagagggtcaaataccacaatatagttcccagagtaactctcttccactgccactggcacatcttcttcctctgatgctataatccctgtccttccacttgatctcaaacagttagagaacacctgtaaatgtaacataatttaattgcaaaacatagttcatgtcataaactgtaacacatggttgatgacagatttttgataacaagacctcattagaaacaacgtcgagcttcttttgatcctctccttgaacgttgacagctccttgaacaccagtcaagtttgaaatactagccctttgaaccaaagaagcaatttgcttacaggccatggaaatgctggaaaggacaatagtgagctcagcatcaatagtacccgcctgttcttgcttcaacaaccaacctgttagtgtctggatttcgaacccacttttcttggtttctgcctctggtgctgtccccacagccaggcacctaacatgccttctcttgatactgttgttaatgccattgccattgctggggcatgacacgagggtctggaatcaaatacgcatag

SEQ ID NO: 6792 - DNA, 601 bp, Gossypium hirsutum
ttggaagcctttagcagcttctctccttcttacacaataaatatttgtccgaaaacactgccacttcctcctcctagaattattcttgccccaaaactcaactttcccttcactgtataatctcaaacacgtacagcacagtccttaatacttgaagcagtaaagttaaatttcaatcatataaatgaaagatctgggttaccatggttaatgatcctggaggcaaaacttctgtttttattcttcaactttgcggtatcttcccctgtttattatcagttaaatcctctggattaaaatataaacagaaacaagggtagagaaaaagatttagtaatgatatgagttgtaagtgcttactggatttgaaggaagaagaagggctttgggttaagctgagtggtttagagtgaaataaatatttcaatggagttttccaatttgatgatcttttagatgaaatttccatagaacttaatgtggagtagtgctcaaaaggaagaaaatcaccactcctaatttcccccaaaattctgacatagactttaatgccttaaaattcgatactatcctaaaatatggtgaagttagagctgtgata

SEQ ID NO: 6793 - DNA, 569 bp, Gossypium hirsutum
  misc_feature (517)..(517): n is a, c, g, or t
  misc_feature (562)..(563): n is a, c, g, or t
tgcatgaaattgacacacgaaatagtacatatactagattggacattggacattttcaaaatacagggacttacatgagccattcacggcattaggccaaagccaaaatgcaaaaatgacacttgaataagcacctaatacaattgaatgaatgcagctgatacaagtaactaccaagaatatcaggttgcatgttttaaggtagacgaatgaagacaaatcaccacaaacatctgcaaatctagaaaataggatgttgaccttaacaataagcaaagagcagcgggaaataaatgcatgtagtaaaaaacctacatatgtaaatataaatatatatctgacctgcttattgcgagtcctttcctcttcatggaacgccaattcctgagagaccaaatgcacaagaccagaattgatgggcaagatcatggtgtaagaaattttataatagcaccctgaaagtaaaaaagaagagaaaggataagacttatacctcctcttcatacttgtcgatatntggatataaagctgcaattaaggcatcatagtttgggtcgtctcnnagagaa

SEQ ID NO: 6794 - DNA, 637 bp, Gossypium hirsutum
  misc_feature (59)..(60): n is a, c, g, or t
tgtttgtagatctgcatgtcatgggagggtgagatcttctagtttgatactcaccttgnntattttcttattacgtgcagtggggttatgttgtgatttcaactccggatggagttttggatcatgaagaagccattcgaaggaatgtaggtgggcaggttctgggttattttcattagacttgtttatctttctgatagttgtttgagctgtgctttatctctgaactttcaatcaaatatctatctgaatttggtatcgtttaaaacagaatattagaatatataacttttggtttgatgccgtatttgtatttgaggattagaattttacagtgtttgctccattggtagcctgctatctaaggtttttcacttgaaatgtcataagctcattcacatatattcaggcttaagctgccaatccaattttaagacatttgcaccttcaaagtgctccttttatctttgatctaaaacatggatttttatgctttgcataatatgcttcagtgttcacgaaaaatgccccaactaggaagtaggaacacacagggccatcagctttttagcctccaagtaaagataagggtgaacccgatctaaagcaggagttttgctgataacccatagcagca

SEQ ID NO: 6795 - DNA, 581 bp, Gossypium hirsutum
ctttatacacagagaagcctattcataaaacctttaaagatgaatcaggtaattgttagaaaaatagctttatatgattttatcggacagtaactttacactataactttcaaagattaatgtttaaaatttaaaatgagtaaaaaataaatatgcatgctaactttactagccaaaagaaacacaaagctgacacttttttgtgtttcctgtatcatgttttctcaaacataaaccaccgggtatgaatctacattttctcaaatatatttgaactcaaaccaaattttaggatgggatgcatacagctgaagggacaaagtgagttgcaaggccacatgcaagcatttctgcaccatccaatcttgcaccagtaagaccgacatattctcctgccagaagatgatgacagaaagtgaagctaaacacaaagcaaattcaagtttacaagttttctggctagctagaaaaaaccaatacaacatgaatcagctccacgaaccaaaatagatccaacaaaggccaaagattgctaatgtagctatcataaaggagaacccaatctaggagcctactgcctc

SEQ ID NO: 6796 - DNA, 594 bp, Gossypium hirsutum
gcttcatttttgtgaataatgaaatacataatgagttgaagtaaacttagatgcataatttcctttttaattagaaaaaaaaacttaaaatctctcttaatatatacataaatattattataaaggtattataaaaaaatgtttaaaaacaactaaaaataaattgagggactaaagatcaaacctgagattagtaccactcttatggttcattcaagcttaatatatcatttactatatgagatttaacacttttttagggtgatattgtggtactaataatatcaactttttaatgtttaatttgagtctaggattgatttgacgaaaactaactgctaagatgattaattaattatgaattttcattaaataaattttaaaatccgaattacacagtaaaaaattatcaacattattttgaagtactaaaatatacttattatatccactctttttgatgcaatgcttggaattattcataatatctcccaactcttaaataagaggataatgcgttacaacgcatttgaattcacatcctcctgcactaatgacagtgttgatgccaatcgaactaaaactcaatcggct

SEQ ID NO: 6797 - DNA, 637 bp, Gossypium hirsutum
aaatctcagtcctcgagatctctgatcccgcagttctctgattaagcatttcgatttatttttcgagtttgaaaaaaataacttaaggagatctttcaagaataagaggcagtttcttcctagttgtttgcgttatcttcggtgatcgtttgtgcgttgagagatttatagctgaaaaagaagaaaaaggaaaaaaaaagaggagtaaattatttgactggaaattgaaatttgattagtcgacatggttactggaaatatatttcattgcagaaagaattcatggccgcctgaggaatatgttagccgtcacactttacatttggtaatcctttttattttttattttttattttggtcctcgtatatatattggcggaggagagaactctgttgatcattttctaagttgattttatttattctgtttgttcaatcagggaaaaaaaaagtgtaaaagcagaagaaagaaactagtgctactataaaaaaaatttatcaggatcaatgtttgtttttcctcggaactagctgcatcttgattgataagattggaaatttatttatcgaaagatggaaaatttacttacttttttagctgtctcctgatattgtagatggatacaagacgtgcttt

SEQ ID NO: 6798 - DNA, 638 bp, Gossypium hirsutum
tttctttactatttaaaaagaaattctaaaggaaaacaagcaatcaaaccccatctctgtattggtaatgacattcccgaagctggggtatatgcaaaaacaaggaaatggaaaagaagagagttaatggaaagagtatcttaatcaaaagaatttggcatcgaacatggacactggaaaacaaaaagtgaaagaggtccaaagaggaccatggaactggttcacattccagattgaatcaatcgatgagtaaaaacggggaactacaacaaattgacccggtgaactgcaatgaaagaaccaagggatgtaattagcaatactcacaaatctgatgctaaaataccgtatccataaagaatggctgtaactagcagcagaagctgggctgcagatgaggtaaaagtttttccacagaaaaagaaccagtaaaatgccaaagccagtataaggaagcacataaatgttctcctttcatccctccacagcaggacatctgcaactgaatcgaattaattcaaggtcactatatggagaaaattgcactatcatgcctcatttatttataagagcctatttggatgcatctatctatatgctataacacagtgtttgattgagctttggaatcaatgaca

SEQ ID NO: 6799 - DNA, 659 bp, Gossypium hirsutum
tttatgcatgtctcatcatcagtgcaatttatgaagaacaattcacgaacacatatatgcggatgagatcttgagtctttaataattagaaccttgaggaacaagtactttgaagatttttccggaggctgcaatctctcatagcatctggaccaggaatttgaggttagttttagtttgcttatattaatgatatttgtatctcggaatattcttgtatcatttatgccatttgtaattagcacaaatattcaggctgtaactaccatattcgtccttgattactttgttgaagctctttggaattggagttaacttgctgcattgctattgatgaaggttcaccatgcttcattttgtacattttagcagttcaatataaaatttccaagtttgagaatgttaagctgtcttgggttgtttcaagttaaaaattgtcattttgttcttttgtgcatttgcaacctctattggccccaagggttcttaactactactattatttttatatagggaaacttatgtttgagtaagcttacgttttgattatagaattttaaaaatattactatatagtcacttgcattattgatttaagcccttaattcttgttataaattttagatcaaaatgtatattttccttttatttcgttaggc

SEQ ID NO: 6800 - DNA, 645 bp, Gossypium hirsutum
  misc_feature (53)..(55): n is a, c, g, or t
tatctaatgaaacaaagataacaggaattagtaactggacgtgtgtgcaaaannngtaaaacaagatgtcgcacaaagtcaaaaacaataacattcttcaacatgttcataactcgcaaacaataccttggtaagagccttcgaaaattccccatctctgtcaactaaactaagcttactcacagtcatgcatggagcaacaatgggtattggcataacatactgtcctgaagaaacacaaggctttttctcatcctgggaattgaaggcagccaagcatgcatcatcataaacaagcaattgccctggatttgtcaacacaaataacaaactgccaccattctccatctctccaacagttggaaataaaaccatatccgcaaaagagccattaggtgtaatgtccacgtggctgacacattttagactttctattccagaagggcattcaaggtccaagatctgtcaaagacaaagaaattagtcaaagaaaatctttttggggatcaaagctataatacttgtagtaaacagaatgatggttctggatttggtttgcaggactcctgatgcatctcctcttctaaaaaaagaataacactaaagccttcgtaaaagttagaggagtgcaatgcggtacaaata

SEQ ID NO: 6801 - DNA, 641 bp, Gossypium hirsutum
tttgtacgataattaaagccataaggaaaacagcaagtccaagagaaatgaataaaatgttataaaaaactctaagctcgtttgtttgccttcgaacgatctttatgattcgaatcgtccgaagaaacacaaacgaaacagcagcagggagccaagttatcagcaagataagagcctttgggttgtccccatagaaagcatggtataactgcgtcaatattgcaccacttagacctacataagatttctaaaggcctaaaacacttcccctgctttcagggaagttcttgacacaagtgaccagagccccagtattggcaaaggcctgggaattggcacctaagcagaaataaacgcacatttgccacacatggggcttagcggtgcggccggtgacggcgagccatatcatgaaatatccgaagaaattcatgacggccccaatcaagagaatcacccacggcggcgttacctcattgatgagccccgataggatcccaacgttgccacccaagtccttggaaaagcttaaaagattgagggttgtttgatcatagcccaaagatgttttaataacattggagtatagaccgaagatatacgttgcgccagataccgacatgataagcagtgaagcaaac

SEQ ID NO: 6802 - DNA, 640 bp, Gossypium hirsutum
tctcatgtactaatgcataattagtagatattacatacttgaagttgatgtttaaagttcataatcgggtattaaattataatcattcgtataatcaaaatcgatataataaacctaaaaaagttatgattgcgaattatgagatatttttatattttttagtattttttatctttattttatcctacatatttgatgtttatgattttccctctcaacaatattgtctcaaaaatttaaatgatgtgacttatcattgtaggcatttgagtggtccaaatctaaatctaactctttcgactgtgtgaacgagtcaaggtctcatcatctaattcaattatcttaattagatgatcatttaaaattcaatactagattattatacaatcaaaatcaaaatatgaatgaaaataaattatataattaatatattaattaaaaaaattatataatgagtatttacggattgacttagctataataataatcataaccactcgttattggattgaggttgaacacaagtcttgactctaaaactttatttaatgtgataaaatataaataagtattattcatacgaatttttccgcaagctcttgttcttggaaatttcctatgtccagtgagagatgtacag

SEQ ID NO: 6803 - DNA, 406 bp, Gossypium hirsutum
tttgggttttcctttttaaagtttattcaaccaatccattttaaattttaaccttgctgatcagtcacatgtacatgattttaaattttgagccacccttaaattttaaccaaaaatcaattaaaaaaaatgttattatcagttattcaatacgttaatatgtgacatcaataatctattaaaagagaatgaaaattttaacgataatgactaattcacttaattatcttattattttcatattacaaataaatttaatttttaactgaatttaatcattttttattaatttatttgtttttttatcatttcaaaaatcttaaagtctatccgaagtctttatattactttataatgtttatttcaatctttctattaaaaaattgttccaaactaacccttgtcc

SEQ ID NO: 6804 - DNA, 605 bp, Gossypium hirsutum
ggacagttcggccaggttggtccagccaagaagtacctactggctttgttcttgttaggcagtggtgttacattacatatcagacataaaaattaaataaataaagaaattagtggttcattccaaagtaggccaagaacaaaggaggaggtaaccaataatatggccacactctcaaattttatatagaaaaagaagagtgtcccttttcatcaattttcaaatatatatattttattttattaaaccccaaaagttggtaaaagggcacatgattccacctgtcttctgtttccatctctctttttgattccaatgagattaccaacttttggtctcacattttttctgaattcaaaccctttgattttgcttcatcaaaagcattttcccaattcataaatggctcaacaataccacccaatttctcttttaatcttatgttgggcttttttttttctttttaattgagtaaacatagtaatcactttaaaatatttttttacatacgcaatattgttatattcatcacagttttattgttgatatatatactttattctttctccagggaggctaaatacttccctagctatcttcttctg

SEQ ID NO: 6805 - DNA, 239 bp, Gossypium hirsutum
ttctcaaccccttttcagttttctcccaaactaaacaaattaaattcattaactcttggctttgttcatctatctgacagatcttccctaaatcaagataacgacatgacaacatatggagctttcctagatgtagacattcgacatcacaagttgtcattgaggagcttggtaagttttagtttgattcttcatttgagctttgaagtaaccatttcatcattttgagtccttttttt

SEQ ID NO: 6806 - DNA, 647 bp, Gossypium hirsutum
  misc_feature (632)..(632): n is a, c, g, or t
tgttggatgggcaaataagcagcggcactacaaatcccatcaaacatatcttaagagaagagagtaatggccttgtgacaagctgagaaagacgagtagggttggctggccaaacccccttctttagacctttctatcctggcctgcccaaaggcttcaactgacttgacaaactagcctttcttctttactccatccaaaattactgccaccattgaaagctagagagctggtttagcctatttgactagttaatggaacattctctccttgggaaataagtgtatatccactcgttcgattagggacactaccctgatgagttaagccgtataacctaaatgagctaaaccagcctaaatatgtgtaaacaatacaatagaaagggtaaaataaaatcctagaaaacttattctcttgaccggcatatctaaatcctccataaagacaacactggataaatttaaagagttataggcatgaccaaacaaactgaaaataaaaaactctatcatcatttatagaaggtccaagatttgctctcattggaattaacacaattcaaatctctgaagcttccgatgaatgtgtaactaaataataggaaatttatattaccataccttttctangtgctagggcaagct

SEQ ID NO: 6807 - DNA, 599 bp, Gossypium hirsutum
  misc_feature (590)..(591): n is a, c, g, or t
ttaagaaaagaaaaggtaaggtggtggttgtttagaagaaaatttatataatcttgatattttattattatttttttctttttttaatttaaatcagttaaaagtttattttaattaagagtgtatctaaaaaccatttattaattgaattaatacatcttattttaataacacatgcataatcattttaattaataaattccattaaattaagtgtttattccaattcttattaaagtgctgagaattagaggaataacataaatttaattagtatgatgagttttttttaatatattttacgtgccatcgaagattgctcgacaactaaggaaacttagatgcaagttgtgccaaatgtgttatgtgagcgtttctttgcaggcgatgttgttcggccaagcctacttggtttgttagcttggagaatattgaaaaatcggaaccttttcatcttccaaggggtcccttggaaagcagttgacattgtgaataattcttatacatgggcagaacagtatgcctcttttcataagaaggatttatctagacagcagacgccgaggccaatctttcacatgctggagaannggatcaat

SEQ ID NO: 6808 - DNA, 651 bp, Gossypium hirsutum
tatttctgaacctgaattactccttgcaacacctgttttcttctatcctccaaagcaccaatctgtatgccggccacagtcagacaataacagcatcaaagaaattgttatgtaatttaatcatgaacagaatgaaataagttggcatggcatctctatgttccaaatttcagtatttcaactctaatgtcaaactctgagcatcaagagatatttcaggtttttatttgccacacaatgatccatttacatttatatatcaatctggttatttgtgcttcacttgaaaaaggtctgtgaccaatttggctaacatgatttttagccataaagaggagtcatttctcccagttcaagtggaaccatcttacatggatcaagagttgtgttggttggctcttccaatcatctatagtgtcatataggtactggaagtctttggggaaagacgcaccaatattggaaatcacagcacaaaaattaaaagaaacatgaaaaacaggagtatagaacttacctgcccagttcgaagatacagttttgtatagccaacccgatacatgtcggggaggacattaaattgcttcagaacagcaactgaaatacttaatggatcttgagaagcattggtctccaacaggaggaacccat

SEQ ID NO: 6809 - DNA, 290 bp, Gossypium hirsutum
  misc_feature (36)..(36): n is a, c, g, or t
  misc_feature (50)..(50): n is a, c, g, or t
  misc_feature (53)..(53): n is a, c, g, or t
gtcaggggataaaattaaaatataattaaaattacnggggccaaatttanaangttaaaagatctgattaaaaccaatgaaatttcggagggactgtatgcgcaaatgtcccaatcgcaagaaaacacgcggatcctggaagcgggtcgggtcagtgcgcgggttgaagctcggaacggcgccgttttgtattatgagggcctaagtgaaacggtgccgtttcactaaggctatttaagccatttcttttttaaaaaaaatcatttctttctcaattcaggaaaaaaaaa

SEQ ID NO: 6810 - DNA, 380 bp, Gossypium hirsutum
gtttagattcaataaacaccttcccaattagagtaaaaggggctcacgcaccaggcaacagaataacctaaaaagaataactacaaaactcctttacgaccaacttacatacagaagatcaatctactatttgccgactgataataatccaaagcttaagccagttaattaagcatagaaccattcttaattagaagcactgatcaatgagaacaataatgtcaaaataaaaatccattatatacttgcttataacaaattaaaaaaacaaaaaggaattgagaataccccattgttagcctgcacaggatgttcatcatcaatgtgacagcacaagcccacgatatcgaaatactctgaacaaaaagggcatggaaact

SEQ ID NO: 6811 - DNA, 599 bp, Gossypium hirsutum
  misc_feature (568)..(569): n is a, c, g, or t
  misc_feature (586)..(587): n is a, c, g, or t
tgaattcctcatcatcagtttctgcacagcctgaaagtctcacggatattaaaatttaaattctcattaaatcaaacaaataagtaaaaacttactataaacctaaatatttaagaagtaaccatgcacctaaaatttctctcaagtgtttatgaaaaaacataaaaatgagaagtatgcccttaaaattctccctctttaaacccacctaaaatataatcaagtcaaagttttccagtatagatctttggaaatgttctaactaaataattggccttcaatatgcgccggcattaaatccttaaaaaagttgcccaatatcagaagcatcattgtagatttacctctaaattctaattccctgaacaataaataataacaataatcacgtttataatatagttaactacgtaataaagaaggaatttcttcagtgttctacatcccaatatcaagaacagtgcgtaacatgaatgccgacacaagagtaagctgaaccggcaaacctttgtcattgtagctgtcactaaaatagtttgaaatccttggccactgggttttagagcanngattttttaatggaccnnagaaacttgcga

SEQ ID NO: 6812 - DNA, 639 bp, Gossypium hirsutum
attactggagatagtaacaggtcgccgtgcagttgacaagtccaaacaaagtcttgtaatatgggtaacacaaatatgcaccgaaatcatccattttatatcctgcaaaaagatttgaacttattttctgcatttttgttacaggcaaaaccatttctggaatcaaatcaagtaaaggaattggtcgatcctcggctcaaagatgattataatccgagcgaagtgcaacgaatattgattacagcttcaatgtgcttaagtcacttacccagcaaccgtccaaccatgacaaaggtatgaaaaacacaacaaaatttcccaagaaaacatcccattttccctgaaaattcatgctagaaaccacgaattctttgcccattttgcaggttgtaaggatgcttaagaacgaagatggtccaattgagtttcaccaaatatcttgtggaaggaaagcagtgatttttgacggccatgatttgaaagattctagttgtaaaaactatctatataccatgcgtccaacataattatgtaattggaaaaccatatctatacatttacgttcgaatacattcggacactgtatctatacggagcggggcatggtgttgcaggattggatttggaacaaatagagcc

SEQ ID NO: 6813 - DNA, 366 bp, Gossypium hirsutum
gcattattgttattgtctcactagcatgatgattagctttgcacagtcccctaacttgagcttgtataaaattaagcagctatgagcaatgaattgttataaattgttagtatacataatatatcttaaagggaaacaaggttttagtggttagataggagagatgaaatacccctttcacactgtccttgttatgggaattgactccataaggaatgcaattttgttgctcaaaatatctcatccatcccttaaaaaaaatggaactaaatattaaatgtgtggataaatttacaagacaaatataaataaataaataatgaaaaaataaatactttttagaggaagtatgtgaaagaaggaaga

SEQ ID NO: 6814 - DNA, 577 bp, Gossypium hirsutum
aatcattttctatactagttaccttattttcactcaacttctcgaaacttcattttcaggtatttaactgtcctattagagcagactcttccactgttctatctgaattaaagaattcttcacatgatttggtaagtagcattatcttccggacatatctccgtaaatgttgtggtgttcttccactattaaagatgtggtaagaaaagtgattggttttgcaaattgtaaatattggaaattcttttattgcgatcatttaagtcactttgctataggatttttgaaaaattttgtgtccatacaaggtcatttatacttccatatatggaacatttaagttccttattagagtattggtttgaggtttcagagtatgtaagaagtatttactggatgcaaacatgttatagattttttatgcacacacaagttcatttgtacctccatttatgcaacatgtaagttgcttattagatttttggcttgaggtttcagagtttgtaagaagtatttgctggaatgcaaacatgttatggaattttgaaatcatttaagtcactttgctatagggctt

SEQ ID NO: 6815 - DNA, 236 bp, Gossypium hirsutum
  misc_feature (201)..(203): n is a, c, g, or t
  misc_feature (215)..(215): n is a, c, g, or t
  misc_feature (217)..(221): n is a, c, g, or t
  misc_feature (223)..(226): n is a, c, g, or t
catccctctcgatatttgaatagggcttgcaccagcagcaaccacctgtagaaaataaccataaaccaaaaagtaatatagcaatagacaggatatgtaatattccaatgagatgattgttacaaatatcacacaaaccttaacaccttcggttattaaaccctgcgcaagaacaactgatgtggtggttccatcaccagnnnaatcattggtcntnnnnncnnnntgtctcacca

SEQ ID NO: 6816 - DNA, 646 bp, Gossypium hirsutum
agtttctttttgctgtagcggcgccagcagcttgtataaaacaagctgcccaagtcctccactgctgtgaataaaacctaaaagtgtggcgcagctgcttactgtgaagccggcggaattgagaagcaacgaacttcaagtcatcagccaccagagcaaaagcttcaacttctgtaagagctcggacagttctagttgagatagggagatttgacgaagaatggggatccagtgcccaggtgagaagttcctctccacaaaaatcccctgccccaatgtattcagaattaaagaagccagttcttccaccattggttgtcatggtcaacaatttgcccctcatgatgaagagcatctcatcaactgggtctccctcccgaacaatatagctctcctctgtgtagagaaccggcttgagacgatcacacatagcatccagtaattgctcgtccattttttcaaacattggcaccttaaacgtcaaaggaaatgaatgaaataaccaaaattagtgattggccgtgaaaatgcaagtcaaatattaacgtgcatcatattactcccgaaaagcatgcaacctgtttaaaacaatggtcaagacgtcaaggcactcactctcatgagcagagccaagcaaagatggcgc

SEQ ID NO: 6817 - DNA, 572 bp, Gossypium hirsutum
  misc_feature (559)..(559): n is a, c, g, or t
ctgttgacttatcgaagccggtgtcgttgagatgattggtaaggaatggtactttgtaagagtgcatgatgcagtccaggtttgcctccagcatgttcagaccatgtctcccaaagcatcagatccttcacatgaaaaaccaagtttctttcagagaataatgaaacagcggagggaggatttatcagtttctgaactagaatcgggtaatagtcaaatgcgttcagattcaacacaggatgaccctcaattggagccattgttgtctcgaaggtcttgaaacttgcttgcatctgaagcaaacgttttggataatgccatttttttaacaaggtgtttccgatatccaatatgttgctcgattgtttacaatttagttaaaagattaggaccgagaactccgattcttgtatgtattgtttggaacattattgtactactactagtagtctaacttatttagtagctgtataaagctgcttcttgtactaattttgattcaatctactcatttcatttcttatctttgtccagtattcaagtaaaatgctttttaacntgccaaaaatcaa

SEQ ID NO: 6818 - DNA, 507 bp, Gossypium hirsutum
  misc_feature (481)..(482): n is a, c, g, or t
  misc_feature (496)..(500): n is a, c, g, or t
attcacttcatcatcgtctttcttattcttcttcttatctccattgcccttgtttttgcctttgccctcgtcgttgacgcccttgcccttaccatcgctgttgccatatccgttaccattgttgttgccattcccactattacccttaccttcaccatgcacaatggcggcttcagtggataacagtacaataaccagaaccaccagaatactatacaacatcatctcgtaatcgaattgacacactaattatatgtttgtttctcctctttatagcttatgattattattagtggtagagtcgatcaatggaggagagttttcaagagcaccattatcaaagttgggagcaccatttccctcgaagcctcttcatcggatactttcaagcgcattgaggcgccttttcttcaagcattgcatttgatgttttgactactacttatttcagtttctaacccatgttgcaatgcttcaatanntctgtatgttgctnnnnnttctgca

SEQ ID NO: 6819 - DNA, 402 bp, Gossypium hirsutum
aaattttggttgtctgtattttgaggaaaactcaatagattgggaaatatgttaatattgtgggtgatgttttgtaagggtttgaatcacctgttaagacatatataattttacttttgtaattgtggtaccacttagccatatgaatgtatggttcaaactctattaaaatcgagtatttgattttttttttgtgatgaaatattccctaatcttcatgaactcattagatatttgtcagagttggaagccaaaatccgaaactaaaaataaatataaacacctccacataatacctccctttaactatgataaaaataattagaaatatgataagataatattaaattatgtatagttgaatcttatagatggagaaaaacagtattgtgcctgatgcac

SEQ ID NO: 6820 - DNA, 618 bp, Gossypium hirsutum
tcgagagcacaacttcttcaggtcttatccgatgccaactcgagctttcaacacttgtatcagctctcggagacaaaagttctgttggcattgtgagtaatcacttaatttcaccttatattcaaagttgctacggataagtggggagctattaatcttggtatgcaaaataaatgtttatttataagtttactgtaaaatagttcgagctacagcccatgttattcgtttgggtttgataacagccagagaaggcatccgaaacaatcaaggaacaacttgctgctatagcaccagcacttgaacggctatggaaacaaaaggaggagagagttaaggagttttccgatgtacggtctcagattcagaagatatgtggggaaattgctggaaatggcagtgaacagacaggtgctcttgtggtcgatgaatccgatttgtccttgaagaagttggatgagtatcaagtaaaattgaaagaacttcaaaaagagaaggtaaaattcattggcttaaatatcctgtggtaaaagtaccatgatagcccttgaatcggattgcattttgtcccctcaaaaaatggacaaattagtccatgtatattagatcaaagagtaa

SEQ ID NO: 6821 - DNA, 560 bp, Gossypium hirsutum
caccgtgaggagcctagtttgggagctggaaaaatgatccccatagaaacaagcagtggatacttggcaaatgagcgcatactcttacctgaggatgcagtaagttacaactctatctgactcccctttggggtgattgctttgctaaatatgactctctaagatgactgctttgctattataattgcccgtgttttctttttctatttttgcaggaatgttgtatatgtctaagctcatacgaagatggcgtggctcttcatgctctcccttgcaaccatcattttcattcaacgtgtattgtgaaatggcttaagatgaatgcaacgtgtcctctctgtaagtacaatattttgaagggaaatgagcaagtatgaaagaacaggagagcaagccttgaacattgtcagattaagttgtcgatgatgctgtgtatgtatagaaaaaacggaagttatgaagagctgaaactgaactatgaagaccgacatgcggtaattcattcttagcttcattttttttttgtttaaatgaccttttggggttaaccggattcccca

SEQ ID NO: 6822 - DNA, 630 bp, Gossypium hirsutum
tcaacaagtgcagtcttaaacagtgtaagcgcatgattagaggcgtcgataaggatggagatgggtttgtggacttcaaagaatttcgattaatgatgagcgccgcagaacgcagcagctgaaacatgttgcagaaaaagtcaaataaaacgcgtaatcgttgaatattctcatttctcaggtactcataataattcttttttatttttcccatattctgtctgtctagaaccttttatcatttgaaactcagtctaaatctctaatttaatcatatccctttgacctaatccaattgtttcctcgtaaccttaatattattttctatcaaatattatttcatatcatgcctaaattcgtaatcgtatcactattcactccaatttttaagttacacttgtttcccaccaagttttatattttagaacgcctagtacaattataggaaagctgtagaaaggtgatggtcagatgtttctcacaaatgccgcaaattttactgaatatagatgcccataactcattcagttgtaagcttaatcaacggtgctccttgtttcccttccttttcttctattccaggaagcttaatcaacacaagtatttgcggcaatgggtcctaccatcatt

SEQ ID NO: 6823 - DNA, 667 bp, Gossypium hirsutum
tgtcacttcgaaagaaaaaaccgcctccattattaaaataaaaaaagcttcatattattatatccatgccataagcactgtgttataagttagtggtggttattgttgttatgatcagtacgatgctgtactaagaacacatctgtgcatgatcacattgtcaattccagccatcatctccgactttaattggaataagaaccatatgattcgtgttgcctcattaaaaaaagaaataaggaaggcataggggaacatttcaataatccattataatttctaccctatatagtgcatggaaaaaaatattcttcaaaaattctcctctcatctctcaataatatggactaaagtacatgcaattatgaaatagagaagaagaatataatttctaccctacatagtgcatggaacattttgatttgttattgttgtgcgtagattcctcccaccaagatgaggatcatattggaaaaacagtagccctcatcgtgggtgtattagcaggtctagctgttctaattgttattctctcattttgccatagcaatgggtatgtaatttctacttcatgttattaattgtttcttcatcctatatagcatactgcttctacacataataacagtgacccttttttcttttttcccagaatgaaacaacaggt

SEQ ID NO: 6824 - DNA, 632 bp, Gossypium hirsutum
tctttggggttaatgcagttaatcatttgtttattttgaagggagcaaagtcattaatttagcaaattttctgagatgcctagttcttattcttctgtggtagaaaaagcatttttaagataatagcttattgccatattgaagctgtttactgaatgaatgaatgtatggtggttgtctttttggcagctaatgtaccatttcggaagaacccattgccagtttcattggacatcttttagctatgtgagtaagtagtgaagcaaattgtgtattgtctatcaaaatttctggaaatggtcattgtttcgagtgtcaggaggagtttatttcacaggagtgtggtaattgtgtggttcaatatttcttgaaggattccaccagtgaatctgtctgtgcagttatcggttctcaaaggagtgttaggtatatgttttatgttgttgctgaggagtttgtgagggtatatgcggctgagaattcaaatcatgctggtttcaaatggaggtcgaggagggaggaggttgtagattggcttacatccatgatctagtatgtaattgaaccttttggtgtttgaattctgtcatttccatggaatcaaagataataaatcgcaatagcatgcatgg

SEQ ID NO: 6825 - DNA, 615 bp, Gossypium hirsutum
  misc_feature (71)..(71): n is a, c, g, or t
atagcttgaagttgtccttgttatcaaaatggtagtagatgatactaatggtaatctgaaaatgaataatnagctcgtaagctcaaatttccagtgaagactatggagttcatcagtcatgacttgtgtaaaaacatgcattcccctaagttactgtgcacccattaattctcatttagaggcattttgaaagggagaggtagtaatcagaagctcattatgcatatgatgttgttgctttgacaggaatgaatcaccatattggaaaacctttgctgctatttgtattcaagtagcgtggagatacaggaaaaaatgtctgaatcgtgccaatacctctcaatccacttgttgttgaggattgtatgtatgtatatatgtatttcagcttttgcaccgtataaatgtaagcttcatttgtaataataatacagttaggaatattaagatagatacccaatctttgtaggaaatttgttgtaactttatcacaggattatctccaatttagcattgggaggaacaaagaatgatatgcaagattgctgtttagattttctttttataaatgtagctaatatacgtgtaaaactatgtaaaaggttccaagtcata

SEQ ID NO: 6826 - DNA, 641 bp, Gossypium hirsutum
ggatcaacagaaaaaggggggaaaggtcaaagtaaaacgagggtggattaaagaaaggataagagcactagatttgttccatgaataaaaaggtaaatgtttttttacgacatatgctttcccccaacatcgaattctcctaaaacttcttcggaacacaattgatactgtactggtatcagtatcaataacatttaacattcagatgccactattgaaatgaccacaataattttgatagatgatatggccccataatcttttgtttcatcatccacaagcataatagttctcccaccctatttcctttagtcatatcaatcatcaaaaacttatgcacaaaaatgaaatcaatagagaaaatatgttatgttttttcctgttccttccaggcaactgtttcaagggacttacccctggcaaggaggacatggaattcttccctgcatgctaaaaaatatgagtaccatggcattaaggtcaagcactagggtgagaaatttccatggattattatcatcttcgtgtcaaaaactacctaagaacttgaaccatcccagtattcaagagaatgaaaacacaatggataacaaccatcgaagggctatagcacataccttaaggcgcaaaagttctcgaat

SEQ ID NO: 6827 - DNA, 629 bp, Gossypium hirsutum
  misc_feature (215)..(215): n is a, c, g, or t
  misc_feature (269)..(270): n is a, c, g, or t
  misc_feature (276)..(276): n is a, c, g, or t
  misc_feature (278)..(278): n is a, c, g, or t
  misc_feature (283)..(284): n is a, c, g, or t
  misc_feature (287)..(287): n is a, c, g, or t
  misc_feature (291)..(291): n is a, c, g, or t
  misc_feature (294)..(294): n is a, c, g, or t
  misc_feature (298)..(298): n is a, c, g, or t
  misc_feature (300)..(300): n is a, c, g, or t
  misc_feature (302)..(302): n is a, c, g, or t
  misc_feature (307)..(307): n is a, c, g, or t
  misc_feature (309)..(310): n is a, c, g, or t
  misc_feature (312)..(313): n is a, c, g, or t
  misc_feature (315)..(315): n is a, c, g, or t
  misc_feature (319)..(319): n is a, c, g, or t
  misc_feature (324)..(324): n is a, c, g, or t
  misc_feature (350)..(351): n is a, c, g, or t
  misc_feature (360)..(360): n is a, c, g, or t
  misc_feature (365)..(367): n is a, c, g, or t
  misc_feature (369)..(369): n is a, c, g, or t
  misc_feature (584)..(584): n is a, c, g, or t
  misc_feature (586)..(591): n is a, c, g, or t
  misc_feature (601)..(602): n is a, c, g, or t
agcatccaatcctaatttcagtgtcacagtcagtggttataaacctttccatgcaaatcctggaattattgaagacttaaccatgtcctaatatcaagaaatatggagagagaaaaatattatgacttacaagatgattggatggctcatcaagcaatattatgtgtggtttcttgaaagttatttttgcaaaagcaactctacttttttgaccncctagcattggcaatcaaagcaattagaaacatgtctgggcatatgtaaaggannaatcanantcccnnccnacanccntganangnattgnannanntnctgnacttntggacccgaagttctgcactcactcnnttgtactcnctcannngnaacctcaaataccaaaaaaaaaaaaaaaaaattttttaaaacccccctaaaaaaaatttcggaaatttttttttgggggtttttttttggcccccttcaaaccttttgaaaaaaaaatttttaatttttttaccttttttttaaaaccattttaaaaaacccctttttcccctaccctttaaacaaaaaaaaaaaaaaaaaaaaaattaattttngnnnnnnggaaaatttnncgccccccccaaaaaaccccccccccc

SEQ ID NO: 6828 - DNA, 372 bp, Gossypium hirsutum
gcacccgtgtcaatcccgagcccctgctagcctcccttagatcagtcccggccagccccttgcaagtctcccttttggtccgtccctgcttatatatcatgacgtggttgtatgatctggattcattcggaagatgggagggagtggaatactgcatttcttttttctttttcttggtcaattcagaatatccgctgaaattgccatgaaagtgagctgcaggacaaaacctgtggatttgacattatactaaaaattcatgtgacatatacaattcaatttgatgctataaattacatggaaacatgtaagatcattttacgagaatttcaagatattttaaagcaaccggaattaacattcctctcagaa

SEQ ID NO: 6829 - DNA, 665 bp, Gossypium hirsutum
  misc_feature (26)..(28): n is a, c, g, or t
agtaatgcaaatattccaattgtttnnnatttatgttttatttactgttcttaacttcctcaatgatttgcccctctaggtgctaagtgtactgaaccgacacctgaggtggctaacggatctaaacctggttcatcatctgggaatgatactcaagaatgtgatgatggtggtttgaatcattctagtcggataaatggtgaaactgaaggtgctgattcagattcccgatgtccaaatgtttctgcgaatgatacttgtggaaccagtagttcctcagatgcatccccagatggtaaatacaatgctaaccctagctcaagccatgatgcacttgagctacagaataaggcaggacttgatgatcccgccgaagataatcagtccgatgatgagactgattcacagtctgggaacaaggaaaccgaatctgcttcggacagtgaaaattttgcttcctctatggactataatgcggtagacaagggaaataaaatggtggtatcggattctgctatcgagaaaaatactgaatcccgtgaagatggtgatatagatatggatgctgtagatgcagtcgacaatgttgaagaaactctatcaggggacaagctagctgaatcatctgtcggagaatctgatgaacataacagtcagagtgatac

SEQ ID NO: 6830 - DNA, 644 bp, Gossypium hirsutum
  misc_feature (638)..(638): n is a, c, g, or t
actgcatacaatatgtttaattattgacagtttataaaatcaattacagctgaaggaaactctctatcttataattgttgaaaaagaattataggaacaaataactacggaagaaggcaagtctgataaccctaaaacaaattttgatgacacagctgtcattctttcacatcataaattgcaaaaatggcttaattagttgttctatggctaaaatataaaaaataacattaactgttaaaatccgttatctttgccgcactagtgttagcatggttcttactctgctgcattagcatttacatggcacaaacatgataaataaggctccatagatgttgatgtggaatgccatataagaccaagtcaacttgaattttcatattataagttaaaagtcaagaagatgtccatgtggcaaaaaggtttccattagaaataaggacataatggaacaaagaacttttaaggacgacattgggtacattgtaaaataaaagtaacctgaaatttttgaaaaagcacaaggatttccttggatttttagcccaaaaatatgtaagaaggttagcaaataatgccataattcaccatgagggagagaaagattatgacagagacagaggcagaaatttccngaaaaa

SEQ ID NO: 6831 - DNA, 655 bp, Gossypium hirsutum
gtaatttgcagaggcaaggttcattgacattgccaaggactctgagtcagaaaacggttgaagaagtatggaaagacttgtttaaggaaaatgatggtgctaaaaatgtaagtaatggtggtggtggtggtggagcgaatttgccacagaggcaacagacgttgggagagatgactttggaggagttcctggggagggcaggtattgtgagggaagatatgcaatcgattggagtgccgaataacaatggattcttcgataacaactctggtttagctcttcagtttcaacagacaaatgggaacaatggttttttgagtaacaataactcagttcttaatcagcctccaatcttaccattagacgtgagtggagccaaatcatcacactcacagcagcaacaacagccactctttcccaagcaacaaacggttgcattcgctccatctatgcacttgataaacactacacattttcctagtcctggagctcaggggtcggtagttgaaaccagtgacctttcaatgaatactaatctagttcagtctagtggcctgcagagtggcgggatgggaatagttggtttaccatctcctgcaagccatatgtctccagatgtgatttcaaagaatagcgtagatacaacttctttatc

SEQ ID NO: 6832 - DNA, 655 bp, Gossypium hirsutum
ccacagtttcatatcccaattgcctcaaggttatgaaactcaggttagcccttttaacatccaaaaaaacacaaaattatagtgaaaaggtgtaatttcttcccaagtaatcagatagagaagtgtctaatcaggtcattgtttcttgcctgagttttatcatcttatatatataaccatattcttcattttcattttagttaatagtaaactggttccctaacaattccttttaacacccactccttcaaaatgagcacccatgttactttattctttaaaatataatttgccaattaattttttgcatttgttgcagaccatacttcaggaacatgataaccatttctcatttatgtatctttgtttacgtacttcatatcacttttgagaaactagttgaagctgaggattacattcattaaagaaataaactgatttttgtttgtgatcaaatctttaaatccttgttctgaatgaatctgaaaaagtaaaatatcttttcaacaggttggtgaaagaggggttcaaatgtctggtggacaaaagcaaaggattgctatagcaagagcaataataaaagcacctcgaatccttcttctagatgaagcaacaagtgcactagacacagaatccgaacgagttgtgcaacaag

SEQ ID NO: 6833 - DNA, 548 bp, Gossypium hirsutum
tcgattcttatctagttgacaacacggagtcaataaccctttaaaatttataaaatttttagtaggtaataaaattaaatatgaaattttactttaatcatttaagttattaaaataataaaatattattttaactctcgtaaaattatacaacttaatttaaggatttagaaaaaatttctaatttcactcttagaataattttttatattatttttatataatttttttaaattatactaagataaatgcaacttaacaaataaatacctctaaaatagtaacaaaattaataataaaacaatagctatacaatctccaaactccaaacaataacaacaaaataataataatataattataaaatgataacaaaacaatgacaaaacagtaaaaaaacaacaaacgttttttttttacaaatttagattgagttgggccaaaaccaaaaaaattacctaagacctgacccgtttaaaaaacggactttatttttttatgcaaatttattttctagacctatattttttatctaaatactctcactt

SEQ ID NO: 6834 - DNA, 510 bp, Gossypium hirsutum
ttgcataggggcactttcaggagcatcgaactccgaagtcccggttctgcaagcagtatactctagtttgaaaggattaatcaaaattcataaccccagtgtgattatcacggtgacagacattaatcccattgtcaaaaaagctttgaagatggcatccgagacgaatgcaaatggtactgcactcgtacttttaccgaggtcttcagtctcaaaggttctatggatggctgatctaagatcaaccgcattacaaagtaagaatgccaacactctcttctttacacctaatatctgtatataaataactgaatatctagagataaacaattaacgcgagtaaaaatgaacggtagaagactacataatcaaaacctttgtattgcagattggaaccggatgcggatctccgtaaatataattactcaaagccgtgcaccttccttaagaaggcttcttaagtctctgagtgatgcatactatattggagatgagatccctattggcttc

SEQ ID NO: 6835 - DNA, 625 bp, Gossypium hirsutum
  misc_feature (577)..(578): n is a, c, g, or t
  misc_feature (599)..(600): n is a, c, g, or t
tttatttatgcctgcatttatattatgggttctctactctctttatcatctctgggatagatggaatgtgttatagatgttagatattgctcagttgaaagaaaaaaaatgcctttgttgacgtgcaattgccttaagccgcaaacagggctgagataatattaactctggttttatgactaatgtgtagagaaagtgtgatctgaagcatccccctggtgacgaaatatatagaagtggtactctgtcaatgtttgaggtatgctgttgatgagcctttagtgctgctactttcttgctgcctcaaagaaaaagaaaagggtctttcttggtgcattttaagtaaatccatatggttctggttttcttcacttctaccccattgttttcatggctaactcttggaaattcctgaacccggtgaaaaatctggaaaaaaatttcccaaaaaaaaaaaaggaaaaaaaaaaagaaaacatgacaaaactaacaaagagagagaaaaacaattccaaatttcataaccacctccattgcctgattggtggcttaaaaagagaaaaacggtttcttaacnnctgtcataactaaacttaatnntcaccgtttcattaaactgtccctc

SEQ ID NO: 6836 - DNA, 617 bp, Gossypium hirsutum
  misc_feature (554)..(554): n is a, c, g, or t
  misc_feature (556)..(558): n is a, c, g, or t
  misc_feature (611)..(613): n is a, c, g, or t
agggcctatacttctcagagttcatgtctgacactcccctgaagtttttggttgttttttttttgctttgaccatacaactaacccaaaatgttgttttttggaaaagttaacttttcatgattctaatcgcatgcattactgataataatattttgctttgggtttcttttacttctttgtttcctgtaatcttctgaaactttctaaaatgattttaaggatatagaattttcctttggaaattgtcaacttgttctgcactatatacatgtttcctttatccttgaacacattgagcttagagcactacaagcttgatcttcgtcatcaagtacatattcgggaaatacaaatggatcaaataacacttgcagtggaacaagttatccctttgatgtattagatttttttctttggtaataatgttcagcttttgtcactaggtgtatttttcaaggctttgaagttacactttcaagttcttattgtttagtctaccgtgcaaagaagtgttgatgtctgtcttaagctgtgccctcatggatgtattcnannntgattctgccatttcttgttgcaggtcttggaatcaccaaggtcctcaacctnnnagaa

SEQ ID NO: 6837 - DNA, 665 bp, Gossypium hirsutum
aacaagtcatcgttttgtattaacaaaagagtggttttttgctaattgcatataaattgtttaacacgaaagtggtggttcaagtctccgtgtacataagtgagtttcacaatttttagcacactttatattgacattttgctattaaactttacaagtttaccaattgaggtactttcaactttgtaaaccaagtcctcctgaacacatgctctagaaacactaactctcgaaagaacacgagagacaaaatttctcatcgagggacaatacttttagttgtttgagaccaattgtaatagccgactttcaataatgtcaaaaatagtagttcgagaccactaaatttgataattaaattcgtaaatttatttatttaataattacgaaccaaatgtgatttttgagagattttttgaattagtaatttgtgttttataaagatttattaagttaagaaattgaggaaaagaggtatcgagacctcgatgttataaatcaagccgtaaatatttttataaatatttacggagtgtcaataaggtagtattaaaatttcgtcagaaaattttgacgtttgggtagttaattaaataaaaaggactaaaatgaaaaaggtgtaaaagttgctaaaaagattaaatagctcaatggtcaaatgagga

SEQ ID NO: 6838 - DNA, 623 bp, Gossypium hirsutum
  misc_feature (606)..(609): n is a, c, g, or t
cagctgcggatgaagcatcggtatcaaatattcctgtagtttctgggtttagtgttccaaaagtggttgttcagattgtaacagtggatgccatttttagggttacaagcccaccttttaatgaactcgtcattcttaaagagatggctttcactgtatacaacaaagctcgacgaatttcacgaggatccatgaatgatctggctctttcatcatcattatctagatctcattcggtcttaactcctatgacatctattccaacaatgtggaaggattctgttggttctcgaatcccagggtcttctattcctagagagggtgaaattgattccagcttgaggggtggtgcttgggaaaattcatggcaaacacggacaggaggattaatttgcgacccaaatagaaatggggatttcttctatcctgacgaagttcgttacatgtttgagcccctttttattcttgcagagtctggttctttggagcatggagtttctcctacagcttttggtaattcaacctctgaaacttcaaagatagtctcggacgaaagtggtggcggcttcatgcaggctgcaaattctgtaggaactgctgatgctnnnncatgtcctcatgat

SEQ ID NO: 6839 - DNA, 651 bp, Gossypium hirsutum
aggatggcttcgaaagaaccgtcgtggaggaggcaaggatttggaaagaaaggttgtgaattggagagatgatgatgacaacactgtgttgcacattgcagctacaaaacaacaacatcaggtatatatgcaatataatgataagttgcgctcctttgatcattttattaatgactatttataatattctacgcaggcagtacaactgttgttggattccttttatgggttagatgcaaacgctaagaactcggaaggcttgacagctcgagaaatcatagaaagggttgaaagacaggggttgaacatgagtggcgccgaagacgatgataccaccaccgccaagattgagcgcattaagaaaagaaccagtaggtctgaaagagcattaataaagttgattcgtgcaaggaatgggttgtcggagaacatgctcaacgcaacactggtggtagcggcgctggtcataacagcaatctaccagtcatctttaagcccaccaagaggtctttggcaaggtgataacactatccccaccaccaccacaaaccttactacgactactaaatttacactctttcacgacaattacagtgagtatcgtattatatttgtgttgggtgaacaaacaaagaaaacaggtacagcagt

SEQ ID NO: 6840 - DNA, 583 bp, Gossypium hirsutum
  misc_feature (48)..(51): n is a, c, g, or t
  misc_feature (510)..(512): n is a, c, g, or t
ggactgtctgccctgcctttggcccatcctacagtaaaaaccaacgcnnnnttttctttaccgatccataaaaaaaaatgctatttaccaagcagcagcagcattaacccaaggcgagaacaagaacttccacagtatcacaccataacattctcccattcaattttctataataaagcatatttttcattctcaaatgaccacttaaaaacactgaattgttggttattgcatgagaaaaaattaactaaaacatgaaatgggctatagtagttagcgtgacgtacacagccaaggcatggaaagagttgaaattaaaatcacaaataccaaagtagaggtcatcccaaattgaaagggctgacttggccaaaagaattatgattaggatgtaaattttacaaatttaggaaaataataaaaccaaactctagtaaaggcatctcggtgaaagagattatatgcaagatttggaagcaaaaacaagaaggaaaaataaaatgttagcannnaaagaacatcagattaataaaaccatgaacaaagggatccacatttttatcacctctgctacatacagaca

SEQ ID NO: 6841 - DNA, 644 bp, Gossypium hirsutum
gagtcttgtttaattacgaaaacagtaattcaatatggtaaagatgaatttgtccatgtgcatttaagggtaaaaaggcctccactcccaggaacaaccggccccggataattgaaaattgtcataaatcagcccttcctttttagcatttttaattagattctttatcttgaagattcatgtagttttaaatgctgagaaactatgttaatcatggttagtcaaactgcatattgatttttgtttatcttgcaggaactacagcagttcaactgagtcctggattctctactgattttctggatgcttctgaagttagaaatatgattcagtcaaaagggtactttaaggggtcgcctaattcatattttaatgcttttgatggtgtggtgcaccatgatgttgcaatgtgtgctcttggtggattagtcagtcatatgtcacgattgatggtaagcctgcggactagcatttatataagcatgtcagtatacacattagatatctaattaattctatttcatacagctgaaggacattttacagagtggagatgtcttaccctaccatgtttatcaaggttgcctcagaattgatgggcagacaatagtaaatcttgagattttcagtaatagtgctgatgg

SEQ ID NO: 6842 - DNA, 614 bp, Gossypium hirsutum
  misc_feature (38)..(41): n is a, c, g, or t
caagctgctatagcagtggcagatacatacatacaaannnngggcttaaccagaaccaagagaggttctgaaataatcaaaatgtgtgaggtgtattggattttcatgaagttttgattcattcagatttaaatccaatctaaaagcaaaatcaactgattttatcacagtagttcatatttcatattatgtggcccaaaattaataatcttagtgaaagtgggaaagaaaactatataaaccagaccaagataaaagcaaagaacagcatatcatgaattaagcaagcaaacttacaaacagcaatggtaccttcactggctcgctgacaacttctgcacgatctttgagattgaaacaaggaagaaatgatacagagttttgggaacactaataaaaacaatagtaagacgaagacgaaagtgaaaagaaaaacaagcaaaattattagtcaagttttatggtcatggctgccactttcatggtaggttcctcctcaaaggacagaatcaaccggctactttattgctttatagtttatactgatcacacatagcaatatatttttggtcaacatatagtctaaacctaacgtttaagcattttaaatatat

SEQ ID NO: 6843 - DNA, 336 bp, Gossypium hirsutum
tctcttccctctgtgtctcccattggctgttttgaataggcagaaactaatagcatcaagcttataatgaaacttaatcacttaactagagaaaatgaaaattcagacaaatcgaaaaaccatgtttgtacaaacaaggataacaaaaccaacatacaatcaaatggaggacctcctctagcaaatctccttggtgatggtggtacacgtggtggagtcttgaagctaccaaatcttgagaaagaatcaccctaaaagattgaatcaagttcactacctcaattaaatggtgttaattacacatgaatttaaccagcaaaaaaatgaaaagaaaaa

SEQ ID NO: 6844 - DNA, 682 bp, Gossypium hirsutum
gatctttgatgccagcttcttatgttcaaagggtcagtttttatttctctctcttccgtttggactaataaagtaacgattaacctttagaacaagtttatacaaccctaatcaacgctttcgcttattaattaagtaattaacatattatgaccattactttttcgattctcaaatgtttgaagaatcgtgaaaaggcattggctgaaaaaagtgtagaaattcctgattttcatgaaagatcattcagatttgtagcctaggtcagctatatttatatctttgctttgtctgacaactagtttatactaacaaatgcattaacccttttctcagggtgatcaagcttcgattattgggggagccattaatttcgttaaggaattagagcagctgttgcagaccatggaggctcataagtggaccactcaacgcccagaacacaatggcgacccttcaccctttgctgagtttttcgccttcccgcaattctcgactcgtgcaacgtctcactgcaacaattccccgtcgtccatggcagctgatcagcccatggccgccgaaagcgtggcggatatcgaagtgaccatggtggaaacccacgctaaccttaagatactctccaagaaacgacccagacaactcttgaaactggttgctgggttacaaagcctaagcctca

SEQ ID NO: 6845 - DNA, 660 bp, Gossypium hirsutum
agagattggaagttgtaccataagttaaaccctaaagtgtttcacctcaaaataattgtttagatggctctgtattgcttatataacttaccgtgttagaaccaacaactgatatagcttttatatcctcatcatcacagatataattgacaatatcctgcgtatatacagaaaccagaaatccagtcagagaaaaattaaaaacataactggaagtttcaccagtagagtaagaaaaaaggatgatagaagctagggaaaatagaatgaaaagattatgttaacaaagtttctcaggtagagatggaactgggtcttgcactctactctgatctctttcaagaaaatcccatttgaggtaggagaggctgccgggaactcttgggatatatgatttgaaatcgtaaccagttgccatacttgacttatgtttaacagagataatgatgcacttaaacttgcacacgcaacatgacaaagctaaagcatatcagcttaaaaggataacactacctagggaatgaggttgatgagagttaagtgacaaccaaagttaaacctggcaacttcctgcaagcctatggcacacagaaagggcaatgaatgattaccacctactagacctacagaaaagccccttccacaagctacctacactca

SEQ ID NO: 6846 - DNA, 582 bp, Gossypium hirsutum
  misc_feature (557)..(561): n is a, c, g, or t
  misc_feature (564)..(578): n is a, c, g, or t
gaccatctattttggattgaaatctatttatgtactttaagaattaagatgtatacagcaagctactttttgagcgcatgtctatgtgtgcaaatgggagaatgctttagtttagttttggtgttgcattattcttgtactttatatggttcaaacaatgaaatatatcaattttctgcagatatgtggaatcaagtatttcaccatcgagagttgatccgttggtaggactttgattacatatgcattataatatgttatacatgactacattattgagtaatttttaaccattttgcacaggtgggagttgaaaagaactatgaaattctttgcaaaacatttgatcatgaagctaaagctatattggaggtatattcagttcagtataggtactattatcatgtcattttcatcctcaaaaacttattcacatgcattttgtaatgttcaaatgtaaaatccgcatattttctctaagacttgatatcaagacctgaaccccaactatttgatttacaattttttttttttatctatcataccattaccaagcnnnnncannnnnnnnnnnnnnncttg

SEQ ID NO: 6847 - DNA, 620 bp, Gossypium hirsutum
tgactctgattctgagtctaagttttttatatttttcatctttatatacgcgattaaaaataaattcaattatattatagttagtaatattattaaatatagtttaataatataaatattaatatgtaggttgtttataataatttctgacctatgcatccatgcaaaataaggaaaaaaataaattgattcgtaaattggtacgaattggttcaacatgattatgcaatatttaaagttttttttatgtattttttaataatttattcgtaaaaaaggtaagacatatttgaatatttttaagctctttcaagataaaaatgagttatactttcaaaagtgttgaaataaaaaattaataaaaattatattttgacctcttaaaatttataagtcaattccaatcgtcactataagatttctaaattctcatttatactctagtagagaaaaggtatgaaagagtctagaaccaagatgaaagagagactctcgtgttatggagtacttgtgtgtatttatacttaattctaaagctatcgaagaagttatccaaagattgcccaatcattaattttttagtttgcgtcgttaaccaatgtccggcaagctaagttgcc

SEQ ID NO: 6848 - DNA, 674 bp, Gossypium hirsutum
tgtcacagcaacaaatagaattgtcatgcattaatacataacaaatgtgagtttacaggaagaaaactattcaattacatcctcactgagagagccaaattctaaaagctctaaaatttgacaatttattttatccatgcagtaaggaggccatgtcaactcatggttgtgtacccacccttaaaaacgcagcttaactaaaagaagaaaacaaagatagtccttactaaaaagaattaactcttgaatttgtgatgctgcaatgtcaccttctaagggttgacggtagaattttaaccatctagagttcttactgttgtcacatcaagacatcaatttactaacatggcaaaaaatacaaccatcttttttaatattatttcagcatatcacaagtcaatgaatggactcaatctttggtagaagcacgtcaccggattcttctcatcacattatttcataggtttaacctataaattggtacctaaactataacatttttcccattttgatacctaaacttttttttggtcacaagtgatatgtaaactactttttttttctcatgttggtacctctattagttcaaccattagtcaaaccgttaagtctatttttaaaaaaggcttaacccataaattagcacctaaactataccatttttcccaagttgg

SEQ ID NO: 6849 - DNA, 573 bp, Gossypium hirsutum
ccaaaacattaaactccagtactgacttactaccctaagttattaagtagatcaaacgagggacaagtttcttgttacaaaattcggtaacatatgggactactaagggccaaggatcattcaaaccctttgtaattatatacaagaatctcaatatatataaatatctaaaattctcccaactgtttggtgttgaggaacatgaggtccaagtttcaaaaggtcggtgtagcaagtcagcaaccgggatgaaattcctgatgcctttatgtgtgcacttagtcaggcagaaagtgaaaagattgtaaaaaacgatgaaaaaggtaaaaagaaaatgacttttaagtgcccttggtaggaaaaaaaaaaggtgaaaggaaagataatacatttctataagaaaacaaaaaatgagagaaatatgaactaagtgtccacatttacaagattatccatcgttttctaattttattttttatttatcttaatttacagaaggtatagtaactaaaataatataactttgactttcttgttatttttccaccctatcaagaacaggaaaaaagaaaa

SEQ ID NO: 6850 - DNA, 605 bp, Gossypium hirsutum
atacctttaaatctagaatccatcacagagtgtcagattgttaaagtcaatgccacacatacctcagtattaacaacaggtatatggccttattcctgccccccgagtctttaatttagcctgaaaaaaattgcagaattgtagtgaacacttaaaaaacttgatgaaaataaaaacacccagatgagtgataccgccaacatctaaatcaggaaagcatcaattcaaagatgcaaatagattgagacatacatttaattgtcttcccaattactatcatatcaatcaaagtacagttatgtgataatatgcaactaaacccattttaattcatccacttcacaaattaacagcttgtagcacttgaaaccgacaatatcctccatgactaaccatctcaaaaaatcaaatttcaaggaaactaagaattaacattgcgttatgcccccagttttcaccgatttaaccatccataaatataatcgcactaaaaagaagaaaaaatagaaatcttcttttcccattattgctttgaaacattacataaaagaagtatttttcgttttattattttccctgacaatgtataacacatcacttcatca

SEQ ID NO: 6851 - DNA, 595 bp, Gossypium hirsutum
tgtttcttatgttagcatttttttgcactgagttcacccatgttgcaaacctttggaaaagaaaattgtggtgaaagtttgaaaaagtagtgctctcaggaagctggtatttaatttttcctttgtcattttctgatacttgaaaactatgattcacttaggtgctgcaaatttgacatatatgcccctgaagcaaatttttgggaagacttagaggccaggattatggagtctgtcagaaatacattggataggcgtatacaattctatgaggatgagatacgcaagcttagcgaacagcgtttcatgccaatttggaacttctgtaattttttcattttgaaggttcggtactctttttaaagttaagagaatatggttatggctaatattgatccgggggaaaactttatgattttctttctatggtttttgcatatttgaaggtcatggaagaagcatgaacttacttgagaggctttaacttaaaactgttttgtccttccagggatataatcctaattaagctaataaaaaaaaagtatattttttaagcttactttcaacacttcgactgttaatgcttcacttttct

SEQ ID NO: 6852 - DNA, 610 bp, Gossypium hirsutum
cgcttgctgtataggtccaatgccaattcgccacaaacacttatcggaaactatgcaggccctccatgcaagtctgttactcctttgcaagctttggggagctacattaagaacaccgtgtaccaccccggttgtgatacggtttcttgttctactggtgcaattgacaaagcagtcgacattgcaaaacgggcagattatgtagtgttgataatgggattagatcaaactgaagaaagagaggcactcgatcgggttgatttgtttcttcccgggaggcaacaggaactcattgtcagcgttgcgaaagctgcaaagagaccagttgttttagtgcttctttccggaggtccgattgatatatcttttgctaaggatgatccgagaatcggtggcattttttgggctggttatccaggagaaggcggaggtaatgcactcgcggaagtaatcttcggtgatcacaatccaggtaacaatctgttgataccgtctattgccaataaaatgttatatgatcaatgatgattcactacatactgtcatgcaggagggagattacccgtaacttggtatccacaagatttcaccaaagtgccgatgacagaca

SEQ ID NO: 6853 - DNA, 635 bp, Gossypium hirsutum
gatattatcttattgatggttttttttccatggctaaaaagaaaccatgtttatgtgtttgtttatagttaattactgttgggattttcactgaaaactaatggaattgttctatgtgtatgtatgttcattgattttgattagtaatttacgtctgaatagagatggcaaaaaccctaaaccgacgggttttgacctgataggattggtttttctttttcctttttgaaatgggatttggggcggggtgggagccaatgctctatcatcgggttgggggtgagcaaaaatctgacttacctttcccgattcattacttttgagcaaagagtggaaaatggtgcatttttttgccattcattgactaagtacctatatttccaaccccgatagtagcaaaactagtcaagtaacgagcaggttgatttcccgaccgatacgtgatctatgttaaatctctggtttttgcagtggtgggattcggcaaaaagaggggacctaactcatccgagaagtaagagctatgcaattgaaaaaaggtcttgtttgaagcttttatgggtttagtctgtgttttcccccccttttttttgtaatgttttatgatacttatttttatccactggtattaaggt

SEQ ID NO: 6854 - DNA, 493 bp, Gossypium hirsutum
atctctgtctaatttttatattttcatttgtgaattaggtggtcaaattatatgaaaggtgccttatagcatgtgccaattatcctgagtactggatacgatatgttttatgtatggaagccagtggaagcatggatcttgctaataatgcacttgtgcgtgctacgcaagtcttcgtcaaggtatgaagtgcagtttgtgtttgttgtataaatactacttggatgaattttatctcccttctagaacagccatttgagttttagttgtcatagttaaaacttttcaactttttactactgtcatttaaatattttaaagaatttaagaaaaaaaaagtttggagcatatctatcaatgtttttgctttggggtttgttttggtacaatttatcacacagtcgaataacacaatattagtgggaaagtgggagcagtatggttttcagtcattttcacttgtaatttttatgttgttattaacgtataaaaa

SEQ ID NO: 6855 - DNA, 641 bp, Gossypium hirsutum
ttgaatctaggaaattctaggttggttgaattaaactcaatcattggttcttttgctttttatagttttaaaagggatcaataatagataaagatatgaaaaatattgaaattcaaactttaaatttattgaatcttgccacttaagaataacaagagccaactgaactaaacatttaaaattctttaatcatgttggatgaagaatgcaaatgttttgcttcaactaaagataaccaatcaatattctgcaacaaaacaggcctctgctatccagaattacacaaagtacatacccctccatgtagagattctaaaaggcaaaattgtgatgctcaaattaatgagaattatggtaagtaatctacctgtcgcaaaaatcatgacaatgaagtcttgtaacattagctttgatatctcagaaaagaagaatgcaagaaagtgctcactgatttggactttggataaaataaaattgtattttcacatggttgagcggcagcaggtttggtgagtccttcctccaatcatgaggaatgacaaatacttggcttgcattagagaacattcaaaatgaaaaaccagagactgacaagtatatgagagaaatagagaaagaaacagaaaatatgaatcataagg

SEQ ID NO: 6856 - DNA, 408 bp, Gossypium hirsutum
ctttaactttaattatttaactttccacattagcttatttcactccatgtttttacttttttttatatactttcattgtataaattattaataattaaaaaaatactctttgtactttttgacatcaatgtctcaaaactcatagtaatagttaaaccactctgattatctgtttttaatctaattaattcaaaataaaatttcttaaataattgaaaatagaaaaatgaaataaaaaattattattatcaatacaaataagcaataatttaaattagattcaaacaatttttaaattgatttttatttaattttgcatcaatccaattttaatgattttagattggattactaattttggattgaattttaaaaatcaaatctgtatttttttttagtcaacaagtg

SEQ ID NO: 6857 - DNA, 582 bp, Gossypium hirsutum
  misc_feature (50)..(55): n is a, c, g, or t
  misc_feature (341)..(341): n is a, c, g, or t
  misc_feature (343)..(343): n is a, c, g, or t
  misc_feature (484)..(486): n is a, c, g, or t
  misc_feature (517)..(523): n is a, c, g, or t
  misc_feature (525)..(529): n is a, c, g, or t
  misc_feature (549)..(551): n is a, c, g, or t
  misc_feature (558)..(559): n is a, c, g, or t
  misc_feature (561)..(564): n is a, c, g, or t
  misc_feature (566)..(568): n is a, c, g, or t
  misc_feature (575)..(579): n is a, c, g, or t
gccttccacagatgtggcaagttcagtaggattgcagctgggacaggatnnnnnnactgggaattctagagattcctttagaccacttgatcagattcagtggaatttcagtctcacagatctgactgcagacttgtcaaacttgggaggtaagctgtggctatgatgcctatgctaagatatccagttaaaattttgtatttaaattgtttatcatctctctctcttacacacacacacacacacacacatatatatgaatatttgagcttttgtgattgttttttgctcttaatcatttgagcatgctttatggctctcctgtgcacccagcactccangnatcttccatgtttattccatttgatgtgtttcttaattgatcttgttctcacaaagtggaatcgttacagatctaggtgcccttgggaattaccctggttctccttttcttccctctgattcagaaattttgcttgattannnggatcaagagaatataggtaatgaggttgcnnnnnnnannnnncttgatgtctattttgaatnnnttagagnnannnntnnntgtagcnnnnnatc

SEQ ID NO: 6858 - DNA, 608 bp, Gossypium hirsutum
gtgtcgcataatggagtgacaagcttactcttattatacctttcttcacaagcctgaatatcttcctcgctaactctcctcttactcaaatcaatgtaacccttttccttatcgacacgaaggaccatcacaggctcggttcggcccaccttgatcagactgctgacgctacgaatacggcggcgggaaagctccgagaacaagatcatgccttcgatgttgttgtattcaaggagcgaaacgtaggcacccatgtcggcgatgttcttcacttgtatcatcaccgccatgtccacctcagggtacttcgcttcgtacatacgacattcaaggttcggcatcttattcaaactgtgaattccttttctttgttctttggattcgactctttgagggattttattttcggggggattagggttttcagaagctgttgcctggactggtcagacttgagtgagtgaaaaaagacaacaaatttagtttcttatgtgttcaaaacgacgtcgctacgaacaaggcaggtagccagtacctagtacggtatttaaaaaaaaaaagtctaaacaacaccctttgaaaatctatagttgtttcttaccccacaa

SEQ ID NO: 6859 - DNA, 586 bp, Gossypium hirsutum
  misc_feature (81)..(82): n is a, c, g, or t
  misc_feature (547)..(547): n is a, c, g, or t
  misc_feature (582)..(582): n is a, c, g, or t
aattccaaagagctggttcttttcattcctatgacagaaattgacaagtaacccaacaaattacaagtactgggtataatnnggggaaaaaaagttcagcagcatgagcaggaaaaaaggaaagtgaataccaaataaaaagaacagaatcccctgcaacaagtctcttggcactaacaaacacactccagcctgtagtaagaaggtggcgtttaggctgtcctgcaagttgtgtgacaccacatcaacttaatagttgtactactagatatatacttttagtgtccaacgaaagaaaacctagtttgaatagacatctaaagcaaattacaaaaagatgatggaaccatagttcccttaactacaggcacaaaagaaccattacagaaaatatcaaatgaatgcactaaactaggaacctcagatacatagaacatataaagtattcaactcagaacaaaatttaggatatgaaaacttcagtagatatgcttttgagtttttaagtttattgaacaattgttagttccaaacctttcggagttanaaccacttagcgacaagattttcattatctatggngaaa

SEQ ID NO: 6860 - DNA, 627 bp, Gossypium hirsutum
gggaatctccttctcaggtttcatcatcccacgacctgtatgtgctacttttatataatttgaaatcttttttcttttctttttttttcaatacaaagaagaccaaagcctataagccaacaggattaaacctggggtttaggttatacacaaatactgagtgcaaactttattctcactcgtttcaatcattcaccatttacagagtatgccagtatggtggagatggtactattggatttgtccagtatcttggaccttgtacggattgcttgtttcacaatttggagatataaacgaattgcttgaagatggaaacaatgagacagtgaagcagtacttgagaaattattatggtttcagacatgattacctgggattagttgctgctgtgattattagtttcgcagttctctttggaacaatctttgctgtggccataaagatgttcaatttccagagacgatagaattttttggttttattctaataaaatcaatgctatttgaattttatgcatttattacaaggtccaaattctaataaaatcaatgctatatgaattttatgaaccaatgtacacctttttagatgtaaaaagtttatggtttgattgcttctctagcg

SEQ ID NO: 6861 - DNA, 627 bp, Gossypium hirsutum
ggggggtgttgcatataattatgggaggaacttacattcaagttaaggtcatatttgtatcaagggaaaaaaagaaagaagaaattaggaacccatatgtgggaatagggcaactgcagatgtggacctgtgaaaaacaaccatacatagacgtttcaatattaatgcggagacgtccatattgtttgtatggaaaattaatattttgcagatagattatgttggtgcagaacttcttcaattgttggggatgtaagtctgaatacttgaaccaaacatgaaaataaagcttgaacacaaaaactgatcaatatgacaaaacaccaagtcatgtatcaagccattgttggtccagtggcttatcgattgtctttaccaccagaattggaaagaattcataatgtgtttcatgtttctatgttgaggatcgatcggactcatcgcatgtgatttcaccgactgaagtggaaattcgatcggatatgacatacgaagaagaaccgattcgaatcttggcacgagaagtgaaacagttgagaaacaaagaaattgctttagtgaaagtgttatggcaacgacatgggatggaagaggcaacatgggaaaccgaggaggctatgaggaaac

SEQ ID NO: 6862 - DNA, 667 bp, Gossypium hirsutum
ttttggtttaggcacttaataattcctaaaggtgtgcttaaaaggaaaaatcagtagtgcatgagatttttttggaggggggaggagtgaggatggcaagggggcaagagttaattgaaaggttattcgtatgcctaaggcagaaggaggattaagcttgagggagttagaaagttagaacaaagcaagtatttttcaacatttgtggtctgtaatgatgcaagcaggatcattatgggcggcatggattcaggcatatatgcttaaaggcaaatctgttatgcaagtccctagtaatgggagttggagttggagttggagctggagcatattgttgcaaatctagcttcttcacaatctgaactgaggttgaaccaaggagaaaagtatcaaatcaagcggatttgagatgcgataagggaaaggaatgagaaagtatatcttgaaggaagcttatttggtatcctttatacataccaagcattctttggttagctggatggctcttcataacagactgccaactagggacagattgatcaaaagaggaatgaatatagaagggaattgtttattgtgtgacagggaattagaaacaaggggatcatcttttcttcgactgctgctattctaaggaggtttgggaattattaagtggctaaaccag

SEQ ID NO: 6863 - DNA, 611 bp, Gossypium hirsutum
  misc_feature (65)..(66): n is a, c, g, or t
acttatagtaggcttaatattggatatcttttccataagtgaccatggaagaaggaaacaatttnncacaacaaaacaatacctaaacttctgatcttagtcaagtgacaatccttttggactttgtcacccacttctgtcattgttcgttttattttccttcagttctccttccttttattaaagggtaaaaatcataatttcttgcattgaaaaagaagtaaaataatgataattaccctcagcgaatgtttatatgtcaggaagtgcctagagttgggaaactgttttgccatttgtatatttgtctcatcacggttaacacctctgagttggatatcctgccaacaataaggcaccaaaaagtttgaacatcacaaatacattatattctatttgacattttagactttaaatagtggaaagaatccaggacatttgagacatacatgtggatcgccaagaaaatcaagttccaatagtccttggtcatcctcccagagattatatataataatttgtgtaccatggtctttcatcagactgaactaaaagcaggaaaaggaaacattttactatacaatacaactgtgcgaagcataatggagatc

SEQ ID NO: 6864 - DNA, 631 bp, Gossypium hirsutum
atgttaattgccataggctcaaaatgtgctttgcatgctgggtttcccataacattgcactgagttatgaattttttatggctaattgcatgttaaggattgatgaaattttgtacaaaatattaaatcaaaacagataaaaacctttctatctgtaatgcatgttttcatctgcacagcaggcatgtgcacagatcacaaaccatcacaacataaacctttggtttgctattatctatgcatttcccgactgttcatttttcttgaagtatttgtcttgcgattatgaatatatgacccttcaatacatggaaaaacttagaaaacaattaaacatacccgtatctgaaactcgcccaaatccaagtaacatgggctcgaatatctcttattatattggttacttcccgttggtcttcgtaactctttcaagatatgcttttacttatgagattatgttgttttagttgcttttcttagattttgatccaacattaaatggatgttttatgtgtttcaagggtgctttttgagaaactgaatttaaattacgaggagggtgagagatggattgtgaatctcatccgaaactctaaacttgatgcaaagattgattcaaagactggaaccg

SEQ ID NO: 6865 - DNA, 610 bp, Gossypium hirsutum
  misc_feature (28)..(29): n is a, c, g, or t
  misc_feature (599)..(601): n is a, c, g, or t
cacattcagcaggcatgtgatataaatnngtggaaaagaagaagatataattcatcaaaacttggggaacaaaaggggttatcatcaaaatcaaaattgcatgtgcacgcccatcctttaaagtttctttttccaagaaacttttcaaggctaaagtccacctactttttcactgtgaatgtcccgaccaataaaatattgacttgtgtgtcctggtttttctctggaagcatgtacatatacagagaatctgccctcatggccctgtagcaaaagattaaacgatgtgatttgtgataaaatttgaaatttctaaagcatggaattctacctacttttgagaaggataagaagttgcacttgtaaaacggtcacaaattcttacaggccacgaattaaaactctatcaagcattcgtaatttcgaactgtttctcaactaattaatctaaaaacaagttactaaagtgtgtataagcctccagaaaaccactgttcatcaggaaccagcatctataactctctctaaaccagatacagaagtccatgaagcatactagaaaatcaatgatcacaacaaaacatctaagcatctacatnnnatgaaaaag

SEQ ID NO: 6866 - DNA, 536 bp, Gossypium hirsutum
tgcttgcaacttttgcagatggagtggtgaggaaattggagcctgcgaggagctcgatgggttaggagcaatggaactcgccatgggagcttgggcagactgggtagcatcaaaagtcattcccctgaagaaacatgtctttttcgttacaatgtcgccaacacatttctggttaggatctttacccttgcactgaattatcctatacttcatctatataatctggataagtcacctggtgaaagcttgcaaacttatcgaataccgtaaaatcatagcatagaggcatttgaagcaaagattgtgcatcatgaaggcactaaaaggactattgctggtatataaaagctaatgtatataacatggacttgtgtgggaattacacaatcttagtggcccaatatgggtttttttactaacattttgacatgaaataggaaaggagagtgggaagctggaagtaaaggaaactgctataatgaaacgagacctatcgatcgggaaggccactggggaagtggttcggacttggctac

SEQ ID NO: 6867 - DNA, 660 bp, Gossypium hirsutum
cgaactgaaagattcgcatgtcttgctcacgaaccccgaatcaccgcttggtttcaatcgtagcgaagcaagcgaggattcaaagacatcaaacgcaagtaagtttcgtttctcttttcatacattcgattcaaaaaaggtaaaatgagagaagaaaaggaaaataagggagggagattgtgaatgaatcacctttcgattcgtctattgcttttctattgcgtatattgtctgtgtttgtattcgtgttttttgttgcgtaaaaaaaaggaagaaaatacaactgctattacacagcttttatagccgaaaatagagagaaaaagaaatgaaaaagaaaatacaagttttgtttcttttctcctctttctttgttgtgctggtgtttttgtatttgtttgcaggtacggagtccactggcatcgtacggaggtgcgggcatggcgtacgagggccgtgtgctggtgctcgggtactgggtgtggcgtggctgttggaggcatagaggttgggatcggctgtagcgctagaaaaaaaagaaccctagggttctgtctgttctaaaagcaatgggcctatcgggccttgtaagtttgggtccggttttaaatgggttggtttgggcttgattttttgtaatggactgtaatgaacagtggg

SEQ ID NO: 6868 - DNA, 583 bp, Gossypium hirsutum
actctccattggagtaatattgctggaacatacggatacatcgcaccaggtgatttttcattttacttccatagatgacatagcatagaggataatctttgttgtcaactattatttctttttctttgcagagctttcctacaccatgcaagttactgaaaaatgtgatgtgtttagttttggtgtgctggcattggaattgatagtcggggcatatccaggtgaatttctctctaatctatcaattttaacagcagaaagcattccactaaacaatgtgttggatcaaaggctttcacctccaccgccagaagttgtgaacaaactcgtattcatcctgaagctggctgtttcatgtttaaatatcaatccaaaatctaggccaaccatgcacactgtttctcagctggtgttcgaccacatctagtcacatctaggactctttgatcttcatctaagataccaccttagaaacgtttggtatttgctctaatgttgtttctttagcttttgtgtagttataatgggttaatggattagcatttttgtaccctcaattacctttttccttgagatttgctac

SEQ ID NO: 6869 - DNA, 551 bp, Gossypium hirsutum
tagcagaagctggcgacggagctggaggagaagattgtggaggtggtgatgtggttgccatcgattcaatttaccaaatcaaattgatggtacactaagaatacctataaattcacatatgccaacatactcgctcagtctcattaaacaataaaaatttgagaagattcctataatgaaagcttcaaagatatgcaggattcatctaaactaatataactccactaatttgtagctgatcaaattgaaattctacgaaaattaaaaaaaaaaacaaaacaaaacccaagtttttagagtttcaagtgccagctgcttatacaatcaatcaccaaacttcaccaaacaaaccactcttgcttcaaaacacagaaaacttcccatagccaactctacgataggccaactgttgataacatggcagcggcaggccacttcaccaccagttggaggtaactcaacttaaacccagagcaccagtgagtcacttagaaaaccaaaacccaaatcccacccagcaaatgcatcaaacccttacctttctaaatcac

SEQ ID NO: 6870 - DNA, 650 bp, Gossypium hirsutum
ctttgatgcaggtgaattacaatatcctcgcaagtttacaaggtatcgatgttttatgcttccaagaatttcaagctctctttcaaaaaatagatcaaatccttcattcaacttcacaattcgtttcaaagcaaacacatttccatcatccatagaaagtttgtacactgtcccaaaccctccagtacctaaaatgtgttcctcattcaaagtttctaatttcttaatggtgtctttggaagagtatggcaagtctccatgaaacataacaatcgatgcccctgaagcaacagtaccatgttaatagagatgttgagatattagagagtaaatatgaaaactgaaaacagctcgattttccaaaattaaagatcagttagcaagaacacctccactgacgtccatggccagagttctgccctcatttttaccaaacttcttatataggaagcatccccaaaaacacataagtgccaccaaaagtagtgcacctacagtggctgatgcactaatgagaagtcttccggagtatttctttttaccaccttaattttgagctacaagaagaagattgaaatattaaccaaaatgacctccaagaagaaaacaatagattcaagaataaaggcaagaaaatttcgaggagttca

SEQ ID NO: 6871 - DNA, 561 bp, Gossypium hirsutum
cccgatgaggacactgttggcattcaccacacctcccccgttggggatctcggttcctctggtcaagatgacgacgaagatgatggcggcgatatttctttggttagccgccttcgccggcatggcagacttcttttgggacgttcaggccgaagacgtagacgaagagaaggcaccaccgggggtcaaatatagatcgaagttatacccatagtgggggaaaacaggaaaaaaaggtaacacatcttcatagtgttgggcaaaaattaggtaaagaaaaacacataaaaaagaattgaccttgaatttgcagcaatttacttctaattcattttagggggaacaaagatacgttttcaatttgttgttgtgtaatcatttgggtgtgttcataattccttttcccttctgttagttgccaaaaaaaaaaaggaatttggtccgttaacttggggtaaccctcctaccgggggaaaatttggctttggttttttaaaaaaaaaacccccagcctttttctaggaaggggaattggcgggaaaaatttgcccaaattgaaaa

SEQ ID NO: 6872 - DNA, 631 bp, Gossypium hirsutum
  misc_feature (76)..(76): n is a, c, g, or t
aaagttcgaccacacttgacttcaaagggcacaatctttacctattatgcttgtctattggtattgcattttcttnctcaagtgttctgattattttacttttttaatatttcttgcatctagaaatcttttcttctgaatcttttcacttcaaatgatgtgagccttcatctctgagtaagtaaatgtataatgtagtcaagaaccgagattttgagtttttcctttctatgtcagcaaatgtttgatgtaatcaagaactgaggtttttgagttttccttagtatgtatctgcattaagattctcctttttggttgaaggtcttacatgaagggggaaactataggatccttggcacttaactgcaaaagaattatggagtgtattgacaataaaaatgtcttttattttctaatggctgctctaaaaccataagctaactaaagtagggttaagttgtaatcaatctctttcaccaaatgctttgttcattggggctttggaatgttaattaaaccaaaataatggaatggaaaccgctcattatcttaagaaaaggaatcaccataatggaatccacctccaggggaaaatggaatttcctcccccttcctttggttatgattaagc

SEQ ID NO: 6873 - DNA, 623 bp, Gossypium hirsutum
atggttagtacgagttcagggattttacatattaaaagccagatagagatcgatgaatgatttacatgttatatatggtttgaatgacatctggtcttgtatcatgttctatatatcaggctgggaatacacaacagatggaaaatgtgaaaaaatgccgtctacacgattacttaatgtgaagataaggtcattgccatgtttagagcaagagggaatgatctggatctggcctggagatgaccctcctacgccaacacttccttccttacaacctccttccggatttgtaattcatgctgaggtacactttagatgttttaaaacactactgtaattgcaagaatcatgtgaactttgtttaactgactcgatgaaaagtcggacaactttaagcaaaagcacccactatctcacctcagtttcttttatatgctgataaatgccagattgtcatggaacttccgattgaacacggactacttttggataaccttttggatcttgctcatgcaccttttactcacacttccacatttgcaaagggatggacagttccaaggtttgtttctgcaatcagattgggaaaaggtttattgctgttgtattttagtttgaagcgg

SEQ ID NO: 6874 - DNA, 640 bp, Gossypium hirsutum
  misc_feature (628)..(628): n is a, c, g, or t
  misc_feature (630)..(634): n is a, c, g, or t
cattttgctataaagaatcttcagaagtcaaaagaattgaattcgttacatgagttttacttatctctactgcccaaccaaaagggcaaatgaacagtagccgtttcccatggctcatgagatggtacaacaagctgttgcccaagacttctgccggtttattcttgtttcagttgttgaaaagtatttgaacgccctgtctagtgtaagccaacaagcagattagtatctttgactatgatgaatcaatcaaaactgttcaactctgcgctattcctatctatgctagtgtatgacaaggtgaaacttcataagatgccaccctgatgaatcaccatgttatggagatcactcacaacgagctgctgcgaaagatcatttagtccttggctaacactccatgatcattgtagtagcccaatgcagttgtcatactcgtagtccatcccatacatagtggccgagtccaatagcagatcatcagaacactgaaattctaggggagagttggtcataggtggtccaaaagaagtgcagcaccctgggcacacaaacaatggtggcacagcctcagagtcctctatgccacagcagcgtgtgtgctgccacacctcacaaatgtcacatncnnnnnaaaaaa

SEQ ID NO: 6875 - DNA, 689 bp, Gossypium hirsutum
ttttccttatccccagcttgtggcctcctttgtacccaaaaaagaaaaataaatgttggatatgtggtgagctataatatatgattttaaggtttattttaatgagagaatatggttcttataggtaatggttgaattaagatggaaatgattgagcttttaatgtattaaagtaaataggataacccatatctgccactgagctacaaagaaattttatgaatataaaccaggcttaaggtgggaagttattctgtattgttgtcggactgttcagttctgcttataaggacttgcttggtttccatctgaagctggttgtaaatccaagtttgtgctggaattgaaagattgataaagaagataaaagatctgggtgtcatgcataatttgtttcttcagaggctttacatgataactgttttgaaggctttagacctagtgtagcattgtaagttctgcttctgatagtccaaaagagagcctacaagatggtgaaaatcttgtgcacttctccttttattaattgaacaaagctatgtacaaatttgtagagtttcagttatcttattcctataatgggatcaatatttggacaccaccttacataaataattcctcaactgaagacgaaattgtgtaatgtaagagaacctaaaatgaggctcttaaattggaagccctgaaac

SEQ ID NO: 6876 - DNA, 676 bp, Gossypium hirsutum
aagtgaagcgtataatatataaagcttaaaatatatagtgaactctaaagtatgctctagttttatctacagaacatgcaatgtttttattgataaataggcatgatttcctcatagtcaatgtctgttgctgaatgctcaaatatggagaagtacatggtttgacatgatccctttcatactactaaagttatatgaaatgagaaatatgaaaaataaaagaaattaaagggaaattcaatcaggtgggaattttttatgcctagcgcgatacaaaaaagcacaccaaggcacacacccatgtgcctaatcaaaagggcctcgcttggaagtgtctgaggcaattttgttgaataatactaaggcacaaggcacacgccttgacaacactgaataaggtcatgcacagatttgaaactgattggagaactgagcacatacatagacataatcaaactatcgaataggttcatttttcctacaatgataagattaaaagcatgcttcttctgatgacaacaaaatgagaatatcacagaataataaagctctttgtagatgtaataattacactgtaatatcacagaataataaagctctttgtagatgtaataattacactgttctttcactgttgttttagcctttttatgtgggtaatgctcattccgaagag

SEQ ID NO: 6877 - DNA, 685 bp, Gossypium hirsutum
acctcttcagctactacacatgaatctcattggacctatgcaattgagaacatgagtggaaaacgctatctcctggtgtgtgtatatggcttctcaagatgcacatgaatgaggtttattagagaaaagtttgacacatttgaagaatttagaaaactatacaggagagttatggatgaaaaaggtcagctcattaggatgattagaaaattttgaagtgataatagacgtgagtttgagaacgttgaaattgtcaatttttttaacgaggaaagaatcaaacatgaattctttgctgccatgacatcacaacagaatggaattgtggaacgtaaaaaccgcatcattgaggagatgacacaagtgattctcaatagcgaaagggtttgctcgtaagttttaggctaagatagtgaacactactaactcgtgattaatagagtttttataaggacaaataaaaataatttaaaaaatattttatatagaatcatctgattaaaaaatattaactttctcaaaaaaaataaacattttttaaaaatcatttttaaaagttacgcaccgctaattttattttgaaagtgcaagatatcgatcacttcttaaagttataaaagaaggagacgtaggtgttgagattcaaatccttacttaagaatataaagaaatggcttgagggatg

SEQ ID NO: 6878 - DNA, 597 bp, Gossypium hirsutum
catgaaaacttcggatagttattggaaaaacccgaccctgaacaactattcttcccctttttctatctgaaagtgcgcataaaaaatgaagtctaatgaaaataaccaagaacctgcccacccacattccttctaatggcttcttcgtgatccaaaataccatcgggagttgaaatcacaacataaccccactgcatggaataaagattatcgaaaaacaacataagtgtgggaagaattctatagacataaccgggtacatttgcatatcctataccaagccggccagcaccttctatataataggcgatgaatgggcatacctgctgagttggaagtttaaatgttgtgtacttctggatatccttcgctttgatgtcctgccggtaagtgagtgctcggcaatcgtttaccctgccttgtagttcaactgtgatcttcccagctctatgcggatcgaaaagctcaaagttcctgatgtatccttccgaaaagaagaaatacaaacaagttaatgaccgaaaaacaagcaacggatccatcgtcccgtagcaggcagtaaccacaagtctaaacattcaacatcttagaccctta

SEQ ID NO: 6879 - DNA, 655 bp, Gossypium hirsutum
agctagctacagcccccaaaggaaaccaatcaccaatagcaaagttcacagcctcaccacagttgaaacctaaatgattataattagaaacgtatgcatttcagtgagagcagtgtaaagacaactttaaaaaacatggcttaccatgactaaatccagcatgatatgcacttggaaaggtaattacaaactctccaggctgctgcacagccttgtagacagggacctcatgttccaacaaaatatttggggggaatagagttgttttacccaaaagcacatcaaaagctccatcttcaccatccacagataggatatcattagtgtacacatgttccttgacaaccttctcaaattttgaagcagcatgactgggtatcccataccaagtttttgaagccccacagtgatgataattaatgctgccacaaaagaagaaaaggattaactacagaatattaagtaattaactggaaagtaattacagattattagtacagaagatgtttacctatacaaataatgatcttccacatgccaagcaaacatgctaaatagcattcctatgtaaagcatgggatcagataccccctgaaacaaagttcaataaaataggaccatacatgtcagatcagcttacagagtgccaaagttg

SEQ ID NO: 6880 - DNA, 647 bp, Gossypium hirsutum
aacagcaactccttgctcagcaacagtttaggcagtctacgatgcaaggactgggacaggtataaattttgcttattttttgtgcttttaaagtttctgtgaggccataagagtaactcatgacatatcgacatctatatgtacatatgcatgtaagtgcatgctttgattttacatagtaactatgactcttggtaggattgaagggttttcaaaactatcatgaggtaaaggacagttaattttgctgaatcttatgattcctaagcaaatttgaattagttttttatgtttgttttgttgaatcatagaatagcttcgtatgtttctcagccattcagttgtattataactatgaacaatcatttctttggtacagaatcagctgccgcttcatgatctccagggtcagactcagcaaaagtttcagtcggtaactttcttatgacttcttttcctttacttcttgttttatctgaaatttcttatgaattacaaatgcttgcttcatatatatcagtgcctgaaaaactgcatgccagttatgggtctaagttgtgcttttgaatatcattattgccataacctagtaaatttaagtatttagagttcaggaaatgggtttgttctgagagtctttggagctg

SEQ ID NO: 6881 - DNA, 785 bp, Gossypium hirsutum
agatattggaggtgggaaacaatagcaggtgtcgtcactggtttttcaacatctataatcactatcagcttcgttagaatcctacagcatacgaagtctttatttcctgaagccattaacacagcccgtatcaagcgtgtttgtttcctagtagtgtacttttcggttatatgttggttggcatcgcaatactggaaaaggctgaatatcccattgattagagtctataagtactactactaggtggcggttggtttgtttttttactagtgcaagttgcccctgggtacatagtatgtatgatgtagctttaatagtggagatgtatgcttgagttgagtaggtgaacaagcaagaagcagagagaaagtggtatacagatgattaatggagatgtatgcttgagttgagtaggtgaacaagcaagaagcagagagaaagtggtatacagatgatttagtgtataaaaaagatgtattctgatgtataatatgtgttttcctgctgtagtaggtaggaatctagtgtacctgagagattcaactcagtagttcacagtgcatgttctgtatggcacaggtttatgacttatgaacaaaatcacttttgtttttttgtttacctgctgtagtagataggaattttttgtttacctgctgtagtagataggaatttttctttgtcttttttgggtaagttaccaacatagatgttcctttgtgttatgtacaacgtaaatgtgaactgcgtttgtttaatcaagaaaaagaaaagaacagcggaat

SEQ ID NO: 6882 - DNA, 686 bp, Gossypium hirsutum
gaaaggtggaatcttttacccttggaatcaactcaaataagatttggcccattcgcttcacttatcattttctttattacgtctaattgattttagtttaaatttgataatgatgttctactgctcaactaagagtgaacaaattctaattaaataagacaattgaatcctttttgtgcacgcttcaataatattattattagtattatctcaaatcaaatatcttcattgagcttaaatcaaactccaaaatggattaaatttggattttgtaccgaatttgaacggaatacagatatttagggaggtcgatagggtatcagctcaattaccaaaagctcattgttatccaaattacacattatcgtggtttttaataacttatcagttcaaatggagtcatacaataggtgtctcaagaaccattactatttgaataaatataaatttatataaaaacctagcacctgggatccgtggcgcaatggtagcgcgtctgactccagatcagaaggttgcgtgttcgattcacgtcgggttcaaattcccgatccttccggatctatatttttcccttagttttttgtatgggtagtttcgtcatttactttcttcccgaaactctccatatttataaaacaacccccgagaagccccccctatcagcagctcaaacaccgaaaagc

SEQ ID NO: 6883 - DNA, 650 bp, Gossypium hirsutum
cagccgagcctgattttacggctgaataataaatgggaaaatagctaattaaggagctttgcgtttctctattcgattagtgtaaattttggggaaaacctgtttataaacagatgcatatatagtttttttttaaatgcaaatcaatttatgggatcaattataagtaagggtgtttaaatagtcagtttagttattaattgaattatccgaaatgtaaaaatttttaactgttaattgaatcgaattttttttaaatacattaaccgaactgaaatatttttattaatttggtcggttaaccaaattttatatgtttttgtcttttggttaaaataaatataaaacatataaaaaatacattgctaatgttcattatctttttttttaatagttcaaaaatatattatttatttcagttaattatccaatttcaaaccgaattaactgataaccgatttttcaaaaaattattaatcgacctccaattgaactaaattcggccaccaactgattaatcaacttagatcaattcagtcgattaatttgattttaatcgaactatgaacacccctaattatgagcttaaaaatgtacaacttctttgagctatatcatttatattgcaactcgcttgaaaaaactaaggg

SEQ ID NO: 6884 - DNA, 647 bp, Gossypium hirsutum
tatttatgcagcttttaatccaagcccatcctcactaaatgcaaatcacgacccataattaacccgctcaaattggattaagctagaatgaaccaagcctggcaactatattaaaagaaaaatagcaagaaatatagagaaagaaaagactagggagaagagatagtaaattttttgggggattttagagaattgaatgtgactgctaatacttgtggttaaactatttaatttatcaatttgcttttaaacttatccaaagaaaaatttggagttcatcttaaatgtatcagagtaagaatataacatacaatatttggaacaatagttttaagtaaattagcaatgccaaaatcagtgccaacagcttcgggtactgatcaacaataacaataaatacactttatgtttatgtagttcgatttttttatgtctgcagaattttacctgaaaaaataattcactatcttaacacctcatacaataaattattacaactttaaatactcaccaaattaaaatctcaattttacatctaagattttctaatttttaaaagggttttcttttctaatttctaatttattttaagatgatgtataagaattactcacatatagttttttaattagtactagtttcttact

SEQ ID NO: 6885 - DNA, 615 bp, Gossypium hirsutum
  misc_feature (585)..(587): n is a, c, g, or t
atgcattcggttgttgtgcaggggataagttttatcataaggttcgtttctattcttggatgtctatgttttaggtgtggatactatttgacttctgatgcagtcaaataaatccataaaactcctcactccgtcttcctgactggttcttctccgctgttgcatgtgttaggctaacggggttgttcctgatgaaagatatagacttttcatctaaccaaacatgagatgatcaccctcaccaacacacacacacagccagcgcctccaccaaaatgaagatacactagtgcagtacgattttaccagatgacacttctgtcttttagtctatagactctgaaaagttaacatatttttaagcaaaatttatctggcagagagatgtggatgctttaaccttaaatgcttaattgtttgctttatggggctgaaaacttgtttctaattatctggggcaatcaatgcaggatggctatggtgttggttctacttttttccagcaaacaccacagcctcagtttgttactcagtataatgacaatggttctaggaataacgagttcccaacaacattcttcaacnnnaattgtttgactctcacgagggatggaa

SEQ ID NO: 6886 - DNA, 653 bp, Gossypium hirsutum
ggactcaagtggactcggaaacgagtctttgtcaacataaagaacattcaattccaaagataagaatagtttctactaaagacattctagtcatattcaaatgcaaatacatatcataaatcgaaaagcatcagaaataataagcactaaaaagaatcatactactttttttctagacaatgaaaccaagctttccttgtaacgaatggatcgtcctcttaatacttcctttgacctctcaatttgcttggttttagtattataccaaacaattctcccataccaatcactaaggacaagaagctcaccattgttctcaaagctcatcaccggtcgaaacattagtcgatcttccaggaccggtacttcgatcgtcaactgcttaatccaagaatctgatacaccatattccttcatcacccataaatcataaacatgcatatttactttttgtttgatgatcaaggaaaagaaattttgatattctataatcagtgcattcagaaagtaattctcctcttgaaaatcaggatgatttggcaaattaagctctcgaaatacctcctcatcaaattgaaatgacatgatcatcctcttagatgactttagatttcgtcctccccagtgaaaggctctatcgaaataccctttac

SEQ ID NO: 6887 - DNA, 606 bp, Gossypium hirsutum
  misc_feature (59)..(60): n is a, c, g, or t
  misc_feature (537)..(539): n is a, c, g, or t
  misc_feature (546)..(546): n is a, c, g, or t
  misc_feature (548)..(549): n is a, c, g, or t
  misc_feature (551)..(551): n is a, c, g, or t
  misc_feature (556)..(556): n is a, c, g, or t
  misc_feature (559)..(559): n is a, c, g, or t
  misc_feature (561)..(564): n is a, c, g, or t
  misc_feature (570)..(570): n is a, c, g, or t
  misc_feature (575)..(575): n is a, c, g, or t
  misc_feature (577)..(578): n is a, c, g, or t
  misc_feature (584)..(584): n is a, c, g, or t
  misc_feature (595)..(595): n is a, c, g, or t
  misc_feature (601)..(601): n is a, c, g, or t
aaacttagtctctaaatcaggaagctgtgttccgtgttcgtactgaggcaaatgcctgnncagttccactctattcctagcttcagtttgttttacaacagcacgctttttggctttctctactcggcttttatcatcatattgcattcgaggatgaggagcatctttcttcctatctttctcaggtgcacgatcacctcccttcttctcagaagctgcaacttgagaaccatcattcttttgggaagaagattttgcggctttacttggttttgtatttgctgaggtcacaaccttagatgcagcacttgatgccttagttccttcagctagaaacacatagtgatcaacaggaacaaagttattgaggatttgttcaaaggtgaagtacacaagataaactgaataaccataggtcaacaatccactcattaggttgagtcctgtattagatatacacagaaaaacccatgcaaagaaaatgcaagttgattcatgagcatgaagccatttaacaaaacttgtgagctatgttgnnncgactcntnntntttcnagncnnnnctgtgnctgananntgtgtntgaaacatttntggaanagaca

SEQ ID NO: 6888 - DNA, 555 bp, Gossypium hirsutum
ctgcaaactaatggatacacttgtggataaaatgaggaacctggctataagtggaaatggacgtatgcccgtaaaactggaaaaatatgtctagaagaagtcaaggtctttcccttaactatatctgttttctatgttcactactttgagaaatctaaatttcttttaagaaacataaaatttcattagttgacaaaatattagattacataagaatctatcttgctaaagttcgtcatccctccctttgacacaacataataaaatatatactaaccaaaatatttgaagaaagccgggaacttattcttttagttatattgctagaacaaagaactgaaagaccctggtgtatatttctagacattaatttgaactcctgtgtcatatgtctctccacctttccaattttctggtatgttgtttacaggaataatccatgactcatctccatcctccccactcagtaacattcttaaagacaatggaccacttgggggtgaattggttgtccatactgctccatgactcctatccaaagcttgcacacaagtt

SEQ ID NO: 6889 - DNA, 619 bp, Gossypium hirsutum
cctattaagtcgtttcttcttctgaacaccctgatgaacgcaccccagcttctttaagacaatcaaattgcatcacatcaataacatacctgtaaaatatgactcatcaataaattacaggagcatttttgaaaggattactcatctctcatgaaaaaaatgttattgaagaggttcatgcaataaaaattggtaaatctatatcaccttaaaaattcatgtgcatcctcctccttcccttgaacaagttggccacaaatattttgtagttgagacagtatccctttaggggacagtggagattttccctccttggccttcaaaattaaattttctaaatcacaggtgaaacaccattctttctttgcacctaataaagcaatttatagtaagaatcatccaacatgctacctcaaaaatcaaaatctaattaattccagattcagaaacaatacggctgcatacatgcttttgaatggagtccctgaagaaagtaagcagtcaagggaggagtgaatgtcaagcattggagaatagcattggcataacagctgcacaaagtaaatggcgcattaagaacagaaagaaacctcataggcaactaaaaaaccaaagacac

SEQ ID NO: 6890 - DNA, 551 bp, Gossypium hirsutum
gtaccgggaatcttgatcttctcaagagtaagacgactatgttttgtctttaatttgttatcccaatagttaaatattaatatgatcccccttcgttttgagtagagattgcggctcaacttgatgagggaaagggactggcgaaaacagtggcagataataaggatgcgaacaaacgaggggcaattcattttgcagcaagacagaagtgtgcaattgttgttggaagaattgagaggagagatgaagatggggtttacatcccaaaatatttctcaactactctgccaaatatgctttgactcctgctttgatttttatcccactattcgtggagatattcacataaaatgaatcttgtaaaattgacccctttctcacaatatctcagtttgcatcaaatgatagaacacgtgtaaatttgaagctcttgtatcttgaattacaaaccaaccattcagtttcttctcatttcaaacaaagttgaattctggatgacaagtttttgctttttacgcgtgtatagagattccataaaccctaagtccaaa

SEQ ID NO: 6891 - DNA, 619 bp, Gossypium hirsutum
  misc_feature (408)..(408): n is a, c, g, or t
  misc_feature (436)..(438): n is a, c, g, or t
  misc_feature (446)..(450): n is a, c, g, or t
  misc_feature (458)..(458): n is a, c, g, or t
  misc_feature (463)..(474): n is a, c, g, or t
  misc_feature (476)..(487): n is a, c, g, or t
  misc_feature (489)..(520): n is a, c, g, or t
  misc_feature (523)..(548): n is a, c, g, or t
  misc_feature (553)..(566): n is a, c, g, or t
  misc_feature (569)..(573): n is a, c, g, or t
  misc_feature (575)..(609): n is a, c, g, or t
  misc_feature (611)..(614): n is a, c, g, or t
gtttttgggctttaatgttatcatcgtagtttttcttgcgtctcatgttgaccggttactggtttggctgtagtttttttatcgaaggggatcctattatagccctgggctggactggggagggtggaggctttatttgacaaaaaatggggaaaaacttgcctttttcccccccaccttaaaaccaaaaagttaatggctaatacaatttataaggatagggggaaggggcggcggccagcccccctggggggaaaattgaattcccggcctttaaattccttggcaaatattactttatccaaaaggacttatcattgttgcccggttgaaccctaacctatctcaggttccttgcctaatatttacctcgaaataaaccacaggcttcaggttgcattaaatgangacttttcttttgctgccgccatcgctnnngactagcnnnnngtaagaanggagnnnnnnnnnnnncnnnnnnnnnnnnannnnnnnnnnnnnnnnnnnnnnnnnnnnnnnngcnnnnnnnnnnnnnnnnnnnnnnnnnnatgcnnnnnnnnnnnnnntgnnnnncnnnnnnnnnnnnnnnnnnnnnnnnnnnnnnnnnnngnnnnccccc

SEQ ID NO: 6892 - DNA, 642 bp, Gossypium hirsutum
tctatgagtcttccttttgtccggttctgatattgttagtgatgttagtgatccttgttcagttttacctaattgcatgaatggagatgttgggtattttgctcattcctcaatgcactgttggtataattcctcaaattttatgtttaaagaaaataaggagggtgaagtgattgaatttccaactgagagtgcatgttcaagtagtaggatgatttttcatgatcagggaaggacgaataatgtttctgtgccacagctctcattgactgatttctcagatgtaaagcaacagcattttgatgttaaagggaatggacatattttatcagcatgtggaaagttgtcatatactgctaatgatagactttttgatgataatggattagtgcaaccattcaatcgcattgctttttgtgcaaagaatgaatatgataaatttgttgcacctggcaacatcttctgccattctactgaaggttttgatagagctggatggagcaagtctattaacagggttgattcacttgaagaacctaagcagttcttgaatgatgttccgcctatatcaaaaaaggtattagtggttaatggcaaggatgctcatcattctcatcaaggtataaatctaactgttagtag

SEQ ID NO: 6893 - DNA, 416 bp, Gossypium hirsutum
aaagcacattgactcatctcacattttattttccaccacttttttactttctccagcctctaaatatttgctcttttttttttatgttcaaccaaaaaatttgtttgcttcttcatatttttccacccccaaaaaaaaaaaaggttacccttcctgggccgggaaaaccaaaccgggggttggaaaaattttaaacctggtaaggggaaatttccctaaaaattctgtattaaaagtaaaattgtattttgttctttctataaaaatagataaattaattcatgtaaattagatcaaagagcaaattaattattttaattaaaattttcgttctttttaattgaagaatcattttactcattgatccaatatataaagaccatttcacctatttttttaattttttaataaacgag

SEQ ID NO: 6894 - DNA, 595 bp, Gossypium hirsutum
aagcgacaggtgtatgcccgaaaatttcagattatagggagcaatataacttctactgaagtaactattcctttaaataccctcttgagggttttaagccatgatgaactccagttgctgaaataaccactgctcttacaccattcattttgcacaaattcaaaggtacagtagtttgcatttaagtcatatagcacatgatttcttaatgtaattcagcacacctcgagcatttaactcatagaaatgaaccatttcagcagcgaagtattttctataaataactaatcaagtttatatggtgcagtcagattaaataaataatcacaagttacgctagattcatggtccacaaaataagcgactcttaccaaaacacgatctagtataagctgtactacaagctgttccatctcttccctctttagttcaaaatctggtaaattcataaaaaaaatggatataattatgttgctacgataaatgggaacagtcgagaacttaggttaccttaacgacgatgaatgaaagagaacaaaagaaatatgatatttatctttcatacagagaaaccagatttatgtagctcaccatg

SEQ ID NO: 6895 - DNA, 624 bp, Gossypium hirsutum
  misc_feature (620)..(621): n is a, c, g, or t
agcttcatagtgtcttcttatgattatgacttgagttgttatttctgggtttgccttcttcagactatcgatgcactttttatttgtttcatcatacttatagcaaagttgtgagatccttaagtaatcatcttgatgttaaacgtaactaagttctttctctttataacatctttgtagtttggtcattaagaaattgccactcttgctgtattcttaatgcattgagaacaaacttttacaaggatttatttaatattttaattccagcaatgttttttttctttaagttttgaagttattgaccttcacatcaggactgataatgaatgcttactcatccaacataacagtcttgtttgaaccaactggaatttgcatgtaaagattaccattcaaatgttaattacatcatagtagttgcttttttggaacattccttatctaagcagcgtttcctttcccttaaggatgcatatagttctggagagaagatattctgaagcctatgacttgctatcttatgcgaggaaacatttgttacgtttcaagaattgatctcaaatcaagttttaagtggtttggtgttggatggcattattactagcatccatgaccanngaa

SEQ ID NO: 6896 - DNA, 683 bp, Gossypium hirsutum
attgagtcctgggtcgataccagtaccaagagtaagaaaaatattaagactgtggttaagaattatcaaataattgataaaatggaccttttttatttcacaatttatcaagatcaagaaagcaacccatccaataaaaaaggaagccattttgattggatgggactgaatgaagaaatactaagtcatcctataccgaatctagaactttggttcttcccagaatttgtgctgctatataatgcatataaggttaaaccatggatcataccaataaaattacttcttttcaattttaatggaaataggaacattaatcaaaatattattgaaaataaaaaaagggactcccttatagcaccaaacgaaaaacaaattattggattagagaatcgaaatcaagaagaaaaagaacccataggtgaagggggtcttgtatcagatgcacaaaaacaaggaaattttaaatccgttctctcaaaccaagaaaaagatgttgaagaagattatgataaatcagacaaaaaaaaacgtagaaagaaaaagcaatacaagagcaacacggaagcagagcttgatttcttcctaaaaaggtatttgcgttttcaattgagatgggatgattctttaaatcaaagaataatcaataatatcaaagtatattgcctcctgcttaaactgaa

SEQ ID NO: 6897 - DNA, 613 bp, Gossypium hirsutum
ataagataaaatatatctacaattaaaggatttatatgattctcaagattacaaaatcaaatattattagattatatattttctaatattatttttcctaatagattacaaggtagccttaatttgcctcttcattgaaccatcaaaatttgaagtagaatcggactaatttaagaaagtcagatgagcctcgtttaatagattaacctctatgataattattctttccataaattatataaataattatcacaattgcatttaaatcaaaatataaatgtaactattttaatacttaattttattgttagagttatttttaattttactgacacctcataaaaaagaaattaaattatagtaaatattttaaatgaaaaaaaaaagtatatttctggttaaaaaatgtatttaaaagatattgaagtgattgtgatttagagggggtgaaattgatggtctcaaatggaagaatacaaaacttagaagagcgagcatttgtttgtttttggcagagcaatagagagggagtaagttttatggtaaaagttactttccattgacatcaaagcatccaatcagtctttcctcccatgactagttgtttcccctt

SEQ ID NO: 6898 - DNA, 651 bp, Gossypium hirsutum
  misc_feature (62)..(64): n is a, c, g, or t
ttctgcttcttcttaggtatggaaactactcttcgtagacacccgcgaccacgtaaatcaannnttatctgttgctatccccggtattattcggtgcagcggccactgcttcgttgatagtggtgaagttgccacttccatcaggatttacaaccactacttgactcacggaaacccctttgtccttcccttcctcatctgctcgaacatgcttctgccggcttgcggattcgtaaactgctcgatcatggtccgacattattaaaggcaaaggagagtccctgccatttaccaaattggaaaacacatggtttcttcctgttagagatttaattaatccatgaacccaaccgtgcctgaaaagtgcaagagacacactgaggaaatttgttccattagaaatagatggcaataagccatttttaatgctcgaagccgacggtgtagcttcaagcccttcgatacaagtttgcacattcgttaaaacagcactaagcaacgcatgcaaatcatcagccaggaaggtatcgagaccgtcggatttgattctttgtaacgtgtacgataagaaatctacattaagctcagctagaaactggcaatcctggagtgcccgaatggtgctgaggaacgaagtcgatggcagtctga

SEQ ID NO: 6899 - DNA, 691 bp, Gossypium hirsutum
  misc_feature (633)..(653): n is a, c, g, or t
  misc_feature (657)..(675): n is a, c, g, or t
  misc_feature (678)..(684): n is a, c, g, or t
tgcattttaccctatttactcaaaaaatgatcaaattagtcattatacattagatcaaagagcaaattggtcttttctgataaaattttcatctattttttctgttaaaaactagagtggctgatagaataactagagagttacattctatctagagagttacatgtgacgtgtacctcattctgacatatagagatcagcttttaatagtaaaaatagatgaaatttttggtctaatgcatatggattaatttgcccattttttgaataaaggaggcaaaatgcaatccgtctcctggtacaagggcctctatgatatttttactcaataatagctgaaatcataagcacaaattggttgttaagattagagatcataataattgaaattgcagtagtttaaagttcttacattaggaggttcaagggaagattagaggattgatattgtgatgcaaatttccttactgatgccattgagctcagatccaattccataacatcaatcttagcactagggatttcttttagtattgattctttgacattccgaccggcatctgcattccttaccgccataactacgtggacaccgcgcaatgcgaggacgcgagtagtctctacaccaatacnnnnnnnnnnnnnnnnnnnnnggtnnnnnnnnnnnnnnnnnnnaannnnnnnttccctt

SEQ ID NO: 6900 - DNA, 1274 bp, Gossypium hirsutum
  misc_feature (138)..(138): n is a, c, g, or t
  misc_feature (189)..(189): n is a, c, g, or t
  misc_feature (218)..(218): n is a, c, g, or t
  misc_feature (225)..(225): n is a, c, g, or t
  misc_feature (240)..(240): n is a, c, g, or t
  misc_feature (270)..(289): n is a, c, g, or t
  misc_feature (315)..(315): n is a, c, g, or t
  misc_feature (319)..(321): n is a, c, g, or t
  misc_feature (325)..(325): n is a, c, g, or t
  misc_feature (342)..(342): n is a, c, g, or t
  misc_feature (382)..(382): n is a, c, g, or t
  misc_feature (390)..(390): n is a, c, g, or t
  misc_feature (392)..(392): n is a, c, g, or t
  misc_feature (397)..(397): n is a, c, g, or t
  misc_feature (422)..(422): n is a, c, g, or t
  misc_feature (434)..(434): n is a, c, g, or t
  misc_feature (485)..(487): n is a, c, g, or t
  misc_feature (602)..(602): n is a, c, g, or t
  misc_feature (616)..(616): n is a, c, g, or t
  misc_feature (675)..(675): n is a, c, g, or t
  misc_feature (679)..(679): n is a, c, g, or t
  misc_feature (740)..(740): n is a, c, g, or t
  misc_feature (808)..(808): n is a, c, g, or t
gaaaggacttgccatgacccctgcattgttgcttttaagcaaagaaagaaaatgttagtcttctcatctaacgaagttcatgcacaagctgacaagcataagtacaatggaggccgagtcagattgcattttaccctntttactcaaaaaatgatcaaattagtcattatacattagatcaaagagcanattggtcttttctgataaaattttcatcnatttttnctgttaaaaactagngtggctgatagaataactagagagttacannnnnnnnnnnnnnnnnnnngtgacgtgtacctcattctgacatanagannncagnttttaatagtaaaaatngatgaaatttttggtctaatgcatatggattaatttgccnattttttnantaaangaggcaaaatgcaatccgtctcctngtacaagggccnctatgatatttttactcaataatagctgaaatcataagcacaaattggttnnnaagattagagatcataataattgaaattgcagtagtttaaagttcttacattaggaggttcaagggaagattagaggattgatattgtgatgcaaatttccttactgatgccatngagctcagatccanttccataacatcaatcttagcactagggatttcttttagtattgattctttgacattcngacnggcatctgcattccttaccgccataactacgtggacaccgcgcaatgcgaggacgcgagtngtctctacaccaataccacttgatgctcctgaaatggactgatataagtaaccaagagaaaaacatanaagcaccaaatataaaggctgtaatggttaaacagtatttcatctaattcaacactttttaaaaagttgagagcgaaatttagctaaaaaccaaatagaggccaaattgaaaaaaaataaaatataaacataaaagttaaatttgtaattatgtcttttgcttcctttcccagtcttctttgatttgaataaccagaccaaggaatcctcctattaggtcccagatctaaaaaactactgtaaatttaacttctattttctattaattcaaaacccaaaaaattgagaatcaagaaaaaagactaaattgaatctcctctgaaaaaaaaaaaaaaaaatattcccccaaaaacacctaatttatgaaaaagctttggaggaaacaggggaaaaaaaaaataaaaaagaaaaaccctaaaaaaaatttctctttctcttttttttatttttttttatatttttcttt

SEQ ID NO: 6901 - DNA, 619 bp, Gossypium hirsutum
  misc_feature (588)..(589): n is a, c, g, or t
  misc_feature (591)..(593): n is a, c, g, or t
  misc_feature (598)..(600): n is a, c, g, or t
  misc_feature (605)..(609): n is a, c, g, or t
agggagagggcaggcctactgaaatggaaacttgttgcttttgagtaatgtgagcgaagaaaagcttatctcgattaaatggagaccaatgtagttatctcaaactagaaagttaaaataaaggttggatgatattttaggatttcatttggttttatccaaaaattgaataacggctgttagacggaacattcagatattgtccatttttttaagtcaacaactctttgctttttccttgagctaaggattctgatcttgtctctaacccaaatggctaatgcaaataaaatatctgccaatgcgaaaataatcaactaatcaaacttttcttttttcatcatgtcgatttgaaacactatatatgttaaaattatgttaattatataaaaaaatattataattataactctcatttaatgtcttgtgccttcatatttgaaattttttatgcgttttaaagtttctttgaaaaaaaaaaaaaaaaaaaaaaacccacttcttattattacaatataaaaaagggaaatacctttaaaaccctttaaaaaggattcaggttgaccctaaaaaacaaagcaccacccnntnnnttaannnaaaannnnnaacctctgaa

SEQ ID NO: 6902 - DNA, 623 bp, Gossypium hirsutum
tggtatgggaagaaatgcaaacccttaacggtgtgacgctatttgctagtttcttgtcgtctcattcaagaactgaactccctggtgcaatgaggaacgttgtctacttctctaaagttcggttctttggaaagcgatgcatatcatactcggttgatgaccgtagatactaccctcgcaaagagtgccatgactggggagaacaagatccgttcgagaacatatggatcgaaccaccccgagatgcatccttgaattgaacatcaacactggtagtagtagtccaagtaagtatatgtttaaagctgttacaacatataaacctagttatattttacaacatccatgaaatggttgttgatgctttctatagaataattgcttatgaatgagttgatcatgtaatgaccatgtttgatacaaactccattggtgctctttgctttttagggaagaacattgttatgctcttcagagatttcagttaatcttaatttacctttttttgttattttacatatgaaatgtcttttcagtgtaaagttattcaaatacagcacctgttgatcatatgtaatttaaattcttattcctcattatctttatctttatgggattggtta

SEQ ID NO: 6903 - DNA, 632 bp, Gossypium hirsutum
taaggacatggatgggggtggtggaaggggtagaggtcgggttgatgcttcaggaaagacgtggcaacaggagggagattggctctgtccgaatacaaggtctgtgatgtgatattggtgagcagcttcttgctcttctgtaacatttccttccaattgtctttacctctgatcgttattttcatacttcatataatttatgtttctggatgcagttgttccaatgtcaacttttcattccgtggtgtgtgcaatcgatgtggaactgctcgacctgcaggtgcatctggtggtggtggaggggctggtggtcgtgggaagggtcgtggtgctcctgattctggaggtcatggccgagcagtagctgctactggtggactttttggcccaaatgattggccttgcccaatgtatgacttctaatgctcgagtgaaatctttccttcttttctggtccttgtgtgatcttaggaaagtcaatattttcttttagtttttctgtttatttggtgcaaaggagagcactactgctcgaacataatatctctactgtaacatgccccctctcttgccacttgaactaagccaaagtgatgtctttaatattttgctggattatacaaattggtgag

SEQ ID NO: 6904 - DNA, 623 bp, Gossypium hirsutum
tctttatttttctgagtcgtgaccattatatgctttcattcgcagaaataaaagcacccggaatggatttactcaagatttctctttgcaaaccaccaaaagtgtctgatggtgtttcagtttgggagtggtccggctctgcattagatgagggtgatgaggcttcaaaatggtttacaaattatctcgggaaacccagtaggatggttcgttttaatgcaggttggtttgatttcaattaactatataaatgctacagccatgttgtgatagctttgcatattaagatagtttttaagtctcaaatttatatggctaacaatttggttacaacattatttaataaatgcagcatcagaaactaggcctgtggatcctgtgtatgctcaagggtattccataatgttttctgacatgttccctttcatgttagcatctcaggttagttttggaaacaatggtttttattttcataactgatgatgatgatggtgatgatgatgatatcaatataaattaacaaagctcaaacttgatattataagtacaaatgcttgcagggatctttggacgaactgaacaagcttctgaaggagcctgtacccatgaaccgttcagaccca

SEQ ID NO: 6905 - DNA, 595 bp, Gossypium hirsutum
tcgataagagcaagtggatttttgcagtttctacatctgtacaagggattaccactgtactccattaatgtccactgaagctaaagctatataagaacacagaataaatatacaattcttttaagagaaatagaaaaaaagcgattaataaaagaacattggaaaaagagaaatatacatgaagaagatttgtgatgatgagtttcacagttaagctgtgctgagagatgaaagaatcatggtgggtgtggcgatggttaaataatacaaaaaggtagggtttagggtcaatggtcatcgcccttcggggctaagttatgtatgaatctaaaattctaacggagaaacaaatggtatgataacgactataaataaatattgggtaaatatcactgtttgtaactcaattattaataatttttttgtcatctgattataaaaaaattataaaataatcacttaattatttaacttaatttttattagtcatcagctagtttacattaaaattaacataatagtaattttaaccctcaatatttataaactatgtcaatttacttttgattctaaaaaattaaccctcaatgtttgc

SEQ ID NO: 6906 - DNA, 638 bp, Gossypium hirsutum
gtcatgcaaacgagcagacctccgttaaaaatgaggtatgtttttgtcttttgcattgggatactctagtggacttaaacgtgatatgccaatattttataatccctgccatgcattctgctggtcgagaatctaattgaatttctggcatttgctatcctgccttgctttagatagggcatgaaaacatgtagaacattgtaaatctagactagctcatgtcctaagttagctaccaatgtatttcggtctttgtttatgtgattttaccaatggtcgttaatgcgtggagatagctttgcagggaacatcgaatgcaacagaggatatggatgaagagtttagtccagtggatgtggatgtcaaccttgttaaaaaccttcttgactcctttgcttgtcaacaaggacttcctggtccaacttccaatttgcttgggctgatgggtgttaatcttcctaaggatgacaataagggcaaatgagtttgtaccagggaaataataggaattcattgtaatttacgtgtagctgctgcatccttcttgtaacttaaggtagcaaattgctttgagaatcaatttaatactatctagaatcaatagaaaactacaagttgtatttccgtcaaagtagtca

SEQ ID NO: 6907 - DNA, 625 bp, Gossypium hirsutum
tgtcatagttctcaacacatgagcagcaaacatcaaaagataagaaagcaaaacacagttcaatataccaaaaagaacagatgtttatgcacttacatccttcttgtcttgaggcaaaagaaaaggatccctgacactaagtccagacactattgttaatacaggatcaaagcaacggaagatggcacccatgattagcattttcccaagcttgggatctacaggaagcattgccaaaaactttcctgattggaagaagggggaagacacaatagagggaaataagtaacaatagtgaataccccttcaattccacattgaacatgcacatttgacttgcacaaagtttaagaaaagaactagaactcatggtttttattttaaaattctgaaacatcataaaaaactaatgtctagttttttagtccaaaaggatgaaaaagatcatgataaataaatgtatgaaacagtaaagtattagcttgagatattcaaaaaaggaaagaaaacataattttgaaacacccaaagaggacagatgaacattcaatcagtcataaaggaaagaatagatataaagtttatgctgcaaaacacatttacccagcatagcaatagcaaacta

SEQ ID NO: 6908 - DNA, 586 bp, Gossypium hirsutum
  misc_feature (531)..(535): n is a, c, g, or t
agcatccttcaggggttattatgcttctggtggagctggaattctcaatgaaacaggccaatattttgtaataaaaatgcctacctagtacctacttgtacattcatttacattgtttctagtattaattttgttctttgtattgcagattcagagattgacatttgatgatcagataaattgctttaaaaagaccaaggaaagaatcggggctaaaataggtgcacaggctgcaaacaagctttgcaatgaggccacttacttcattggaattggtaagcttgaaacaaaagtttcaaaatttattaaaaaggatgccttaacaaacttgattttgtttgatgtttatgcaggcagtaatgattatgtcaacaatttcttgcagccctttctacctgatgggcaacagtacacacatgatgaatttgttgaactcttgacatcaactttggagcaacagttttcggtatataagtagtagtcttttgtcttgatcaacaagttatagtttttgatattgaactttgaacnnnnnaatgggaatgaaatggcagaggctttaccagctcggagcacgaaagatatg

SEQ ID NO: 6909 - DNA, 596 bp, Gossypium hirsutum
gttaagattgagctgaattgagcttgagtgagttgacttgagctcgagtgagctggaaacgagctaaacgtagcttaacgaaatgaaattgaactaattcagctcgcatggatttgcaaacaatgcttagggagctgatccaaaagtgtgcccggggcatggtcgtatcaaattagaaccaatacatgagcatttaggacaattggacaaacaagttcaacaagtaagaacaccacaaaatccaaggcaagagagaggaagagctagtttaaatcaaggtgacctttatgagcctagtgatgtggaaagtgaccacgcttcagttcgaagtgcaaggcgacaaggccaaaggaatcggcctccaagggaaagaaatcgggttgatgatgaccttaagaatatcaagatggccattcccccattccaaggcaaaaacaacctcaaggcttactcggagtgggagaagaatattgattagtcttcgaatgtcataatcatttagagagcaagaaagtgaagctcacggcaatcgagttcttggactatgccatagtgtggtgggatcaacttgtgacaagccaaagaagaaacggtga

SEQ ID NO: 6910 - DNA, 612 bp, Gossypium hirsutum
  misc_feature (608)..(608): n is a, c, g, or t
acagcatgatcccaaagcaggacatatccgcaaccacgatgaatcggtgcgaacacagccaaacaaccaacctttctgagtccagtaaggaatttccaccaccccctccaactcagagaaaacaatcctcctacatttccatgtgaagtcgatttcaaccaatttcttaataatatcctctttatttctgatctccctcaaacccaatttttttcgagctcccaagcctcataagcttctttccacaaaatcttcttccgatttcccccaaaaaacatgggaaaaactagcaaagttgctttgacttttctttctacagtagctcaggcaattttccaagattatgttcgagctcgagaaataaagtttatagctttccaccctaatcttcaagagtcttgtatatgccatataaaacacaaatctagtttatgtcccgtaagaatgcagaaaagaaattttcagcccccatagagtaggctatgtaacctttccttttaccctatcttgcataaaccttctatcactttcacctcactttcggagctcaatgcttccttacgaaataattataaagctacatacgttcaagttctcacgcatgatantcat

SEQ ID NO: 6911 - DNA, 602 bp, Gossypium hirsutum
agtcaaaatgtcaacgactaattggtattacaatcagctaatatggtaaagaagctgtatagagtgacacttgcttatcacagattcaacaatttatcttcttctgtgtgtgtgcatcagtgcgtctttttttcttttctttcttttttccaccactaggattgagaaagaggagcattttcagattttagcccatgaacacatattgtcaagcagcaacaaaattaccattgcttctttatgcatgcagtagcatcatggatcctattactttggtttctttttgcagatagtagtatcaaggaatctaagtttctcaaagagaaagagagggggcgggggtcccactcctatctgtagttccttttctttttcttccccccccccctttttttcatatgacaatttcaaataaaagagaaggaaacctgagaattttctgattacaccactttctatttaaactattgtgcttctgcagtcatgcaacataccatgaccagccaaataaaagctgccataggcaaattttatatgcgataacattcaatatagtcatatcattaacaggataattatatatttatatccaactagcaaag

SEQ ID NO: 6912 - DNA, 573 bp, Gossypium hirsutum
ttgggttgggttggggttatttgatttaaagctcctgttttttaagttagataattatcggtttaaatcattttagattttgatcatttgggttcggattagttttgggattgaggtagatggagtctagttaaattggattagatgcaagttattttttgtattcgagtaataattaataagtctacaaatacacgattttgccaattgagggttgagttgaactgattcatttagagcttaatatatatgattcgaaggttgtcgtaaaatgttaaatgttttaaaaattaagtcaggtcatccacggttccattctcgttttataataattaaatacacaattaaaatataaaaataataaaaataaaggtgggttcaatctacttatctaaatgggctaagttgagctcatttgctagtgtatttgattataaattccaaattaatcaataatattagtactagaaattcattatttaacattataatttatattgagcagctactaagtgtttgataaataaaacttgtaataattggacaaagagcgaaagaagacacgagcgagac

SEQ ID NO: 6913 - DNA, 655 bp, Gossypium hirsutum
atcacatgaacgacatatagcggcgtgttcacgaaactcgccaaacgaatcgccctcccggttgcctcggcttctagctacctcgaaattacaatatatcaaccaaaagaaagcatgtgtaaggatgtttaaattgcagttgtggttgcgttttaagtcactaccatcggaggtctagaaagggcatgaccttctggaccggtaataccgcgctcgatcattcttttttgcccttcgaacacagcatcgccgttttcggcatgaaccatagccaatgcacctaaagacttacacctcttcatccctcgtaatagaaccgcgtcgtcgaccatgaatgttcccttgtacgccatgaaaaacttgaaagactttatgcctacgaaattgttaacaacaatcgtgaaaacaattaaaaaagaaaaaataaaacacaaattttacgtggaattcattaatgttgaaaatcaaatgacacaaatttcaatcattaattgaaaagcttacccttttccttaaccattatttccatttctttcgaaacagattcatcccaatgtcgaatcaccatatgaaaaccgtaatccatacaagatttgcttgctttcttttcataagcttcgaacccggacattaaactaccattaacagggtggac

SEQ ID NO: 6914 - DNA, 573 bp, Gossypium hirsutum
  misc_feature (512)..(512): n is a, c, g, or t
  misc_feature (540)..(542): n is a, c, g, or t
  misc_feature (560)..(561): n is a, c, g, or t
tgatgattctttgataagtttctatttgttttcacatgaatgttgcaccatattttggagtcttggaatgttggttgcatctgtatggtatactttttaagttacctttggatctgtctggtatgctttttatgttatttttgattctgtatgatatgctttttaagttacattgtcacattaattcttttctttgcgtgctaaaatgacatattcctatagttgagaattttaaaaataattttcttgtaactgtcaagcactaagttttatttgctcaaatcaagtattgatttttataactgagatggtttaaataatgcaggtagatttagttaagagacactgcttccctgtttactggaatggagaaaataggcgtgttttaagaggtcactggtttgctcgtaaagggggagtggattggcttccacttcgtgaagatgtagctgaacaattggagattgcatatagtaacaaggtttgcaacatattgatgtcctaagatccgntttcttccaataaattttgatttaccgnnntttgcattgtctatcccnngtgaagctccta

SEQ ID NO: 6915 - DNA, 625 bp, Gossypium hirsutum
  misc_feature (531)..(531): n is a, c, g, or t
  misc_feature (597)..(597): n is a, c, g, or t
  misc_feature (606)..(606): n is a, c, g, or t
  misc_feature (620)..(622): n is a, c, g, or t
acatcacccgtcaatgactagaatgatggttaaatcaaggagctattagtactcacaacactaaaagtatattaatttaaactcttaccacattttaaggtatcaaacacatggaaatattttacctgtacagcaatctggttatatttctgttggtccgtgaacaaagaatccagactaatgttatgaagccttgcaacagcaaatggtgtataacaaagtgttccactctggtttaaatccttgacaatattataacatcaaacaaagacaataagttgaacagaccaatatcatcacgatgcactttaccaaacctatgataaatataaaatgcaatcaaataatcaaagtctgatttctacttttcatgctgtccaattttactttttgggattttcactttagcaaaatcgaaatcttttagcaatttagtcaatccaaggtctattctatatgtgtttccaaaagttccttttaagtgcaatacagtttttatgccttaagtagttagttcacaagtcaacaagncttcatgattgagcacctaagaccaaagtagaagaatattcagtcattaaggcctggaagagaatngtctagttnggcacaattagatnnngca

SEQ ID NO: 6916 - DNA, 612 bp, Gossypium hirsutum
  misc_feature (550)..(550): n is a, c, g, or t
tgaaatacttgcctttctatcttcctgtacagcaccagagtaaaggcttatacaaactatgagattcacaaaaatgtcgagaaacaccaagaaacttgattttgtcatttttttttttcaatttgtttgatagtatgcataaaacagaaatcataacttgtattttatagtgaactggaagaattgaatcttatatccaattaactggagtatttaaatttttttgtctttgtatagccactacaaccaaggaactgatctgtcaatttttactcataccatatatgattgtgatatatgaccagttcaagatatattgttcactatctgataacaccattctttctgctgtatttattgtatatttttgcagctgaactgattatgttcataactttaatgactaaggaatcaatttataacttcattaaattgggttttaaccacatttttcttctgatttactcccctgaaaatctcgggtgttgcaaaaatcatgtattgggaaagtttgttcacagaaagatttatataatatttattaataagnttgaaagaaattgactgaacatacatataacatcaactgaaaacaaataataacagtgcagc

SEQ ID NO: 6917 - DNA, 604 bp, Gossypium hirsutum
  misc_feature (578)..(578): n is a, c, g, or t
ggaccatcaaccatgaactctgtaacagtagccattgttcctccaggaccatcttgcaccacaccataaaatgccaccacatttggatgatgaagtttggagagaatgtcagcttcccgccaaaattcattggtctgaggatgaagtgtaaatcttttagtatagcattaagtatgaaataataccaaagagagagaaaacagcttgtgcacatgtgttttatatgtgatataagaatgtgaagattattaataataatagccactataataaaaaaaatatctcctcgaaaacagccgtgtgctatagtgagagagggtgagatcttatatctcgtgacactatatgaaaacccgggaacccccaatatgaaaaaaaaaaaaaaaaattaccttttttttggaaccccccccccccttcccccccccccaaataaaataaataaaaggaaaggaaaaaaaaaaaatagttttttttagttagtttccttttattaaaaaaaggattttgttttgtggtatggggaaagaaaacccgaaaagggaatcacttgtataaaaaaaaaaataatttgttgngaagggaagtaacatatctttcttgc

SEQ ID NO: 6918 - DNA, 516 bp, Gossypium hirsutum
  misc_feature (512)..(512): n is a, c, g, or t
atgacatgaaatttcacccagacattttgtaagcccatagttggaaacattttaaatttgatatattccaccagatcagacagctagtacaactgtacaggtccacattcaaaactgaaaaactttaagagggaatcttaccactgttgtatctaaccacgtattcatcaacatcaacaccaggaagtgcaaaaccagccctggtcaaaaggttgccagcatccctgacctgaagacaaaagctaaactgttatttaacaccaaggtaatagacaatgttttttctttttatttaaaaaaaaaaaaaaaaggtgttgaggggtattttttttttatcctacaggggagttggaaaaccttattgtgatggaattttattattttaactcaaaacaagtttatcattttctctttttgattttaattcacaccgcaaaacccaaactgaaatttttggtggggggcggggtttccccccccttttttatacaataaaggaggcggcaggtgtnattt

SEQ ID NO: 6919 - DNA, 511 bp, Gossypium hirsutum
attgatattgatgagtctggacttggtaacgacggatcggtccgattaactcgcaaaaaataatagggattggagattgaaaagtcagaagctatttgtttcatgggtgaagggtctctgcagcggctaatgcacaatgggattttgtttacagcgttaaggaaaatgggatttcagacctaggttttttatttatgttaagttttaagttcctttttttttccttttacaagttttgatttcttgtgttctttaattatttctgcctttcgtttccaatgcactgttctcggtgccaattaaagtaggacagttgtaggttcatttaattgttgcgtttgtatttgggtcaagtttcccgtcaaataaaagcattagtggatattcaaaaaaaaatagggaaataatctttatgattatttttcaaatttatggatttgttaaaaatttgttcagtaatgaatttaaaatccttaaatgtttttttttgaatttgaaaaatcctattttt

SEQ ID NO: 6920 - DNA, 652 bp, Gossypium hirsutum
ttttgtgcggagactcctggtgctgcaagagcttgggtatcaactttacagtaagttagctttttactgttctattttctgttatatacatgtatatatatttatttcttgttaagtttgattgattccatgtataacataattcctatcactttaattcaacttgtctgaagatgatggctgatactatctcctgtcatctgaaaagtatacgtgtcacataatttactgactcttttcagacctcatttttcatataccttgttttatcctcatgtttccgtttgattgttgtagtgcaacgcagttggttctaaaggcccacaaagaggctgtcaattccttaagtgggaatggttctgcaaagttgggtacggttgcaactgtagttgctgctgcaaattcaacagccagggaatgttctaaagaaattgaagcggcaatgcagatatctttgagaaatgccttaggattggtgacaaatgtacccactgatggtccaatggatgaccttacaattatgaaggtatgctatcagcagtatctcctattcttgtgtttatgggctgtgattttaggttatttgaagataccagtgttatacgtagattgaggtcttattctcagacagagcaggttgaagcctcattta

SEQ ID NO: 6921 - DNA, 646 bp, Gossypium hirsutum
cagtgttcaagaacgacaacatttatgagaatgcattaccttctgcctgaaactttttaaagtttccctcaaagaatcaactgtagaatgtttcgcaaaatgctctttccattcattagcaagctttctcaaaacagcaacacttgcatcgagattatcgagataaagcacatcctgtttccaaagatattggggaaaaataaccaacaaaactttaacaatagttaagtgaaagaaaatacagtcaagatccgggggaaaacattaaccagaaagatcagtagaaaccaaaaccaatttgttattggatgaaaaatcttcaaataggtcagaaattgctcacccattgcttataacactcaggattttgagttaaacaccaaataaaaacatcacttgctttcttagataattctggaagacctgcaataaaaataaaatatggtataaatggatagaactaatttcatacaccatttcaggtgggtctaagatgcagtctaagaatttagttttaccttctccggtagcttttacagcatagctcggtatctactgggcaacttgtttcattgctttacttccaagagaaccagcaaaggcaacctccttcagagtaggataaatagtttcgaacctctcagtt

SEQ ID NO: 6922 - DNA, 659 bp, Gossypium hirsutum
tgaaactaacctaattgaatattaaagtcgacaacttgaaaacaaatgtcccaaacaaaaatgatccgaaccctaaatgacccaaaccagagtgatgagtcctcatcttaggtccattgtaggccttatttagcttgtttctaagttgtttttgtatgttttagagtcattttagtttattttactttttttaatttgcattttaatttgaactttttagtgtttgttacacatatttttagtgcttttataatgttcttatttactttgatttgaataagatttttacaaagttttcttgtaggttttaaggagtttgaatgagaaaagttggatgtagaaaaagcggagcgattgaagcgaagcagagatatttgggcaggatgagggcagtgggttgtggcaccagaagttagagccatggcactgcgacagcttattatcgaaatgctgcattttgcacgaaggttttaggtcttttcccatccatttcatgcttttaacaaagttatcactttgtaacctagaaagaagctaccgtacaaaatttttaggctttagaacatttcctagttttaggttttgagattttagttcaatttttcagctatttggcttttataatcaattttgaaggattttcactaggggatgctacc

SEQ ID NO: 6923 - DNA, 640 bp, Gossypium hirsutum
tacgcagagaccatgttcaaaaatctctcggagttactggatgagagaggttcaagtgtgcttaaaagaatagaaagtttctctgaggacattatgtggagtgtatgcgatgtcgaattcacccacagtctcatcctatggcatgttgctacagaagttgttttctatgacgacgatcaccggtatcgagctgtctatccgaattgccagataagtaaggccatatctgattatatgatgtaccttctttctctatatcccgcaatacttcccagagggattggtcacataaggctccgtgaatcctgcattgaagcgatgaacttcaccctcgacaatatcaaattcaaggaagctgtcagagggttgtttgaggtggacattagatctcggtcattcttaatccagatgggaagttcaaggaagtccgcattctttgaagggtgcgaaatagcccggcatttgcaggatttggtatctactttccaatgggataacgaagataaatagaaactgatagcggatttgtggctggacatgctgacttatgccgcggctcaatgttcgtggaaagagcatgcgaggcgactccagcatggtgatgaattcttaacccacgttgcacttctaatggcacatc

SEQ ID NO: 6924 - DNA, 535 bp, Gossypium hirsutum
  misc_feature (527)..(527): n is a, c, g, or t
tctactatgtttaaatttaattaaaaacaatattttaaataaaagtcaatttttttattaaatcaaatgataaatcatcgtgttaagcataaattattttaggttaaattatggttacaatccttctattatgtttaaattgaaggtttgatatctatacttcaatttgacatgatttggtttcattatttttataatatcattaattagtcaaaataatttacactcttaattattttttactaaaatgctaatatcaattttttttttaaatatccattatacttgtgttagaaaaatgtttttagtagtaataattaaagaatgttaactattttggttaattaatgtaattgtaaaataggtaatgaatttatatcaaataaactctaccgactaaattactaaatgtgagcataatagaaagaccaaaattaaaatttaatatattacgatgattaaaagaataaaataaaggaactagacaattcccatggagaaaagcccttggggcattcctttcaagnaaaggtag

SEQ ID NO: 6925 - DNA, 632 bp, Gossypium hirsutum
aaaaggaaaaaaatactggtagttccatcctttttctaattctaaatagagggatagtgttttctaagcaatgcatttctcttttgtaattttttttatataagtgatagtagtaagggttgtcaagggagaactaagtataatttaaagtctcaaatacaaatcatgattaagtatataaatctatacacttattaatatataaaattatttattttcatttttaagaaattatagaatttcatgtttgattcattgacaccctagaaatgtatatcaaatgctcgtatatataagcagcttatgtatatttgaatattctactgcaatggacgttcttgtttggatttattaaagtttaattatgtagagattgttaattattagtagtagatactgttttaaaaaacgaacgtggtattttgggatagaaactttaaagccacggtaaagcaaagtagaagggaagaagtggagcagcagctttgcttgcgtgaagcaaacataaatacatatatgcggtgagtggctggcagtctcaactcaactatcaatttgtcattccaaccctaccacacgtgcaaaaacccacgtgggacaaacatcctttctcatttcaatcattcatatcg

SEQ ID NO: 6926 - DNA, 509 bp, Gossypium hirsutum
  misc_feature (457)..(457): n is a, c, g, or t
  misc_feature (463)..(468): n is a, c, g, or t
  misc_feature (470)..(472): n is a, c, g, or t
tataatgtagaaacaacatcctgtagcaaaatagaggtgcgataataaagatggaaaatcagaaatactaacggatactagcgcaagcttccactacatgacagcagccaaatccagtaaatggcaagattgccttattttaagcagtccagaatattgtaacaactcttcttatgaagaatgaagggcccatacagaaaacatatctccttttgtttggttttctctcatttatatcctcaacccaacaataggttattcagatttattttgtccttttcattctactgtgttataaatccagttggttcatatccaagatggcacttaatccatcgggtttcattgtgcattgtgaagaggaagaggttcatatcctgatcaatctccactaagttgctttatactcaactagctcccttgatcagatttttcttctttctttctccattttgtntactannnnnnannntcgttttttttttttttttttttttttgggggggggg

SEQ ID NO: 6927 - DNA, 712 bp, Gossypium hirsutum
  misc_feature (614)..(629): n is a, c, g, or t
  misc_feature (632)..(634): n is a, c, g, or t
  misc_feature (639)..(644): n is a, c, g, or t
  misc_feature (646)..(653): n is a, c, g, or t
  misc_feature (655)..(670): n is a, c, g, or t
  misc_feature (672)..(676): n is a, c, g, or t
  misc_feature (678)..(683): n is a, c, g, or t
  misc_feature (685)..(685): n is a, c, g, or t
  misc_feature (687)..(692): n is a, c, g, or t
  misc_feature (694)..(701): n is a, c, g, or t
  misc_feature (703)..(703): n is a, c, g, or t
tggcgtaaggctgttccctatgcttttttgattgctttgaagtatgaaccccaggtattattatatcttatatccggtattcagactgtcaaattacttgaaacttaacgtcaaacatttgttggtacttggaaaaataattcttccttgatttccatccacctgccaccagaacgaatttcagggacaaccagctcttaaatagccttgactctgataattgtcattgtgtgggatttagtctcagtttgtttgtgtgatattgatacaatgatgtcttgaataagtttgtttgaatgtgctgtagaaatttttggctgtagctattgacttaatttaccaacgcttgttctttagttttcaatttgctttgactatgattgtggaagctaatatgattcccttttctttttcaggttcaggacttgcactcaataactcctgctcacttcttagaagtaagtggtgctgtaatacatcccctgtcttaccagcaggtaggttgcaaattattcttggcacttggaatcctccgcctctttttagctctggttttctgtacattgttccctgaatatgatttcttaactggtttttatcttatgctgtttgannnnnnnnnnnnnnnnaannnaaccnnnnnngnnnnnnnnannnnnnnnnnnnnnnngnnnnntnnnnnncngnnnnnngnnnnnnnnangggggtgtt

SEQ ID NO: 6928 - DNA, 622 bp, Gossypium hirsutum
ctcgtttacacccatgttatcaatactaagcaacgtcacccttttcatgtcaccttcaatatttgactttctaccatcatcaccccataattcaacagattctctcacatccgacaaaacttgcctgtcaatagtaatattttccaattacccgccgttagcattaattgtctctagccatcttctctcatgagcacctgttcaacatttatttttccaattgcttgaaattttctgtcgtaactttagatttgttgttagtattcccaatgaaattgtcgacttcatgccccgaaccctccagctcatcgtcgtcaacctttgttcgcgacccttcatcttcacttgaagcattctgcggaaaatcattagccatgtttgttttggatggatcttcatttatatcatggcttctcgactcgacatcatcacctcattcctacagcaataaaatctatcaagaattactgcttgatcaatgtaatggcctaaattcaaggttatcggaacagtggtttcgggatcacaaatccgatgaggaaaattttatttttcttatatttttatggttaataatttcaaaaaaatgattttgtaaaaatttcgttcgaaaattttgacg

SEQ ID NO: 6929 - DNA, 622 bp, Gossypium hirsutum
ggctctttattgtatttatttttttgatcttaaattgtagtattgttataatatttaatattattgtctttaccgtttttacactaatcacaaataaacataccacccactcaaaaggaccctcaatctaaattagtaaaggagatataaaaatgttgtagtagaatatgataatagcgctgttgtccaacatgatggtagggaagaggaggcttccaatttatccacccatgagtttagggaataagctcttaaaagattgtatgggattacttatatgttttagagtgttgtgagctttttgttaaaaagatgttttcggtcattcttgacatcgatattgatatcaagtaaattagtctctctaaaaaaatcagaataatttaatccttatcaattttaaaagtgaacaaaggacaattattcattgatttaatgttttccatcaattgtatctaattttgattggtataataacaaacgtatctctcaaagtttacatattttgtcaaattagtattgagttaataaatttagcccgcaaaatttgtgtaaacgtcgatacaaaatttgttgaatcttttagaatcaagaccaaattgacaatataataaacatcgag

SEQ ID NO: 6930 - DNA, 668 bp, Gossypium hirsutum
acacgaaactcgtgtacgtgtccatttatttgtagccaactacagccaggggtcttctttaaacctttctctttaagaagtctcctcattttagcaaatttatcccactttccagcagccgcatatatgttcgagagtaaaacataatttccagcattttctggttccattgttaatagtttctcagcagcagactccgcaaatttggtttgggaatgcaacttacaggcactcaacaagggcccccacactcgagtatctggcttgaatggcatttctttaacaacttctctagcttcattgatatgtccagctcgccctagcaaatccaccatgcaggcatagtgttcttggctgggttggcaaccatagatttctctcatctccttaaaaactgctcgaccttctttaacaaggcctgaattgacacaagcagtcaacaagccaagaaaagtaacttgatccaatttcagattcaacggcttcatctggttatacaactcaaaacattctgaccagttcccatgcttggcatatgcactgatcattgagttccaagttatgacatccttaccatcaattttttcttcatcaaaaagctttctagcaaaaactatgcatccacattttgcgtaactgataagaagtgcagaattaacagatgacag

SEQ ID NO: 6931 - DNA, 638 bp, Gossypium hirsutum
  misc_feature (56)..(60): n is a, c, g, or t
tgattactgatgatctatctcatgtacagatgtttttgtttggaaccaaggccttnnnnngtttgtggatcgtctgattgagtggccgcagtattgcaaccatattttacagatatctcacctgcgtgccactcattcagagcttgttgctttcattgaacgagctcttgtcaggatttcatcaggtcacttggagtcagatgggagcaacaatctttctgttcatcaccaggcttcctctcaggtgaccccagtaaacggggaggtaaatcgtggtgttcttttgttgttgcatatgtagaatttaaatctacaaataatggtgtcacaaaataaatattagcttggcgataatatataattaaatattagctcatttttctggctataaatgatatctgatttggtttgcatctaagagttcagcaggatataatatggtgatacaataatattaagattctgtcattcaagaatttagctgttaaatcagttttttctttttctttgtagcctgcattgaagtttattctttttagatccatgcataaataagtattaaaaataaagaaagagatgcttttgagttggtgcagcaaactcaagagaagtttataatgtatgatgtgtttggctgg

SEQ ID NO: 6932 - DNA, 640 bp, Gossypium hirsutum
gatgtttgatgatcaataaattctgattctttctagccaaaaaagaaaaaaaatcaaagtaaattttaattctgaatcttgatattttgtgtcgataatcagtaatcccatttgcggagataaattagaatacaatgcaaaatttgaaggaaataaaagaataggatgataaattggaattttgttatgataatataacagattttcacggaggggatgaaatctgttaggtgggccgccccatcacccgttgggcatctaaacctcggttgtaataagaaaaggattacagggacagtctagacaattgactggcctcagaaacatgcgcattacgcaccaagcacacgataatacttcccaatacgttgcaattttggcgtttccagttccaagaagctcacaacaagacatagatttcccttttcccgcttcttttcctcatttgcagaaatttactcgaaaactgaccatttccccccctctcaccctacgagtattactctgccagtccacttttctcttcgcttctttcaactgtcgttcaaagtcgccgagcaaaatcgaaaatccagcgcactttaattatccgctgaaaagtgagccgtcatctctctcaatttcaattattctcggatcg

SEQ ID NO: 6933 - DNA, 615 bp, Gossypium hirsutum
aaattaagagttaatttgagaaccttgagatactcatctacatcagccttcatctgttttgccttcagagcagcatcaacctcagaaaggatgcgagggggttctctgatttccggaagcaaatcaatctgcacacaatgatttcagaattactttcttgattaaactaaacaatatgaagaggaagggagggagggagagggagagagcatgatgaactaacacctttaagttgggagtagatggatctggtaacctcatattgcgtggaaaagcactaaggataatatttcgcatctgtatgcagctcggaggaatcacatcacagaaggtaaaatgacaatcacacaggaactcagggaagtcatgaagtagaaccagcagcaccctgagtgtgcctttatacagaaaatgaacctaaaatggatataatacaagagagaatcagtaggaccagcataatttgtttacaatgaaaacaaataaccaaaaaagtctttagaaagaggcaaaccggcactccgagctcagcattcctcaaaaacggctccaggaattgaagcaagtctaccagcaatcgttggatatagggccaacccttctgaccattccaag

SEQ ID NO: 6934 - DNA, 631 bp, Gossypium hirsutum
gtacggatatgtgattgaaatactgaaagcagtaatatacgaggttcttacatgtgaacttcagtgttgtctctcttccttgtcattgcccatgtcaatgatgcgctatttgcatctaaaccaggctgtgatatttctaaaccatgtcttcggacaagttttatgtatctgagaaccaaagaagtttaatgttagcttacttgaaacattttcttatccaaccaagacagtgagattaagaacttactcctccgcatcaaaattctcaaccccaagatcctcatcccatataaaaatgtagtcatagggcacagcaatgtcggggtgcaaaaaccgctttgcataccaccttgattcaacataacgaggacttagcaaaatcaaataaaacctactagattgatgtcggtttgtataacaaaaacgagctaagatgctaaccatttagtctgcttttgaacgctcacgtgaatagctcgcttcgaccactcaaattcatcccattcagtggtcaggccatcgtaatgaaacaacataatagtgaagttctcagaaaactgtaaaataaaggttttagataagagagtttggacattcaaggatagattgaggcaagaatagatatatgtca

SEQ ID NO: 6935 - DNA, 664 bp, Gossypium hirsutum
gatagtagaaagaattcagagattgaaaggaagttacaagagttagagtctcgtgaaaatgaacttcgtagggagcgacagtcttttatttcagagtatgcttcaacctacctttcatttatctgctagtgggctagtgggacttttctgtgtttagttctcatccatgctactcagactagggtatgagtgttaaatatgggtatgcttaactttttaaaagtgtttccatgtattttggagggtccctggtgggtcatatcccaatacccatgtccaaatgtgttggtgatgggtgttggaacacaagcatgtcaaaaaaaatgaagtgacatagcaacataggtttttggtttttgtttgtttgtttgatagttggtgggtagcggttccttctttttttgtttttttttcttttttcttgtgcgtgtgtgtgttaactttctcaatgaatatatacccctgtagaattcgttgtttatttgttaatccaagagttataattctttttacatttaaagttcattgatattttgttttcctttctttcaggcgagaagcacatgagactactttgtccaaacaaagggaagacctgcgagaatgggaaaagaaattgcaagatgcggaggagaggctggctaaaggccaaacatatgtctac

SEQ ID NO: 6936 - DNA, 571 bp, Gossypium hirsutum
ttgggagagttgtagaggctacagaagtttgtatctagtaaaacccaattgtagtttagctttccaaaacaatcagcagatttcatgattccccacgtaaatcctggcaaatgtgcaatggctaattggctatggttattgttacatcaaatgaaaggaaagtgactcgtagaaagcatcaaaaggaaggaaatcgcttatcgtagttatataagtaaatactcttatgaatttagaagaaaaaagtttgtcacgatgcagaagtaagaactaaaaacagaaggaacttcaattttaagaacttataaccgaaccaaagctagtaagcagccaatatacaaatgcagtcatccgattcgaagggatgctctcttttagatgcatgaaaactagtacagcattatttgttcatatatccaaacattacttgtccacaatgagaagtcatgaaacatttatttaacaacttttaaacatttctcctattgtggacaacttaaaaccccatctacaaccaagatagaattaacatcttatttatagacttaattttattatttttaaaatttat

SEQ ID NO: 6937 - DNA, 639 bp, Gossypium hirsutum
  misc_feature (63)..(65): n is a, c, g, or t
  misc_feature (68)..(68): n is a, c, g, or t
tttatgtgatatcataaccattggaatggacaatgaatgtcgtagaacctactttatgagttnnnttnatagtttcctaatcaaactactttccccaaagtttttccattcagtttctgcaatgaaagtggattaacgtaaagcaaatcagtgaaacagtagcaattttacctcaactggacaagtcccaacatcaataacaactgcacccggcttcagccaactgctacgaatcatattaggtaccccagctgctgagactactatgtcagcttcgcatgtgatatgttcgggattcttcgtgcaagcatgtactgttgtgacggttgcatggtgcctctgcccaacgatttcagtaaaataagcttacttagtaaaataacaagtggatacagttgaacagaaccagttcttaaacctatgagaattataggaaagtaacttagaaagaattaaaatacaaatattctcaataaaattttggaatataaagatttacacgtatcatcaacatggacactggtgaaatgtgtgaatatagaaaataaagatttattttatcttctcattggtcaaaactatttttatttactgctcaagaagtggatactacgtatctagttaatacatagatcgatc

SEQ ID NO: 6938 - DNA, 654 bp, Gossypium hirsutum
aaagagcacaatttatgcaacaagttcacgtgtagccttggctaaaatgaatgatctaagtgctattttgtgtccaatgcatgtcttagagatgaagagacattgtacttgctgttagtcacactgatatttaaattgtcacaacaaccttttaatttgccatcatcaaatacaaaagagattgggcactttgggcccaatacacaagtttgttgtatactgaatcaacaatatcccaacacaaagtttcagattttaccattgacttcaaatatctggactgttcaagctgatggagaaaagcatatttgaaaacaaaaacggacataaataccgcaaaaatgcttttagatgtctcaaggaaaatacagtgaaaagaatacacgtttatggcaccataccttcaatcgagttacagcaacagaaattgcccgtccaggagcttgaagagctctactgtgaacctatgaatcgcagacaattggatttagcaaaacaatgatgattagacattgagatatataggaggtgttctatctagccacctgtatataaagtagggaaacaactttcggcagaagagaaactgggtcagtttcagcagatacttgagaagtcaaatcctgaaaacaacaaacaatgacatcacatgag

SEQ ID NO: 6939 - DNA, 608 bp, Gossypium hirsutum
ctgctccttttttgctttgcgcgctctcgtcttctgccctacatgggtttaagtacgggggtttgcagttttcacgaaaatacccttgttctaagtttgacttgtccaaaagtgcctgatattattcaaactcaaattgttccgtttaatattaaaaaaagaaagagtaagtttgccctttaattttaatttgttgacttaaattttatttttcacctggatattacttaaacttatattttatcatttaggttgatatttttaaactaacacggttaatttatgtcaatatggcactaataactaatttggtgatgacacgtgatagcttttaatatgtcacaaagtaggtatattaaaatatctttgaaaatatataaattaataaaaaatatttttttcacataaaaatgaacttgaaaaaatgggtgtatagattcatttgaatctagacacctattttcccaacttcattccggatgtattttttaataagtttatatattttaaaaaaattatgaaagagttttaagttattgttatctgtactattaataaaatatttgattaaattgatatcacgtgtcaattgcgcaccaactcattaa

SEQ ID NO: 6940 - DNA, 653 bp, Gossypium hirsutum
  misc_feature (59)..(60): n is a, c, g, or t
ggctgaagcggccgcgggttcaggtgttggagtaggtgcttggggtgctggtcttgacnngtatgctaaacgaaaccatggacgagttggttggttcgacataattgggagagtttcgaaaagattttaagatcaaagcctgcaaaactataagaactagaaatgatgaaagaatggagacatacacaaatggctaccacaaatgtgcttatatagtaatccaggttcaactataaacaggaatttggaggaaaggaaaaaataaaaataaaaaaaggaaaatatatcacgaaaaaatgtcccgagccgtaaacccataccatagagacaaagaaaggcatcggacaatagcaactaatagtatacataacagctgagctgacaaaagttaatatcttacggtaggtatcaaatggagtagtttacaagattttctttttctcaaggcagaatctattgcctgctgggggattcatccacttcaaaaccttcatttctgcagactcctctgccgactccccgttccaatcatatctacccctttaatctcaatgttaacaacttgcagcaagaattttttttgcagtcattttaaccacggcccatagaaaatgaattttctttttaaaagatgtcgtttcaagtttggaatc

SEQ ID NO: 6941 - DNA, 616 bp, Gossypium hirsutum
gctcttgcaggcatgagtttaggacaattattacttacaaccataggttgagtaggtatatctgccttccggttaagctgttcttgaattatccgattgtcttcagctttaacctggaaacataattaataatagactcataagagaagaccagacgaagcaaagggacaaatggaaaaaggttcaggaatgttataaacaattctttcttcattcgactcctgtagttcaacttggtcactgaagcaagttctatagattcctatactataaaatgtaggaacttgtgagctgagtccacagttaggttactaaaacattgcataaccaaatttaatttgattaaggctttgtttaacaatgcttcttaaaagtgtttttttctctaaagtattttttgttgggagaagttgaaattttcagcttccccaaaaagtgttcttgggccaatttttgatttgagaaaaacactttttttctttcaaaaaatagcctgattaagaataatcgattttgtctcaaaagtgtttttctatcctaaaattgcttcttaaaagtaatactaaacatacactcaatcaaattcgcttattatacaatgcagagactcatgtga

SEQ ID NO: 6942 - DNA, 585 bp, Gossypium hirsutum
agttgttgagcatgctctgttaacttttttcacttaagatataattaaattgtgcattgttaaatatatactaaattgacatgaagtatttatgtcaaaaagttggaaaatgaaaagacattttaataatttcaacacccatttattagatgacagttatgagggttttttggaccttagacctagcctctggtaatagacctgaccctctaatcaagagccaatggttggagcttatgaggaataaatgctgtttcccgtttcaagtattagatttttttttagatgagtgctttttatttacttagctgcttaggtaacatgagaacccaatatggccattggctttattagtttactagtgaggtctgatacagtggcaggagagattggatgactctatacaccattcaacatttttgaaattgctgaaagaaattctacacattactaacattatagaccaatatcaaactacttaaaaattggtatgccctccctcaaccccctcgctgccctatattcaccgagcctgaaaagaaaaagaagagaagttaattgatcatgccttgtaaaagtgtctta

SEQ ID NO: 6943 - DNA, 507 bp, Gossypium hirsutum
tcgcaatcaaaagaagcagcatctgtctgagtgatggaaaaagaattcttgaactggattagcgaagagcaggagtgagatcctgaagaagaaaaagaagcataaagatggggaaagaagactaataggcagagaaagagataggaggccatgttatgtttgtagaggaagatgaaggataggaatggtatttataggcaacaaataataccacaacattggtgttacagtctttcttttcttttacgctgaaaagctatggatattagattttcaaaatttttgtatttttcaccagcatcaacaaccacttaagtcttcttttttccatatatttttcattcttaaaactgaattcttttcttttagcaaaatcttgtatttcatttgaacatgtaaagaatgtgtgtgtctattcacttgcctgtcaaccaaagctaattaatgtggatattcttttccacacaaaagagcaaaattgtgctctattcagctacgtttgaggag

SEQ ID NO: 6944 - DNA, 572 bp, Gossypium hirsutum
  misc_feature (565)..(566): n is a, c, g, or t
ttctcattcttcactactcagaggcgattctaggggggttggcatgggccccggcccccctaaaataaaaaattatcatttaggccttctattttttttaaaaaattttaaattaataaaggtaaaattgtactttggcccccctaaaattataaaaattcgatttaatcatttaaaaattataaagatatagactataaaaaaattaaaatttcattcggcccctctaaaaaattattctggctttgcccctgtgtcgctactccttgtgatgttacaacataccctcgtctaaaaacaaaaatgaaaaaccaaacaagaatatgatagaacttggctgattatctaaatagttaacctaatttttaaattttaaaaatgacttaattgattatttttaaattgttactaagttctttttaactttttagtcttattagtttaaaaaaaaaattaatttactccccataaaaaaataggggtcaaattgaataaatatataaatattaaaaattaaatttattagtatacattatatataaatataaaacaaacctttaatggnnaaattt

SEQ ID NO: 6945 - DNA, 643 bp, Gossypium hirsutum
cgacacgacgcattcggggttagggttaaaggaaggagcccaaacggttcggaatacggttcgagtttggatctctctttcccttaatatactctccctatatgcttcttcgtcccagtttgtaacgtccccgcacattctcctttaatttgaatctctatcggtttcggatcgtgtatggagctccgagcagctctgccttcggttcacctcactgaaaactcccagagctcgaaggatagcttttaaacggaagtagcgttgatgtcgtagcctcaaaaatggcccaatattattatgggccttttgggtttaaaacaaaaggaaacgatgccgtttatttggttaacaaagaaaatacactgttttcttcggtgtcagagcaaaaacattcaccaagatcaaagagtttcggcatcttcaaagccgctgccttggagaaaaccctaaacattccctctttgcctaaataaatccgagaaagaaaattaatatttatattacttgaagctgtggagatctgaattttaaaatttcttatctaaaaatccctgcttccccagattcaaattctgctaaagttttgccttttgaaatcgagtaagttatgcatttctcataatcttttcatcttcatcttgca

SEQ ID NO: 6946 - DNA, 668 bp, Gossypium hirsutum
gggagctacttcatcccatcattcaaaattcttcaaaaaatgaagaaatataagtatagacattcaaatatctaacaatgagataacttttataaccatgccatacggatatgcgatctaaagccattagaagtcatcgtggttaagtgattaagtacaagataacattaaaatgaaagcagacaattttgtcacctaattgagccagcctatttacccatccaggaataggctttccagttagctgcatgcacacttcattggtgaaatggttgcaattcttagcaattaaatggtacgtgtccccatggtatttctgggaaagctgctccataagtgaccgaaattctgaacgagacaagttagtgctgcccaataatattgatcttctgaagatgaagccgggacaacttcttggttccacttcaaacaccccacttgtagggtactcatgcgctccaaatccgtactccaaaccatgtactgattaaattagtgcagaataggttaaaaccacagaaattagaaaataagagggagaaaatcaaaggttaacattaacttcgaataaatgacaaatcatcataagctggtaaccctcaacaaatttattaaacagtgatagcaaaatgaaattaattaatgccatcaaggtaaggatttctatg

SEQ ID NO: 6947 - DNA, 642 bp, Gossypium hirsutum
cgctcatatgcggcgttactaaaagaagctgccataatcacaaccgggcctgaacaagtgagtgtcccaacaacactaccgcccacaacttggccttgtccgccagccaaatatatggttatccccgtagcagccggcggtgcaggtggaggcaaaaatgatcccgccaatgacagtatctcaaatcggccatgtaagttgacaactgcaccagccgaggctggttgcctaagggtcacattcgtgacggtcccagtcccactcattatgcaaactcccctctgacgtcttctagcaaaggttgcgacgctttcaacaatgtcacatccatcccctatctccatgacatgcgtgcgtaaagcgttggcactgtctcggttgatgatgataggtggcttaggtttgttcttggatccagcgggcctgcctcgtggtcttcgattgaactctccttcaccatagccttgaaggctaagctctttgccttcgttattggcgctgctgttgttgttgttgttattgttgatatcatcccgatcccttttcttaaccccgctgctgcttccactttgctcatcttcagagttttggtgatgatggtactgattttcttgctgttgaagctgaggatggtggtgaaga

SEQ ID NO: 6948 - DNA, 631 bp, Gossypium hirsutum
tatctctgatttggattcttaaggattatgtcggttttttagaaataacctaaataaattaattatttataaaaatgattactaataaaattatgtacgaaaatcacatgttttgaacttttgtgcccccattgtcatgtgagcaccacccttcatgcctgattttaaaaaaggaaatttgggtgtcacagttataatgggtaacaccgaaatataaaatgtttaaataactgatgaagaagtaattaccttttctatttggatgaaaaaaacagcggcacttaattaaatgcttttgaacttttggtttatttgtatgttaaaattgttccgtaaatagtacttaaaaatataaaataacaaaaatgattttttttatttttttaaaaataataaatttataaaatatataaaatttttatttaaattacttaaatatattcataaaaaaaattcgtaaagttttaaaaaagccgattcgaagttaaaaagttgtttttaaggagtcaacaatgaattataaattttaagggatcaaagtacaattttatcattatattaacttataactttacaaattttgaagagattaaatgggtatttaccattttggggtcaagactgttacttt

SEQ ID NO: 6949 - DNA, 640 bp, Gossypium hirsutum
tcaatctttccctttgatgtctgctctttgtaattgttcatcttcatggtcagttttagcttgttagttgcttttctttctggggttttaactatatctattatttccttttccttttctgatttgacttggggttatgctaaatttcgtactcaaatcaaaaacatcatttagtaaaaaaaaaccgtaagtacttaaccaggagaagagaaaaactcaaatattaaattgaacgttgaagtcaaatttaagcatttgtatgagaataaagaaaaatttaaatatcaatttaaaaaaattcagatatcaaatttaacatttaatctaaatttaagtaccaaataatatatttaatcccgcgattggtttgataatagtatttgatgtagccatgcatcagtacatatacttataatttcgcggtttttaaaaaggggtatgttgtagaccacatatagcattcgccatatttcttccccgtaattgagaatgtaggacctcaaatctgtaataatgaattatggtcattgcttttttccttttgtaattttggttttcatgctttcatgatcgtatttgagagttgacccctctgttgttttttcatgtttgcttacaattcaaggaaaccaagattctt

SEQ ID NO: 6950 - DNA, 648 bp, Gossypium hirsutum
tagggttatatcgagctaacaaagagacagatttaacatacataattagggttcaaataatttggaattaaattttaattttttgtctactaattactacattatttatcattgagttattccactaaagtactaggattgaactctcatttattatgtatcattacgatagcaacttaataagtgctggttcaatgatcttgtaataagaatgttactttcataggatatcattaatttatttgggttaaattcgttcttccaatatgatcctattttatattatggtaatcattacatcttccttcgtgaaaaagccaattactaacaaaatgtaacacccctataccatgttcgacctaaggaacctgatataggaatattacatttggtgccaaagtgattttggttaatcactaaatatattttgaacataaaaaatatatataataaatttaaataatttacattttagcccctattactacttggaacatactcgatcttcctaagtacatgtcattctattcaaaattttaaaacataccctcttgatacttggagatgtgatgagatgaatgctcgaaatctcaaatacaactcttcaaaattactgtacctaatctgcgcacggaaacaaaccgtacg

SEQ ID NO: 6951 - DNA, 642 bp, Gossypium hirsutum
caacaagctttccaaacaactcattaacaattccaacaagtaaacttaaaaacagcttatacccatcaatgacaatagcatgtaagtgcgtaatatgaattttggcgaaatagggttcgattaaaacaccatagagaatagcttgattaagtagaatgtcttcttggggatttgggatagttaacgaaaagggggtcttaatttcgattgaagaagctcaaaagcttgccttagagagagttctagttgattgtgaggttcataggatgagactctaatcaattgcgaagccattaagagtagttttcattaagacaaagcaaaaacttaataccttgttagcgaactacttcactcgatttagcaccgatttaacatctgagtgtaggatcgttagccctttcctctcaagccgaagtcagattttctcgagaaaactgagaaatttggatttcaagcttcatttttgttgagaggaaattgaaactattgaccctaatttcaaccaaagcttgaggatgaatttgtggagcctaagaggagtgagaatcaatggaatccgccggtaggtaaaaatttggtggcttttaatttgaaattgaatctcggttcaggcttgaatagggttggtaaggatgcttc

SEQ ID NO: 6952 - DNA, 663 bp, Gossypium hirsutum
agcagcatcatatacatgtcaaccttgtctgctatttgcaagaaagaatcaattctctgcttcttggtgatggtatgatttccattcaattctgtggtctaatagcatgggttgaaagagctgtgattttgctttaccacttcgtttttcatcattctaaactatttcctccataactaaatccacagtttcgttttccttgtcggtatcttcttcatcgattagatcctcaacttcattttcttctccttcggctttctctccatctatctcaccttcaacatctccggttctgttgttcaccgcagaccacccttgtacttgaggatcaagggccttcctcccaagtttaattgctccatcttcattcatcccattttggacaattccaatgcccttcttttcgtaagtgtttctaaattggttcagcaaccagatgcaaagggcaagcaaggcacacatatgcacaaaatgcttgaccttgaaccctttgtacctctggtttctagtagctgattgctttatcatgctgaaccctccaatatcctcccgatctgaaacaaaacagaaggcaatcgagtctaagtaagtaatatagagttgtaactagaatgcaagatattggaaccccattgaactaagaaccaacagctccaagaattt

SEQ ID NO: 6953 - DNA, 652 bp, Gossypium hirsutum
cttgctcacttagtatttaaacctaccagagcatagaaaataaaactcaagacaaccaaaaatctaaattgggttcaactgtgaataccgtgcttgactctacaaccatatgaagataagtcaccctcatttccatcctttctatattttatttctctgtcaatttataaatttatattatctgtgccccgtggcaatgcattaaatccgttaaaaaaactaaacaccttaaatatgtctacctctgaaatttcccagaaaagccacaatcattttaccagtacctgattaattttccggaacattcattgtaatagaagcagttctaattgatcaattgcataagctgcaatgcatgcctttagaaagagcaacaaacataaacgaaacggggcaatactgagcaaagagaaccatctttacaatatcttgtgattcacaagggccttggaataattgaaagtttcttttgaataccacaaatgaccaattaataagctttgccatcattattcaaccatcattccactcataaacacgtctagccaaaagatcccacttcccaaatacagcaaacgtttcaactatagttactctaatcaggcacaccaagttaagccattgaaatatataaatgcatatactcctccaa

SEQ ID NO: 6954 - DNA, 529 bp, Gossypium hirsutum
  misc_feature (506)..(513): n is a, c, g, or t
  misc_feature (515)..(516): n is a, c, g, or t
ctccaaatgcaaaagcacttcaacctgcaagtataggacacatgaggatacggatatgaaattaatggctcttctatggagttaaagatcacaaattcagaaatgttactggtttggaagttcaaggaactccattacagccaagtacatatccaatctcttaaaacagtggcataagggaaaaaattaacatgttgtgaagcaagatgtatagaacacaatatttggcaccaatggcagacaataatgggagcctagctgctgccgctgccacccccccaaaaaaataaagattttctaaatcccctagcatggatatgttttcatattaaatacatttaaatggaccctccaacattattatttaagttttatcttaacgataagaaaaaaaattgacttcctagtttctcacaataacttctcctcttaaatatttcaatcttttaaatatctttgtgattgttttcaatggtccagcttaatcatttgagttaccacttacnnnnnnnnannaaaattttttgac

SEQ ID NO: 6955 - DNA, 586 bp, Gossypium hirsutum
tagagaagcacaaataacctaaacccagaaaaagcaatcatttcgtgcaagaacaaaaaaccctaaagaaataaaaacacaaaaccaatttcggaactccaaactctaaattcttaaaagagaaccagtgaaaattaatgtatacaataaatcttaatctcaacatttaatcttttcatcatgtctttatatttgactattttaatctcattcgaataagaattgtgatgaattacactttaataataattaatgaattattaagtccagatttatgtctccatttcaatagtatcacaatgttgaaattacaatataatctaattaatatatataaatatattttttccaaataagagattttggatttagattcttttcatttctcacagtctcattaatcattcttttcctcacatctttatactacaagttctacaattaaaaagagacaaatcaatcccaccatattttctaatatccttctagattcgattcttttaacagattattaaattaaataccattagttttgcctacatatctctaaatatagcatgcttcaaaggttccaagcttcaatcta

SEQ ID NO: 6956 - DNA, 648 bp, Gossypium hirsutum
tattttaggcggaatgttttaactaaaaatatttatgtatgagaaaatctgaaggcgctgtaccttgtcaaagttgacagaaaatgtctcattgggatggaaaacaaaggcttccttttccaataaccagttaaattgtaatgcttgaccttttctgaaattattcagtaaatcaagaatggtcagtaacaataattaaaaatattatgccagtgaacagttaatggttcgcttacccatgagcttcctctaagccaaaccgaactgagcgaaagcatcctgcaaggaatgaaacatacatggacttttccagactagtcggaagtaaatgctgctcaaagatgtcaaaacaaacagaaagagccttagtttttcatagttctttttaatatcatttgtcataaatgcaaaaagtgttgacataaacaggcaactaatgcacaactttttaactaattcaacatgcaatatagattacttaaaccgttatctcttccaggttcctttatgatagtacaaggttcaaggtagaagttgattccaaatgtcccttactgggcatttgagactaaagcttgattgagaacaaacgttccaaatagataatgaatagcactacattactaaaaattggatgcaaaagattat

SEQ ID NO: 6957 - DNA, 610 bp, Gossypium hirsutum
tagcctgcatccctgacgtaagggcatatattaccaccagggcagtaaatagagctcctctgttgtatggataaaagacaccaaccagtgcaagcataaaaatgaagaccgttctgataggcatacaaagtttcaaagaaattacagagggacatcaactattgacatagatttaggaatgcattaaaagtcacttcacaattctgaaagaaacaaaaatacaaaacacgtggaatccttacaaagtgaacagctgtgttccagatccgagagcagcagcaaagagagatttgtactttgggaaacggaatacgtctccatgaatatacttccatccagtctcttcttgatcatcagctgcttcttcatcttgaccgtacctgttataacaaatcaaatatttatagcaacaaaatgaaagaaataaaagtaagagaattatatccaaataaggaaagatataacagatctcacttaatgaaatcattcttcaagacccgcatgagaattgttgcaaggaaaccagtcaaaaggagaaccgtcacacaagagttgataattgaaaaccaatgaatctctaaatgatgcggcaaagaagaagacatggaat

SEQ ID NO: 6958 - DNA, 179 bp, Gossypium hirsutum
tctacccctcattggaacaacctaagacattcaataattataaaattgcctttaacattgatcaaacttgaaaaagtgtgtctatttattgcaaataaaaaaaaaggagagaagaaaacagataaaaaacctgacaatccaacagatccaatgcaatgaagaaatatgatatttataac

SEQ ID NO: 6959 - DNA, 690 bp, Gossypium hirsutum
ttccgaatccttttccccattactcacattttcagatattggtgttttaggagcttctttgataaaaaaccaacttaaaactttgctttcaaactatctctttactacattttaaaacaagtcaatgagggtttcatagcataaacacgataaaagtatcatgaaagctcttatattaaaagttaaattgtattttacccctctattaaaaaaatgaacaaattagtccttatatgttagatcaaagagtaaattggtccttttgctaaaaaaagtatcaatttctactgttaaaaattaatccttgtacgttggcatgaggtacacgtggcacgacatatgtcattgtttggttattctatcagccatgtcaacttttaatagtagaaatgaattaaattttaatagaaggggtcatgttactttttgatctaatatataaacaccaattgaaccactttttaatagaaggggcaaaatataatatggcatctaaccatagtatttttaccacataaaaacaatattataatttagatttttaaaattaaaaaaattttgttttaaagttggatgattaaggataaaaacaacctttttaagaactttgttttcaaagttcatataaataattttgtttgatgttaggagttttgttctttgaatatgaaagacgttgatttcaggctc

SEQ ID NO: 6960 - DNA, 556 bp, Gossypium hirsutum
  misc_feature (448)..(449): n is a, c, g, or t
  misc_feature (521)..(524): n is a, c, g, or t
  misc_feature (526)..(526): n is a, c, g, or t
atacaggttatcagataaagcgctcaaaatgcagtggtgacacaggtagtcatcattcatccactttttttcagcaactttggcttgagccagttcttcactggttgcttcagaactaatattgagactagggcatggatcagtaagcacatacgcaatctgcaattgctttaagaaaagttccatgtgttctgcccagcaatggtaattctttccatcgaaacgagtggtctcaattggggaaaattcatgagaaaaagcagtccctgagttagacacatctctgttatattgatgatcaagtttgtctctgcatatatttattcaaaggactgaagtcagtacatcattactcaaatgagtctcacgctaaacaatatttgagagatagataaatctgcctgcaagagcaaggaccctgcctgcctacacttacgcaactctaccnnaagcattactaaaaacttcttgtatatgattgacagtcctaggtaacaataaagaaactaccatattgctannnncnagactgacaatggattcccaccttaccttt

SEQ ID NO: 6961 - DNA, 675 bp, Gossypium hirsutum
agcggctccatctgtttgatcagtcagaaatgaaaacaaaggactattgaatgctcatgtcctgtttggatttgtatgatttttgagatttttgttgaatagaaacactctgatattctttcatggctactgcaatgttgaagtgcatataatgagctctagaatgtcatgcatagtcctggtgctgttaatttggtactgttaattttgaatgctttgaaatgtttgaaatggctttgttaatttggtactgttaatgctttgaaatgtttcaaatggtgctgttactacttcaactttgaatgctttgaaatgttgctgctttcacttgctcctttctttccaaacaatatataattttggtctcacgtggttgctgctttcacttgctgtctctcctccaccttccattgtccaactttcaagcaaatcgttggaattataggatcttttgaagattaacatgcaactgtcgaatatttatggttatatgtctaccttaaaagatgttttataaattgttttcattcattaaaaaaaccaggttatgcttatgattgcaaattgcatgtgagcacatacatattttttgtacttggatatcatatgttatattcctttgtccccaaaaccattaatgagtactatataatttaaaaagggcatcaaacttta

SEQ ID NO: 6962 - DNA, 623 bp, Gossypium hirsutum
atggtgggtcgtgagtttgagtcattgagagtgtcttttgctaagtaattttaaaatttgagttaaagtttaactctaagagtggggggatatctgttgcttgattatagggataagaggtgggtagttgtattggtttaaattttaagtttacatttgattacttgcaattggtggctgctcgtttggcttcttcactttcgtattttaggtaactttaatggatctttaatcgtttaatttttgggttatgaaatgctagtggtggtgttgttttatagtcgttaattatttagttctgcatttaggtgaaagtctccttcaacatcgtagttttgtatggttgtggtttgattaacggtaagactatggaagagttttagtgttggaagagtttgattcttgattgcctcgtgccttgttaccggtttgattcttgattgcctcgtgccttgttaccgttataatcgttttatttggtgtatttaggttatgggggtcttgtagttgcgttcccattgaaattgaaccaggtgtgtaacgagaaacttgaaaattagtgaattatgaaggccaaaattagggcccgtcaatgtcacacactgtgtgcaacacacgatcta

SEQ ID NO: 6963 - DNA, 898 bp, Gossypium hirsutum
  misc_feature (320)..(320): n is a, c, g, or t
  misc_feature (344)..(344): n is a, c, g, or t
  misc_feature (523)..(523): n is a, c, g, or t
  misc_feature (542)..(542): n is a, c, g, or t
  misc_feature (735)..(735): n is a, c, g, or t
  misc_feature (805)..(805): n is a, c, g, or t
  misc_feature (844)..(844): n is a, c, g, or t
  misc_feature (850)..(851): n is a, c, g, or t
  misc_feature (856)..(856): n is a, c, g, or t
gggtgtgaaatggcatctgattgggcacaatgtaggtgagtatctagatttttctatttaatggactttatgtatttgggcattattgaggtctagttttggtttgttcagattttggtctttgtggtttgattgggtttaattctttgtagtgtggttgtgtaacgccttaaagatttaatttttgctatgatcaaattcatcatagttaaatatttacttcagtggttcagtggttaagggacttgggtgtgaatggtgggtcgtgagtttgagtcattgagagtgtcttttgctaagtaattttaaaatttgagttnaagtttaactctaagagtgggggnatatctgttgcttgattatagggataagaggtgggtagttgtattggtttaaattttaagtttacatttgattacttgcaattggtggctgctcgtttggcttcttcactttcgtattttaggtaactttaatggatctttaatcgtttaatttttgggttatgaaatgctagtggtgntgttgttttatagtcgttnattatttagttctgcatttaggtgaaagtctccttcaacatcgtagttttgtatggttgtggtttgattaacggtaagactatggaagagttttagtgttggaagagtttgattcttgattgcctcgtgccttgttaccggtttgattcttgattgcctcatgccttgttaccgttataatcgttttatttgntgtatttaggttatgggggtcttgtagttgcgttcccattgaaattgaaccaggtgtgtaacgagaaacntgaaaattagtgaattatgaaggccaaaattagggcccntcaatnncacanactgtgtgcaacacacgatctaggctatgtttggggagtgtg

SEQ ID NO: 6964 - DNA, 675 bp, Gossypium hirsutum
agacaccccttcatctgcatctctgggtccttctgcctctggaaatgttgcagactacatgggccagatggcaattgcaatgggcaaacttgccacattggaaaactttcttcaccaggtacttgcccattcggtaactatgaaattatgtgcttaacaggttcttacaagggtcacatttcaatttccaggctgaccttttgaggcagcaaactctgcaacaaatgcagcggattttgaccacacgccaagcagcccgagcccttctagtttttagtgattacacttctcggctccgggcacttagctccttatggttagccagacctagaaactgatattattttatttcatgaaagctcaacttgactgcattaatgctttgcacagagtgtactccctatttcaccttttggtacccattgacgattctttgatggtgaagcataatgtgaaatgtaaattttggttgctgtcgtttacactcactggcctatggaaatggcagtaatttagacgattgctgtatattaagtaggatctgagcaaaatgtgtttgtgattgtgtgtagcaatctcacatgtgaggcaaatcttccaaaactttgaccatcttgtaatcaccttaagtgcaatgctaacttagatagttcaatgctcttccaagtatttaac

SEQ ID NO: 6965 - DNA, 656 bp, Gossypium hirsutum
cattttttgaactctaacctctgattttttgttcaaaggtgcggtgccggggcttactcacattgaaccgaataagcttaggctatgtcttgagcttgttcaatccgcagctttggttatctcgcgtgaagaaggaaacgcaaacccaccgacttcaactgcggtttacccaccaatgagtgatgaacataacagtagtagcagtggaagcaatcttgctaaccttaatctggattcaaggttggtttatctcaatctaggtgctacaggttcaactcaaatgggttcgagaatggagggtgatgatgatagcagccacaacagccacagagaagccatgaaccgacatgacccaacaatgtaccatcactctcatgatttctagctccaaaaaacttctctctctctctctctctctctctctctatttatatataacaatggatgttgaaagacaggcagaatagtagttcatgaaaactcattcatgagagattattggattatatatattttcttttgtcagtgctttgcttccaatcactagctttttccctttgctgtgaagggtgcttttctctttctctttttctattgttttctctttttttttgtaggctttcaatgaccttgatatgaagtgaagagtttcattg

SEQ ID NO: 6966 - DNA, 569 bp, Gossypium hirsutum
  misc_feature (537)..(538): n is a, c, g, or t
aatgttagataccgaaagtgtcaaatttatgacataatatatatgtggtcgtaacttgttaagatgctgataaaaaagaaaaaaaaattaagaataaagttggctagatgctttttttaagattattctggctagtttttttgtcaagctatttgatatgaccatattggtcataatttcccagtattctttgcttcctatacgggactgaatatacaaatatgccaccaactttgtgtggttgccttctgctactaggctgtgcagggaaaaaaaaaaaatttggatattgagatttgaatttatggttaattaaaaactcctcggattccgacttgagttgacttgagttcttttttttttttcttttttttttttaaaaataaatcttaaaaaagttaattttttaaaaaaaattcaaaaaaattttgtctaacccctttaccaacccatcttctaattttacaagaacttttttttacagaaatttactaaaattgcaacttgtttacaaacaagtaatcaaagcacttggtnngatgcccttcatattaataagcacttgatta

SEQ ID NO: 6967 - DNA, 621 bp, Gossypium hirsutum
cgaagggattcaaactgaagtgaaggtcatcggccaaactcaccacaagaacttggtgagactaattggctattgtgatgaagccgaacatagacttttggtctacgagttcatggaaaacggatcattgtcaagcttccttttcggaattttaaggcctagttggcaacaaagactgcaaattgcatcagggattgcaaaaggcctcacatacttacacgaagaatgcagcaaacaaatcatccattgcgacataaagccacaaaacatactattagacgaatccctcaccgcgaaaatatccgatttcgggttggcaaagcttcttatgaacgacaaaacacgaacgaaaaccggcatacgagggacaaaaggctatgtagcaccagaatggtttcgaaacatcccggttacggtcaaggtcgatgtttacagcttcggggtaatgttattagagatcatatgttgcagaagatgtgtggaagttgaaatggaggaagcagcaatattaacagattgggcttttcagtgttacagcgaagggatgattgaaaaactagttgaagacgatgaagaagctagaaatgatgttgggaaatggagaagtataaaagtgggatt

SEQ ID NO: 6968 - DNA, 430 bp, Gossypium hirsutum
  misc_feature (416)..(417): n is a, c, g, or t
atcaccccctttatctttttttgcctctcatactttattatttcttggatttttcgttttttatttttcaattcaatcttcttccacttttttccctgttttattatatattatgaaattacatatttttgtgtgggttattttcactatttaaagaaaaccaattaaaagatatcatagcatattattgcatataaaactaaataaaataaattaatagagttgaataaaatgatttattcaattatccgtttctaatatcaaattagttaaataaactattttttaatcgaccaaaaccaaaattgaaataatcaaatttgattgatttttttaaagctcatccctacattgcaccaaagcccaatatagcacacaatcgccatgggctttttaatcttcttcaataaaatcanngctgggatctaca

SEQ ID NO: 6969 - DNA, 533 bp, Gossypium hirsutum
  misc_feature (7)..(7): n is a, c, g, or t
  misc_feature (301)..(302): n is a, c, g, or t
  misc_feature (313)..(319): n is a, c, g, or t
  misc_feature (355)..(355): n is a, c, g, or t
  misc_feature (415)..(420): n is a, c, g, or t
  misc_feature (441)..(441): n is a, c, g, or t
  misc_feature (455)..(456): n is a, c, g, or t
  misc_feature (458)..(460): n is a, c, g, or t
  misc_feature (498)..(499): n is a, c, g, or t
  misc_feature (520)..(520): n is a, c, g, or t
acagaancaaaaaagaacaggatacggagggagagcgcaattagacaatgaatgaaacattttcaattagaaaatgaatgaaacattttctacatatgtatgagaggttccacagcaaaaaccagatcaaattttatgaatatcacaatgataatgaatatttcagcaggtgtaaaatgcagtgattctttgcacttccaaccatatcaattacaaaagtaaagaatcctcgttataacactagacctcttcctaaaactgcaacatctacataatgattttgatttggagatgtaacatnncttgtattacnnnnnnnggaaaaagaaaaggtctcgcctctaaattctcctcntggatgggatgtgcggcggatctaaggataagattgattggattccattccgatctcatnnnnnntcatcgacctgaatttcatgncgtgttgcaataanngnnncgaaacattaagggcctttgacccccaaattcccatcnnaaaaacagtttcatcttatanagttgtatatatc

SEQ ID NO: 6970 - DNA, 654 bp, Gossypium hirsutum
tgagatatttagccattgtttcgactgttgtctatctaatgtcttgatttcgagctttgaatttttatgaaactgaatcattatgttctttggaattaatgaaaactgttattattcagtaatgctgagattgtttaagccaaatattttcatttatttactttgatagcattgaaattctagagcagtgtttgcagtttatttgccattacattgcttggggactagagagtctgtaaaacttagatatagcatgaattggaacaattgagtaaacaatatactcgtgttaatctacttggatctagaactcagttcgattggaatcgagttgagctagagtaattcaagtttttgaacaataatagtagaggaaagcgcaaactgaatacatcgattgtcagcaaaattgtaatgataattggatgtgtagcctccagcatcaatgaaacctcttaagcaagcttggattatggttttgttgtgaaggtagattaaaaaagtgactacaaggtcaatttactttctcttgttgggtttgcctgaccctcattcaagccaccacctcggctatttccacttccatgaaatattgcatgattcttgctagccaaattggctagtgcctatgactttgttgaattgtggtgaagg

SEQ ID NO: 6971 - DNA, 615 bp, Gossypium hirsutum
aaagaagggcctaatttgccatggatctggttctcatagctgctgttgaacctgtaatttggagcaatgcttaaaaatatttctcgatactcatggtgaagtacttggcagaactctttaccagtaagcatatggacaccatcttccatcaactcatcttggtaagggggtggatcaaaagttgtggattggaccaattctgaactaaattgatattttgagtggccactcaactgagaagatatatgaactttactggagtacctttgccctccttgttcatttagacttctcatttctccatagattgctctttgtgtcaagttgaagattttaggatagcgtaaaacaagcaaaacttgatcatcttgcaagaaacgaatatggcggtgattataagtgggaacatggccggtttgaagctcccagaacgcatcatagtcacatgtgtcggtacaaggcaaggttgaagttgaacttcctaccaagcacatcaaacgttcttctccattatcttctacctccatataaaccccttcgaaaacaatcttcatgaccgatgagcctggattcatattaggctctatgccaccataagaaaatgaccagtccttg

SEQ ID NO: 6972 - DNA, 567 bp, Gossypium hirsutum
  misc_feature (62)..(63): n is a, c, g, or t
  misc_feature (550)..(551): n is a, c, g, or t
  misc_feature (561)..(562): n is a, c, g, or t
tgcctcacatcattaggcatagaatatcctcaaatttagcaagtatacttgcatgactgtgnntaaatttaatcaatacagtcaaagaattctaaatatcgaaaaccatacacccataaagacatgaactctaattgctcttaacaataccactaaaacacaaaatttgtataatcctaatacataaatatagcaattctcataatgaaaaaaactaattttaaattttgggacacaagtcaaatttgaattatgacggtaaaacaagccacttccatgtaaaatctccaattcaacacataaatcatctggaacttcttgttatacagaaatgaccactatcttatataatttctcagctttatatcacatagagaagtacattcaagttacgtacttctaaaaatttgttccaaccaaccaaaccacaatctttagccatttcatgcatagaagcaacatcttccttctacacccatccttcacttcacaatgacaatgatattgaacatcaaaaggattcattgaaaaactctctattcatgaatanngacctaaatnnttata

SEQ ID NO: 6973 - DNA, 613 bp, Gossypium hirsutum
tttattttattattatgtaaatggtaagaatgaaacgcttattatatagaataattagttgagatgtaatctaatttatataagaaaaataaaagaatatttaatttattgtattgataaaataaattgaattttggataaatatttaaacttttatttttttaaagttataacagatctaatacaatcaatcattttaagcatgaaactaaataattaatataaatctgagtaattaatttgttaattgagtcctttgtaacaacttttgaggtgaaagtctatcaagcctcctacactaccttataaattttattttagtccctctattaaaagttactccataccaatctttatatattaaaatttactcaaataatgactccattataatttctcaactaattaccgataaattggacaaaacttaaccatctcaaaaaaaaaaaaaatcggggaaaaaaaaaacccccccaaaaaaacaaaaaaaaaattttacctgggattaaaaaaaaaaaggcttttggcaaaaaaaaaaaaaaaaaaatggggggggaaaacccttggggaaaaacaaaaaggaaaaaaccccccgggccccggggtttaaaaa

SEQ ID NO: 6974 - DNA, 754 bp, Gossypium hirsutum
  misc_feature (623)..(626): n is a, c, g, or t
  misc_feature (628)..(639): n is a, c, g, or t
  misc_feature (641)..(643): n is a, c, g, or t
  misc_feature (645)..(647): n is a, c, g, or t
  misc_feature (649)..(657): n is a, c, g, or t
  misc_feature (668)..(673): n is a, c, g, or t
  misc_feature (677)..(678): n is a, c, g, or t
  misc_feature (682)..(688): n is a, c, g, or t
  misc_feature (698)..(701): n is a, c, g, or t
  misc_feature (710)..(710): n is a, c, g, or t
  misc_feature (715)..(727): n is a, c, g, or t
  misc_feature (736)..(740): n is a, c, g, or t
  misc_feature (742)..(746): n is a, c, g, or t
tgacaaagacagaatgaagtatcggaaagtggtcgaagtgcaaactccaacacccccataactcatcctttttcccttttttagatctcaccacctcttggactagttagttggcctagatctaaattgatccaaaaaaatgcatttacaagatgtgttcatggttggtcagatcaaacaaaaatataaaatttttatccagatttaaaacgaatcaacaattaagccaaacagatcactcgactcatgaacaaatccactaaaaaaagagtataattagaattgtgtaaatgaatatagcttttaatgaacaattcatgaatgatttgattcatgttttttttttcgcttatcaaattaaatcaataaacatgaacaatattttgaagcttatttattaaaggaatcaaatattaaaaaaatttatttaattcatttatgttcctaaataaactagtttatatttgtttaaaatacttaaaacatttaaaacttatttattattcaattattatttaaaatttttaacaaccacacgtatgatcctaccaaaaaaaaaaaaacaaaaacggccccccaaaaaaataaaaaaacaaaccctccgggaaggctatcatgaaaannnnannnnnnnnnnnngnnngnnncnnnnnnnnnccccccccccnnnnnncttnntccnnnnnnntttatcctcnnnntcccaccancctcnnnnnnnnnnnnntcccttttnnnnncnnnnntcccccct

SEQ ID NO: 6975 - DNA, 518 bp, Gossypium hirsutum
tattgaatgaaaactgcaacagtttaatgatgcacaactctagtagctaattgaggcagtggtgaagccgggaccgggggggtggccctaagatggaaaaatttgcatttagacccctttataatttataaaattttaaattaattatggtaaaattgcactttgcccccccaaatgataaaaaattgatttaatcctttaaaaattataaagatataggctattaaaatggtgaaattgcatttttactatcgtaaaaatatacaatctaattccggccccctcaaaataattttctggcttcacccttggattgagggtttagaatccaagtatttgccagcctctaagggagctaaggtctacatcaaccaatagtttttcttttgaagacattacaattatgacttatgagaactttttagcattgttgcaatactgattatgcaatgcaatcaacctcaagtgtgatgcttaggctttctttcttcttgcttctgtgatgtgatcagccatag

SEQ ID NO: 6976 - DNA, 652 bp, Gossypium hirsutum
atcttcaaattttgattacagtcttttccttaatcatttcagtataaaactcgtctccattttcagtcggatttaattgactgcatgattgtgatagccaattggttcaatgaacaatcatgaagaaaaggtttcttggactaaattcataggttcaatttgtgggtaaattttaaaatgttaggttcaatttagtttttaaatttaaaataatgtgagtttatttgtttaaattaaataatttttttcatgaatattgttgagggggtcgattttttcgagagaaagttcatgtggtattatggttacagatccatcaattgagacactcttggttttgtgcatcaagtaccacggacatgtactcctgacatgctgtctcttggggagtacgagagataaaacccataccgaagatcatacttctggttgttggggattggttgactgttcgacaaacaatacttccaaacttatttcgaaagagtcgatccccttcaacaaacatgttacgaacattaatttaatatgttcttgaacaaataattaaacatgttgcaaacaattaaaaacatgttcacgaataagaaacaattaaatcataaataaaaccaacaagtggttaggtgtaatagtaagtcacattgcactc

SEQ ID NO: 6977 - DNA, 599 bp, Gossypium hirsutum
tatcaaataacacttcccaatatgcaaaacaaaaaagagcagagtaaagaagctcttgtaactcactgaagcctatgagattgccatatttttgaacagcgtgtctgatttgcgtaaccttctcttcgccgattcctaactgtagtcatcatcaacattgagaaaagatatacatgattattgtgcaaatgcaggaaaagtacatgctcggaatagaatgtacttttatccataaaagtaaaacgaactaggataatggatatctaaaggttaatatttgcttctgctgtaaagagtaactatattcaagtcagcaacaaaaatgaatggaacatccgcaaatatataaatacacactacctacgacatctctaataagtatgtgcatttgtgaatagaaatcctgaaccctaaaagaacaaaacaaacctttgaacaaacatcatcagatgctccactttctctaaaaagctttccaaggtaaaatggtatcatatcactgatgcaaactcccctaaattttcaagttgcgattaagcaacgaagaaagaaaatcatttaggaatcacaaactaccaaaaaggaataaacaacagagc

SEQ ID NO: 6978 - DNA, 571 bp, Gossypium hirsutum
atgacctttagcggcgcttttcccacaaacgcccctaaaagtcatgaaattcaaaaaaaatattataaaatattataaaggtcatgaaaaatataaaaaaaaaaaattaaaattcattatttcaatttaattttaatttattcaaataaattgatttcaatttgattcactgtttgtaagttagaaaactataatcatctgaaccaaactaaatttaaaattttttattttataactaagttcttttacaaatataaaaataaaaaaatatttaaattagtaaaaaaattaaaatactttatacaaatatatttatatattaaacggttgtgtagcacaaggaaactttgctcgggcacaatgtaaaggaaacctagatcagctcctttgacatagggtccaatgccctgcatatgaccatccacaagggattttccttcaattcatatagttttgaaaactcaacaaaataattttaagttgcaagtcacatcatattattagcataaagttctgaatattttattaccttgccattaagtggagaagtcgccatcgacccatcgcggta

SEQ ID NO: 6979 - DNA, 614 bp, Gossypium hirsutum
  misc_feature (603)..(603): n is a, c, g, or t
gttctcactagaagatataaaaagctacttcaaaatgccgattcctaccctcaaaaccatattaaaacaccaaaatccgtgtcgggtcattggtagtcgattcaaaacatcttctgtccagtatgtagcttcaagatttagggaccctacgtttgagaaactgatggacaaatacaaaaaccttctcaaagtcattgcaatacaagatcttatccttgcaaatcccacccataaccctccttccgtctcccttgatttcctttctaggctttctcaaaagctacatttaaaccgtggtgctgcttcttttctccgtaaataccctcatattttccacattttctatgatcccaataagttccagactttctgtagattgactgatgctgctatgcgtgtttcccgacaagaggcagaagctatcaatgcttctttggatgttgttgttgaccgtttagttaggcttttgtcaatgtcgacaactaaatcgttgcctctccgcgctgttttcaaagtttggagggaacttgggttgccctgatgattttgaggactcaatcatatctggaaattctcacatattcaagcttgttgatgctcagnacctaatactc

SEQ ID NO: 6980 - DNA, 650 bp, Gossypium hirsutum
ttactatgcaactccaacaggctcagagggatcgagtggaactggctctaaagaagaacctacaaacttgggaatatctttagcacagactggagaatagctttcaattgcagtagattagattaaaagaagagaactggggaaactaatcgtatagtattctctcccagggagaagctaaagtccaaaacgattcctctctttgtcaagaagagtaataaaatccctagccattgctttcactgtcttactcgctggcaactgccactgcaaccagaggggcttcagggattacctcagctcagtggaaagcgaagggtcaaatcctggagaaggcgaaggaatggaactgcttatctcggaaaatgaagagaaacttaattgactagcttgcctaggattaggatccctatttacccaagagacttaaaggcttgaaagtaaagaaactgcgcttgccctaggaaatcaatacctcactaaacattataaaactgccttgcacacactcctgaccactcttatatccttaatgggggattcgcttacacaaggaaagctctaaacctagcttaagcttaataaactaaactcatataaatgctttaaaaattgcttgcctggaactttttccccaggaaagagagaag

SEQ ID NO: 6981 - DNA, 578 bp, Gossypium hirsutum
aatgcaatcagtttccatactcccattgtattcagtctagtctatcatattcttatatttaacgtgatactagttttagattgtcgtgttttaggataaaacaagcgtgcaagatgcaaatggttttagttcatcattgccatcgagtccagtgtctaatttgcattttccgcttggaaaactacttcccaagtaattatcatgtatttcagtgtggaaactaatcatggtctttgcctatttactctgttttcccatttgaccatattagatcctacagtttgctcttagcttgcaggcttaaatataaattgattcggtcatttgaaatgtcaaggatgattagagtataaacttggccatgagaccagcatcatcgtactcgactgtgtcaatgagagcgataggcttgcaactaatacctgcggttagtgtaaaaacagtggtggcggtgagattagatactatagcgatactgtaacgtgagacaaaaagtaagctaaatgcaccgcaccgcaccgcacccaatcgcccatccaaacccaccctgtgtcaatgagagcgataggcttgcaact

SEQ ID NO: 6982 - DNA, 405 bp, Gossypium hirsutum
tttgaagaatctcagaacattttgtatcaaaccaaatgcaaacacagctgggatttgatacttgaggtaagcatcagctttttttgcaatatcaggctgttgatgaagaaatattagtattggctcagtatagaaccataaaatggatataatgattgagaaaaggaaagaaatgatgcaagaagcttgtaagtagattcccagcatgttataagtttttgcaccaaatccttgaccacaaagagtctccagtgctccacttagtcccacctgaaaaacaaacaaacaaacagaaaggaaaggactgttcagatagccagctttcaattcacacaactacaaggctttgacattacatcagatacatggagatctcagaattatatacacaatagcaaaaaaaaa

SEQ ID NO: 6983 - DNA, 586 bp, Gossypium hirsutum
  misc_feature (484)..(484): n is a, c, g, or t
  misc_feature (488)..(493): n is a, c, g, or t
  misc_feature (495)..(496): n is a, c, g, or t
  misc_feature (500)..(503): n is a, c, g, or t
  misc_feature (506)..(508): n is a, c, g, or t
  misc_feature (516)..(516): n is a, c, g, or t
  misc_feature (518)..(519): n is a, c, g, or t
  misc_feature (535)..(536): n is a, c, g, or t
  misc_feature (538)..(539): n is a, c, g, or t
  misc_feature (542)..(543): n is a, c, g, or t
  misc_feature (559)..(562): n is a, c, g, or t
  misc_feature (576)..(578): n is a, c, g, or t
gtaaagataagtagaatttagtgagatatgcagatatctaagaagaggtgaaggaccactaaagataaaccaggtaccttttcagcgtaagataatgcacctcgctcatctttcctttcccacaaaacagataaagccacgaaaacttccggtcttgtaggatcaatacttagcaaatcatgcactaacttgttcaactttgaataatcagacttcatttttagaagcattgcatactcgtccatgcaagtgacaacataaggatcaacggagcgaacctgcaaggataacaaacttgaatatgttaacattcatgatagaagtgcaaacataggcagaaaaagaataagcaataattcattgactagaaaagctttgaattataacaaccttctcaaaattcattatcgcctcatcattttttcctatgatggcttcgacctgggcatagaaacaagtcaatagaaaaaaataaaaaattcanagannnnnnanncaannnncannnaccactgngnnaaattaaaaaggcacnncnnctnnaaccttttcctcctcnnnnaaactaaaattacnnnattaattt

SEQ ID NO: 6984 - DNA, 607 bp, Gossypium hirsutum
  misc_feature (11)..(11): n is a, c, g, or t
  misc_feature (524)..(524): n is a, c, g, or t
cttcatgtacnagttttgtaatctataacttgtgattacgcaatctatactgtatatgcgaacataggtagcttaaaaccgcttacattctgggtatgtaaagcgtggaacgcttgaaaacgaagacagtgcttgcattgccaaagattggaagtgcttattttcaatgtggatgacagtctaattagatacctgataagctactggccattagtggggttgggggcgtgtctgaaccacgtaaatatcttccccgagacaacatccttcaacatcttgggggcagccaaacttctgctccaggaaaagcccaatggcaccaagatgctgactaaactgctgacggaatttaggatcaactgttaacggttttttgctgtagtctactgtcaaacggtgaacttcaccatcagcagggtctgcacctgatactgccatctcctcactgaaatttgcaaatgctagtgtccggacagtcctgtcaaacttcccagacaatacacgccagggtgtgccacgagtanctgaagcaagagtttcgcctaaccctggagcaatctcagcctcaacaatgttatgatcctgctcagttgggctgagtgtgtgg

SEQ ID NO: 6985 - DNA, 586 bp, Gossypium hirsutum
  misc_feature (503)..(505): n is a, c, g, or t
  misc_feature (534)..(534): n is a, c, g, or t
ctgtcattcattcatttcttcattattttacttaagccctaatatcatactttagtttaacaacgaccaagctttaaattgaaccatagagaaaaacaattgaaaaaaaaagcatcttgttagaggatataataatcaacaatattattgatgaggctgccttacctgtatataaacaaaggagggatgagatttttgctcttcaatgagtggaaaaaggatggaattgtgattgcaagagtgagctacacagtcttactgaacttttctctcttgtgatatagttttgattttcttctacttcttaatttattcgaaaatacaaattcacaatcgaaagacaatataggtttaaaagttaaaagaatggattgatcactccatacttgcctgtttccaagttggtaagtgtggtctacactacaggttaaatatgcaattggtagaaacagttggttctcattcacatattgagaggattatcgtcttttttttttgggggnnngcttgtaacctttttttaaaaaaaaaaanaaagggccctttggttaggaaaaaattttaggaaattaaacccttttagggc

SEQ ID NO: 6986 - DNA, 699 bp, Gossypium hirsutum
tgccaagtaatagtggagtaacttgtagtttatgtctttaaatttatgcatgaatacatagtcctgtgaaatagaattctggttaaacaggtaatagtgcagtaacgtgtagtgtatgtctttatgacatgtttaatttatgcatgaatacataatcctgtgaaatagaaataacaggtttaagaatgaaacctaattactttaaaggatgtatactgatttaatttttattgtttaaatctgaaaaggcacgttgtacaattagtccagtgtatttaaaggtcccatatctggcaaaatgtttttacagttattctgaatataaaaagagaaatagtgtggtggcctatatgttgcttgttaactgcataatatgctaactgtttttcccttgtgtttcattgcagtcatgttatagtaaaattatctgacgtacgtaaggaagtacagtgcccaatctgcctgggtattttctttactgattttttgtttaatatgttaattttattttgctggctacattcttcgtggtaattgacttattagcatttcttttttgaactcttacagttcatcttacaatatagctatctcatggttgtacttttttccaaactccatgcatgtatattgacgaaaattatgccaatatacttaccttaaaatgcatttaaatttccgatactagctttagctctc

SEQ ID NO: 6987 - DNA, 475 bp, Gossypium hirsutum
acctacctttccatctaaatctcatattcatgagagctcggccattttggttgattttgctatctttgacccatattattattatatacatagcaatgaggtgtttacatctttttcttgtcattaccgttttgtttttccttgtaagagcccatcaatgtgagtcgtctcgggttttaaacgaagacactgctgcattgaagtcttttgaaaaggaagttgtcccactcccaccttctggacacaatggatgcacttacattcctgacgctggtggcacaccttgcaccaacgagagagccctcgtagaccatgttatgactcctcctaggcgcttgctaccagattcagtgcctccgctaatctcaaacgaatccaccttgtttcccttattgcagcaactggttaattagttgcttacatatattagataaattttgcgtgtatattgtgtatgaccaaatgggaacatacc

SEQ ID NO: 6988 - DNA, 616 bp, Gossypium hirsutum
cgactggttttaaggtgttctcaaagattgatttgaagagctggtaccaccaaatcagattgagaggttgagatgaatggaagacgacattcacgactcctgttgatctttatgattggttagtgatgccctttggcctttcaaacgcaccgaacacatttatgtgggtcatgaatgaggtatttaagaaaattttgaattccttttgttgttttttatttcgatgacatcatgatttatagtaaaagcaaggaagaatacctatctcacttgcaacaagttttgcaggtgttcaaaatagagctttatatgaatttaaagaagtgcacttttttgtgtgacgaagtcatattttggggttttttttttctttgctaagggcataaaaccatatttgaagaaggtatgtccatcggagaatggtatggaccataaaattttaaagatgttcgaagcattcatgggttgacttcattttataagaggttcatcaataattctaacacttgtcatctacaaacaaatgggcaaacaaaggttgttaattgaagttcgaaaaatatgcataggtgtgtcggaaatcatatgacaagttgagttcccaaacaactccgaa

SEQ ID NO: 6989 - DNA, 648 bp, Gossypium hirsutum
ggtgcaatctagcccttttttgccctagaatgctaattaaaagttggaaagagaagggacatttaaaatttgataccgcaaataggaaaattctaaatggcatttattactcattgtttttcttaagatggaaatgaaacagaagctttggctaacagagattagccataatcggttatagacttagtaacagtgttggaaatgaaaacaatttgttacagactttgtaacagtaaacaaaaactgtgtttatgttagattaccttcaaaggataaacgtaacgtgtttttatgaaagatacgttgaatatatcaagggatctccagcttgcctagagacaagatcaagtgctaggatcttttatgtaagttgagtgtcggttcacaaggagttcaatcagtggatcctccacatcagacccagcccaagtcttatcccggtgaactgaaatatttccattatctgtgacaactgtgaccacctctttccgggtcaaaagctcattggctacaactgcatgcattttgtactttttcagagccataatggccttctctaggagaatttttgaatctgtctcaagctgttgaccgaaaccagataaaatggagccaatcaattcatgatacatgacacgaagagcattc

SEQ ID NO: 6990 - DNA, 666 bp, Gossypium hirsutum
ttgaaggtaaaaaaataaaaacctcaaatgctggatataagaaaaaatgatttgatgtttgaattatatgtgttaatctcaaatttctttcagttcttcatgtaaattgatcctatgcttggttaataggcatgcatgctcttagtaggcattcccttgtttaatattgggccatttttatgtgctcttgatggcttttggcaatgcatgtgtaagctcaaactatcttgtttcatgaccatattgttttgtataaattttaatgaatttagaggggaaagcaatcataattgtgattggttaataggcattattcagtctaattttggccttgcattaccattttatttatgcatcgtctatgaatataaggttcattttgagctcatttcactctttacagggagagcagtcgagcacaatagtcgagggggaagaaggcatagcatacttttggaaagctgacgatcaaacaacaattttgttacgtgttgtagctttttaatgcaagagcagtgtcctgtgaaagctgaaaccttgcttatgaatgccattgaaagcaatcgacgcatgttgagaatgcagtgcaagtgtttcagcttttgttcttcaactgatagccaaaatgaatgcatctgctggttgtttttatgtcaggcatatgct

SEQ ID NO: 6991 - DNA, 645 bp, Gossypium hirsutum
tactcttccagccatctctgattggaatggaagctgctggaatccatgaaactacttacaactccatcatgaagtgtgatgttgatattaggaaggatctttacggaaacattgtgcttagtggtggatcgaccatgttccctggcattgctgataggatgagcaaggaaatcactgcacttgcccctagcagcatgaagatcaaggtggttgcacctcccgagagaaaatacagtgtctggattggaggatccattttagcatctcttagcaccttccagcaggtaacttttgtgcttgtaattttcctaggatgtttacggggattgaatgttattattgactgtcattccttacgtctatatttctgtgcctcagatgtggatttccaagggtgagtatgatgaatcaggcccagctatcgttcaccggaagtgcttctaatttgaatgtatcggaagcctacatttttcagtcatctgtctgtgtgagttcagtttgttggacatctgaagctttggtttttatcaatggaggaaagtttatggtatatacagtctgtctctcattagatttcaggttttagattccaaaagtacttttggcatggagtggcttgtatggatttcgaacttgagagttact

SEQ ID NO: 6992 - DNA, 637 bp, Gossypium hirsutum
tgcgtttaattgggttaaatttagtctttatattattaaaaaaaatcaaaaatccgcataaaattaatatttatcgtataaaaaatggttcgagttttttttcaattgcaattaaattccaaagaacagatattatttacataactgtaaaaatttcaaaaaatattagctctattaaatagtttatgatatttttttatacagtagatgctaattttatttaaatcgatccatttaatagtagagaagctaatttgatcaaatccctataatagaaggatctctcaaatacatttatcatttctaaagattgcttcaaaattaaactatttaaacatctaaatatatagggatctttttttttaaaatattaatccattgtggattatgtcacataatatttgtatcgaaaaacgtgaatttatttttttaatcaattcaatgtgtttcaacattagacattaaatgaaggaaagaaattgatttttcggagaaaaacgatgtattctactaattgatttaatgagtttcaggtcaccgacacaatttcttaattttttgatatggcttgatcaaatggttgcagtattctgatttctatattttaactatagtcattgattaaaaagatcccaca

SEQ ID NO: 6993 - DNA, 656 bp, Gossypium hirsutum
ctttccttcattgaatcagcaacttctccattatttttgctaccttttgacctctttccctcagccaatgtcttttccttcttggagggaatatttattttattttgtacacgaaatgtagctatctgaccaacctttgtttttgaatcttccttgctcccaacattgtctcctaggtcgactgaagcattcttattgaaattcactacactctgttcccaaccgtttccatctaaactactccgcttatcccgcttctttttcttgccactcgttctgctccttccagatattgactccaaagaatcttcctttgcagagtcagaggacaacaatctacctttcgatgcattcagattagcttcagcagcgacatcacagaccctggcagtgacttccttagcaatattcactgaattagatagagctgtgggtttcaagtcattgggcaatgactcccctcctgcaatctcattttcatgcttcttttttatgagcaatgtctttccactttcaacagtcctgcgatttacgttatttgattcctccagctcttcacttttttcaattaaaaattttgtcttcttctcatttaattgttttttattacccataatggacttatctattaacacagaaggatgttcttgacatgc

SEQ ID NO: 6994 - DNA, 398 bp, Gossypium hirsutum
ctattgacttcttatgtaagtagttgccgtcccgtgacagctaatagcatacttgagttttgggggggctgacagcaacagttggcaatgatggcttgtgtttcctttcctgaatgttctcatgttgtttgtatagcaaaaagtccaaaggcattgaatgatccatcaatcaaacgaatttaactagagaaagcttagcttgtacttagacgtgctagcccaggaatacagagatgccatgtcggtttgcatttgcaagattcttattaatttgatgcgggtccttttgcagttaaattgtagaattctctgaaagagttgttggcttttccagtccttgatccactgttaccaggttttggatcatgattccaactacagaagactatgtataaccc

SEQ ID NO: 6995 - DNA, 594 bp, Gossypium hirsutum
atacggatacattgcaccaggtgatttttcattttacttccatagatgacatagcatagaggataatatttgttatcaactattatttctttttctttgcaaagctttcctacaccatgcaagttactgaaaaatgtgatgtgtttagttttggtgtgctggcattggaattgatagtcggggcatatccgggtgaatttctctctaatctatcaattttaactgctgaaagcattccactaaacaatgtgttggatcaaaggcttacacctccactgccggaagttgtgaacaaactcgtattcatcctgaagttggttgtttcctgtttctcagctgttgtttgaccacatctagtcccatctatgactctttgatcttcatctaagataccaccttagaaacgtttggtatttgctctaatgttgtttgtttagcttttgtgtagttatcatgggttaatggattaacatttttatacccttaattaccttttccttgagaattggtagtgcaataggagttgcttcagatctgtctgtaacagttcatcatacgttctattctatggaataaaaaggtgttacccgaccc

SEQ ID NO: 6996 - DNA, 649 bp, Gossypium hirsutum
tataatatttttttctaataaatggtaaagttattgatgtacagctgatttactttgaaagtagttaattgcgaaatatacttaacgtagttgctaagtttatgggccaaaaattatattaacccttgatttaatttttattaattaaacataaattgagttaaaataaaacaaattgtacaaatcagttaaattaatatatatacatgttctaaagaaacgtttttggttttaataagtcatattacactcctattaactgaagaagactacccctattgaaatactgtccagataagtagcgatttacatttcagttcttattcctcttgccagaccgatccgcgttccaagtaacacaatttctgattgttcaagcaactatacaagagtatgatgcatagagaaatatgtttatctcttctattctgatacaaagaatatcaaaatctggtataatagctgaaattactgtaagaaatcattttctcatattaggttcacattttacttacctagacaaaaatttgagagctttggtaattcttttacaatgagaaatttttttttctcttgtttcctagtacattaacttctcttcaatcacttctttattctcattagtgtaatgtttttccacaggaatata

SEQ ID NO: 6997 - DNA, 661 bp, Gossypium hirsutum
ttctaacaccttcatatcttgtcaggccccctctaaatcttcttcgccaggaactggcaggaacttgcatttatctggatgtcttgcacaaagcaacttcaggatttaatgacaataatgggcaacttctagaacctaaaagttctcaagatactgatgtatcttcagacaacaatggtttggaattggctgaacattcttatgaagaaacaaaattggaaggaatagcagaagagaagctggtctctttctgtgcacaggtactcagggacacatctgatttccaatctacaataggggaaacaagttccgtggatattcatcgagttctggagttgcggtctccagttatcgttaaggtacaaagttcattttcacactttctctgagaaaaaatattaaaacatgataaggtttagaccatttttttaatgcaataacatctagttgcttattagtcattagttagatatcatggttgaactatgccttgtatatgaaacagtaatacaatatagcctttgccaaacttatattagtgcagattcatgaatggctggatcatgcttataattgcagcatatatgcagacattgatgttgactgagaatagctgtgcggattggttgtttttttactttttccttccctacttacctat

SEQ ID NO: 6998 - DNA, 596 bp, Gossypium hirsutum
aattgagactgcaaagaggcttcctcaggagaagctaacatttcttctaagttgtttatcatctttggaactctgtggcatctgcaatgtatgtggttctttcggcttgttcctttagttcgttttcatctattttaataactgctgctcttttacagtattttgattatttataattgcctaggcatgtttcattcaactaggaacaaataaggattttaggaacaattaggaacaaatccactttaaaggatttgagtgatcacataaggattcattcaattaggattagatgaaataattgtttgcttatgtttaaatgcttcagcttggggtatgctgaaggatcatattgtgctctatggtggcttgttttgcctttcatggctaagtaccagaatcatctatttggcataatttctccttttagttatttattttttaattattcttcaactttttaagttttaatcttccgttctgacatccatgcttatggtttgtaggatccaccagaagatgctgttgtcactatctgtggtcatgttttctgcaaccaatgcatctctgaacatcttactgggatgacaagcagt

SEQ ID NO: 6999 - DNA, 594 bp, Gossypium hirsutum
  misc_feature (586)..(588): n is a, c, g, or t
ataacaattcaatcacacttagatgcgcaactaagaggaaataaaagaacagctaaaatgataatttttagtttcttatgaaatgttaccatttatatagaagtgatcaaaagacaaatgaaatcctgaaaagaaagttttactggcatcaaaactcaaagcattccataataagcacataatactagcatttttattgctaccaattacaatgcagaaatgtttcaactctgaaccaaccttaatatagaacagatcgaactcccatttgtagatcaaatcgtcctgtaattcacaaagtagcttcttggtttattaattattagtttaatcttgctttgttccatataagatactgttttatgttatgtagtacattagccaaaagttacctatgacaataggacctcaatagagataaaatagttagacataaaaataaagaataattagtacaaatttaaacaagcaattagaaagatatgtaaaacccttgtaaaaaataacacctcttcaaaataagcagaaagttttccttctttttgtcacaaacaagtctttagagtggctaaaaattacctaattnnnacaatg

SEQ ID NO: 7000 - DNA, 620 bp, Gossypium hirsutum
tgcagcttttatgtagactggatcgttgctgtattggtcctttgagataaatcctagtttcaaaaaactagttaaatgatgacttgaggccgtttgttctggcatcattactcaaaatgaagtgtctaataatgagaaacttttttggtttagtctacataaatactgatatacaattagcaactgcattatttgctttgttttctcactcattttcagatgtttcagatcctacagtattgtcggtgttggtcttcttggcactttcacatattgtcacaaatataagataaatcgagtcagcttctccagttttattccttcttattaccagtaattctctctctctcattgcactcatctttctgtattaattagttttcatatctttatctccaccctccctttacttcctggattgtttctctaatacatctgaaaagttgtcgtgcaacactatcaacaatgatggaggaagtgaagccggaatttgattcagacaaagctgctgtactagttaacgagctcaggaaaacctttaattctggcaagacaaagagctatgaatggagaatatcacaattggaaagcatatcaaagatgatgagaaaagagaagaa

SEQ ID NO: 7001 - DNA, 447 bp, Gossypium hirsutum
tgactgctctgcatggccttcattagctggtttactacattaccttcatttctcttcaacctttggtcactggcatcccgatagaaggttacacagaaaaaatcggtgtaaatgatgcattttattatgccaagtaccattttcttgtaacattctcgggtgccttgaaaacaaaaacttgtttgtgtgattttaaaagttgtatagtttggtctataactattatcaaattgaatcaacagcatcccctattaaaaacatactgtattgtaattattacaattcgatgagccccaatattgcaggccattcatgatgttatatccttttctgattcttcgttaattagccaatgtcgggtttttagccaagactctgatggagattgaattgccaggaaacttctacatggtttaaactaaagttgggtcaccaggaaggaaattt

SEQ ID NO: 7002 - DNA, 544 bp, Gossypium hirsutum
ctatcaatcggaggaatagcgaaaataaactgacagagccaaaagtaagaaagatttgcctgtttcgctgttcatactaaagcttaagcgcgtaaggccgaaaacggaaattgaagaagatgagtggaatgattgagagggataagaaagtcactgcaaataaagagtagacaaaatgatttgtgggtgtactgtatacaacattgattatttatttagaaatttattattttttcaatgactaatttgccaatttgggcaacacatgagaaattatacgaaaaaatactaccaaaaagctgttgaattcattatactattactgttttcatgttttatgtaaaacaaaaagtacttaatttattagctacgcatagcttatcagtcgtacatgatttgtggttaataattaatggtctttgggtacaaattaataataaacaattagtagaacccaccccccaaccaataaacactctaattaaaatattaattacaaaacagaaccagattaaaaggttagcgcacactcttaaataacaat

SEQ ID NO: 7003 - DNA, 644 bp, Gossypium hirsutum
tccttctatgaggctggtgttattttctccccagagcaggtatatcaaaatatgctagtaactcggagttactgtatgttacttgaactcgggtttgagtgtatatttatgtttaaatgtgtcagacatgaatgtcgaataaaatacgaatcgaaatgaataattgtaagcaaaattatgtgaacatagccttgggtggttggtgagaaataggctttggaattttggggtctttgttgaaggatttccgcctcttttgagaaaaatttttgaagtgtcgttcatttagggtcggtcgatctctcaacacatccgcggcgttgtttatgatcaaggttttgtcttctcgactctatggagggctcgagtgcctaaggctgcctgaaaaggcatcaggcttgcaccctattggacctactgcctctttaagcagccttaggcattcaggctctccacatagttgggaggcaaccttgaccagggacaattccaatccgttgagggtttgtcttaaattcaaattccatcgtgttcagtgtgtcatatttacacatgtgggtggtgggagggggaaattagcatttttaccctttaaactttataaaattataaattaataatggtagatttgcaatttggccctc

SEQ ID NO: 7004 - DNA, 666 bp, Gossypium hirsutum
cttggcaatagagagatagaatttgccaggcaaaatacttgatgtaattgtaatataaaaatcctccaagtcaaaacacatgatagttacaaaattaacatcatatgaatttgaaatatgctaaaggaggagggcacttactgcaagaacaagaaaaggaataacttccattatgattagagtagattttactccaatagcactgaaaaatcctacagatccaagaactgagagcatgacaagcagaacgccagaaaggccaagcaatacctggaagacaatcagtacacatcatagaagataagtaacagaaaaattttcagacattcatccaaccctagcagggagcttttttgatctttttaacctaactattgcagtcctagattcaaagggatgcttatttattgctccgtccaagcagaacctcaagtcatcagataaagcatgacttagaaatcctcaaaaccaagagaaactcatttattagatatagattcctgaaagcataattagtcatactttgtctaggtaaaaaggtcgcctaaaataagtttctgtaaattggaaacaacatataaaagaggtctagaaaaagtcattctaacggttggattctaaaaaataaccaatctatctcattttctttgtcctttccctcctgag

SEQ ID NO: 7005 - DNA, 649 bp, Gossypium hirsutum
gtgtgctgtaggtcccaatattacatttccagtcgacttggccagagactccatatggatcagatgctccacctactgagggactctttactaaggaagtcactataggtgagtccgagaaagatgccaaaaaattggcaaggggacagtgaggtgaagctggtgacaccaaatgatctgaagaataaagctttgatgaatctgctaagaagaggaaaatatctctcatacgcaggaccatttcttcggatagctgattgggatgatgccaaaggttctccacaatataaatgttatcaatagcagcctctgatagacatacatcatccacgttttcttctgcttcctcttcattgcaaggcgtcgtaatctgaaacataaaatatactgttaaaaagaacatccaatgcgtaaaattgaaatgataatgaattttgtaactatttaaaggcaaaagaatcactggcataacactttaatggtatatatgacagtactggttctgttaagtgagccagagagcaattgaaaagtaatgttgtcggacatggagaatgctttaaatggtactcagcaagacgtcgttcattcctttcctgactgagctgatattgtatagaaagaatttcctgctcaagctttgacactg

SEQ ID NO: 7006 - DNA, 459 bp, Gossypium hirsutum
  misc_feature (426)..(428): n is a, c, g, or t
tggggcatcagcgctttggcattgtacgtgctttcttcttgcttgcaacttgattctatccctgattatcttttgagaagttgattaatcaactatctgtgaatttttttctttttaatagatacttggaatcaatggtttactaaaaaaaattattttatttgttatttaatttaaaactgctgtttgatattgctaactcagtgatctcatgacaattatgactttgtggaaattagtgttaagcttcaacaagtgtaattgttaaaatcggctagacctacccaaacaatacatgcttttggacagtcaaactgcaatatgcttcttcttttggatttagccaaactgcaaaatacttattgctatctttgggtcgcagaacactttcagctctttgtgcttcatttgcaattcactgaatgnnngtatttacttgacttccattggttttttttt

SEQ ID NO: 7007 - DNA, 626 bp, Gossypium hirsutum
catgcatgcatgcatgctataaaacaaacactgagagaattgcagaaataataatcaaacacctttaaccaggccccattcggtcatttctacgtataggcaaacaagtgctaattagagtcctttattaacaatccatgttaaagagggaatataaactaagataatcaaaccgtatatgttaatggcctatatcaatcaatttatggttaacttccgttaagttacaccatctgttaagtatcagttttccacatcaagcaaagggtcttatcatcgagaaatgctaatttattctcactttatctgcaatatcctgtggaaagataaggcaaaatcaaggaaaagctttgaacaggaatatagattttgagaacagtataatgctgtgtctgttgatgcatttaggctgtaacagattggctccacagcattacttagacatttcaatcatctatatgcaaaaacaatataaataccctccaagtctggcattaaggagcatagatttcaaaaaaaactcaaaagttcagtgagaagttgttaatcaagaaaatggcagaaaacagaagaggattaatgatgttcaggcctttctttaaaaaattgcgaaagggattctcgag

SEQ ID NO: 7008 - DNA, 607 bp, Gossypium hirsutum
cgaggtcactgtaaagctggtcagaaactgatcattcgagtaatggtgcaccctgcgatgagctctcctccgccggcgcagtcgcccatggaagatggcggatccaacgacgatggggatggttgggattcgatttggggacctccaccgcacaattccaccatcaagcaggcggttgcatcttatttcatgacggctcttgggggaatgctggttatcatgtatttgctcatgtagttattaatattataggaactgtttctatatatatatatattgttggtttcatttgatattcttaaaaaaacaaactatttgtgcttttctgatgtttttagactgtttatgtcgtatttgcaaatagtttacttcttttgctttcattagtacccattctggtaagtttatatacgttgagcaagctttgcgtagaatataaattttatttcgaaaagaaattctctatgcaataatgtacagagaggagtggttaaaaattgccatgaaattccagttacactgagctttgagttataatgtgaatagggaattgggattaaaaagacgtgaaattattaaatatccgtgatgcatgtagattagggtg

SEQ ID NO: 7009 - DNA, 652 bp, Gossypium hirsutum
tcagaaagacaaatgaatgtacaatcatatagttactactttcattgtgttaatgagctaagtcctcgctcccgacaccgacgctagacttgtcgattgtccgaacattgtattgttcgtatactcttgctctgttctctgcccaccattgttctgcttgtttctcgctgaaccgcttacgactgcattcaaagtttttaccaaaccatttaatttttcaccaaatcacagaaaaactctcgggtaaaagtaccatggaggtccttgtactaggagtcggattgcattttatctcctctactaaaaaaatgagcaaaattattagtccctatacgttagaccaaagcaaattggtcctattaaaaatttcatccgtttctactgttaaaagttggtccttgtacgttgacatgccatgtgtaactgtctagttattccatcagccacgccagtttttaacagtagatttgaatgaaaagtttaactaaaaaactagtttgctctttaatttaacgtatggggattaatttattcattttttagtaaaagggacaaaatacaatctgactcttagtacaggtccaccatggtacttttatccaaatccccattattcaggattatagcttgtcaatgcaataacgtacctgat

SEQ ID NO: 7010 - DNA, 657 bp, Gossypium hirsutum
  misc_feature (646)..(649): n is a, c, g, or t
  misc_feature (652)..(654): n is a, c, g, or t
tgattactactcttttcatctgaatttaaagaagcatcggttttattatcagcatcgaggttaacgtcatcaaattcatccatcggcatcggcgcaagacaagcgcagaccccaaacagaagccaagcagaatccggtcgaagccaccgagccggtctggcatcccacgacacattccaggaaccttcccctttcctctccacattcttccacacatctcctctattcttcactcctctgtctcctccgcatggcaaaatcgcatgccatatagaagctgcaccaccctctgagccgccaccaagccgacaagccgttgaatggtgccggcagcgccgattagcggcagataaatcggcgaaatgtgatggccagtgcaagaaacgattttcgtgatggtgagccgctgaaccaccgtgggcgatcagagatagggagttgaggatccaaggcttgggaggtcgtgcgcacaatacaccaagcatcaccggactgttactaacgaacgccgattaagatacactgtataacctacacaccatttacaaccatttcagctctctatttatatgtaaatcaaaattttcctttttcactttgacggcgagatagaggaaaaggagaaaagatactgggtccaccacannnntcnnncac

SEQ ID NO: 7011 - DNA, 604 bp, Gossypium hirsutum
gactgtaggctatgatatggctcaattagcttgtttctgattgttttcagtaatagtctgatatttatgtgtaaaatgaattgacaggtcaaaacactattagttggtgctgattatgttggtgatattccgttataccaaaaaattatagcagctctattgactggtgagtcaatggtaactattttgccacactaaactttgcacatcttccatttttagctttatgctccgttttgtccatttataggtgcccgtgccacgcttataattaatctttcttatttgttataaaaaaagatattttcttttgctataaactcatataaaagcctcttacatcaaccaggtgctctagctattacagttgctaatccaactgatcttgtcaaagttcggctgcaagctgaaggaaaatttccagctgggattgctaggcgttattatgggactttggatgcatactacaccatagttagagaagtcagttttcttagaatattactatccttttcctttttttgagaaattaatttccttatcatataaagttttcaataatcaggaaggactagcagcactgtggactggctgtcccaacatg

SEQ ID NO: 7012 - DNA, 544 bp, Gossypium hirsutum
gtcaggttgacctagaatctgtttgatcaccaccataagcaagagttccttgagaaatatctttattatcactagtattctgaggacatgtactatcaacctccatttaactctttgtaattaaaatttctattgaaaccagttttggacttgcaacattctccaagccaatatcggttttgtattcatgtttcaaagaattagctctctgaacgaaggctgtaaccacaagagatcagttgctttccacactattttcatgttcctgtgcaccagcttcagtaatatataccttttgtttctttcttctttcggaacatcacaagctacagctgtttttccacgagctggtgtgctgacagctgattctccatctaaattgttcttttttacctcaaccaatgtcttgtttgacatataagcagtaggagtattcctgctctcgcaccctgcatgtttgccatctttagtttctgtcgagcaggtcccaaagaaatttacggcattgaaagtagttgttacaacaattgaatgttgttttgca

SEQ ID NO: 7013 - DNA, 493 bp, Gossypium hirsutum
  misc_feature (21)..(23): n is a, c, g, or t
  misc_feature (464)..(476): n is a, c, g, or t
acagggacgggtgtgccctgnnncttctgatggcataaggaaaatctcacctccttgaatatttcgctataagaagtctccttgaagccctacaaccgcaatggcatgtcaagaacaagaataagacaagtaagcattcatgcatctactgtattgtatctcttaacctccatgcaaaagcctggacattaatccttcaaatgccttagcatgaatgtgtcgaaagtaggaacaagaaaaataagctttttaagaacatgaatgcaagtatgagtgtgtaaggggagagagcaaaacagagaccaatttccgaaacaaactaagagatgacccatttgatgctccaattttagcacggaagacatggattctgaagttttgaactgcataggccatcatcatcaggacagactctttcccaaggcccttaccacggctattctagcatgaaaaataagagaagnnnnnnnnnnnnnctagatcaactttacag

SEQ ID NO: 7014 - DNA, 638 bp, Gossypium hirsutum
gttgcatttgagagttttgaaactgatggttttgatcatgatgaccagccaagcattgttgatgaggaatttaatggagtggagccaacttttacgagttatcaggaggttcaacatatttccttctcttaatagtttgcattggttaagaatagaattgtgtgcttttcattcatagattgttattgaaatccacaggatacagagcaactttctttcaacaatcctgatgcagatgacaaatttgaagaggttgatgaatatttgtttttgagcttggggtttcctttgaaacaaaatgcttgggctggtcctgatcattggaaatatcgaaaaactaaaggtacatgtcatggagcttgtggcaagttctgtattttatcaacatttttacctttcatagttcaataacataattttgagcgtcgaataccataggttccgaggatgtccctaatgaagaaaatacagtagcgtcaacaaagaaagccagaaataaaaaacaaactgagcccgatattgatttcacaaaagccttggatgatgaattgctagacatatttgctcctcccaaaaatctgaaatcattactgctaccttctaacaaagcaccttgtaatacaaagcttcctgaaaat

SEQ ID NO: 7015 - DNA, 610 bp, Gossypium hirsutum
atcatcaaaggatttttcttctatgtgttcaaatcacttgtcactttcggtcaaggagaaagaaggtgatgttgatgatcatggacaagaagaaacatgggaagctgaaaattatgaatatgataaggctctgaatgctgacaggacttatctcaagttcaaaaaacaattggatgcttctccagagcaatgttttaggtaatttagggttatttgttgaatgtctatgccggaaacccttttataaattggcatatatggacgacctctcattactgtcaccagtattaatgcaaagctagaatgatgcatattgttccttattgtatattcattgtttctttgttgctagccctttgttatggctctaaaagttcataaaaaaaatagaataatgaatgtactcgaaatttaaggtcatatacaatatttctgaaaaggtcttgcaatgcggttaaccttttcttttcttctcaaggaatccctggtcaagtttatctgcttttatgacttactgtcaccaaaacgaaaggagaatgtaaccaaaagaaaattgggaagcaatcactttgttatcacccagattaccgcaaagtttacactgattcac

SEQ ID NO: 7016 - DNA, 583 bp, Gossypium hirsutum
tcataataccgccactgcttcgtgccgatctgtgagaaaaataaggaactccaaaaatgagtcatcacaattaataaaagacaatgacagagagacaagatgagtctataacttcgagacacatgctaagcaatgccataaccaactaggtatggtaaactatcctagacttgaagtgataaatagatgataaaatttatcagaaatcacaatataccttcatgaaaacagtatataatgaataacaatttaattaaccgctgatctgacaaacctcgagaaactattttgaagtaaggatttcacaatcgtaagcataaaagttaaaagtaataaggaaactgcggcactgaggaaaatcagacaaataaccagctggttaataaccattcaatcataggcatccttagtgataaaacaaagtcaactagtaaactccaccagataataattcaataataagaatgaaatctatcaaactgaaatccaattctttttttattttttcaagatgaggaaatatctaagctcatatgaataactaatttactgaaaatggtcattaacagtaagacaagcacag

SEQ ID NO: 7017 - DNA, 476 bp, Gossypium hirsutum
aaaattcatgaatttcagtttaatttaaaaattaaaatcttagtgataaaacagagttaaatttaacaaaaaccaattaacaatattttgataaaaaagtaattttatttaagatttttaccactaaatttgtcagtgatgttagtgaatgatacctcaatctgcttacataaatgagcaaataataattaaaatcaaagagatgggtgcaaagggaaagcaaagataatttttcatatgcaacctctgtaaatgaccatacaaaattcatccactgaaacatggtcgaaacagagtcataataaaagtgaaccataaccacattaaataaaacacaaaattaaggaatgctgaaacatgagaccctacaaatttacatgttagattaccataagatgcagtgtctcacacttgaaaaccataaaaccaaatggtttaaggtctaaagcctatttcctagcttctttttttttttt

SEQ ID NO: 7018 - DNA, 609 bp, Gossypium hirsutum
gcatatcaaaatctgaatggtgcattggatattgaagaagttttgatagccactctaagcatgagaaaggcacatgtaatgtaaaaccccaaaccttgaaatggtttagacctaaatcaaatgattttatcccaaagtcataaacaatccataagcaaaaccccatgaccacaaaatcataaacaatcattgcatagtgaataaatctcagtgaaagtgggaaagaagtataaaacccagacccagataaaagcatgccatgaatttattaataagcttgaaagagaaataaggcaagcaaattacccttggttcgctgggtcacagcttctgattgaaagaaattaaaagcagtggggaaaggaccaaatcataataatagtatgagttgtggttgacaaacacagaaatgtatgaatcaatttcttctttgccattattgttttatctagttgatacagatttcttcttgaatacagcttgtgtctaccaaataattaattactttcaactccttcattcataattctcaaagttatccataaaccttttattgaaattaatactattttttatatatatatatatatttttacatccattggttgg

SEQ ID NO: 7019 - DNA, 498 bp, Gossypium hirsutum
ggcagagatattatcagcccttgttccagccctggcaatgatttgctcttgttcccaagtaagcctacgttaatatatataactacatttggattaggtcttgcttctaaagaaaaacagtgtaaaatgatatttaaaaagaaagacatgcatgaaccccagatgttaggctttgaaagtcaaaaattaaataaaaagagaaaagatggcagacacgcgtttgcattattgattatcacagaatattactaaaactaatcatgattcacactgcaagtcagtagtcaccctatagcagatatactcaagatgcaacttgctaaaccccccagctataagcctctctaccctctatataaaggaccttcaatggcgtctcttaaagcatctcattcattttccatcttcaaaaaaaatggcttcgtttcatatgattacaacccttctttttctgctaacaataatgctgggtgcatcaaatgctcaactcagtgccac

SEQ ID NO: 7020 - DNA, 632 bp, Gossypium hirsutum
  misc_feature (7)..(7): n is a, c, g, or t
tgagatnagcacgggttcccctgctcctataaggcaaaacaaagggagtgtgattaggcatcacatttctagttgaatccttaggcagacaaatcaaggctcgaataatagaaaccaaagaaaaaaaaggtaataactgaacataaactcttcttgattctgtaaggctgtttatgggtgttcaatttggcataacaataacaagtgatgccaaatgaatacttcctcaatcaagatatctagcatttacaaatggcaagggaaggactataaatatatatgtctttctaagtattctattttcgtgattagataacataggaatatgaagaaaccagcaaggagaaacctgtaagggttaaaatcttgatcatcgtcctcagcagactcatacttggcatgatctttagcgatttttttagagtaaccctcatcccaatacaacctctcccagttttctctaagctcattatacagttccatgtaccttttgcaccacggttcatgctccttcagtaacacaaaacaaaacccagaaagagagtatactattagcagcagttttcagtatattttaggttattaaaaatataattgtggttgtagttatgttatagcgctaaccgattcct

SEQ ID NO: 7021 - DNA, 570 bp, Gossypium hirsutum
ggacttaagccgtacttacagtacctcaatcaaaacaaaggctttgtgttcttcttcctttctactttctttcaccttttgtttgtgtgtggtcaaatagcacagaactcttggatggctgctaatgttgataatcctaatgttagctcgttgaatttgatcacggtttacttggcaattggagttttctcaactttattgttgctatctagatctctttccacagttaccttgggtatgagatcttcaagatctctattttcgcagctactaaattcccttttccgtgctcctatgtcattttatgactccactcctctaggaagaatattaagtcgggtaagcttctcacttgctgaatattgatataacagttaactgaaaatgataggtgttactcatatttataccttttgattttcaatcaggtttctgttgatctgagcattgttgatcttgatgtaccattcagcttaatatttgcttttgtggctaccttaaatacttacagcaatcttggagtcctggctgttgttacctggcaagtcctatttgtttcggtaccaatga

SEQ ID NO: 7022 - DNA, 418 bp, Gossypium hirsutum
  misc_feature (409)..(409): n is a, c, g, or t
  misc_feature (411)..(412): n is a, c, g, or t
tctcttcttgcacctgcttcttagcttcagcccattctttctgcaaaatttggtcaggccaagaagttggtcatgaaaacaaacatgtcagcatttcttgagaaagtacaaaatttttcaataatcagctaaagatatatgaccaatcatcaggtgatacatctgcgacctaacttctacaaggtatattcaatactgcaaaataaatcacctctatttttttaacatactcctcttgctttcttctctccaaagctcttgtttcctaaaacacaattagaaaggtgatcaaaccaacatacatgtcaaatacgtacagatgagggaacagatgtattctcgtaacaaaataattaaaccttgttacctcacgaacttcctctgcactctgtatggtatccaaactagncnngcataa

SEQ ID NO: 7023 - DNA, 606 bp, Gossypium hirsutum
ctgcagcctccttagcagctgctgagctgcttccttggctgcttgttcctgcaaagagtgcagcagttcgattaagttcctgtaacgtatagcaagatagatctttattttctcaaaaaactcatgaaaggaaagttgagttatttttcacttgagttcaaactaacactaaagcactgagactcaaattagttacattgaactatttcactggatctggggctcaattttacaacataaaaatatgagaagaaacatctaaaattctctcttcgatactcaaatatatctgaattactaatcaaggagaaattatcctctcagagatgtttttaaccagaaagatttactagatgcttctttggattcccatacttgagcacatggcaatgtatggatattgcaattaatgtgcaagatattagactagagtaggccaaaataatgcagcactcaacgagtcatgagtcaaatcacctcaagatattcccggtttatttcttcccaaatgatctttttgaaacgcttctcctcctcattgtgaagataaccatcaacctgaaaatataatatttgagtaatccccaagaataattagaaactgac

SEQ ID NO: 7024 - DNA, 590 bp, Gossypium hirsutum
gaatgactggggacaaaattcattgcaaaagttctggaagttcccttaaaaaatgtacacctttagaatatttctactatgttttcatattaaagatttatgttcaatgttgtagcatctctgaggtacgacttcaagttggaagaacctgtttgttaatgctgaagctttaccggcaattttgttgtcttgcttgactctaggtttctatggcttgcaggtagcaagtatctttgttcctactgttgttactttgtccttgatcacattgttgggctggtaagatctgaaaggtttattttgtcatattctcctttttgtgagataaaatgtctgatttccatcttatattgagttcttttgttgattgtttgtaggtatgctggtggagctgctggagcctaccctcagcagtggcttccagaaaatggcaattactttgtttttgcccttatgttttcaatatctgtggtggtgatcgcatgtccttgtgctcttggtttggctactccaaccgctgtcatggttgctacaggggttggagcaagtaatggtgtgttgataaaaggaggagatgcactggaaagagc

SEQ ID NO: 7025 - DNA, 372 bp, Gossypium hirsutum
tgtatttgaatgcacacatgtatacgtatagtatatttttacttcttatagttcttttgcttatcaacttaataggatgttttacaaattgtaggtaaacaacaagcatccttgcttctacacttacagaaaattcaaaattatatttgacatgcacacatgtatgcatatatacatataagaaaatggacatttacttgtataattagtatgtgcgtgtatacacacacatgaataccgcagacatgcaagatttatcttttacattctctttatttgtccaacaaatttctggtaactgttgctatttgctttattctatggttccttggttaataatacatcttccacggaaaagaacctttttttttt

SEQ ID NO: 7026 - DNA, 702 bp, Gossypium hirsutum
  misc_feature (695)..(699): n is a, c, g, or t
cactttaacgcaggaactgtcaaaattagaaagcacaggagctggttccaaaggaatgaagcaattgtccagtttatttcaactgcaaaactacaaaatcagcctaagctttttattactagttgattatttggttgcaaatcccagaagagtttgatttctgtccccttattttaagaatttcttcctaagatgaagcttaaaagcatcaacaaaaggccctgtattaattatagaggtacaccacctgtgctgattcactgttatttggggttgaaccatacaaggaaagctcttcactgccaactgcatcttgcaaagcatcagaggatgaccttcgcaagcgcttggccagagggacatcaccttcaatatctccaacctagaagaatagaaaaccagaaagaaatctttatagcattccaacagaaaacaatttaatgaagagcaattttagaatgaactatgaaactatgccgaaatgatgccaagatattcctggaatatgagataacagccctacagtgtggtattatcaaccaactaatagtgcctaaaaggtcaagtgtgcatagaagatactgaaaacagcgttgcacaatccagaaacaacaatacctcaaaattatttaatttagtttataaattactgaatgatgccatgatattcctggaatatgagataaacagacctnnnnncct

SEQ ID NO: 7027 - DNA, 561 bp, Gossypium hirsutum
gaggagatggatacagtcactgtgaacgtgagaatcaagattttatttgcacggattaagtgttttcttcaaagttaatgtttaaaatatgaagttacagatttaatgttcatttgtgattcatgtcttatgatatgggcgtaataggatgcatggcattataggattcatgtagcctatctaacatccgtgtccgacacatatttggacatgggtatagggctatggccgtctaaggaccctccaaatatatagaaaaacttagaaaagtttgatttgtgagaaaagtttgatttgtttttttgacttatgtcttgatttgaagccgctcattgactattatgttttgcatatgtgtgataagggcactaaaactttcttcttgagaaaggactttgtaaccctgtccgatatatatcgaaacatccatattgggatatgatcatccaaggactctcaaaatacatttacatcttgaaaaattttgaatatgtctaacatagatttgtatgttcactcattctattactcttgccattcagctggtgggcctggaaggtg

SEQ ID NO: 7028 - DNA, 663 bp, Gossypium hirsutum
  misc_feature (656)..(656): n is a, c, g, or t
  misc_feature (660)..(660): n is a, c, g, or t
aagctcaacgatagtcaaaacttctaggaagtacatgcatgctttaagtatcttcataagatatctagccccggaaattcggtgattaccccattagatagatggatagagattgaaaaaacagcaagaacaactgatacataaaatgcaacaaggaaaattctgtgataaaattcatggtccattgtacgggaaaactgatgtaccgtatgtactgggactcagggtgaggtcagatacagaaatgtacccagtacatgtaagctcaaatttttttctaagtttttccatgtatttggaaaatatagcatgaatcaagccagaaaaagatggtaactaggtctcatatccgtagcagaaataaagataaactcttccgaaatcgatcatcattaattaaggagaagaaaaatcacataagcggtaaaagaaataaatttcaatagaaagcttttaaacaacataagttaaaactgacttacctgaacaagagtttccaatttttcttgcataatcgagaattcttgttttgcagcattcaatgcagtgattaagctgaaaatagaaagaaaagatttctgattacggcacaggaactaaagccacaaggtcagataaataagagcatgtaaaccgaactgttgcgcttctgaagnaatncat

SEQ ID NO: 7029 - DNA, 678 bp, Gossypium hirsutum
aagtagctgcgggtgtgcttcaagttggtcatgtgtcaagtctagatcaaattgctgatgtgttgacaaaatggttgtctgcaatgctgttcaacaagttcaggaggtagctgagggttgctccatatgaaggttaagttcacggaaaaagaaagttagaagagcacggggaatgttatgaatattaagtcagttgtaattttagtttgttagtcagttagttgttaagaaacagttatgagttgcatgtattaaatacatcattgtacatctctcttattcaagaaagtaagaagtcttttctgctaagatggttctaaacttcaacacttacggactaaaatgtaaattttatgaaatttatggtaaactcataaaataaagtgtaaaataatttgatatgtgaaataaaatattacgatagaaggcttatttggagtgatatatgataatgaattaaatataaatgatgttaaagtgatatatctgaaaaaggccttaaatgtcatcttgaccaactaaatcacccttaccaaaaaactccccatctcgaccgcccagggagcatccccttcatcgtgtaaccaacaacttttggccgcaatcgccctcttaggcaatgcctcaaccgaaaggtctcattcaaatggtaactcttttttcccatgcacaatcctg

SEQ ID NO: 7030 - DNA, 582 bp, Gossypium hirsutum
ctgtctttgttcattaagctaatagacatgcagattgatagattgttcattttgtatatttttttgtgcttaatttgattttgaattagttcctgctaattgatgaattttgtgtttaaatatttacagagatgaaatttgggtgttttaaataaaaaacaaacaaagaaggaattaaattgaagcatgagaaatagaacagggactgaatcataaatttgagacatttgaggggctgatcaaattttaaccttgtaaaagccaaaattagaaatgaaatatgatattaatttatgtagttagtaatatgtggaacaagcttaaaattagcgtatgatttatgtataaataggtggtgtggtacacttaaaaggcagcttaatttacaaacactactatttactactgtttaccactatttagagttattttattgtaggaattatttttatttgataatttcgacaccctccatagatgaaacattgagggcggtgagagatatgtaccttggcaaattacacttgcttggttgccatctatatttaacgtaaagattatcagggcggccatactgaggca

SEQ ID NO: 7031 - DNA, 646 bp, Gossypium hirsutum
tttggttgacaaagtgtaattgcattgaaattctttatgtcatatttagtagtataaattgtaattacataactacataatttatatttttaaaaagattaattattatataaaattattagtatgataaataaacaagtatcaaaaataaaataaaatcattatatgtattatgctagcctaaaaaagtagatgataatatgagtactaataaaaatagcaaaaagaaaaaaaaaacatatataatttttttaattgttctagtgcatatttgttgagttatttcatatttaatatttaacatatgcttcttatcatcatcttttagtctttgatcgagtttattatcatttgaatttgattttacatcattaaggttattaaaacttccttttatatactcttcgaagtatatggaccatctcaatttcacgtatgattgaagttataaaatattcaatatgttagtatgatgtatcatttttttatgttatactaatgagatgttaatatgagaaataattttttagaaaattacatttcttttcaaccgcatttcgaaatcttaaatgtgccaaattgaagagtttacgaggtgtctatgatgcttgtgactagcaccgttctttcaaatagtattacacct

SEQ ID NO: 7032 - DNA, 613 bp, Gossypium hirsutum
  misc_feature (299)..(299): n is a, c, g, or t
gataaaaaattattagtaaaaaaatattaatttaatcagttaagatttataattaatttatcattttttataagcaataatcttaaattcctttcgacttggttcaatgagctaacttaaaattacgtcaaaatacaaatcttttcccacatttctgtcaaaaattataataatcacattatattaattattttccattgttttagtgcaagaaaatcaatcacatctacgctttgtaggggttggggggggggggggtgttcaatatctaaatgtgatttatgtgatggcggaaacanaaattatatgaactcagtcatatatatatataacattcacagtaatgcatactatatcatatagcttacatatttctctccaatatgcaagcaaatgattatacatagctcaaaacacaatattatttgtttaattattttaatttcagaagctgattccccctccaagcataagtaaacagtagtatagcagaaggtatgccaatttcatggagttgtgatacctgccaaacaaaaataaaacaataaatttagtcgacgaagcattaaaaaaaaaaggattttatgtaattaaattgaatataaagacaggg

SEQ ID NO: 7033 - DNA, 539 bp, Gossypium hirsutum
ggtgactacaaaatgtcacccaattatgccttttgttatattttggttacctaactattaatttttccaattttgtcactaaatttttcgaaattaaatattttagttactcttttgtaaacctatccatgggccaggtcactgaaaagtgaaagagtttagacaaaaatatgggtcggaaaaatgggcttggacaaaaaaataaggctcgtttagaaaacaggtcgagtctcgggtaaggcttttttagcccaatcccggccaagatttgcaaaaaaaaaaagatgttttcctacagttttgttgttgttttctcgctgttttactgacatttcactattatgttgctattattttttattaatttttggatattgtatagctcttagtttattgttaattttactattattttaaaagcatttgcttgttaagttgtacctaatttagtgttatttaaatataaagattttttaaatttattttcaatttattggaaacatgtatgttaatgtttttagtgtattatttatatatat

SEQ ID NO: 7034 - DNA, 372 bp, Gossypium hirsutum
attcaaaacaaacagcaaattctgtcatataacccttttgaagattgaaatgtcttcaggatgggaagattattacttatgttgacagatgttgatgaccctacatccagttccgttcctatgtgaccaattcattcaatcacggttaagaaccggcattcaacaaatctaagatttgaaccccacagatccaggggctaaccagtaaacatgtatgtctcattgactagcatagtcataaatcagctcatcgagggaactgttttgtcatgaattaaccataatgaccatcctctagtcatagagggcaacctttcaaggcttgttaggaatatgaagggctttgctaatgctatccctcaccctcagctt

SEQ ID NO: 7035 - DNA, 574 bp, Gossypium hirsutum
  misc_feature (27)..(29): n is a, c, g, or t
atggtggtcctgaaatgccctcaaaannnggggtaaaacacgaaattagatgctctgcattcaacatgaacatctaagctgatgaattattatttgatgcaaacacccaaatgacatgtccatcaagtttcagtacctgcaaaaagaaattaggcttaatcatctctttacaaagttgaatcaatgtagtctttagactagaaatttacatcaatgtggtaattaactgcagttgactgaattgttattatactgacgtaacaattttactcagaaaaattcaaatcttttctaaggaattattaatatttttaaaattttaaatatataaagattaagaaaataattactgaaaaagtataaactgtattaaaagattaagtagttataaaatataaaaatatgaaaaatattaaaataaatgataaataatgatttaacaaaaataaaaggttactaaatagattatcaatatatggcaagataaggtgactgaaataatattccagcaatataatttcggttctcttaaaaggaatttctaacttcctccatcaaagctaggtagcaaaat

SEQ ID NO: 7036 - DNA, 652 bp, Gossypium hirsutum
actcaaccatcaccaagtgttggatgcaatggcaaaacccaaaaaaataatagggcttgagctttgaagacaacatcgttggaagggatagtcatgaactccgaatatggaccataaaatgaatataaaaaaataaaaaattgatttgaatgattcacatatgttcattagttccattgcagaaaaaaatgaaagacccgatgaatcagaacactgtcaagtgttcaatcaggaataggagactggtccagtgtataccatcgaacgagttgcaaaccagtgaacaactgattaaactggtaaaatttggttttaagtttctgcatgtatctccatacacattggaaatgggcaacaaagtacataagattttatataagaacctagaagctagctactattttagggtgaatcacatacaagatactctaaagcatctaaaatttttaatttaactacgcagagtttgatctaagcttcaatccaggtagattcagattttatgtagcagttcaatgttatagccagttggcccagttcaaccctcatcaccagtacacgatattgccagaaaaaaggtccaacccaccatacaggcatatatattatcagcttatataatagaaatagcttgaaacccaatccaacttac

SEQ ID NO: 7037 - DNA, 628 bp, Gossypium hirsutum
agagtaagtggctcatccacgatatcagatgatggatacaactggagaaagtatggacagaaacatgttaaaggaagtgaatttccacgcagttattacaaatgtacacatcctaattgtgaagtgaaaaagctatttgagcgatctcatgatggacagattacggagataatatacaaaggtacacatgatcatcctaaacctcaacctagccgccggtattcttctggaaatacaatgtctgtacaagaggaaagatttgacaaggtgccacctttgactggtagagatggtaagaaaagctacacatttagtttttctatatgttgattacatcttaagttatgaattaatctttcatttttccccgttttagacaagtcatccaacatgtatggccagatggctcatagtattgaaccaaataatacagcagattcatctccggtcacagctaatgatgataatgtggatgatgttgatgatgatgatcctttctcaaagcgaaggtattgttatttttcacatgaaggtttaactttctactctgtggttttgtctgcttgctaattgatattatcgaatatgagcaggaagatggatggggggattgatatcattcctgtgg

SEQ ID NO: 7038 - DNA, 597 bp, Gossypium hirsutum
  misc_feature (61)..(61): n is a, c, g, or t
tgtttttcttagatggattccgtgtttgatcatgcattgtatgatacctgatggtcatatnggccacatgtattacttactgtgattttgtttacagaatgcccctgcaatttatcgtagtagaactgtctttgaggatgcaactccagagttggtcagagatttcttctgggatgatgagtttcgaccaaagtgggacactatgctttcatatgttaaaattttggaggagtgccctcgtacagggacaatgactgttcactggataaagaaggtaggtgagatgaatggtttgtataatattttttactgattttttttggagtaataagctttaaagcgtttaagactttgtatggactcacatatctcggcttgtttcatctttttggcagttcccctttttctgcagtgatcgggagtacataattgctcgaagaatatgggaggctggaaatgcttaccattgtgtgacaaaggtacatgctataactatgttgcactaactcttcatatttgttgcagtaccggtgtccagcacatggggatgggggtatgacctccaaagttccttcaaatacagaaaaaatcaaaaat

SEQ ID NO: 7039 - DNA, 580 bp, Gossypium hirsutum
gttgcttttgtcgatacccttgtctttcttcttaaatccaatccttttgtttaattaatgttggatgtgctgcatcatatctttaataatgccaaaatctattcatcttttcattgctcttatacaagtaatttatcaattcaaacaccaacaactttattttatattctcaagcaaaacaacagatcatgaagattgtattttgtctttcctatttagaaagtgagaaaattattctttataggttggattaaagagtaaattagtcatttttattaaaaatttcatctatttttgctattaaaaactggtgtagccaatgaaataaccagatagttaccacatgtaccttatattgatgtataggaactagtttttaacggtaaaaatggatgaaatttttatcaaaatgacaagtttgctcttttatctaacctatataaactaatttgcctatctttttaatagagaggacaaaatgcaatataacttttaatataaaatcctccttttttagtgttgttattttatttatgagttaattatgtcatacatccttaaattatagtcgtcattctaa

SEQ ID NO: 7040 - DNA, 602 bp, Gossypium hirsutum
  misc_feature (582)..(584): n is a, c, g, or t
gcatcaactcagatgagagactagcaaagagcactgccgtccgttcggcctctgagatctgatatccagatgctgcaagaagagcgcacaagcttgggattttattaacatatgatcgaatagaaagactgcctttccggagaaagtgaagctcatgatacaactgtgactgctttgtactcgaattagccgtgaacaggttattcgccatgatccagacgtcatgttcagtccgaacatccgtgaaagaggaaaaaaatgaagaacttatcatggataaaagctagaaggtaagcaaactgtcttgctgatcaaagatcaaagcagacgaattgactacaagactactatcaaaggattgaacaaacctcgttggtgccgtcaacgatccatcaagaagaccgaacaaatcgtagccacaaggaatgagccagatctgctgctttcattgaacgaacgaaccttcatccaatttgacaacctcatgccgaggaaaagaagtgaccactcgatcaccaagaaacaccgagccattaagctcaacagaatcagatcgacagaatgcgtggtagccatgcccgnnnatcaccgagcgactgata

SEQ ID NO: 7041 - DNA, 591 bp, Gossypium hirsutum
gctcaactattagcaatgaagaaagctattatactccggcttcacgttcgattagtggcggtttggtgactccggccaagacagaaatgaatgggaatactaattctggtcgtcctcgttccaaaagaacatctccaaaaacaaggcttttggcttcttcacccgaaatgaagcgtgttattatcccttcaataaagcagcagcggtcgcagctgcctcctcctcctccaccaccaccgcctcttcaacaatcacaaagcctagcccctgagttacatgagaccgaagaaactacttgtgcaaaaagggcgaaattctcctccccacctcctcctccaaatgtggcgttacttcgatcaattagcagccatatgtccccacaaagaacaaaaattccaccttcgcctccacctccacctccaccgccccctccgttcccagcaacgggaccttcaattccgaggacagtaaggtccttggaaaccgatgtgtctctaaaaccttccccagtgttaaaaacgcaagaatcctcgactccaattcccgatataagtgaagggggtgggagtagaaaatccatgaagaggtatc

SEQ ID NO: 7042 - DNA, 597 bp, Gossypium hirsutum
atacccaacttaatctaatgctccattttgcagttatgggtaaatttgtttaggggcagggtgagccttggcatcagtatccatggaaatcacttcagattttgctagtagttattgtatcatatgtaagttatggatttaatctttatattttaatacggatttaatttagacccaaatagtaattgttaaatctgtctagttaaattttatcattccaaaattcttatgtggcaaacatataattattttgtaatgtcacgttaaccacctattttcacataatactcacaaaaaattaaataattttggtaaatgaatttaattttaaatttcaaaaaagttttgactaatattgattaaattggagagcaaaaattaaatccacaatttatgtataatacatgaagaaattactttatggacccttctcaccacatcatccatggtctttttcttttcaattattaaataacgtttgagcaaattttttcatgtcattgatacataattttggaattttttttacttcaaacttagaacccaaaacccaaaatcccaaatctcaaactcgaaccctagaccctaaaactcaaa

SEQ ID NO: 7043 - DNA, 665 bp, Gossypium hirsutum
cggtagccaatttcagaagctacagcagcatgttgcaagagtgttaaaaggcttctcgcaaccccctgaagtgagatgtggaacttacaatccggaagttctgactagccaaaagcgtcagtgggcaaactttcagctgcaacatttggtacggtacttaattcaagtgaacattttcttgttaatgttactcgtacctgtgtatggactcttctcagcaagtatctactgagggatgcaactttttttatgcagctgttattttaatacagcttgtctaattacattcagtttatatttattgcaaggcctaccttgatgtctgataaacctcttatattttacttgtatatatccattattatttttaactaataatgaagaatttcgaagtgttttcataacattctgttcttaagtgtgcaggatcatagatcttttaaaggaccatcaaggttgtttgagagcatggttgttgttggacttcctcctagttgtgatattcaggcacttcaaaggcaatatgtcaccaggcaatctgaaggttcggggaagttgcgaagtgctctaagttgtcagaataattctcgggtcgaaccttacgttgaaccccaggtgagtgttcttcataaaacaagtgattccttatatcttgaagggcgatt

SEQ ID NO: 7044 - DNA, 800 bp, Gossypium hirsutum
  misc_feature (672)..(682): n is a, c, g, or t
  misc_feature (684)..(700): n is a, c, g, or t
  misc_feature (702)..(702): n is a, c, g, or t
  misc_feature (707)..(711): n is a, c, g, or t
  misc_feature (713)..(737): n is a, c, g, or t
  misc_feature (744)..(751): n is a, c, g, or t
  misc_feature (753)..(759): n is a, c, g, or t
  misc_feature (762)..(762): n is a, c, g, or t
  misc_feature (766)..(767): n is a, c, g, or t
  misc_feature (770)..(775): n is a, c, g, or t
  misc_feature (777)..(786): n is a, c, g, or t
tgtcaatttctgaggcaattttacgagacttgttgtgacaaacaagtaattaatataatattctcgggaaatactaggattttataataatgctgtctactagaagaaaacgatattgagaaatgattggttcattatcagtaaagttggtttgtcaaaggcttagtatgtttcagagaagcacacatgtttttgatctaaaacaaattatactttgatattcatttcccaattatttcaggtatttaaactgatctgtctttcctttctatcctatttgtttcataggaaagggacattattgagggtcctgtacctcgccttgatacctgcttgtgcatgttattgtctatcaccacgcttgtggtggccaatattgttgaggaagaggaaagtgagttgattgatgaaactgatggtagcccgtcgaatccaacaaaagagaagcaaaccacgggaagatgtcgtaagggtttaatatccagcttacagatgttgggcgattatgaggctttattgactccacctcaagcagtttgttcagtagccaaccaggctgctgccaaagcaatcatgtttcattctggtcgcacagttggcaatggatactatgagtgcatgagcattaatgacatgcccatgaattgctgtaagcactgttatccttcgtcnnnnnnnnnnnannnnnnnnnnnnnnnnncnccccnnnnncnnnnnnnnnnnnnnnnnnnnnnnnnccccccnnnnnnnnannnnnnngcnaccnnccnnnnnncnnnnnnnnnnccccaccaaccaaa

SEQ ID NO: 7045 - DNA, 689 bp, Gossypium hirsutum
  misc_feature (673)..(683): n is a, c, g, or t
ttttttattcattgaaattaaattatatatttttactataattaatatataaatttattatttttataatttttaaaaaataaatataaatttgtatcattttattttgctaaaaaaaatgagttgatacgtgagcagatcccttggatgtttagcttcatgttgaagccaaataatgattacagaccaaaagaaaagaaaagaacccagaaatcaaggaagctttccccattagtaattttgcatttataacaaacaaatatataagaattcacttgacatagaattatatctgacctgactgatattataaggaaaaaaatttcagttaattacactaaatatttctaaattataactttcagtttaaattaaagttttagaactcaatattttaattacatttattgagtttattaattaagtttttttattaccaaaatttgttaacttaattatggacaatgttttatttctttaatttttcattttaaatttagttatgaaagatttgatttatcgtttaaattaataattttaataataaaataatttaattagtctaaaattaataatttaaaggtgtaattaaaaggtcataatttgcaaataaaaaaaaatggaatataggtaaatgtcattttgactatgttagagtggttgctaaagggannnnnnnnnnntttttt

SEQ ID NO: 7046 - DNA, 496 bp, Gossypium hirsutum
gatgccagtggtacattttgctgctgggggaatcgtgactccggcagatgctgcactgatgatgcagttagggtgtgatggtgtctttgttgggtcagaagtgtttgataactgctcggatccgtataagcttgttcatgggattgtagaggcagttaggcattataacgatcctcatgttttggtcgagaatagttgcggattggaaggggagatggcggggcttaatgtttccgaggaaaggatggaacagtttggagaataaggagcttgatcaagtaatgcatcttctctttgcttcttcttgtagttgggaatatgagtcctttcccccctttgctttgttattgtttacttgttctagttttgataaggtatactgtattttgtttgccaagttaatacgaatatgaactagaataagttggtcgattattctgttaccataattttgtatgttgaactctttgaggctatatataatgcaggaatgaac

SEQ ID NO: 7047 - DNA, 673 bp, Gossypium hirsutum
gttgggaacactaaggctaccggcaccgagaccaccgaacatattcatcaacaagtccagactaggagtaccaggtgctcctggaaatgcaataaaacaaaatgaagtgtaaaatatagtcgaaataagagcttgttaagagaaggtggcaacacaagctagagagttcaatgtttaacagagccctttcaggcactttatcgaaaaaatctgtaactacagtttggacttgttcgtattttgtacctctagtagtactgctctgcgttgaatccctgtaagaatgctagctacggttagaaaagtgatgataatcatcaaggtaagttcccacataaaaaatattaagaacagaaaaagaatttgattctatttttattaaatccttcagatggccaaatctaaaacaacaatttagaaattattatggttggtgtacaagaaatctaagtccaatcaagaaacagacactaattcactatagaaatcggcgtaatgataaatttaaccctcaacgtctacatcttttaccaatttggcccttattctatttttaattaaatttggccattaagtaaaaaaagagtcaaatcactttttttaacggaaatgctgactaaaacattaattttttaacaatgttggcatggcaatccatgtgtactttatgttg

SEQ ID NO: 7048 - DNA, 682 bp, Gossypium hirsutum
ctagatgggcagcaggtgataactctccaggtgacgagggtgaaattttagaagatgaggaaatccctaaaagaagaaaaaagttgccccttttagaattatctcacaacagattacggaataagtcagctactccagagcttggggaactgaagagggagggctctgagggaattagagccagatcatctgaatctgatgaacaaggtgctcgttccaagtccagaagtggggatgattaccctggtaatgattcagagaatgatgacttgatggtgattgacattaaacatgatagaaatgacggcagtcttagccagtctgatacagaatctgagaatgagactaattcacgtgggacacctgaaccttcagctcctcctttaagaagtgtaaacatgcttcagggatgcagaaatgttgacgaatttgagaggctaaacaagatagatgaaggtacttatggtgttgtatatagagctaaggacaagaaaactggggaaattgtggcgttgaagaaggtaaagatggagaaagaaagagaaggttttcctttgacctctctgagggaaataaatattcttctttcatttcatcatccatcaattgtagatgttaaagaagtagttgtagggagtaaccttgatagcatttttatggtgatggaatacatggaacatga

SEQ ID NO: 7049 - DNA, 588 bp, Gossypium hirsutum
tgacttcttttcgtttttttccctttttcatctgaaagctttagctatggatcctttcgatttgtttcgcaaaggtataattttcttcttagatctctctctttttttttcatctgtctttctccgttccgtttattacaaaatttacctttttttataattttttttttatttttttgggttggattgacttgagatctcggatactttgggactagataatgggagattatagatttgacttatgctgccttttcgttttaattattcgtttagctagatacctagaaagctttttccttattcttatttttatttttaattagggtttttaattaaaggagcttgctatttaattcttacttgaggattttgtgattttcttttctcttcaggttaaagtcttgttgataagtgaatttcaaggctttgaactgtatattggtataattttggtttatttaatgaaaatctcgctattaattcgtagtctcaaggcttaattttaatgttacttttataggaaacgtttggctgtgagctccattcagtttttaattaaacacagcactatgttgttcattaagc

SEQ ID NO: 7050 - DNA, 627 bp, Gossypium hirsutum
taaaagcacttgtgtttttctcaaggagcaaggatcgattggggtttggatagagatcctaggtttgagcgaaaatgttctccctttttaccaaaaagatgtgggtggtagatataatatgagatacaagtcttgatataaatctggatgtttgtcttccaaagtttcaaaatgtgccaaaactacaagttttcttgcttgagcccttgtgctttaaatatgtgtagattagtaatggttcagtataacttttttattattataaaattggtaagtaatatgtatttggtacagtataatttgctacactaattgttaattttgagaagaaagaaagagaagagaaagagtggctgctgccgtggagagaaagagaggaagaaaaggaggagagaagagaatgaatatcagaatgaattgcatacattgccctcaaacctcaaggaaatatatacaagtgagactatacataaaaaggaaaggtaatcttctaattacctaaattttagcctattataatcctaaatcaacgtctaaggtttatacaaatcttaacattctccctcaagctggagcgtataaatcatatgctcctagcttgttacatatatatccaactccgaggtt

SEQ ID NO: 7051 - DNA, 638 bp, Gossypium hirsutum
cagttgcaccaattaaaatgagttccttctctatgagttcagccacctgcataagttttaaaaatatgataaattaaataatcatttaaagtacctccacaaataaaggcctttcaacttttcaataacaataaagctgcattggcttccaatatttctgttgtgaaaagaaatatatattataaattcttttagattttgtgtgtttgtccaagtcagaacttggccatattaatgtgctacttcaacctctaagtatgaaatgccaactgattgagaagataacagattttaatttgagggttttcatggataaaaaataaaagagtaggggcctagttaggtacaataaaagcagaagggtttatttacaagggcttttctaatatatctgcctctatggtccctctcaatttcgatattgagcaaactggtccctctcaaagaaattaaagcaataatccctatcaatttcaaaagtgagcaactaaggacaaataatcattaatataataacaaatttagctctcaaattttacataatgtgtcaatttggtcttgatttaataaatttagcccacaacatttatgtattgtgtcaacttggtcctaatctaacaaatttagcccataacatt

SEQ ID NO: 7052 - DNA, 631 bp, Gossypium hirsutum
gaatacaacacgacagcagccaatagaaacgagaaacaaacgaattgtaaaaatatattcggttataaagccgaaggaatccgtttttgtaattttttacacacacaatcaatactaaaaagaaatacaaagatttccaaaggtagtccctttctcttattttcttgaaactcgaagcaaatataaagaaataaaagagaaatcacctgttcttcgcgcctcgccaccattggaagccctttttcgttcatgaaagccataagaaaccctaaggtttcgaataagcttcggagaagaggaatatgaaatgggtaaagtgcaagggccaaattctattcgtttttttatttatttcaaaagattgcaagtagatctaaacttgttttaaaaagaggagagggtccgaatgttttatttttcggcacgacggagctatggcggagccaccgcgctagctcgccggagaaaaagagggcgagagagagtctataggtgctctctatttttgaagaaaaaagggggaaaatgacttttttttctttttttttatatttatatgaggattaaaacggcgccgttttggacttaattagccatgaccaatacgccaccgttttaagccataccagta

SEQ ID NO: 7053 - DNA, 608 bp, Gossypium hirsutum
  misc_feature (25)..(25): n is a, c, g, or t
tcccaatttgtcgagagcctgcaantgaacaatcatcctaacagcccaattttgttttttttctccgttgaagactggtggcgccattgtgaaacttgtcgcttccatttttaacaggtcctcaagataacaaaaaacttttgagggcaatttgttggtaaaaaagcacccaggaaacaagagaattctatatatttttcactgaccatacattttattgaatgaccaatgttgtatttatacaggaaattgtaacaaaaggatagcaccaattttttttttttaaaaatagaaaatcaaatttaaattttgaaaagaaattttgctgcaacatacttatctttgatcgatttctagcggattcttgggcgttggttccaagatgaatgcattttacccttttcatttcctttttggggagggaaaacttaacactgccaaacctcccaatattgatgtcaaaaagaaattttgctgcaaccacatatctttgatcgatttctagcggattcttgggcattactttcaatagtacagcacttttaactttttttgtctttttctgtgatggagaacttagtactgcctaacctcccagtaatgatgtc

SEQ ID NO: 7054 - DNA, 544 bp, Gossypium hirsutum
ctgcaacgagtagtgatgcgccttcttgggcattgacaatggcggcagctattgggagacggtagcttttccaattgcttgtgatgaaagttatcagcatgaaaaaaaatgcatgctctacaaacgcatgactgaaaactaaacctgcatttcgtgtatgaaacttatcaactcattttagcaaatgaactaaaacggctaaaattacctgagatgaataaagcagctttggagaaacaaatataataagacgcccagttggatacttcttgagccatctccaacaacattttagctactgaatctgaatttttgcatgtgtttataatcatttaacttgtattattatatttatagtaacccctaccgtggaaaaatattactaccggccgcaatgaaccaaacgagaatctaccttgttagtgcatgcctgtgactggtggagcccggtttttagaataacattatttgcgtaacatgtacggaagtaacggaaccatatttaatacatccactcttttagagttgtacaaggtggactggg

SEQ ID NO: 7055 - DNA, 606 bp, Gossypium hirsutum
ggtttttcttgcttctatactactaattataatatcatttccatggcatgaacaagatagtcggatacaacttaatttatgttaagtgttttgtttcttcttcagccaaaaccaaaagcttgtcattctgtgtttactgaaattcattcaaatttttatagctactcaggctctgttttcatgtcaaagaacaaaaactagagacacaatagagccaacctgcaagtgtgccaaaaatactatagcaaatcccatgttgctcctatatctatgtcaagtacgtactcaacatttcaaattgggcattaacatgagacactaccctccaagtataggtcaagccaatttcatgattttgatctaatgtactagtcttattctgtaaaaatgaagacaataccagagtcatctcttatattttgtaatttactaagcaagccctttttgagaacttaattgaaccaaaaaaacatgtttaagaaaaactgcaagttatttagtttattctacaatgaataataaattgattatatgaacacttattaatttggatgatgtgactttcaggtgatcatgatttgaaaccatgggttatttcagtccctg

SEQ ID NO: 7056 - DNA, 653 bp, Gossypium hirsutum
ttataatgacataactcaggtgagattgtttctaaatatgcatcttgatgagtaatcactcattctttttgtggttgtttgtaatatcgctaagctacattttctttatttcctttctttttgcttacagtatccagtattcccatggatcctttctgactacagttcaaagagtctagatctttctgatccttcagctttccgagatctttcaaaggtggctggctttaatcttggtggcactttatatctgcactctccttttctgacattataactttgtatacttgcagcctgttggagcattgaatccagagcggctgaagaaatttcaagagagatatgctagcttcgatgacccggtcattcccaagttccattatggctcacattattcaagtgctggaactgtatgttttctattctgtttaacattttgggttttaccttttatagtgtatatttaaatttcttaaactagggtcactgctggatacataccagcaatccatgaagaaggttgatttctttagtttgtttctcatagtaattgggaaatttgtatacatttccatatgcgtgttgcttgctgagtatttgcctttaaaaataaaattttgttgtttactgtcttctgttttattattcttctg

SEQ ID NO: 7057 - DNA, 599 bp, Gossypium hirsutum
ttgtctctttaagaagctacggccaacatgaatttaacgccacaataaattcaaaactttacagctctgagaaacacctattattagtctctaccatctgtctccgttaacttttccttttacatcaggatgttgaagctgtactttttttcctgggagatagctaatatgttgctgatctagtggacatctgatgtttttaaatctagcaatatctgttttgctctttgtatgcgctcatcgtattttttcctctctacatcttatgtttccctctctgaaatttcccttttcttatgggagatacacaaaattctatggcatatctgaaagagcagctgtggacttggttcatgatgcactaacaagtatggatctggtttgaatatccttttattatcttggagtatcctctttttacaagtcattgtttatttggaaccatgcttttcaatataaatttctgcttctgttttcagaaccttttaagtgatactagtaaatgtctattaacttcatatttgaacctaagaccgatagcattttgattgattgcttgtagattacaagcattggaagaagagatgagaaatgcaaag

SEQ ID NO: 7058 - DNA, 537 bp, Gossypium hirsutum
  misc_feature (358)..(358): n is a, c, g, or t
  misc_feature (368)..(368): n is a, c, g, or t
  misc_feature (387)..(387): n is a, c, g, or t
  misc_feature (404)..(404): n is a, c, g, or t
  misc_feature (431)..(433): n is a, c, g, or t
  misc_feature (435)..(435): n is a, c, g, or t
  misc_feature (454)..(455): n is a, c, g, or t
  misc_feature (482)..(483): n is a, c, g, or t
  misc_feature (488)..(489): n is a, c, g, or t
  misc_feature (491)..(492): n is a, c, g, or t
  misc_feature (495)..(495): n is a, c, g, or t
  misc_feature (497)..(524): n is a, c, g, or t
  misc_feature (530)..(532): n is a, c, g, or t
  misc_feature (534)..(534): n is a, c, g, or t
gcacttgctgcgagcagagctcgttatattcgcagaagggaaagacaaagatcttctggacttggcccttctcgagctcttttttctacctctcctgaaaacatgccaggcacactgcacatatatccaaattcaccagatgaatgccaaaacttgagtcatgggttaccccagtgtgattcactggcttcaggcataccatcagttaatattagccctctgtcacctgttaccccgtctgttattatggtctctagttctactgcaagtggagataaagctgttaaaccgaggttcttattaccttactggcctaacttggtaaaaacttggtttttggtacatcctccaatggaanaacattcttnaaatttggtttccttcaanaatggggctagtggatnttttggatttactaaaaatcttctgannngnttttagttggtggctattnnaattttattacaactattatggtactnntatgnnannctntnnnnnnnnnnnnnnnnnnnnnnnnnnnnagtttnnngnttt

SEQ ID NO: 7059 - DNA, 613 bp, Gossypium hirsutum
  misc_feature (465)..(465): n is a, c, g, or t
  misc_feature (468)..(470): n is a, c, g, or t
  misc_feature (496)..(499): n is a, c, g, or t
  misc_feature (505)..(509): n is a, c, g, or t
  misc_feature (526)..(532): n is a, c, g, or t
  misc_feature (534)..(541): n is a, c, g, or t
  misc_feature (544)..(544): n is a, c, g, or t
  misc_feature (550)..(571): n is a, c, g, or t
  misc_feature (582)..(587): n is a, c, g, or t
  misc_feature (591)..(601): n is a, c, g, or t
  misc_feature (603)..(603): n is a, c, g, or t
  misc_feature (606)..(607): n is a, c, g, or t
catctggagtccttttggcataaaaagtgactggtgcaagaaattatccctgaaaacaatttaaagaaattccagcttaattcaggccgatctaaattttacatagagaagaagcacagcatatgccatagtgtaccttttcttcgtgccagcatcagcagttcccttccgtttcatgactgagttaggtcttaaggtacaatgtctgtgaggtgtgaaaaagaaaaagaaaaagaaaaagaaacaaacaatctatcttatgaagaaggtagatagccctaataacagccctcttgaggaattaaccataaaattagtcagaaaaaaattcaatccaccaactcatatgagaactaaattgaaaaggcaaacgtgatgctcaaatgccagatttgattccactaagcacccagataaaaccaacgaggtaaaatccatattccatatctagggtgaaaaccaagnaannncattcaatgaaacctgaccataagannnngacagnnnnnttttttttttttttttnnnnnnngnnnnnnnntanaaaaannnnnnnnnnnnnnnnnnnnnntttttcctttnnnnnnaaannnnnnnnnnngnaanngggggg

SEQ ID NO: 7060 - DNA, 594 bp, Gossypium hirsutum
tgtaagaaagcttatgaaatcatcaaggaaatggaggaagtgggaatgaagcctgatagtgtcacctgtaacacattgatcgcttatttttgcaaaagtggggatttggcacttgctcttagggtgatgaaacggacgattaaggacggtcttgtgctactactgccacatatagagcgcttctacatgcgtgctgcttaaatggaaaaacaaagggagccatgaagcttttcactgacatgagttccatatcaatgattccaccaaacactataacatacaacattctaatagaatctttgtgcaagaataacgaagtcaaagtcgctctatctctgatggaagatatgcaagcaaatggggtgaagcctcatacgaccacttacaatgcattgtttaaaggcctgaaagagaagaatatgttggaagatggcttaatatagatggacagtaagattcagcacgcttgccatccagactctataaacatgcagattccaacagaatggctttctgctgttggtgaactggaaaaattgaaaagcttcgttcaaagaaacaaggtttctacctcgattgcatagaatggtgcaa

SEQ ID NO: 7061 - DNA, 608 bp, Gossypium hirsutum
  misc_feature (29)..(29): n is a, c, g, or t
gggccttttcttttgttcttaaatacttnggttattacagatataagttaattcgaaatatcattcttttactaatgcgttctctcaagattagaattcatcgcacccataagttttgtatttatttgataaaaccgaaagactcactgtagttttaaaaaccaaaagtaactcatggagatacaatacaataccttggcaaaggtcgtaattgataatcaagcttaaggttttagtttattcatctgaatatggtaattgactggtcgttttatcaaaaacagatgctaagcctacttgatttgctgcatttaatagcgaaaataaagcatatatcatgcatcattctatctcttcctatcacctcggcttcttttatccctatcatgatcgtcatcactttcagttctccggtgccatcttctatccctatcatgatcatcatcactttcagttctccggtgcctatctgtccgttcttccctccgatctttatggacatggtcatttgcaccacttcttctgtaactcaactcattcctcgaatctcgtctgttactttctgcatatttcttcaaataatcactttcacccttcttgtcagtgta

SEQ ID NO: 7062 - DNA, 627 bp, Gossypium hirsutum
gaagggctctctcatgaagtgggatgttgcaagtttctggagggagtgaatggttaacataacaaagattaaacttcatgaagtacagttttggttgcaatttctcccatagggccgaccgtcctaactctctcctctttactatccataactcctttggcgtgtaacttatgatgacatcattgcttatatgtgcagttctacacatacgaaagcttgaagcaagtcatgttgacatcactgcaatcacctactcaactgaacacattacagactgtttgtctctgacatcctcctttttttaaataaccttgattttttggcaattcaatcttagtatttttggcttcaaccttccagaattgcacttacgtcagaggtaatgatatgatcttcttactgtgcagctagtttgtggtgccctatctggttcaactgcggctttctttacaactccctttgatgtggtgaagacaagattacagacacaggtctgcgatctctttgtattatttcattccctgtttttgtctgttcacgaaaagtctgccaaatattcttaccaacaggcttaaaggctgtactttccacgtttgcatacagttctacgcttgcaagaatgtttac

SEQ ID NO: 7063 - DNA, 633 bp, Gossypium hirsutum
ccctagacaactcctccatcaatgcaaagacaaaataggtagtaatttcgattcaaagatctctgtcttctgttatcactgacaactacgtatctctgtatgagagagaaatctaagtgtgtgtgtggtcaaatccatatttcaaaagctttttcttgtaaatacctttttgtttcatttacttcctcaactcaactcaaatccttcctcctcattacatttttataatctctctttttctcgtaaatacctgaaaaccagttcctctacctatcaccattcacggcctcccttatatagccgctttaccctattctaagagctgccacccactacactctaattactcgtttattttagcctgtaaatgaagggtttgtggatcctttagaacctctgtttcacggctttcaaagcaattatttatttcactcaagtattgaatttactgtaaatacattttttaactatttaataaaaactcattttaatttacatcttattaacaatttattataatataaacattaactttctattcaagttaaataaatgcacaataatgaggtaacaatatcagaaataaataaccaagtgatatttaatcttccttggcttttctttgtcgatgaa

SEQ ID NO: 7064 - DNA, 602 bp, Gossypium hirsutum
ctgttttgtgatttgtttaccgtttggtttggagtttagagtctaaaccgaaatatgagaatttcatattttctattgcttttgattgtttttttctgtttatttggacttctttttactttttttgattgaaagatctctaattttgcaggtaagggaatatattctcttttgtcttattgtatttatgttgatttttgtttagaggagatgaatttttttaaaaaaatttacagtaatggaaaataacgggaatagcagcccgttattgccacaattatccgttactcattaaattgtggccgcgatccaccactattggtgtgactctgcttcacaccgctattttcagctagcgattttggacggcaccactatctctatatagcggccgctattccggtattggaccgctatttaaatccttgtttcttacagtgctgtctgggaacaaacattacgtacatcctcctcaacaccttcaaaaaaagtaggaagtatcactatcacctggatgataacccaagatatacacatcactgacattcaaagctaatttgatggattggtactcattcgagagttccgccagaacatatgtc

SEQ ID NO: 7065 - DNA, 613 bp, Gossypium hirsutum
ggatgagaggtcaatgaacaggtaagtcttaatcttgctgtttttgtgctaagtagttttgtgcaatttcagattaaatgtctgaatttcgagagaggagaaaaaaaaccaaaatagggaggttgctgccaggaatggctgccgccttgagaaataaagaggaaaggaaaaaagaaagaaaagagaagaaaaagaacgataaaggaggagataattctgtatttttgtgcatctctttatttacaaacttcttttgcaattatacatttagtgtctttactattttatttaatttgatccagtcagcatgaaagtgtattggttatattaagagcaaatcttggatgagtatcagacattatctgcatttacaatcatagtggcatattggaatacaagctaccactgtaagtctgctcttatgaagttctctatttctatctctatcttgtccagcccccttacgtttttatgtagcaggaactcaagttgatatctcaacttttattgtttttctctttgaattgttgggaagggatatttttcctatctattgttcttttcggttctttcctttctttttgtcttgttttctgtttcctatggcactgta

SEQ ID NO: 7066 - DNA, 707 bp, Gossypium hirsutum
  misc_feature (592)..(595): n is a, c, g, or t
  misc_feature (604)..(606): n is a, c, g, or t
  misc_feature (611)..(626): n is a, c, g, or t
  misc_feature (628)..(631): n is a, c, g, or t
  misc_feature (635)..(665): n is a, c, g, or t
  misc_feature (669)..(693): n is a, c, g, or t
  misc_feature (696)..(698): n is a, c, g, or t
aaaccttctttcaatttgaaagcacaactttacaaggcaatgttattgttaaaccattttgctttcattatctatttaaatatttataccagtgaaaaccgtatgtgctattgaggaagtgggtgttgcagccgatattagagggtaaatatcataaatttattcgaaattaattttgcttgcatataatgttcttaacattcactgttggggaaggaaccaatcaaatcttcaatacagagagaaaccttggaatcagatttagaaagttatcttgtcagtagttggatttggatctacttagtaaatcatattagatgaagcggcaaaatggttctttctttacaattgtgtttactcttttatttggagctcttatcctttcattgttattctatgttgtatgtcccgttagtaactaaatttaaaattataatttttttaaaaaataatagcatttttgtcgttaccaagctaggttggtgctcagttgattgatgatatcaaatttagtaaagaatttaatgcatattagaaatattattacacgtgtattcatgagaaagcacagatttagatgatggtatagtgnnnncatggatgnnnatggnnnnnnnnnnnnnnnnannnnaaannnnnnnnnnnnnnnnnnnnnnnnnnnnnnnccannnnnnnnnnnnnnnnnnnnnnnnntannntttataaca

SEQ ID NO: 7067 - DNA, 659 bp, Gossypium hirsutum
aacaaacaacgagttaaaacaggaagaagaccgaaatagcaaaaagcgttaagctttgactaaatccaaatgaaactatcgtattaagcattaattgagatttaggattgaggtaagagtttttggcatgtagatatgtagttcgacacaagatttaaagcattacctggtggagtcccacagcacatattcctatcatctatgtgctcaacctcaagtccaataaaccatgccccgagggacacatcttcattagcatacttgtgcaatataggcctgcaatcattcagaatcactcggaatattagcgatacctcttttaaaagattattatcagatacagaaaccggaagagtaaaggatataaatttgatcagcattttaataagcttgggaattttaatggacttatgcaagattacaaaagattaactctatgctcaaagtgataaacaagggctgattaaataaactgaaagaaaaattgaagacagagagaaaacttaagtcaaggggatgtttgcaaggcattgccaaatgggcacaaatacaaggactatgaaaattaaatcagaaccctcaattacgcaaagtaatataaacaaagaacaggctactccaagacaaaaatcaaagatcttactggtttatggagatgt

SEQ ID NO: 7068 - DNA, 608 bp, Gossypium hirsutum
  misc_feature (303)..(303): n is a, c, g, or t
tgatgtactacacttccaaacattcatattatttgatcaaatgcaaaagataacagtacccttctagaagaaacaccctttgaagaaactgacaaacatgtacctaacacatagatcagcaattacagaacaaatgtagatgtggacccagaaacaaattccttagatttaggagattcttcaatctaaagatttactttatatgggaactccaagcataggacatattcaaattactaagcatttaaaatatattctacaaatgtaactcgaagtcactacaacgatctaacacggtaaganagatagtcacctggactgtgggtcttccttttttccttagccaccttttcatggattccatcaagcatggaaatgaagaattcatgtgcgtcctgctgctcgtaactcgccaaatttgctgcatgttgccaccaactgcaaaaacctcatcaaattagccccacacctttctttttacctcaaaagcaaatattaatagcttacacaacatcaatatggtgaagaaaagaaggggggaaatcaactttttgattgaaaattaacctgtgcaagaacttagctggactataaaggagaacgaaccc

SEQ ID NO: 7069 - DNA, 478 bp, Gossypium hirsutum
tagtgttaggagtattccatgcttattcatgtgatctttaatatgatatatatatatatattacagtctttatataagtgcgtatagtgttaggagtaaatccatgcttatcatgtgatgtataacatgatgtatatatacagtagtattttggtggtacattggcattgaccttttaaaaatggtggtacagctagccactaattacgattgggaatattattattttaaagataacaaagattatggttaataaagggagaagggattaagtacaaaagtggaatctgattatattacaaagttgtccaaaagaaaggtgacaccatcaaattcaatcaagaataagaaaaagctagggcgcattttttcatgctcaagtggcttagggcgaaaagaaacgaataactattgattaagtgcttaaaaaaaaaaacacaaagcatcaaaatatttgcaaacaagtgtaaatagggag

SEQ ID NO: 7070 - DNA, 604 bp, Gossypium hirsutum
ccgtgtttcccttcctggggtatccatggataaaagtaagttcctttagtgtttaagatcaatcacactcctcatgattgctaaacctcatctctttgattaagagagggaagggctgtggcaatggttcatgccattaaacctctattccaggatttgtgattgaagctaatctagttgtgatgttcatttaaattgaattctctgttagaaaaagtttgaatcatcatattcatgtttctatctactttgttatctctattttggtgggatgaaaaatgagaatctttacgagtgcaggagaattcaattgtgtgattagagcagatggtaaggttacaatacagggtatactgactacgggggagcagatagtatccaacaaatctggagtctttcgtatgctgacacaaaatctaggcccaccgggacccttcaccgtctcattccggctacctggtccggtcaataaccaagaagtgaagagtcatttggcttgcggatttcttgaagccattgtgaagaagatgtaattgggaaatgttagaaaacccagtgactgccctttatttacttttcatttctttcccttgcatccaactca

SEQ ID NO: 7071 - DNA, 510 bp, Gossypium hirsutum
  misc_feature (59)..(61): n is a, c, g, or t
  misc_feature (474)..(476): n is a, c, g, or t
tgaactttcttatcttgatctttcatcgaataacctgagaggtacagtggaatgaaatnnncttgcgaaactagaaaaacttggttatcttgaactttcaaacaatagatttttgtcactgagtggcagtgatagtgatggtaattacaccttccccatgcttgcttccttttttcttttttttttcccttcttgaatggcaaaaaagttcccaattttcttgaaaacagccaagcctttgaaaagtttctatctttctaacaacaaaattaaaggggcaatatctcaaggcaaaacgaaaggggggaaaaatttaaacaattaaaaacttcccaccacctttttggctagttaaattcaattcccaggaagaaacctaaaaactattgatctttaatcaaacttgcttcaaaggcctcttctagttccaccacctttagtccatgtccttgatttgtcaagaaacagcttggnnngaacaattccagagtgtcttgggaaccttaaccg

SEQ ID NO: 7072 - DNA, 577 bp, Gossypium hirsutum
ctcttctgcttctctgtttggaaggatgcaggtacttttaaaagtgaatgttggtgttaattttctgagagatcctgtcattgaaattcttcagtttgaaaaatatcaggacagaaacacgtcttctaagaatcaggacaacttagtatatgcaaatcaagacccatgtggagaactgttgaaatggttgcttcctttggataacacttttcctacacctcttactttatcccctccgcctttaggatctgcttctgcaattggtagcccatctcagaggcctggtgtttctgcctcctctggctctccgctcttttcttttagtcattttagaagttactctatgtcttcacttcctcaaaatgttacacctcctgctggacctgttaaagcccagagttctaaaccatcatttgaccttgatgatgtggatcattactcttctcagaagaattcaaagggtaaaataacagggattgaagagcttttatcatatcggggtgtgtcactagagcgagaaagattttctgtccgttgtggattagaagggatccatatcccaggaagaagatggagg

SEQ ID NO: 7073 - DNA, 542 bp, Gossypium hirsutum
  misc_feature (467)..(473): n is a, c, g, or t
  misc_feature (507)..(515): n is a, c, g, or t
gtgccacctgtacaaaatgatgagcaatatcagaatgcatgtatttacattagtagcaattttttaaatatattcaaattgagatattgaagtgtatgctgtcagacctgaagctcagcacgaacttgctccaacttgaattcctggcaacaaaagtaaatcagcttttttttttaaaacaaccacaaataatatttctgtaattagattagtcaaagtaacctgctcctgaagagcctctctcaaatgtgagactagactagctcttgatgatgcaacagccgttagctgctgaatacaatccctcaatacaacatgttgaccctggacctcctccacaagtgcagatccatggaactgccctgttcaaaggaattgggattgaaaaacgataagtgtcttgagatatgaacaaagcctccatggtaattaatcattgttcaaatgagaaatatttggtctcacgnnnnnnnaatagccaacaaggatgatgaatagtagttaaannnnnnnnnttcttaataagcaacaaaagtacaact

SEQ ID NO: 7074 - DNA, 666 bp, Gossypium hirsutum
tatcacttgcccgctctccaaaagtggtaatggttccctaacctagtttcttcattagaatgcgagagcctattagcatccatttatagaagtaaattaatcttttgagaaattatttaacaaaatgaaatttttagcttagcacatgataaaaattaatatagcaaataaacgagactttgattataatgataaaattaacatattaaacattatattgttttaagtttcattagtcgattaagtcttaactcgatcggtatagacattattatgaatgcatgaaggcgtgggtacaagtgtactaaaacgtattctcctcttatttaaaggttgggaaggggaatttctaaattttacacaaaatatataataccctcgtactttttttgtgaatttgaaaacagttttgcaaatatttatctataaaacataataaagtaggatacatatgtaagcactgtagatgtgcttacctcatctcctgtttatgattttaacaccaacgaccttaatccaacggctcatcgtcattcaaggcacgttttagtgcaaatcaacggctaattttagccatgagcactaactaaacattttggtttatttccaaaaacatcacctcatcttttttggtacaattgcgattataagccccacatctcccaa

SEQ ID NO: 7075 - DNA, 629 bp, Gossypium hirsutum
ctgcataggtaattgaagacccttcgaaggttacatctttgattctcgttataccaaatgcaatgaaacacaatgcataaagtttagtgaattccctaacactactatttcacttaccatctcctacctatccattccaataagccaacataacaaccaatacttttcaccagcaaaagtgatagttacaacttacaaccgtatcaacagttaccatcagaatcaatcattacaagcaccaggggaggctggcaggggtggcccctaaaaatgataaaattttaatttaattctttaaaaattgtaaagatataagctaatataacgatgaaattgcattttagctctcataaaaatacataactcggcttaactcaacccaaactaactatcctacacatgatatacaaaggtggtactcaaacttgagctctcaagccggaatcgaacttgagctctcaaaattccctttgcattaagccaaggcctcattggtgatacatgaaagcaattgttagtagtaactatgcaaatgcttaatcttttaatccgaatggaactcacaacagaattgacattaataattcgacctgtagaccctttaataagtgatggcaaaagcaatacaa

SEQ ID NO: 7076 - DNA, 611 bp, Gossypium hirsutum
gaaggttccatctatcttcctcaattgcaacttcaatcaggtgaccaaggcactccattcccataacaaaaagatacgggatcccctcttacattttggattattgcatttccatgaaaattatttcataatctcgacaaaacaagtttctcaatctcagcataatgctttttctttagattcttgaggcctaaaacaattatataaacgaataatcaatatatactttgaaatcatagtatttaagagaagaaaataaatctccaattcaaccaataaaacccacagattattaaaaacttttttctttaacacatgtattgattttgtaaaatacttatcatatattgatatttcttaatacatgtacctaaatcatttataaattaaaacaattttgttgtcaatcaacattagttttattaaattagtttgttgatttatcttattaaacctgtaacaaagaaaagtaataatttagttttaagggctcttttattagatattaattaattaattactttttacataaaatttattcccagcttatctttattaacaacatcattctttttaatctatttatttgaaattggatgaactctgttcac

SEQ ID NO: 7077 - DNA, 714 bp, Gossypium hirsutum
  misc_feature (670)..(676): n is a, c, g, or t
  misc_feature (679)..(688): n is a, c, g, or t
  misc_feature (690)..(692): n is a, c, g, or t
  misc_feature (694)..(694): n is a, c, g, or t
  misc_feature (699)..(702): n is a, c, g, or t
gtgattcgagatgaaaatggggaaattttggggcttgttgcaaatcgcttaccctgttctttcgatctttgcagcagaagcagttgagtgatacacgggctccgatttgctaaagagttgggttttctgtcaataatagttgagggagattcaagatctgttattaggaagattaataatcatgaatatgatttctcggatataagggctcttacatggtccgcaaaagagatagtgaaggagttttaggtctgcgccttccatttcattggtagatttgggaacaaaacaacgtatgcaatggcacaagagtgattaaatcaaggcgaggatggctattgggtagaagatgctccggcattggtagaagcagtagctgcagaagaatgtcgtcttcatgagcctctatagaactgttggttttcttcgaaggtttgtgaggatttgcattctgatgactccatttcttgtttggttgctctctatccagtattgttaatgatcttatttgagcaattgcaggttggaatcccacgactgaaggattcgttttagtgttttccttgtaactgttgattcttttaattgtttttctttgttccgttcttcaataaagaggccgacttttgagttaagaaaaaaaaacatcacttggcgcgaatagattttnnnnnnntannnnnnnnnntnnntnctttnnnnttttttcttttc

SEQ ID NO: 7078 - DNA, 612 bp, Gossypium hirsutum
atatataattgtactttgtttctactcttttcatttccattttagtagctttccagggaagcagcaaaattaacacaaagaagaacttaaaacaaaccatcttaaagttattatgtcaatggcctttttgaaatgatctacgaaaccgtaaaagctaaaagaagcttaaagaactttacaactattctcttctctttttttttccccaaacaaagattaaaaagtagcgtgttccatacctccaaagtagccaaaccttttgacaccatctcgatcatccgtatcctaatctaaacacattatatatcaataatcaaaagtaataaacagagaaagaaaatcaaattgttccgttatccagaaagagggaaaaattttaaataaacagtctacctcttgatcagacttttcgttttcgaatttcggataaaaagtagctctgatttgtgcaagtgaataagtcgaattatcaactttgaaattttctaacaaattaggctttaaaaaaattctactcaaatcaacattgttcttctcggtttgaacatcagcggcagaagcggcattggatccagccacggttccataggacttcggcttccaaacttgtcc

SEQ ID NO: 7079 - DNA, 560 bp, Gossypium hirsutum
tgctccttggatgtaatggctgtcactgtagcctggatcaagggagaaggtgggttttgaaggttactcactgtagcccttaatcgttagtatttaattgctatttgggcatctttgatcatattattaatttatattatattttgttctaggtccaacaatttggtttctagccatcatatatttcttaactggcgtccctggaggctattacttgtggtatcgtcctctttacggtgcttgcaggtactacttttcatttgttcctttttcggtttatggcatactaaatttgtaactattgactctatgttgtgaccaaattggaaatttagatctattgaccataaaacatgttttgatgctttctagacggtgactgaagatactaggataccctatgcatgaaccatgtaccagtggaatttacttcaaacagcctaacaggggtaattgagagatgttgaatagtgtcaagcttgaatttgagcttaaaacgaaattcgagatttgatattcgacataagattcaatcaaacaccaatttttaagtttgcaca

SEQ ID NO: 7080 - DNA, 606 bp, Gossypium hirsutum
  misc_feature (598)..(598): n is a, c, g, or t
ggttctagggttgtgggtttattttagtattttgaaaattgtaaatgaactttttggactatttaatcttggactttatttatttatttgggtttatttatttgcaattaaatgagcccgggcaaaattggttgactaaacatattccttacaaaatcattttcataattataacataaatttattatttctttaaacatattagagtaagaaaagtaagagaacccgagagtacttaccttggatgcactcattcttaaaaatcaagcttccaataatttgaatctatcctttactagcttcaaatttcatttctcaatatttcctcataaatttagcgaaatatcagtatataagctttccaagctttcttatacaacaagctcaaataaagttaggagaggtgaaaccaccattactaacattatacaagctttctctctctagtttcaattctcttttaaaaactaatgaaaccttagctgaaaatggagagattgaaggtggattagtttcccggattttaacaagaactcaaggtttgagtgttgagtttttatgatattaaaataaattaaaaatagaatgagagaaaatnttctcctc

SEQ ID NO: 7081 - DNA, 531 bp, Gossypium hirsutum
acatgtcaaaacggtgtcgtattcagttgcagtctcctacgtcgtggtacatctccggtggtgactgattcatcatagacggtcaactccatctcagctcaacctctgcaacgctttacccttcaaaacaacgaaaaaaggggcggcggtctgggggaatccctatattttaatccacactaatattctctttatggatttcgattttcgattcttttgacgaagaagacgaagatttataattatatgatgtcaaagaaagccagcaactgcgctatttgcgacaattcaaatcgcgcttctatttgcgccgtttgcgtcaattacaggtacgttaaaaaatcgtcgctaaaaaagtgaaatatttttatattataatatttaaaattttaagctgttaacttgctctttgatttcctcgatgaactgttctttgcagattaaatgagtataattctttgttaaaatcattgaaaaaccatcgtgatttgttatattcaaaattaaacgaactgattgccgcaaaggttt

SEQ ID NO: 7082 - DNA, 665 bp, Gossypium hirsutum
agtaatggtccgtaagcaattttaccatggcaatgataccaattacattaacaaaatattacctccttccaagcctcaaaacagtaaaaagggagctaggagtcgaggggcttaaaagtgaattatgctggacaaatgtgttaaatgaagactgctattttgcaagaaacaatattgcactgaccatcatttggctccaagtccaatgcctttttaaagctctcaactgcggcatctatgtcattaagtgccatatgtgcctgacattgatgaaaaattgaaaagcattttgagagacaaagcatcttaggaaaagtggagtttaaccattcaatagtttggacaattgtgtgtaactgcaatagcatgcaatgccaaagaatgaatgaacaaggctttgaatgtcattcagatagtaagcactgagacctggccttgtcgaaaaaaagctttcacattatcttcaccatcacgaattgcaaagtccgcatccaacaatgctccttttaagtctccgagtttcaacttgcaggcctgaggcaaacaacacagactgcgcttttattaaagaaaacaaacatcaataaagtggaaactatatgtatgattgtcatccaatatttgaggaactccacactgccacatactttcagtccaacatacag

SEQ ID NO: 7083 - DNA, 660 bp, Gossypium hirsutum
cacacagttggcgaggctgtgatactccgcttcagcagaggatcgtgatactactgactgcttttttgaacaccaagcaatcaggtttggccctatgtacacaacatagccagatatagagcgacgatcatcaacagaagatgcccaatctgcatccgagtaacacaccaggtctggttggccttttgaaaaatacaagccatgatctaacgtaccagccaaatacctcagcactcgtttaacagctcgccaatggttatcacttggagagttcataaactgactgagcttatttacacaaaacgaaatatcagggcgtgtgacacatacatattgaagcattcctacaacacttcgatacagatgaatatcaaagaacaaaggactgttgtctgacacagtcaacttgggcgtattcaacataggcgtaggagtcatagcagcctcaaccataccagctttttgcagcaactccatgatatactttttttgactaagcaataacccctgagttgttctttttacatcaacccctaagaagaaactaagatgacccatatcttttagggcaaacttactgtgaagctggcgaaccacctcacctatgtcatgtgcagatgtcctagtgagcacaatatcatctacatacaccatgagcac

SEQ ID NO: 7084 - DNA, 638 bp, Gossypium hirsutum
actgcaattaactgggttcaattctgagagttggccattgatccaacagatgttacagtaccatacacatttccagaaccaaaagaatcagcattgttcataccatatccatgacctgagaaaaagaattgttttctatgaggcaacttgtatatccaataataactacatattcacattcattattactaggaaatatagaggcagagagacaaagtcaatatgctaccttgcactaagggtcgctgatgttgatcaaagtgttgttgcaaaggtttagatgaattagtataaggtgttgcagtctgagatcccccagaagcccccagttcattaacaatttgcatattatttcccatcatccctaatgcaccacttagtgacccattaggaaacccaaaatttttctgctgcaagccagacctgatgccactgcccatttggctaccaatggtctgcaaaatacgactgttttgaccaccaatgtgttgcttctgctgctgtggctgagagaccatagttgaatcaacagttgaaagcccaccaacattattaggaggttgattattcatgtaagactgattattaatgctactgttattgttattactattaaatcctggagtgggaatcatttg

SEQ ID NO: 7085 - DNA, 628 bp, Gossypium hirsutum
ggcctcatctacaggaagagagaaaccttaattaagattgattgaccattattggctgtcccaatttcttcaaaagtaagatgtcattaccggttgtttgacagaaaatttcatgttttccaccacccagttgactgtttcattctcaacattatcttctgatatcagcatatgaacttcaagatttatccctcctaatatctcaaaactttctttgaagccatttgcaggtgataggctcctctgtgcctgaggcttgaaggtctccaagccttccacacagacctacaagcaattttcacttttagaaagtaataactaaaagcaagaattgacattcacatgaaataaggtcaactgctagggggcaaaggtgcttctgtctttgggttgacacaaaagtagaaactaactaaaccagaatttcagatttctaattccctcgtcttgtgacaattccaaatcaaaattctagtgctaatgtgcctgagaaatgaggatgatcaccagattctacaaagtatatacaaactatgcgttgcttggctactaagtattaaccttctaaaaccaacagagataagaaataaataaaaagtaaataaaaccctttcacccatcttatcat

SEQ ID NO: 7086 - DNA, 641 bp, Gossypium hirsutum
atggaactagaatcaccatggtgatgaagcaccatttgtaatcacagtagtaactggccttaaatagaaattgttgcttgactaggtttaggtcatcataaggtgacaagcatgccatatatgaaaaatataatatatacacacctggaatccatatttcatgctcacgtgaccagatgccatgttgatgagtatccttggtatgaaaaaaggacttagtcgacgaatacgctgcattaaaagagcagagatttcacttgtcttattaattttctccatattcaagtagttcattttccagcccatagctgacacgaggaaaggaatgatgatgacactatgagctagtaatgacaatagaaatacttacaatcataatgaaaaaattcgtggctgcaagaaaccaaccttctcacagatcatttgcgctgcatctaagatatcactaatacttccagtcccaccacctatagagactccctggttacccaaaaattaataaagaataagataatgaaaagaaactagagaagatctcacatattatcagctattcaaaagtgcttaccgttctttccttctgttcctgatctgcgggtgcccattttgcatcttttaaagcttcatcagcagcacataat

SEQ ID NO: 7087 - DNA, 470 bp, Gossypium hirsutum
actgtcgcacacaaaaagcttctcggccgagtgagagcattcgatcgccactgcaacatggttctggaaaatgtcagggaaatgtggactgaggttgtttttctttcctccttttgtttgccttcatcttattacaatcaaatacagaggttaaatcgattctctattacggtataggtaccgaagaccgggaaaggcaagaaaaaggcactaccagttaacaaggacagattcatcagtaagatgttccttaggggagattctgttataattgttctaagaaatcccaagtaaatttggtgctcttatgttatgaaacttttgtagggtttatgtattcaaccagggaaatgctatttaaaccaccaacggcactgcatttgatttgctcaaagtactgtatctatattgagtagtagtttggtttgtaaatttactgattatatttacttttatagaaactctatgca

SEQ ID NO: 7088 - DNA, 615 bp, Gossypium hirsutum
cagcagataaatagagcgtaataatgcaaaagatttgcttacttggatcaatacttccatgtggaaaactcacgagcaaaatcatgcaaaaagcaaatacaaaggttgaaagtaactccatccgcaggcaaagccattcaatggctgcaatactgcaaaagaacgggcgagcaaaacaatcaagaagataaaggtttctcttcatgaaccttttctcttgtccaaaaccccttattgtggctgctccagcaattgattcaccaaaaagatgaataactggagatttctggatgctaacaatgcggactagttcccttgaagaagccatgtagtatttctgcaacaagcaataagtgaggaattcaccagacttaaagaacgataaaagcagaatagaattaaataatgagaaaaaaaagaataggcttaaaggaagaaactagtaataaggtgcttccctttctctcaatctatgaaagccaatggaacccaacaacagacatttgaggcaaaatagaaataactacctgcatccacaagcaagcagcagccatcgggataacaagaagcagaactgccaagtaacttccgtcatcaccccaacaatcccaagag

SEQ ID NO: 7089 - DNA, 653 bp, Gossypium hirsutum
gatacgtgtttgaatgtatgatccaacacaggttgtttcaacagatatttaaacacttgtttgggtatagtcttggtgtttttgtgatgttaacgttttttacatggatttttttaatgtgtgtgaacatcacaagcaaatgggcttagaggacatgttatatctagccacaaagtcatgatggatattgaaacctttaaaaagattgtggtttacttagaattttgtggataagacttgtatttatcttttatccgtatctttcacaaatttatatgttgattttaagagattaatatggaagattatttaaatagattcttatgatgataaaattatgttttgtcttggaggatctattgaaagagtgtttgtggtagttttgttattctcattaggtattgagggtaatttgaaatttaaccaatggatcaactatgtgcaaatccctatgtactttctttgtgaagaaccgatttgtattctcaaataataataataaagctcacgataaagattttatgtttttttcccttatgtttggtaatattaggtcataagttgattgccacaccatgcaaattggtgaaaactagttaaaatatttaggcgatccccaccatttggttttaacccttgtacgataccactat

SEQ ID NO: 7090 - DNA, 687 bp, Gossypium hirsutum
  misc_feature (680)..(682): n is a, c, g, or t
ccatgtatttgttggtctgtcatatcacctaaaaggggtagggcaaatagtgtgaatgttgttaattgcttctttcagtttcatttttcttctctatattatatgacatctccatccatcatactctattatcattattgatttctggtgatggttttcttgtctctttattaggcagaagtaatttgatgcttttttgatgtgctagaatcactcttcttgtcaaagcactgtttgcaaacttgaagagttgaatccttgatagtgacaaagagacttaaagcatgtttggataatgttagggctattatccttactctggtgtcgtccaatgcttataatttcttcaatttaccctctgcaaatgacctggcttaaaatggatgccactataccttccactgttgcatcgggatcagtaaaatatgagatattgtggaatatgaagaaggagccacttgttctctattacgatttattggttctttaatatttaaggataagttaattgatcctccatcagcaatagtgagtggagatataccaaataagaaggaaactcactactgggtcttcttggttagtcatcctaattgattgaacttttagcatccgaatagactgccaatgcttgatgaggattggagttaaaccacactcttgaacaatcaacaccttcnnntgaag

SEQ ID NO: 7091 - DNA, 614 bp, Gossypium hirsutum
tagtccctgagcccaaaatatacaaattaaccattttaatgcaaacccatgctagatgaatattcatggcattcaatacaacccattttttcaataatttcacaaaaaatccttgtatttttactaatttaacaaattaatccttaatcgaaaaattcatcaaaatcacttaacaaaatacccaaaacatgcaaattaaccattttaatgcaaacccatactagctgaatattcatgtcattcaatacaacccatttttgcaataatttaacaaaaaatccttgtatttttactaatttaacaaattaatccttaataaaaaaattcatcaaaatcacttaacaaaatacttttaaataacaactaatatctcaaattaaacatttagcatataaaattatatagattcattaagggcaatatccaaaatctttaacaaaataaaaaactcaatatccaaaatctttaacaaaatcaaaaactaaggtaagatttagttgaacctaattgtaacaatctcaaaaacataaaaattataagaaacgggtaagaattggactcacatgaagcaaatgtacaaaaccagctctaggagctctcctcatgtctgtttg

SEQ ID NO: 7092 - DNA, 652 bp, Gossypium hirsutum
ctgatatgggtcccatgttcacaataattggcatcatggtaaatcaacaaaaccataaactggtttcttattttatggacagaaaagattgcaaatgttgagattgaaactctaagtacacatcctgtttttgcagatatatatgggctcctattgtcttggattgggtggaattccatggattgtaatgtctgaggtaaacgaagaacatgtagttttttcattagcttttaaatgaattgatgaatgagtaggggtggttaagttgagattgtggtgcagatattccctctccacatcaaaggcattgcaggcagcctcgtaacattggtcagctggggtggttcttgggttgtttccttcactttcagctttctcatggactggaattcatatggtaattaaatcttcctttttcgacacgatatatgatgataaatatgatgttccaaatatataaaagattttcaaaattaaattaatccgtgtcgaaaatgtttgatgtattgaccaggtttggtttgatcttaatttcttggttttgcaggtacattttcgatgtttgctatattctgtgtagtagcgatagtgttcatctggaagttggtgcctgagacgaagggacgtaccttagaagaaattcaggcttcca

SEQ ID NO: 7093 - DNA, 611 bp, Gossypium hirsutum
agatggatgcaaaatacaagattaattgcaacttgcaaatgttaagcacattttggtctaggtcataacagtatagatgtcatcccatattattttcttgttaagtcaacaagttatgatagacgaagctactatgtattaacatgaatattgtttttaacactattaaaaaaaaggcttagttagtttaaactagacctgttcaaggaccggcttacccactcaaaatttgggaggatttgggcaaaaatattaggcatgaaaaatgagcctgggcaaaaaaattagtcttgttaaaatatggctctggttataaaaattagatttatggtaatatataatactataatgtaaattagaaaaatgttaagttgtctatacataaaattctaataaataaaaaagtatattaaattattaaatattaaatcaaaagcaatataattttctttttcaaaaaagttaaaaaaaaatatgtgcggcttaaaatagacttgggttagtcattaacaaatatagatggacttaggtaaaattttaggcccaaattttggaccaagccaggcttgggcaagtataaagtgtgataatatcgtgcttaaccctagtcc

SEQ ID NO: 7094 - DNA, 637 bp, Gossypium hirsutum
  misc_feature (610)..(610): n is a, c, g, or t
  misc_feature (612)..(620): n is a, c, g, or t
  misc_feature (623)..(624): n is a, c, g, or t
  misc_feature (627)..(632): n is a, c, g, or t
gatttggatgttttaacaaaagttttaaaagtagccctctttgtctagtttaaggttagacaatgtttgtatcaacgttacaggtagcagaattgctggggaaaagagcattcattgaaagtgtgatagtggtgagaattgtattaatgttactgtggacgagggtaggaagcttgttgctatgtggaaggcagtgtttggggaaggaatggccgattataaatgactttggaagcatgggattggagaagagagagaaagtaatgcaaaattggttaaagcacgggtttctatttactcccataagggctgctttcatctacttgaaagtcttctgccttttcgtttacttctctcgggtaatcattcaatgctacctcttccctttaatcttctttctactttcatcctttccctaaggattagggttactacataatatatttgtaccgataaaagtatgagacccctatattaaaaatttgattgtattttacttattctattcaaataatactaaattagttcatatacgttaaatcaaagagcaatttgatttttttggtaaaaattccattcatttctactttcatcaacacaagctacacangnnnnnnnnnacnnacnnnnnnaaaaa

SEQ ID NO: 7095 - DNA, 652 bp, Gossypium hirsutum
tataattgttggacgtaggagaaagaacaacttgttgaccagtggttacccacaatattatctactgttttttattacaaaaagttgcatgaaatgaaagtgatagaggtcacaagagaaggacaatgaaactgagaacaaatgaagtgggtcgtcctttatattaattaccatgaataagttagagaataacaatggatatcttagtttattgaaataaaataggattaatttatacatattgtgaagctgcttccgctctgccggtgcccatcccatattccccggtctattgttaatcatcatggggattcaaattttgatattattttaatagactgaatcagattactggagtgttaatagactaaattgagaatttcaattttacgtcaccactttaaaaacatggtacaaaataattgcatatgaataaattggattaaatcttgccttataatttatttataagtatatctaaggtgattaaattattagtaactttacattttaattactcaattttaataagttataaaatgacaaataaactattcgaaagttttcatttaagttactggactattaaaataggcgttgtatgactgtttctatttgtactgcctacactaatagaacaaacgctcacgtt

SEQ ID NO: 7096 - DNA, 616 bp, Gossypium hirsutum
aaaattatgcgccgacagaccgtttatatgtttatcccaggaacgtttaccgatacaaagcaaaaggtttcttaaaattatattaggttttcccagattataatattgcttgaactgtttttctttttccctttataaataacttatgtgtatcattcttatctaattatatgttttatttaacatgaagaatgtgctttagctgtggcaatggatgaagagacaatatttgattactgcatatacaatggttgataaatataagttattaacttaacaatcccgaagaatataaaataataataaaaaattgccttgatttcttgaccatattttttaaaaacaatccttaatcataccagtgtaatttcattgtagttgtacctacaggtaaccaatgttttaatagtaaagcaaagctgaaaaaatagagagagccctccctcctagtcccggtccaatcaaaatgataataaaacgacaaccaagttttaatcatccatgtggttccctcatgatcatggtgttgtaccccatgatatatttttatttattaatattttttttaacttttcctttaagattattaatggtgaaaatacaatggaatctatgt

SEQ ID NO: 7097 - DNA, 668 bp, Gossypium hirsutum
attaagagcccccttaaagaatatatcaaaaacgcagaaatgaccagcttcccagcgaaaagtagaacggagctaaagctgtgaattaccaagaattgcaatgaatctccttttatatcttcccaaaaaccttaaaggaaaggctgcttaaaaaggaagcaaaaattcttcttttcagtaagcaggcatttgcagagcaacaaaggcacacacataaagatattatccaactcaaatttgaactttctaattctaaaagtagttctaatctgtcaaacagaacatcttttgaaagaaactttggagctacagttggtagctgttttcattttaatcatcaatttcatggcctatggtcactacttgcacagttcctaagccaattaaccgggccatgaccttggcaactagatgtttgttgaacaattgtgacaaagtcatagtggttacgcacaacaaacagataataacattaagtaatcaaataaccttacatcatgatctaattctttttcaagttctcggtacttgatttcaaagttagctcaggcaagtttaaaataagaaatgagcaattccatcaagctcagggtgctggcaaattgtttgtctgattggaaaaagcttttacgaaataagcaaagcatatacgtgcttctttcgtgggc

SEQ ID NO: 7098 - DNA, 575 bp, Gossypium hirsutum
  misc_feature (565)..(571): n is a, c, g, or t
gttttttgtccgaatactcaaccaatccaggaaacaatatggtaaaaaatttgagacacttggcctgaatgttaatgaggttagtctgttaatcgtcactggtgtttacatctagatgtcgatcataagttctgacttgattaatgatttcaggaggaaatttttgcttcttcatttgctgctgctgcatatttgaagtccattaatttcccaaaagataaaaaagtaagtattgttgaatttttgaagttgtatgcctagcaaaactggaaatctgctgtcagatggactggcatgaacaataaaatttcagcatactgtgttagatggttaaaatgctatcagcctctatttaaatgccttcacttgtgatatgtatatgtgtgtatcacatgtatgttctatttgtatgatatcataaataatactaaatgttgcatctttttccattcactgtttactaccctcattatcttatcagttttatatatcaatgagcatttgttctcaatattcttgctttccgaatttcagttttgatccatcttcctaaaatttacttttnnnnnnnaatt

SEQ ID NO: 7099 - DNA, 512 bp, Gossypium hirsutum
gtgcacattcagccagaatttccctcctagtgctcttccaccaagctattcaatgtggtcgcatcgaaatttttctcctcatgatagtccaccaatgccatggatgagtgctcatagaaaccggctatctggaattgggccaggtagcttcagcagtattcctccagcaggtggtgctgaagcttcagctgagttttcaatgaaaattttgtgcccatctgggaagattggtggtgtaattggcaagggtggctttaatgttaaacagttacagcaggaaacaggagcaggcattcatgttgaagatgcatcaacggagtcagatgagcgagtaattcatgtctctggaattgaggtattttattttgactctagcttcattcctcttgaggaaaaataaaataacatattttaccctttttgtatgtcaactagttgctcctgccttaaactttgtactctttttagacttaaaaaaaaaaagcttatgcaagaccttttattattctagg

SEQ ID NO: 7100 - DNA, 606 bp, Gossypium hirsutum
  misc_feature (545)..(546): n is a, c, g, or t
  misc_feature (599)..(599): n is a, c, g, or t
ctgggggtctagcacctttttgcactgtgacaacttcacaaagatgttaccaagcaatgccagtgtgaaatgtttaagcgatgctggattttttctggatgagtaagtttcatttttctctgcaacggacaatattctatttccagatgtttacatattttgatttccattttgcaaacaaaacttaatttgaattaatccatgaaggccctccatcctggaccaattggcctaccgggacctaatttaatccttgggttaaattggggatggtggatggggtttggcgggccttggtaccccaaaaaaccaaaggccaattccccgaatttatattaatgctgcaaatgtattccaaaaaaagggcaacatgcaagttgccattttatagcgtatgaataggtccatattctctgcatgtgttacattatttttagacttttcctgatacatgaaaattagcgcgtgtgaattaacacagaatgtgcctagttaaattctgttttgaacctgtaccattattgttcacatcaataaaatgtacnngacaggggatagagcaaaatctaaatccaaattgcacgaggtcgatcagcaanccaaagc

SEQ ID NO: 7101 - DNA, 540 bp, Gossypium hirsutum
gtgagatagcccttggtcggagtcaaaatagggtgcaaatatgcacccttttacgcactttcgcctaaggaatttgcaggcaccacaaggccctcctccattatttccactcatctccctctcttactctctttctaaagagattatttctgccttttacaagtagaaaactgggtgttgtttgtttaaccggttttagataagaaatatgttaaaagctttgctactcttgaggctgtgggtcatttaccaaaaaggaaaaaaaaatactggtagttccatcctttttctaattctaaatagagggatagtgttttctaagcaatgcatttctcttttgtaattttttttatataagtgatagtagtaagggttgtcaagggagaactaagtataatttaaagtctcaaatacaaatcatgattaagtatataaatctatacacttattaatatataaaattatttattttcatttttaagaaattatagaatttcatgtttgattcattgacaccccagaaatgtatatcaaacgctc

SEQ ID NO: 7102 - DNA, 632 bp, Gossypium hirsutum
gttagctggcagttgcaagtacatttatgaagaaaagttgaaccaattaagaaaaagccctctcacttaaagtagttctggccacggaccttgaaagattttggctcgagaggagaccaacaatcaggcatgcttttctctttcggacagtgtgggactgaggtaccagctaccggtctttggaaacccaccttcggagaaactaagatgaaataagaccatgcacatgtaaatatatgacaaataaagaagatattcaaggatgataaggaaaaaaaactggtagcatagcattcacctaatgtcggattggcatgtccgtccctccatttaaaggatagtttcagaggtgctttcttctttgaactaagagtacttgggttaaacgatctttttctctcaagtgaaggggcagtcgaatgaagacaaggcaagcaagtatttggaagaagttcgacatgatgcgcagcttgcttttcattcccacgaatactttcactagaaatatcatccacaaacacagcactcccctcagtctgattatcattcgccctcgattgagaattaacattgttaattagactcaaatctctaggagacgatacactcaatgcagatgcattttcagagcc

SEQ ID NO: 7103 - DNA, 640 bp, Gossypium hirsutum
cacttgcattcgcatatactagtattcacattagagataaactataaaaaaaatgaattctagttacttgttaaacagattcatcagaataattcaggtcatttatcattatagacatcataaaccaaaaaaattcttcttctcctttacctcgtatgaccactgaatggaaccaaaaagaaagataagcgaagaaaatcaagttactgaacagcaatttttcctactagtatcggaagtagttcatttcataatagtgtgcagagtttcaaacaaactcttacaactttattcaatttcttcaaacatgtcattattctaaatttgattttctggacagttaatctatgggttcaatttattgcaaatactaacaaatccgatctttatctttcaaaaatggttcagaaaggtttatgatctataaaacacataatatgtctaacttttgcaactgctcacactcaaaagtcaaaacagacagatctcaggttgacaaaggaaacataagaagcaaaactgcttccattgaagatgaaaatttatatccataaaggctctcgtacaaattaagtaatcgtaagacacctacgagaaccatttcaaccaaatctagttttttcacaaactattccatcat

SEQ ID NO: 7104 - DNA, 550 bp, Gossypium hirsutum
  misc_feature (53)..(59): n is a, c, g, or t
  misc_feature (505)..(507): n is a, c, g, or t
cagtagaggttgatacttacatgaaactcatcataatcacgtggatgctgcannnnnnnatctccgttagaagtttgattggaaagtcggataagataagcattcaatatcaaattacaaaatccagttgaatttgtttctaatatccactttcatctccctattttaagcacatgcacatatcaaagtattagaacattaatgatcttgaaacgaaataaagtttaaacgaaataaagttttagggacatcattagccgcaattcgaatctccaactaccatattctctatggacgaattcacaggccctgctacatttatgtgatcccaagctatcaggatgctggtgcttcaaagttaaaaaaggcacctgaagtgcctgaaagattactcaatcaggaggttgtcctatgtaatatcctcgaaaccattgtgtaacaccataaatcaatgtctagaacatcataaaatgctgtgtaaagcatgtcattatagcttcttcannnctagatccaagagctccaagtgttccaattgttaatgccacat

SEQ ID NO: 7105 - DNA, 620 bp, Gossypium hirsutum
ataaagttcatgaatttttatgctaagtctccattttgtgtattaagggttatggttagtttctattttcgatgaagcttttggagaaatgctccacaggtagctcaatgtatcactgcaattatgacataacaatttctccccgaaatttgttgcagattgaagttctaagccagctacaccatccacatattgttttgcttcttggagcttgtccagagaatggttgcttggtttatgaatacttggaaaatggtagcctggaggaacatattctccagaaaagtggaaaacctcctcttccttggtttattcggttccgcatagtttttgaagtagcttctggacttgcgtttttacacaactcaaagccagatcctattgttcatagagatttaaaaccgggtaatatactgttagatagaaactatgttagcaaaattggggatgttgggctcgctaagcttatttcagatgttgtgcctgacaatatcaccatgtacaaagactctattcttgctggtactctcttctacatggaccccgagtatcagagaaccggcaccgtcagaccaaaatcagatctatatgctcttggacttacaacactccagttactg

SEQ ID NO: 7106 - DNA, 611 bp, Gossypium hirsutum
gcgcagtttattttgattttttgcctcttcctaggtaaaatagtcagccatgatatccttttatatatatatttaattctcaacaggatggattgttgcactctcatgaattgtaccaatattaggcagattcatgatgtgattttggtcaaaaagaaaatctcccccagttgcttcacttaattttcaataacatcaaaaatatatattatcaagttcatttagatatcagtttttttatgtagcataatttatcaaatgtcaaaatgtataattttatctttttttttagaactttgttttcgtatctgttacatcaattagttaaagaaatcattttaatattgaaaagtatatgtatcatatcatgtttattatatattttttatataaatgcttattatgattttatatttattaaatatatcgtgtattttttattgtatttatagaactagattttagtttacgtgtagctaaattccgaaaagaagcctcagctttgaaccaaaaggttaaaagatgccttaacttttttggcagaaccaaagtacaacttgataggttgaaaaaatggagattagttgaccaaaaggtatacatgtgctcat

SEQ ID NO: 7107 - DNA, 690 bp, Gossypium hirsutum
ccctctttcctgcataaggatcatctctaacaatttaacatcaaaaagcaacctgaaaagatatatgatcacataaaataaacttacttcgtagttgccaaattgactttgggtctcaaaaaaatccaccaaaattgtcaatatcctcttcttcttcttcttcttcttcttcgtgcttattatgctcttctttaaccgaaccaaatgcgttcctaacgttccctcctgaggcttcatcttctatttccttctgctgaagaagcgcctctttcaagaatttcgagcttattcccgtcgaaagcatctgcaccgaaaacaaacaaataaaacgagaacacaaatttagataaaaattaaaaaacgaaagaagaaataagaaaaacaaaaagaagggaaacggctcagtattactttgtcttgcttttggtggtgtttaggagctttggagcgtttctttgaggaggcaacggaatcgccatctgccagaaaaggttgcgaatttctgtttcgttctcttttgttcttcaccattgaagaagggctgcaatttttgaatcaaggattgagaggaagaataatggaacgagattttggtacctggaaactgtcagggttttaagacgtggcaaattcgtaattcaagacacataagagctttcatatttcagtgcacaaattcttctgggaaat

SEQ ID NO: 7108 - DNA, 589 bp, Gossypium hirsutum
  misc_feature (576)..(576): n is a, c, g, or t
  misc_feature (578)..(579): n is a, c, g, or t
  misc_feature (581)..(583): n is a, c, g, or t
ttctttaaaggagaaaaaatgggatactgtagaaaaaatactaagtaattattatatgggtgcaatgagtggaataagaaacttagtcgacaagtgcttacttgatagcatagattgttattctatgcatgacatgcttgaagagatcggcaaggacattgttcgccaagaatgtaaagaagacccgggaaagcgtagcaggttatggtttcctgaagacgtagatcaagtgctcagatataataaagtaagcgctaattgtatttacagtgttttctattattttatatattcgtgttattttaattaaaatttatttgtgatatcatgtaaatatataaattcagttaattatatgttttcatacgttaaaagtttaattgtttatatttatattgtatcaaatgttaatcattttaattattatttcaaaaaataaaatatcagtttacttaccatgcatacaaataaagacaaatgtcttaagagtataacatgggatatactcagggatttatggggttggtactaatttaatccatggcttttaaagaacagcaaaaggtatctttattncnnannntgataa

SEQ ID NO: 7109 - DNA, 582 bp, Gossypium hirsutum
  misc_feature (475)..(475): n is a, c, g, or t
  misc_feature (540)..(548): n is a, c, g, or t
  misc_feature (553)..(558): n is a, c, g, or t
  misc_feature (560)..(561): n is a, c, g, or t
  misc_feature (575)..(575): n is a, c, g, or t
ttctcatttacaccagaaaactattacacaaatataatattatttacacaaaaaggtaattattttttacattttttaacaccttaatcaattattaatatgttaataaataattctttaaacctgatatgtatatatagcataaattaacagtgataaacatttttaatataatatattttaacataaataaaataaatgcattatttatgtagcataaattattaatatgttaataaataattctttaaacctgatatgtatatatagcataaacacaatgaacaaaaagatataacacaaacaataacacaaaatatttgtgttacaaaacaaaacaacattttatactacattaaaatgtgcactaacccaacaaaaaaaatatccattccccactgcaaaaccacccggtccgaatgacactgttacacgcttctgtttggtatttttatttacacctcatttcccttcnactctgataatctgatatatcaccccaacaaagctttctatccctcttcaatatgcatgcatacnnnnnnnnnaaatnnnnnngnnacttttgatcgatnctttccg

SEQ ID NO: 7110 - DNA, 514 bp, Gossypium hirsutum
ttaatttatcggtcattggggtttaagtcttttaagagaatggaggattggggttgcgattacgggtcggttttggcgatagaacgtcgccggtaagtagaaatggtcggacgacgggcccaatattgggtaaacccaaatgattcggatcggattcttaagaggcggcaagagagaacagactcggaacagggaagaaccgaaaaactgaagaaatattttgtgcggttaaatataagggtttatgtttttatggattgtgttgccacttgccagttatagattctatacgctataatttcatttaattcttttagaagtaattactcctcaaaataaataaataaatttaattgtcataatgttatttaaacgtaaaacttgaaataccacttttggacatgcgtggtgaactaggatatgagggtgtttttgtcattccctggttagagctttcttacatcaggatcacgtttctcctagctggcatgcaggatgtgtgttgtggtcatac

SEQ ID NO: 7111 - DNA, 645 bp, Gossypium hirsutum
gcttatgtgttcatactactttaatttctatattacgtgatgagtggaagcaaagagcattaacatattgttttataactttaattataagtaaagttttgaagagtacatacaataaaaagattttaaaaatcttaacaatacaaacttaaattcagttgaaaaactcagttaatgattaatttataataatgagtatacgttaaatattaaaaaaaaataacccaacaaatatacattaaaaaaattagataaaattacttttaagcacctataatataatgatacatcctcaatgtttaaatcaatacaaatgttattatacaattatgcatatttagtaacttctctaatttaatttaattttaatttttttaaaaacaagttgaaaagcaaattaatctgcaaagctcaaataaataattaaaaattgaaaaattcataaaatgcataagcaaaaaaattgaaaaactaaaactaaaaaataaaaaattaagaaaaactgagtataagcaaaagattgaaaatggaaatcataacattgattgtgtaatcttggtatttgattgtaaaaaccttataaaataaataaaagagcattagaattttttctttctccaatgacaaaccaaaacgtggaacagc

SEQ ID NO: 7112 - DNA, 629 bp, Gossypium hirsutum
agagcctccctgggccagaaatctaagcctcagccttagaattgctctcttaactctaagtctcttattgtttcccacataatccttgtgcattatccttatctcctattttctccccaatgcatgtaagtaaagtacaagtacatttaaaactccaaatttagttttaaaaggtaacatccaatagatttgaatttggaagcttgtcatttgcattattttttggcattgcattttaagctgcatttgattgcagctaagatcaaaattaggcatgattggagatgtccaagaatctgtcctaaaaaatgtaaatgcaaatcaaaaccatgggaaattatcgccatagttggtcccaaaatctttcctatttaagatcccaatcgggaaatggaggtgatcccaatcgggaaatggaagtgcttcaattttcgtcatctcaaagccccgttaataaagctgagctaaagagaatctcatgctatgttactcaaaaagaagacctttcatctctttacaattaaggctctctcaaagcaaggttttccaaaaattattctgtgaaataaacagactgctaacatggaaaggtgaggttttcaaaaataagaggactgaccctgctttga

SEQ ID NO: 7113 - DNA, 615 bp, Gossypium hirsutum
caatgcgatgatgcttggatatctgaggttgatgaaggaatagtgagagcttcacagtgttatatgttgttctacgtacagaagctgctttacaatgaagcgatcgaggattcaagtttcgtgcatatttccccgcgtagagatccatttgactctactgccggttgttcctagtgcaacaaactcatgcaagcaaggccagctaaagataatcaagcaacaattttcttggatgaaacattcttctagtatcaaaccagtctgaggtacaaatatcagaaacctgatcatcagatacaaatatttatatatccaaatagcaaattctatggctgccatgtattcctaacagttattggccaaaagggaaagtaaaaaatcaaaccaattttcaagttgggatccccaaaacctctctacaagatccaagctctgaattttttttgattgcagtgcaggcagtcgtgtaaagaataaacagttaacatcattgtattgtatgcttcttttgtgctacaaaattactgaaagggtctttttttttaatggtttgtgccttttctgtcatcaactggggttcatccacgtctaaaagtggtaatggttggggggaat

SEQ ID NO: 7114 - DNA, 556 bp, Gossypium hirsutum
taggatcttatttgggtccactttggggtttgggggattatgggttgtctagacattgtatcaaccaaaaatattttttcttttttgggcaattgaagtttttaggaatattctgtatctccttaaccacaaaatacagatacattcctgctttcgtagttaggaattggttcctcaaaccttcagtcgtgtacaatgtgatgtattgatgttcattttatttataatggaaatcgataatatttttggtgaaataggcaaaaagcctttgcctgtatgagtaccaactttccaccttatacaaatcagtctaggaaaaatagcgaacaaatggtgaaaactctaatcatgaattctcaattacaagttacttttttgtactcgaaagattcatgtggtagagagtagcctttgagctttcaactgaaaacccttctccaagtttacttttgactgttaaccttagcttttttttgttttccacattgtacctggttatgccaactgataaggctggaataaacatgggcatatggtgccctatctaccttgaaag

SEQ ID NO: 7115 - DNA, 325 bp, Gossypium hirsutum
actttggcagcatgctccacaaccttacaagttgtcaggtatatcatgcaacactgctggaagcatcttcgaaattaacagatgttatgagttcattaccgaggttggagatagatttgggaaataaaatttcccttcttttccaaatcttgtccttcctgatctcagtggttgtcaatttcatggaaatatcccgcatcaaatgtggatagatatcagtttgatgatggtaataatataatccctcaaaatttgtggaatttgaggggtcttgtgactttacacttaactcaatgtggaattgttgttccaatcccttttgctt

SEQ ID NO: 7116 - DNA, 617 bp, Gossypium hirsutum
  misc_feature (557)..(557): n is a, c, g, or t
tttatatgcacacaaaaaatctaccttttattttttttttactgctgactttacattttactaattttcaactaaagaggcagaccctttgaaaattctcaaattctccaaacctctacaattccatccaagagtttttaataagacagtagtagcattcagggtcgagaaagtgaatgattaaaaaatgataaaaggttgaaacgtgttatacactgctcagggcctgctggctgttgtattcattcttaactccaaatgaatctgcaagtgcattctggaaatgtatggcaaccagcatttacatatttctacaatcttcagaactaaaaaaatagaaatattaattaaagaaaatgataatacagagcttatgttctcaattgtgtttaaatacacagaacatttgagtcaaaaagacaagatctgcaagtgcatgcttaaataaacaaagaaagaaaagggataagaggaatctctcaaactgaatgtgaactgttagattaagggtgttttcagcattgcttttggttactgttatgcagttaaacagaatngagaaaatgtgctatgtatggtttattttctttctttaatatttcagttaagtttgttcc

SEQ ID NO: 7117 - DNA, 595 bp, Gossypium hirsutum
cccagcagcctaatccaagtagcagtgatcatgacaaggctaaacagctgctgcaacgtgtccgaggcaccactgatgtcgaagcagaacttgaggatctcatcaaagcaagttcaatctcaaaaaccatcaaacacccattcaagaaaatcatacaaagaaagtataggcctcaactagtaatggcaatagccataccatttttccaacaagtgacaggcatcaatgtcattgcattttatgccacacttctattcagaacaattggaataggtgaaagtgcttccctactctcctctgtggtaaccggtgttatcggagccggatcaacattcatatcaatgcttatcgttgataaatttgggcgaagagccttattcatggttgggggaatccaaatgcttatctcacagatacttataggaggaatcatggcaactcagctaggggatcatggaacagtaagccaagggtatgcatatttaattataatcttgatatgcatatatgtagcgggttttggatggtcttggggtccattgggatggttggttccgagtgagatatatcagctagagatcgatcggccggacaa

SEQ ID NO: 7118 - DNA, 556 bp, Gossypium hirsutum
  misc_feature (546)..(547): n is a, c, g, or t
tggaacatcaaacttaggtgtgtctgctagattctggtattgggtcttgaaaactggcgttcaagcccaagtccaagcacacaggcgttggtccacaatttcataatatatacgtacaagcttcccaaccccaacagcaatttttttttcggaaatagaaacttgattaatacgtaaaactttcaccatcaaagaaacaaaagttataacggcctaatacaaaagaacgttggtccaaaagtaatacatatatcacaggaaaccagaggctgatcgtagcggaggcctcaaaattttgattacacctctcaaatatttggaaaatttcatttctcttgaagcttttaaaaaatttcaagtggatgcctatactttattttttttttgaaaattttacttaaaagtttttaaaaattttaattagatcccttaatattttttaaaaaatattttcatttttaaaatttttattaagctctccaaaacttaatcatataaattgcaagtaaagtcatatcgaaagtatatctccggagaaaaacactnnataaagcaa

SEQ ID NO: 7119 - DNA, 646 bp, Gossypium hirsutum
gtttgcagtcaacttgtagaaccaaaatctgacaagataactatataagttattgcgcaaagcaattaattgaaataaaaacaacaatgtgaagataataagcagattaagtgtccgacctgatgggaaaatctatgaccttttgctggaagttgtggggttgcacaaggctcccacgttttctcttctcagtgacagccatgcaaattcgtagaactatgcaactgcttaacaaatgatgcttctaagaaatcaagataagagttgcatttgcttctcatttgtccaaaccatagtttgatcctgcagagttaaaaattaaaacaacaaaggagaacgttagaactaaacacacaaggaaaagagagctatagctataaagagaaaactaaacaacaaatattggtggagaaaaaatctaataatttaagtaagattaacttataaagaacaaagagattcctacaacaagaggacattctttaacttaccatccaatccaaagtgacttcaatcagctgaagaatcattctgctaggttttacccaattgtcctcacctttttggatttctcagatagatttatcattagcagacagatgaataaggtgctaaacaaataattaagcctaggttgggaggctag

SEQ ID NO: 7120 - DNA, 665 bp, Gossypium hirsutum
atcgaacttgtctaaaagtcaaagccctttttgggtaataaataaaagggtaaatttcagctaagatcactaaactattagtaaatttacgttttggtgaattaactaccggttgtttatggtcgtgatcagcagccttctgttgtgcgctcttcaggtcgtgatcagtggattccatcgagtagggttgggttaagtgtaacgttggtaccgctgtttttcattccaatggtgcttcatcgttcgcccataacggaagcttcattcacggtttctcgagtttgcttcctagtattttgaagcctcgtatggctgagcttacagctatttgtgaactactctcttggcttgagctgacgcattatgacggtgtagtaaattaaatctgactgtcaagctgttatcatggctcttatttcgtcaaagctacatcgttctgaatttggtgtcatcctttaggaatgtgcttcactgagttcgtcttttcagcatttgtcctttcggtggatacggctaacagtcgatactgcggctcataaacttgctcaagtgaccttattctatacatttcgtcaaacgtgggaagactccccacttttctccagtgttttttagatttggaccgttcatgttaaataccaataccaataccaatcacattaaag

SEQ ID NO: 7121 - DNA, 653 bp, Gossypium hirsutum
tgatgggtcgttgtgggaggcataatggtgcagtgaggcaatatataagatcaaaggtgcctcgtttaagatggactcctcaacttcatcactgttttcttcatgccattgacagacttggtggccaacacagtaagttattcctcttttttttaatattacttttaagattatgagagagacgaaaatgctatttaacaatgggtttttttatttcattcatggtagaagctacgccaaagcttgttcttcagttgatggatgtgaaaggactcaccatttcacatgtcaagagccatcttcaggtctatttccttagcttttcaactcctaatttgtttctttgaaattgtttgtcctttgatctttgttgttcatatggtttgttttttctttcctttctaaccagatgtatcgaagcatgagaagtgattatggcagacagggtatctccttttaaatgcttctttttttttttcttttaaataaaccccaaattttcattaatttttggccgaaattttttgtttttggaattaaaaacccgggggttaaatttctttatttaccttcccccccccaaagttccttctttattaataaaaaattggttaaatggcaaactttctactttgggatttttgaagaaaccc

SEQ ID NO: 7122 - DNA, 675 bp, Gossypium hirsutum
tggaggtggaagtaatacttcctttttcagctcggtgacccggaatctttggggaaatggagggcttaattataatgcaaatgctgctagttccagtgcctatgcaggatctggaagtgggagtataggaacaagtgcttttggaaatagtggaattaactggagttcttctcagatttccagtcaaggtggaaggaataatgtttctggcaataatgttaatttcagttatggaagtggtgataacagctttgggttggggacagcagggcatgagagaaacactgggaccaatgtagtgccaacatcatcatatgcagcatcaaatggcagttatgatggagcctttgcagacttttatggtggtgcttcattttacagggataccacttggccatcatcaacatctgagcgtgatggttctggttcctttggctatggacttgttagtgccacttctgatgttcctggtaaaagttctcctggttatgttggcagttatagtgttaataagggacaatcaaatagaggtaagaattcgtacttggcattgtcatagtgttatttatgttaatgggagtttagtagcacaaactctgataggttatttctttggactaagtcttatgtagcattcctcttagtaatataatctttcttttgttatagctcatc

SEQ ID NO: 7123 - DNA, 615 bp, Gossypium hirsutum
aggaaagggttttgaatttgaaaaaagaaaaaggtatagggaaatgtgtggaatttgagatgcgcagtgtttggtaaaggttaacggtaactgtttaaagcttgttgtccttttgtgtatgaggaaagacaaccggttcttaattacagattatttgggcttgactattttgtttacatggacaagaagcgggaacagagtttgaaacttttgaatataaaaaatgtaaggatatattcggatggtctgaatcaattattccatgtttttggtctattttacgaatttatgattccaaataaataaatctaaaaagggaatatgttttttatggttaaagggcgggttttgaatgttaaatggggtcacttgttggttgccattagaagggttctcgatgaacaggtcctgcgagatgcagctgttcgctacttcattaaaatctatgctaggcataatccacaggagcaatcaggtatggaaaatattttaaactctctatttttgcctagacaaaaatattaacatcaaatagagggaaaaaatataaaatacaaccaataataatatttttattataatatatttactagtgtaataagtaataaccatcca

SEQ ID NO: 7124 - DNA, 602 bp, Gossypium hirsutum
catcttatcttagtcattgtgattaaaagtgcataaaaatattgaacaggtagaaagatcaatgagcaacagaaaataaatgcagggacaaattgagataaagcattttctttcattctttttacgcagtcttccatttttcccatgaggtgcgttcgtactctctaggtttcttgctaaccaaaatgaaaaatgataacattcaccagtacatggcatcaggcatctgttgggatgaaaaactatattacctactgcatatttagtctcttcattcttcactaatataattcaaaattatgttactagatttagtcaagttttagaaggttttaaacagggggccagcaaattaagtctttatataatgtaaaaggcttttcatgtttcttgcacttaaatcctattttatataagatctgtgttagcataagccctactacaagccaatcacaattttctatattaaagattatgatttaagttaattgaagtaattatttatccataaataaaattattaaacattataaataacttatgtagataaagtccatgagagcgactggacttatgtagaaaaagtccatgagagcgactgg

SEQ ID NO: 7125 - DNA, 677 bp, Gossypium hirsutum
gagtattatgccagcttaacaccatcggacaacgacagaataccgcaacccgttgctgcttagatgaattgaatttggaagcaaacctcgaaacactatttatctccatcgcgtaatctggacctggtgaagtctcttgtgtccagatttttgttcaataaaaaccatgtggagattctgtttcatagtcatgaaacttgcctcgttgttactaggatgcccattaaggcatccaccatttattccattaagccatttaagcataagggtaaattgtactatatatataaatatatttcgttattgtcttctaatgagtaacatggattgttattctcgtatttactgccaaaaaatccaaggttgttttttaagccatgcaagaaaattctactgctaatatactaaatgtgaaccagaacaattgtcttgtctgtagcaaagctgagttagagttccactagttgttttggactctttaaactgcaaggatcagggtttaaactagacatagtccaggactttgaagccttgcatgatgtgagtatttccccttaattagatttcaaacccaattaatttaagtaattctgttggatcaaaagagtcttaagatccctaatagtttaggacttttattaaattagtccatttcttgtcggaacggaacgtatcat

SEQ ID NO: 7126 - DNA, 593 bp, Gossypium hirsutum
ttttagtactctggattttcattcccgtagaagaactatccaaataaattaattatttatgaaaatgacttagagtgtaaaatcttgtatgaaaatgatttgttttttacattgcacttggtgccggcagtgaaccttcattatcgcgtaatcattaccacatgattatccgatcctctaaaaaattatttttttggtgtctatattgatatgtattttttccagatacctattaaaaacattagtatttcggggttttaataattaaaaaattttatattttaataaatgttagcgttcagattgttagcactagtttaaattttaagaaatatatatatttttggtgtcggcctttttgttgccaacatcgatgttaaaaaagtttaaattttactttttcagtgctaactttttcattgttagcaccgatgtttttattattttttttttggtatcgtctttcttgttattggcaccagcaggctatatatacttgtagtggaatcataaatcatgagaaaactgaaagggggaaaatttttttgttttttcaaattttgtcttgacaataaaaaaaacaaaaggaaaaa

SEQ ID NO: 7127 - DNA, 606 bp, Gossypium hirsutum
ggatagatcaaagagaatagattcaacagccgtgtacaaccttgttaagttgcaccaattctttttcattaagtttcagttaaataatgaagatattttcatttgattaagaacagagcaataaatgatatagattgttttcttctgtttacatcttgctgtactcttatggcaacatgtgatgaagccgagaccaatgctaacttggcgcatccttcacaactacttccgttctatgaaagccatgtttaacacctcaatcccacattaaaaactcaagacacatagacttaatctcacacttgtgagacaaaaaccgcaacaacatattgtagattggtttcaggtctctacagtctgatcttaccactttctaactgtattaagtccgaagagttccgaaaagtaaatgcacaatctatgccccttcgttactcaagtttgtttctcccttttcttctttagggtccttttgaacacagctaaaacagcaatggtgcaagaaaacatcccaaaattaccttcaatggataaatcaacaaaaggtgaagaaagggcttactttacgacagaaaaataagtgtccatcatgtcaaattataagca

SEQ ID NO: 7128 - DNA, 248 bp, Gossypium hirsutum
gatatttaaacatgaaacagccagcttcaggatgaatacgagtttgttcacaacttctggcggtggaggtgaaagactttgatccaacacattgtttagtggaatgctttctgctgttaaaatcgatagattagagagaaattcacctggatatgccccgactatcaattccaatgccagcacaccaaaactatacacatcacatttttcagtaacttgcatggtgtaggaaagctctgcaaagaaaa

SEQ ID NO: 7129 - DNA, 609 bp, Gossypium hirsutum
  misc_feature (586)..(586): n is a, c, g, or t
atctgctattgcgcctgataacttcacctttccctttcttctcaaagcttgcgcttctctccgcattctcaatttgggttctcagcttcatgcacatgccttcgtatacggctattcctctcacgtcttcgttgctaactccctcatttccatgtatgccaaatgcggcctttttcctgtttccgaaagagtgttcgataaaatgccccaaagaagtatagtgtcatggagcgcaatgattggagcgtgcttgcagtgtggttttcatgagcaagggttgttgctgtttaccaggatgttggatcaaggaattaaacccaacagggcttctattttaaatgccacagcctgcgttcggcgtgagaacgcggctcatcatatgcatagagtcatcatggataatgtacttgataatgatcactccgtgcaaaatgccaccatgcttatgtttgctagatgcggaagaattgaccttgctagaagcttatttgatgggttcacatacaaggatttggtttgctgggcctcaatgatcgacgcatatgctcgggctgacttgccacttgaagctttgctcctctttacnaaatgagattacatgtgtccttc

SEQ ID NO: 7130 - DNA, 664 bp, Gossypium hirsutum
  misc_feature (389)..(389): n is a, c, g, or t
agagtttgttcttttcaaggcgataaaaactactatgtaacccacccctcccagaaactattttctacctttaataatcatcttttgattgtacttttgaggctaatttggtgagtaaaaaccatgaatcaatcgcggtttgcttatgttttcccccaattattccatttccgtaccttttttttctttttggcttaagctcatcggatactatagcaaaaagatctactgcaaaagtcaaaataacttgctccatgaattttactgctatctcaaactttccacgttcatcatttgttcaagtctatggaactttttttgcttctttttcacatcctgatagctacattgctatatatttgctcttcttgtttatgacttcgcaaggngaagatataaaagctaaaagaaaaaggttaaattctgcaattagtccctgtactttgagaaagttgtggatttaatccatgtactttaatttgattatttctagtccttgtacttttcaaattttaaattttcagttgtaatcaaacaataacggttaagttcattaacttttgctatttccaaaatttgatctccaaatatattatcatgtgtataataccatgttagctcactaaaaatctaatagatggattaacaacggtcatttatgtca

SEQ ID NO: 7131 - DNA, 600 bp, Gossypium hirsutum
gtcaattccttcaacttttgttccaaaagaacacttaaagcatctcctgttagcggcatgttcttcggcaaagatgtttctccataattgttttccatcatttcacttctttggagggcaatgctttcattttggtcctttcttttatccttcagttttgtggaaatgctgtgcttttgctttaatggagaactgaatgtgaaagaaataatatctgtatcatttttgtccttggctcccttaccagtttctcggcacgttgatatgcttttagaacatgtctgatctatactaccagctccatgtaccatttctcgtctagtcaccggtttacatttactgtttctttcttttccaattgctggattgatgaaaccttcagtttcagcttgcccattaacaatatgtgttttcctctttcttaccggagaccttaactgagacaaggaatcatgttggccactgcaagattttctctcgatgtcaacaggagagctatccactttgactggcactctatgtcgggtgtgactacttaagcttctgttcagggcaacaaaatctttgaccccaccaacagcattgcaccagaagcagctt

SEQ ID NO: 7132 - DNA, 579 bp, Gossypium hirsutum
gttttcctgcataatcactacttatgccttgcagttgtgcaattctttgctccatcgatatcgctacttctctttctcggcttatctcagattgatactaattcgtttgatacgtacaacctggttaaagaagttgctgtgtttatggcttggtggatcgtctttgtctgggcggttattacttcggcaagtctggtgttttaccgacgcggtattctgtatgttttctgataactcggttttctgtagttgttggcctttggcttagattttttgcttgtaacagatgattacatacgtttttttttgtatacatcgtgattgaatacatgctgcaagaaaactctttgagaatgttatttcatttatagatgtagttaagagattttcagatgtatgccatcgtagcatgattggagaatggctgaacattttcagtttcttatctgtttactgtttggagagccataaactgctattttccgaacaaacggtttgctagcattgctccgtgtaaaccattttagtttaaaggatctctcatcgattcacgatatatcgacctgcatttttctatca

SEQ ID NO: 7133 - DNA, 680 bp, Gossypium hirsutum
gtgccttggacatgaaagtcatcattactagtggttgaaggatgcaagaggaagcgcttcgatggttaatatggaaagatttgatgtattataaaaacccaacacaatccctggtatcaaatgaagatgcagtaaatagtttgcagtgattttatattctgaatcaaagagataatgtcaaagttgtaaataatttgccttaatcaacttcatttttatctttgactatgttgagatttgagatattgaactaaattgtgtttcttgattattaattaataaaacatgttcttaaagaagaaacgaatgtgagattagctaaaggtgctaggagtaggtatgatggttatggatgggttgaatcgtgaataagttttgtttattatattcacaactatataagaattgggtgatagttgaattgataataatcaaatagatttaggttctaaaataattttattttcaatttttattgatttattatataaaaagataaaaatatcctcgtacaagtataacttaatttgtatatgaaagaatattttattatatatattataattagaattaactataattaattcaatgcgaaacataattcaacttgaataaattttgaaaaaagaatacgtgtaatttatatatataaattcgggtgtaagcccgaagtgtgttaa

SEQ ID NO: 7134 - DNA, 680 bp, Gossypium hirsutum
agtgagttgcaggagtttttttggcttggtcttttctcatttttagttgctagtttgctgcttttgttttctcccaagtatatccgaaatttggtttagagctgactatacttttttactgttcatttttctggtcaggatgcatttgaagacggaggaaagctatacgggaagaaagtttatctctttggttgtacggagcgtaagtagctcacagccctggccctttttttctttttgcacattaatatagacaaattgcggttcgtgagggagaaaatggggttttatgccatcatctgcaatacctcttttattgttaattatttattatcatgttaaaaggtaagaaagagaccttgtgtgttagttcttgatttgagccacgttcccgtaagtttctttcttgcatcatgtagtttcaatttactctgatctgtccctttttactctgtgttaattttagttattttttatttgtgtagctcaactggttccttacaagggagaaaacaaagtcatctgtatacctgtggttgtggctgtaagttctaacattgttgtgaagtgattttaatgcttgtcatgctaaactgattcaaagcatgtttctttcttcttcaacttgtgatgagtgggaggagttgtaataaaatcttattcagccgtacctctgtgtg

SEQ ID NO: 7135 - DNA, 630 bp, Gossypium hirsutum
ctttgctagctttgtccaaggaaagcccaacctcatctctaataacagtacctgtacgcaaatggtagatatctctcaataattagaacacaagcaaattgagttttgggaacaatataaacacatgaaaaatacagaactatacaaacctccagtaaggatagcaatgtcatccagatactgactcttgcgttctccgaagccgggagctttgagagcagcaatcttcaaagcacctctaagtttgttcacaaccagagttgctaaagcttcctgttcaatgtcttcagcaattatcaaaattgggtatccgctcctaatggcatcttccaggatgttgataagatctcttgcattggtaatttttttatcaaccagcagcaactgcaatcaaaatgcatatgcaattgtcaacatgcaatacgggaaagttcaatgttaacaagaaaaaaatgtcaatctcatgattataaaatgtaccttgcagttctcatattctactgccattttctcactatcagtgacaaagtaaggtgagatataaccacggtcaaattgcatcccttcaacaacatatagactattctcagcactttttccctcctcaagggtaactacaccctttcgacc

SEQ ID NO: 7136 - DNA, 566 bp, Gossypium hirsutum
gggggggaataaattgatatattggcaggtaaggtcaaaatgtaggtgaattggtgatataggacaaatcccgattatatttgaaattaaattatactgtgttctttttattaaaaaaataatttaaattatgtactttgaatctaaaaataaactgacatttttattaaaaattttatttatttctactattaaaaccaagcctctatctatcaacatgttgtatacgtaacatgtcacgtgttactatcttattatactattagatacgttagtttttaatagtaaaaacaaataaaagatttaatagaaaagaccaatataatctttagatgaatataaaaattaatttatctattttttaataaaaaaattaaatataatctaactcttaatataataatctctcaaatctagttgaaagaatttgaaaataaaaatgatgctagaggcaaattcttcacttcagcagttgtccctaacagcccaaatgctttacctacaaccttgtttagttattgtatatgctactactgttataggaaatatctcgaaagttgtaacgc

SEQ ID NO: 7137 - DNA, 900 bp, Gossypium hirsutum
  misc_feature (339)..(339): n is a, c, g, or t
  misc_feature (437)..(437): n is a, c, g, or t
  misc_feature (609)..(609): n is a, c, g, or t
  misc_feature (612)..(612): n is a, c, g, or t
  misc_feature (831)..(831): n is a, c, g, or t
tttaagaatatctaatgtgtttcctaaactttttttattaatcatgtaaatataaatataaattaaactaataaatgcaaaaaatcataaaatatatatttttatttattttaactgtgtttaaatatttaaatatagagagttcatattatttttattattattttttaaggagagttcatattatttttgtttgttaagcacatcctatcctatccttgcggtaaatataattgttatattggcaggtaaggtcaaaatgtaggtgaattggtgatataggacaaatcccgattatatttgaaattaaattatactgtgttctttttattaaaaaantaatttaaattatgtactttgaatctaaaaataaactgacatttttattaaaaattttatttatttctactattaaaaccaagcctctatctatcaanatgttgtatacgtaacatgtcacgtgttactatcttattatactattagatacgttagtttttaatagtaaaaacaaataaaagatttaatagaaaagaccaatataatctttagatgaatataaaaattaatttatctattttttaataaaaaaattaaatataatctaantcntaatataataatctctcaaatctagttgaaagaatttgaaaataaaaatgatgctagaggcaaattcttcacttcagcagttgtccctaacagcccaaatgctttacctacaaccttgtttagttattgtatatgctactactgttataggaaatatctcgaaagttgtaacgccgcctggaattttttgtagctgaagtgaattacattatgattaanagttttatatgacatctagatccaatccataggtaagtcattaataataatttagacacagcacaatat

SEQ ID NO: 7138 - DNA, 246 bp, Gossypium hirsutum
cgatgactcctgcgcccacatcacgacgtcgaaagaacgggaagaggccttccccggttctaaacccgaataactgatgcgttcgggtcgggttggtctggttccgttgaccgagagtgagagctttttcgttgggattttggatccgaacaagcctgattcgaatgagaaggaacataatcgatttacattgactgaagtgacgccatctttgataaaatggttggaggagcttggggagttaac

SEQ ID NO: 7139 - DNA, 526 bp, Gossypium hirsutum
ttatctcgaaggaacttcccaagaggaacatcaaaattcctgtagaaaactatatggctaaaatggctttgctcacatatagtcccctttaaggcatttcggctagacataagaaccaaaatactctgtgaatccaacattgtgttgatgctctccttattttgcattttctcttcattattatcaccaccagcattcaagttaagtagtgcttcagaggaagctggaaaagattgaggttgtccatcatcaagggatttctcttgatcaggaccagatttagattccacatcaagttgctctgagccctcaaaacttttcattgcaggagttgcttctgtgagcttagattccaccccatttaacccaaaatatgtagacaatgaccgataaggagcagtggatgcaagaggaaaattgcttccgattactttcttcagagaggcagaaatggatgacaacccagacaaaatggctggattatatggctccaaagataaagcagaactattgcctaatcctgact

SEQ ID NO: 7140 - DNA, 627 bp, Gossypium hirsutum
aaccgtacaagtggcataatttcggttaaatttgcgtctttggaattgtacaggtgcatcagctctttcccttgttagaaattattataattttaataaaaaaagattttttatttaatcaaaaaattaattaattaactaaaagtcaaatttcgaaaaaaaaatattttaaatatttttcatacatattacatacatgtaaaatatttatataaaatattaaatttaaaattattaattaggacgaatctacattgatatatattggaacctatcaaaacacatcaatatgataaataacgatcgaaattcacacccgttcgaaaattaaaattgagtaattttttattttctaaatttcataatataaatattattattaatattaatatttttattaaatttatttatgtgatattttaaaaataaaaataaaaaatactttatccattatgcccatcaaaaactaagatttgttgtcttagtcgactgtttttttaaataatattgggtcacattcaattaagaaaatgaaccaataagtgaataaatgtcattttcacacgtaaattaatttttgccattaaaattttaaatttaatccaacaactatggtaacatcgaaac

SEQ ID NO: 7141 - DNA, 625 bp, Gossypium hirsutum
cggtggtgcatgaaactttattttctgacaggaaacctttgatccattatgttgatataaaattgccagattagagtagaaatctattatgagaacatatcagttaagattagagtagatcagttgaatttgttgagatatataacataatttgtgaaatgtaaattatgtgcatagcatgacatgacttgcaagtggtagtttgaacaattttgcatgtgaagataagtatggggtatacatgtaagccaagttggcccatatttcaaatgaagttgatactttagtcagtgtttgcagtttgctctatttaagttatgacattcgaacagataagtgcaaatgatgacttgtaggtaccaggatgattggcttaaaacttcaggaaactctttgcagctttgggaaaaggctcctcttgagccatatgctctaccaaaacctgtaagattcttcacatggcttgctccagctaaaacaaaaactctttatttattgggttggtctggttttagaaattgctctgtttataatctgatcttttggcttgcagataaattattctgtgatatgcccagatattgatccccttacttctgctgctgctgatttttttcaacaacta

SEQ ID NO: 7142 - DNA, 565 bp, Gossypium hirsutum
tcttttggctctacttttgtttatggctatcagaatgctgcattcgaggtaaaagttccttaaaatttgtcgcacgatttactttttagtatttggcacaacacttgtgtcggtaatatttagttttagatatctgcttagaggattgccaatgacgatctttgcaattcgcaggttatgaagaacggctatattgcaaccgtgacactcttccagtcctgataataagcaatctcttgtccgataggttgttcctctgcacatctgaaaggtgcgttatgcttacaatcattgatgcaaagtataatttgaacactcttatggggaaagcaacaataattgtacattaatgtattgatttgtatagttgatttgtgatttagcatacattgaccatgtatcttctgtaattattcttccttaaagtggaacactacattgttttttaagcttttgctcaaattgcctttgcattagccctcttgtctccgatggggtactaaattacttaagtggttgagtatgattcagacttatgagaatttttttccacgagacaaatgat

SEQ ID NO: 7143 - DNA, 629 bp, Gossypium hirsutum
tctgggcggtgctctgagagcccaagccaatgtttttctcaatctttgtctaatgtgtggaaatggaggctcaatatgatgcccagtcttccgaattttccattattctaccatgaatctcacttttttctgccataataagatccacttcctgaatgactatgatggcgatgacgtgatcctccactcctgccgctagatccttcccatgagtttccacggccataagctctgctatttccacttggccaattcaatgtctgtgtcccaagtccattattctcttcctctaccctgtcattatactccaagaccagcctcttaatgtcttgtttctcttcaaactccgcagcttctttctgtttcgtgctttggactagcgtacaatcacggggaatatacatttgtttcgtctgttgtttgttcccccgcttcacgagaactttcacctgcacttcccggcttcctccagcctcttcatccaatgcttcatcaccactttcccctcccactacccttccatgatgatctttgatagaaccctcaaatacattcattggtatcatcatgtttaatgtaggtctgccccgcagctccaacttgcgttgctccatgctctcctgtaatta

SEQ ID NO: 7144 - DNA, 567 bp, Gossypium hirsutum
  misc_feature (517)..(517): n is a, c, g, or t
  misc_feature (528)..(529): n is a, c, g, or t
ttttttgcacatggaagaggtcagctagcttccactcaggtttggataacatattttttgcttcaaatcactttagtctaattcaatttcaattttaataataaataatttatatttttatttaattttaattataatatatatatattaaatactttataataaataaatagtgaaagagttgtggaaacaactgattattagaaattgtaaaataagttaattcagattgagtcttagtttgatttacataaatattattgttaatgtaggaaggcatgggttctagtgcgttgaagcgcattaacctcctatttataagttggggaagaactataagtaattttaggcattatgtaaaaaaaaacagatataatgagaacttatatgagattgttcaaatgatatatatacaaaatataaattttaaatatcttttaaacaatttatatataatatttgaaaattttaatttgaatatttcaaagggtcaaactgtccatgtgttaaataaaangggattttaannttgatatttccaagggtcaaactgtccatgtgttaaat

SEQ ID NO: 7145 - DNA, 628 bp, Gossypium hirsutum
tgcttgtggttctcataatatatctggtgatcaacatccttcatgcttgaaggttcaagagaaaaggacctccgccttgaattgtttgcatttgagcttggtttctcatcctctacattatccgtataactttcatcatcaccgtcggtgccatccacaaccactcctttagttggcatgctcagtgacttgaacttgaaaagtctctgatcttgacaatctgcttcttttctccgggaagagcgtaactcctctatgtcatcaagatagacaactacttcctcacaaaactgaggcaaactttccgaggaagatggtgcttttatcctttcatcatcatcctttcgtttcctagtggttgtacaaatccggctgatgttccggctttctgcttttatgtcatctggtggagaacaagaaagggaagcaccaatggtatcagaatttggataggaataagagtgacattggctgatcaaatgagtggcagtctttgccaatggatcaacttgtatgtattttccttccttctcactaccatctgaagtctgcaccaatgtaggacttcaatgaaacatcaaaatctgaccaaaagacagtaattgaaagaacataatctagttacctg

SEQ ID NO: 7146 - DNA, 537 bp, Gossypium hirsutum
tacggatgattatgatattaatttaattatttaatttattttgtaaatgtataaatgaatctagagtatttattatgattatcataaaaaaaataaagaatcgcaatattagattttttttggctcaaaacaaggtgacagttttcttttttttgacaaaacccaaattttctaaaaacctctaaattcagttgcaggtatttcggtttttatcccatacgattttggtttcgatttcaaaacttaaaaatcgaatggaatggttcaatttaatttttgtttaaaaaccgaactgaattcacccaaactatagctaaagtggggagaagggcatatataatattttctctagagattatttttgatactccaacattagattcttttcatttttataatccttaagtatcattatcattcttttttcttttggtaccattcttgtctattttacgatatatattcggagttcatggttgactctcccaataatgtcatcttcaaggtgtaaacatgcgtcttcccttcagaatgcaa

SEQ ID NO: 7147 - DNA, 649 bp, Gossypium hirsutum
aaatcgtcttttagtgaaacgcttcatcttccgaggacaaatcactggatttggaattttctggtgaggatttcactcaattttacatacaaatgtctgattaactgttgctgttgtctatgtcataacattttattttctttctgaacttataccaagtttgccgtgaaactcattgctaagaagcttgtggtttctatagtttaatttatctaaacatctatgtgggtagataacttgtacttatgctgctaccataatctctatttggctttcttttttatttatatattaactgaaccataaacgaccccattgcctaataaagtgtctcgtagtggcctaaagagtgtattcctcacacaaacttattactttccttggagaaaataggaaaacagttgatattgtttaggggttgtaggcagtggcaaagcttggggggagggggggaggaggcagggcaggggccttggctttcttagttaaatgggaaattttccatttagccccttccaagatataaatcattcaaattaagtcttttagcttttgaataaatgaaaattttgcatttttggcccctccaaaaaaaatgaacaatgtaatttaagcattttaacacaatttttaactttggcctctccaa

SEQ ID NO: 7148 - DNA, 806 bp, Gossypium hirsutum
  misc_feature (372)..(372): n is a, c, g, or t
  misc_feature (396)..(396): n is a, c, g, or t
  misc_feature (408)..(408): n is a, c, g, or t
  misc_feature (433)..(433): n is a, c, g, or t
  misc_feature (443)..(454): n is a, c, g, or t
  misc_feature (545)..(545): n is a, c, g, or t
  misc_feature (557)..(557): n is a, c, g, or t
  misc_feature (562)..(562): n is a, c, g, or t
  misc_feature (564)..(564): n is a, c, g, or t
  misc_feature (570)..(570): n is a, c, g, or t
  misc_feature (575)..(575): n is a, c, g, or t
  misc_feature (578)..(578): n is a, c, g, or t
  misc_feature (608)..(608): n is a, c, g, or t
  misc_feature (654)..(654): n is a, c, g, or t
  misc_feature (670)..(670): n is a, c, g, or t
ttagtttcaagattgatggacttgaaatatgttaaatctttcatatttcctatatgtcatttcatttagtaggcatggatgagcaattcattcttagagttccaccttctgtcgctgaacgcataaatcgtcttttagtgaaacgcttcatcttccgaggacaaatcactggatttggaattttctggtgaggatttcactcaattttacatacaaatgtctgattaactgttgctgttgtctatgtcataacattttattttctttctgaacttataccaagtttgccgtgaaactcattgctaagaagcttgtgatttctatagtttaatttatctaaacatctatgtgggtagataacttgtacttatnctgctaccataatctctatttggntttcttttttanttatatattaactgaaccataaacnaccccattgnnnnnnnnnnnntctcgtagtggcctaaagagtgtattcctcacacaaacttattactttccttggagaaaataggaaaacagttgatattgtttaggggttntaggcagtggcnaagcntngggggnggggnggnggaggcagggcaggggccttggctttcttngttaaatgggaaattttccatttagccccttccaagatataaatcnttcaaattaagtcttntagcttttgaataaatgaaaattttgcatttttggcccctccaaaaaaaatgaacaatgtaatttaagcattttaacacaatttttaactttggcctctccaaaattttataattttatctcagccccctcaaata

SEQ ID NO: 7149 - DNA, 516 bp, Gossypium hirsutum
  misc_feature (314)..(315): n is a, c, g, or t
  misc_feature (330)..(330): n is a, c, g, or t
  misc_feature (334)..(336): n is a, c, g, or t
  misc_feature (340)..(340): n is a, c, g, or t
  misc_feature (345)..(346): n is a, c, g, or t
  misc_feature (349)..(350): n is a, c, g, or t
  misc_feature (352)..(354): n is a, c, g, or t
  misc_feature (358)..(358): n is a, c, g, or t
  misc_feature (368)..(377): n is a, c, g, or t
  misc_feature (379)..(379): n is a, c, g, or t
  misc_feature (381)..(385): n is a, c, g, or t
  misc_feature (388)..(407): n is a, c, g, or t
  misc_feature (412)..(416): n is a, c, g, or t
  misc_feature (421)..(422): n is a, c, g, or t
  misc_feature (442)..(446): n is a, c, g, or t
  misc_feature (449)..(470): n is a, c, g, or t
  misc_feature (473)..(474): n is a, c, g, or t
  misc_feature (476)..(480): n is a, c, g, or t
  misc_feature (488)..(491): n is a, c, g, or t
  misc_feature (493)..(501): n is a, c, g, or t
tggctattcattgtccaccggtttctcagaaacaaaacatataatcaaaactcaaaactaacaataacaggaaacaaagaggaaattaggttgatcattgaggtaaagcagttactttatcaacattttaagtcataatgaaagattaagagattaacactgaagattaagtgaatgcatgagggggggggagggattgagagaggcattggcttacttgaaagtaaatttcgcctcttttcttgtaaagctattttcttttcaaataaaaaggggaaaatttttgagggcgtatttatataattactgacgtnnttaaataaataaatncatnnnaaantgcanncgnngnnntttntctttttttnnnnnnnnnngnannnnnttnnnnnnnnnnnnnnnnnnnnggggnnnnnccccnnttaaaccccttttttacccnnnnnccnnnnnnnnnnnnnnnnnnnnnnccnnannnnnccccaaannnnannnnnnnnnacttttccaaaaaaa

SEQ ID NO: 7150 - DNA, 600 bp, Gossypium hirsutum
gatccaaggttcagaattcggatgggaaggttcttattggagagaactactgttttctgggtatcaacttcttgcatgacagtacctgctgcaataaactctcctgtggttggatcaaatttcaatcctccttgtacagagtcaagaacagtttgtatttttcttaatgatctattcactttgttaatcttgcgagagggccatcttgggatcccaagttgtctgcaaatccttttcagtgtagtggggcaaactacaaggaaaatagaatcaaaggtcaatcaagattaaagtaccttggtatgaaccagattcaccctactgcttgaaaatgatattcttctaacacttgcatatgttcattagaccacttttaataactattttctagagcatatagactcaactataaaatacaaggtctagtatcacaaggccttaataaataaacaacacttcagccataatttgattcaaagaatctcttatctataaaaatattaagctcaaatactactttacacaatatcttaggtttttggaggttttcaatgtcaatgttactcttgctcttttttttttcttgaagggtctgtgtcc

SEQ ID NO: 7151 - DNA, 582 bp, Gossypium hirsutum
cgatccactttttcgagcatgaatcgaattcaagactttcccagcctaagtaaacagaatagagaaaactagaacatcagaaacgaagaaaggatcaaaaattaaaaaaaagggtataagatcattactcacaatttgaggtgcaacaatggtgtctggaaatgaacttggattatgattgaactcgaactgtttctgtttctgagaaagggctttggaaagttcagatgcagataaggaccatgatctagacaagaactccataggctcctttggtgtttgtggctgacggatagctggtaaagacgatgctgctttaagcactccatcctcttctaaattctctaacccgaacaaacaaccagtcttccaatctgaataaaacccagttcccatatctatcttgggattcttttcagctgatgacaaggaaacacttttaaggcttttgtgttcgaatttcaaaagctatactgtaatctcctgtagttttggtatctatgggctttgattaaatgaaagaaaacaagtcttaaagaggaagtacaagattgagaagaagaaaaagaaggaaggaaaatg

SEQ ID NO: 7152 - DNA, 619 bp, Gossypium hirsutum
aaatgcatgtttgctcagaaacttattttctaaaaactaggaatattgttggggatgatgttactgcagcagtcttggaattttttcaggttaataatttgccgccagcttttaactcaacacttgttgccttagtgcctaagaagttaaattcaagttgtatgaaggacttcaggccaatctcttgttgttcagtgatctataaatgcatcactagaattttgattgatagactgacgagttttctacctaaacttaatgtaggcaatcagtcagcttttattcatggaaggaatatttctgataatattcttttagttcaggagatggttagagggtatagcaggaaggaaatcactgtcccctagatgtgccatgaagattgatcttcaaaaggcttacaacttccttaattgggattttatctttgcaactttggaggctttgggatttccactattgtttattcattgaattgggagtggtgtcacacaaccttggtattcaatttcttttaatggaggattggtaggatactttaaagatgccaaaggtacaaggcgaggggatccgctatgaatgttctctttaaaatgcttgataaggctgttgagaatgg

SEQ ID NO: 7153 - DNA, 638 bp, Gossypium hirsutum
tgaaacaatattagtgattaatcaaatcatagtaaatgagagaaccttgagctcgaagatgaaattatttgattaaaaaacctaatgcaatgtaataattgaaagataagtttttgtttattaataactacaagaatatatatttacaatttttatatttaatttcgctaattcatataaattttttaaagttaatatctaataaagttaattctaattgttataaatatctatattattcataaatttgaaatttaattaatatatttttatttttaaaatatatttattttaatttttagatttcaaaattcaagttcaacgtcaataatgttaatttattttatgttaaattttttagtatgatattttgtaataaaaaaaaatattcaattagtaattatgtaaataaaaaagatattgtaattaacttaaatttaacaaaataattttaacaattaaatctaaatttaaaattttaaaaattaaaaaaattaaattactaaaaataaaaatataaaaactaaatttcaaatttttaactataatatactttaacattgttgtagcttctatccattgatttcttccggtatggcggccttttgttagattattgttgtggttggcatgcatac

SEQ ID NO: 7154 - DNA, 653 bp, Gossypium hirsutum
  misc_feature (592)..(592): n is a, c, g, or t
  misc_feature (628)..(628): n is a, c, g, or t
  misc_feature (644)..(647): n is a, c, g, or t
aaattgaaagctccggttgtctggataaaggatgtttatgctgatgcgatcaatgctttggctaagcactgtccaaatctggttgacgttgggttccttgattgcctaaatgttgatgaggcagcattggaaaatgtctcatctgttcgtttcctctctgttgctgggacatcaaatatgaaatgggatgtggtttcgcagctttggcacaagctgcctaaattgattggattggatgtttctagaactgatatcggattagctgctatttctagattgttatcctcatccttgagcttgaaggttttgtgtgccctaaattgtccggttcttgaagaggaaactagcattagcaccaccaaaaccaatggcaaattgttgcttgcccttttttcagatatttttagagaactatcttctttatttgccgaaacttcaaacaaagggaggaatgtgtttttggattggacgtgctcaaagaacaaagataaaaacttgaatgagatcatgacttggcttgagtggatcttatctcacacgcttttgcgtactgctgagagcaacccacaaggtcttgataatttctggcttnagcaaggggcagcattattgctaagcttaatgcagngctcacaagtggatgnnnnaaaaaa

SEQ ID NO: 7155 - DNA, 716 bp, Gossypium hirsutum
  misc_feature (665)..(688): n is a, c, g, or t
  misc_feature (690)..(692): n is a, c, g, or t
  misc_feature (697)..(698): n is a, c, g, or t
  misc_feature (701)..(702): n is a, c, g, or t
  misc_feature (706)..(707): n is a, c, g, or t
  misc_feature (709)..(711): n is a, c, g, or t
acattcgagacttatgaaacctatgctgttcggactcattcatcatccgacacatggatatggagatatgatcttcaagatccctaaaaatctaacggtacccatatcagatatccgacacatgacagccaatatcggatactaacccaaatccaagtaacatagcatgaaactaaccacaatattaaaacacatgaaaagagctaaacccactagttgaaatactctgagatcaactagactaggaagtcaagtagaagcataatcccaaaatcaagccctagtagctactgactatggatccagttcgcttatccatgcatatcaatttatttattttttaaactaagcaagcacaatttaaccaaatactaaaccactatttaaaatatttcaatccaaatctaaaattttaagaaattacagaaaacgaatattcaccttcggcatcatcttcatccttgtcatcgtcctcatcttcatcgtcgtcttcatcaacgtcaacttcaactacagtttgttccgactgtgaaaccaaaacataaaaatcaatggaaaggaagaaacaaatatttttaggaaataaaaaggagtagagaaaaggataaaaaagttacatcgactttttgttgttcgagatgagcggcgaggatctcttcgatttnnnnnnnnnnnnnnnnnnnnnnnnannnaaacnntcnnattnncnnntttat

SEQ ID NO: 7156 - DNA, 643 bp, Gossypium hirsutum
atcccgtttcaccttcagctataacaatcaaagactacacaagtttaatttgtatagctaggaaatttgggtttgttgagcaacattttcaggttttagtttcttttactgttactttttctctttttttccttcctttactgaatttaatttgatgagtaggtcatatatatacctgcatgctgattgaatgacagtaagttcgtagtttgatttcatgagaataagaagaagaaagggacagcttccaaaatactataggttacttacagtactgctttttcaatatatttttcttgctgcagctccacgaaattctcattatatttcccccattgaaggaagctgctattatatccatgcatgtcatttttgttgtgtgattttacatttgattacttgttcatatatagacacagttacatacacatacgcaagtctcctccagaaaaggaaggttctttcttatacgcaaaagtagctataatatcttttctcttgttaacattacctctttatgatgatgatgatcacccatgcataggactaggaaggcagctagcgcctagcaataagtacaaattaagtttctctcattatattgctggtgtgtttatgtaaagaggcatgggcagtattatag

SEQ ID NO: 7157 - DNA, 580 bp, Gossypium hirsutum
gaaactgatgaataattttgagttttgtcctcacaaattattgagttgttgttgagtcaaatttaacaatttaactaatttttaaaatttcataaaataaaaaaataaattaaaataaatgaattaactctttaaaatatgataatgaaaattcattcatcttatcatctaatcattccaagtttttctttgggtcgtggttcaagagaagtgggcctgttccatataaaaattttataattttaagagttataaacaaaatcataaaagttatatattttttatatatattgtgattttttaataattttttaatttgttgttactaaggtattttttttaccttttagccttattagtttcaaaatttctaatttacttctaataaaagagtaggggtcagattgaataaagatgtaaagcttgatgactaactttgttattatattatatatatatataaagcgctaaaataaacatttaatattgcaattttaacggagaggctattttgctcactcatctaacgtacaaagaccattttgcccattttttcagtagatgggctaaagtgcatcta

SEQ ID NO: 7158 - DNA, 687 bp, Gossypium hirsutum
ctgtcccagaatcaacttcggggtcatattccagaaagcttcaccaatagttccagcttgaggcatctaaatctttcattcaatcaacttgaaggccatgttcccgagaaaggcatattcaaaactatcaacatgtcaagtttggtaggaaatagagatctctgtggaaacacatttctcgggtcgtgcagcaagagaagttcaaatcggttttcgaaaaaggcaataacaattctcagcatacttggatctgtttctgtagtgctgaccctagtgctagccatttcattcctcctttggcatgccaaagagagtaacccagtcaagttggaaaatccagaaacagagtttacagcagcagttctaagaaggtttgataaagaggagttagaaaatgctacaagctccttcagtaaagataacattattggagcaagcagtttgagtaccgtgtataagggccagctggaagatggccagctgatagcagtaaaaaaattaaatctgcatcagttctccaaagaatctgataagagcttttacagagaagtcaaaaacttgagccatttaaggcacaagaatctggtcaaggtacttgggtatgcatgggaaagtgagaagctgaaggctgtaattcttcaatacatggagaacggaagtttagagagtggtatacatggcttccat

SEQ ID NO: 7159 - DNA, 573 bp, Gossypium hirsutum
agagtattctctctgaactcaattttcaatccccaactcatgcggtcagattatttgcaatatttgcttttgttattgaccccagatgataatttaagaggtgattccatgatggcaaaagtgattaatcagcaatgcgttggcagacattgttgacagaacactgtattttaacttacaggaagaagcatcaaaaaaccaattggaacaactgatgctaaatcagttagggttctgcgaagggatttcttttctttctctgctaattcatcccctatcagagcccttccaagcaactccactgcagccgcaacatcaatggctagaagctgagatccttgcaagacatcctgctcattggtaaatgactcagatgacatctcatcacttctcaatttgatacaccacaaaagtagtcagaccatgaaatattgcagaagaatttgaaacaatcgatacaaatcatttaaaaaaattgaccttatcaggggattagaaatttctaggctcataattcttctcagattccttaagtaaaaggagtaatatcataatataaacaatccaaaagtt

SEQ ID NO: 7160 - DNA, 667 bp, Gossypium hirsutum
ccttggatgtatgctattcttcacagctttttgaccatactttctccacctgtaaccgtcgtccaaaatgtcatcttcactcctggtttggaaagcaaacctaggtcggcttgtcttttttatcttactgcctttcctcttatccatattggcgcccttggcatcctgatgatgatcgactccattctcagacattaaattattagaaccgctttcaatcattagcttattctcatgaccggagaggaggctaacccaatcgatatcggggagaatattttgagtttgtaaaggaggatgcaaggaggaggagggaagtgaagttgggaagaggaaaggaacattaaggggtgatagtaagggcggcggtgggttactttcttggccatccatctgtaagaaagtgagagataaaggaactgagaatgattaagaaatgaagtttaaaagggagaggaaaatagtggaaggtaaagaggttggactgcccccaccctacaagtacaacacagaagagaagtgtttgataagagttaaatttgggagagggaggaggctaattgctaaggtctttttaagttgtaattcctttctctagcacccaacaacatctcacctacttctgttcaactgcccctctcccctccctcaagtaatagtcgacacg

SEQ ID NO: 7161 - DNA, 642 bp, Gossypium hirsutum
tttcaactcgctgttttccttttcatcttttataagattatggttttcttggtcatctggtacacttttcttgacgttttgaaactttttatggcattgtaaattgctttacttactctattcgtgtcactttgttcatactttccttttttctttttcatttttaggaaatttatattcttttgtttcactttcccttaaacagtgtgacctattttatagtatctatttttaattaataaattgttgagcttaagctccaacttctaggattctagtcccttttgtttttgaattttatattattttatgtgaattaaatatcttaatgcgtgtcaatttttaaatgtttaaaatttaattaaaaatataaaattactgaatattaaaaagcatttttaagataatttaaaaaatctagatgaatttaaatgtatttgggttaattatatataaataagagtgagtttaaaaaaaaatttgaggtttatttttagttaaaaattgtgctttgtatatttcaggtaaactattaaaataattatttttgtttgttattttgctgttaagatctgttacctttcaaacaactgtttaacgtaatagttaaaatgagttttaaatatcaacgtggatgtctag

SEQ ID NO: 7162 - DNA, 685 bp, Gossypium hirsutum
taggttcccttgggtctggtttgcaagcgccagtttttacgcaggagcagtataatcagattttgcatctgttaaacaaggaacctgttgtggttgaagctgctgccagcttagcaggtatgactaatattggcaatagatggattatagatactggagctactgaccatatactatcagatcttcgtttcttggaatctcctgttgcatgtgcattcgggtcaccgagtgttcgacttccaaatggttctgttgtttcggttactcatgttggagtgtgttcaattttgcctaatcttttattgaagagagttctttgtgttccaaacttttattacaatttactttctgtttcaaaacttgctactgatctcaattgtgtggtttctttttatcctcaattttgtttgatacaagatctctccagtggcaagatgaaggggattggtaaagcacgaggtgatctttacatcctggaggattcgtctcgacagacttctgtggtttcaccttcctctgttattactgttgctacagctgactcgtcttttctttggcacactagacttggttatgcgtcggtttcaagactaaataaagttcctaattttttttgtacaaagtcaaatgtggataatattcataaatgttctatttttcctttagctaaacaaacgaggcttca

SEQ ID NO: 7163 - DNA, 586 bp, Gossypium hirsutum
tgcctatttatatttctgtttctctagataacagcaagacaaattacaagagaaatttgtttcactcatctgagctatagtcacttgattctggcagtagaggcacagctgcacagcagaatgattccttgtctttgagaagaagacagctcccatctgaattccatttcaaatcagttatagaaaactgtggtagcggattacttacacagtacgcaccggaaggggtccacatatacaaatgagagctgccagtgcaaagaacaagacgagtgcttatcggatcccaagctgctgcacgaataggatccttttgcaccaagatggcagctaactccaaatggcgaatgtcccaaatccaaagtgcagttggcatgctatcgttgcgagtacaaatatattggctatcattgctccatgaaagaagacctagaataaaattaaattttgttggtaacagcattgaagggaggaaaatcaaagttaatttggtcaactatttctgattagtttatagagtagcttaatgcagccttaaccttgagtgtacatagcatgattaatccctagaaaaatatttgaaacc

SEQ ID NO: 7164 - DNA, 626 bp, Gossypium hirsutum
tatttctgggagctcatagaatctaccttacagttatcgaatcttgatgttgtcgcttcctttttactcaagggggaatcgtccaccacactgcccgccacttcaaggattcaaaatgaaatacttggtcctgccattgctgatacacaagtgagttaatggttctgacctcttcatgatctaggttgtgtgaaaattagatgtctatttcaaatatcaagttttaggagccatttttttagagctgcatgagttacttttccttttttgactttggatttatggtatgtaattgcatacagaacttacttggagattatgtgacatggttacaatcaaataatgcacgtgaaggaagggcttataaggaatcttttgagaaaaaatggccctccattaccttctcagacaaaaattatcctctggagacctatgaattgctgagaaagttggatgaactcagcttgaaagcgatagagaacttaagtgccaatgctacttccaaacaatttgagcgcgaagttcgtgaagtggtgagttaagaattcctctaagtagcaataaaacttgtccaaactagtaaagcaagatagtggtaacaggctgtaatctctatgatgtctgat

SEQ ID NO: 7165 - DNA, 543 bp, Gossypium hirsutum
aaagtttgctattttaccagcaatgtactcttttagttttttgtacaagtctttactgctctgtatcagtctgttccagctgtatgaccccatactagaaaatatgttcattcaatcatgctattgaacttgattagtaacgatttaccttctttttatatttattttatgtttagaatttttgcatactaaatatttatgattttaaaattttatatttgaatttctctgcacagaggtatgaagtggaagtgtattttcatgtttaattagagcattaaataatgagctatatatatgtgaaaaatatttaaaagtacagataaaaggtagccaaaacacactgttattggtacgtagcaatacaaaacaaaaactatatgcctatgccatatggttatgactgccttcatataatctcttttgcctttttttcaatccgttttattatgtccagagctgattctgactaagcaatgtgtctttttagatatatgatgttgttaggtataggatgcatcgtatgaagaaaaaaataaagga

SEQ ID NO: 7166 - DNA, 582 bp, Gossypium hirsutum
gtgataaataaatcactataaactaatgcataaatgtctacataataatctccaaaaaagaaaagaaaagagaagaacaaattgacggtaaaggtaaataaacctgagatgtatcaatttgatcaaatcattgaaatttgcatcttaacctcgccatcatcaaattaacttgacgatgaataccgattaatcaagaaaaaatgtcaaaagccacaagagactcattgtaccaatgatgaacaaaagattgagtcttagatgacttatcctcctcctcctcatttcgaatctatcaccagcgctatgatttatcatgataaagtcttttgagaatggtccttaataggtttggtggcactgtaaactaaagtagtgagagaaattatgagaaaaaagagagttaagtgaatatgtaaatatatttatatataaaaagatattattgtaaatatccaaatacaacgagtagtaaagtcttgagctaatctttggttaaacattgaaaatctgaatgccataatgcccttcaaatcctcttagtcatttttttactgcaataattcttgctaagaagaatgctaa

SEQ ID NO: 7167 - DNA, 618 bp, Gossypium hirsutum
cgacaacacaagtactatgcccccaggcaaacctcgggggtctcccgggcacatttagtatcctccatgtaggtttctcatcggttggatccaggagataaagttgggaagcagagtgaagaccagcgacagacccgccaaagatgagaattcttccaccgggtaggctcacagcaacatggtcaagtcttggaggtggagctacgcccccggggtttccagcgccaggcatcccactcccagttacacatctccaacagggttcctcctcacttaaatccattgtgaacacatcactagaacgaaaccgtagaggaccactcttagcaagacctccaaacatcaatattttccgaccaccgtataccgacagtgtgtgacccaaacgagaaggtggggtccacgctacgggtatctctctccagacaggtttctccattgaaagatcaagcaggaaagtgtcactaagaagtactcccgaatctgcacaaccaccggaaactatgagcttggttccatcaagagtgcaggagctgtgccatgatctaggtagcggaggagccaatcctgagatctctcgccaagtcggaggcttagcatccaaatctagcacgaaaa

SEQ ID NO: 7168 - DNA, 536 bp, Gossypium hirsutum
gagtaggatcgatctcataaggattttagtttgcccttgtttgaatttttcataaccagaacatttcgtgaacagtttagtgcacaaaactcttcttctcttgggtaaaataaataaaatgattaaagtaatataaaattaaataaataaaaatcaaacattagtaaaatagtaaataaaaacccatggtattgtttccaacacctcaccaaagattatttttgaaatggcataaaaaataatactatgagacgatcttatctattttttaaaccgaaaaactaatattcaaatgaaaagagtttaagtgtaatttcagatctcccaactcaaatcccaaaatttagtccatttttaactgaaaataatttaattgctgatagtaaaaaaataaacaaaaaaaattaagaagaaataaagctaaaataataaaaagaaagaaacggcaagtaagcgcaagctacaattgaaaagcaaaaacctcttcccccaaaaaacaaaagcaagaaaaaatgcaccctttgtttcttcaattt

SEQ ID NO: 7169 - DNA, 685 bp, Gossypium hirsutum
ctatcctctggtcggttttacttctacagttttattagaaagaacgatagattatagtgcagtgaagcaaaatctttgttgtactgggagaaaaatatgcatttttaaagcctaaggagataaatcagtgtaattttgtacatttttttggttggacttttctaagaatgtatctgtttaaaggtttttcaactactaactagtgtccacccttgttttctcaagaaacaaaaacatcatatctaaaacatctggcctccacttgtatcagggataggaacactggtatttgggatgaagtatcaatatctgttactggggtaagattcaagcacaagacttgaacttcttgatttaatcaacgttatctgtttatctcttaatagagttgagcacatatcatactatacaatgccacaaacctaaggttctataccactcatctttctacattttttatatatcatttcctttttcttgcttttgatccttcctacctggtttttgttgacttttccatctgatttctaatggtttgttgtaagtacctttgtttgcagctatgtaatggttcagttctgttaaacctacatatcggtagttagttggtgttgctcttatttctccactatcactgttttatgatacttggtaatgatctgaaatgccgaccagaggatagcca

SEQ ID NO: 7170 - DNA, 513 bp, Gossypium hirsutum
cagagagagaaagagagtcgatttccttttcacaaaacaattaaaagaagaaatcttttattttctgtgaatttctctttcggcactctctgcaactgcaatcatgacctcaattgtgcaagtaattttcttttattgttcaaattgaagaatcgactatggctttctttttaattttgatttgcgacaattaatcatcgttctttttttcttttgaaaagggcttttccaagtctttggccatgactgtgctatcggagatcggcgacaagacgttctttgctgccgcggttagtcaaatcttatattttgagtttcttctttggttggttaatcatttattaaattggtgtttcactaatatgtattgaatatggttctgaaaaggacttgaaactaaaactgagttgttcatgttgtcaataatgaacagtcaacttccttttacaaccttttgtattgttttaatattgttgctctttcctttttcttcttcttcttcttttttttttt

SEQ ID NO: 7171 - DNA, 597 bp, Gossypium hirsutum
ggcatgttcctctcaacagcttcttcattcggtttgggggattcaggtgagtcaacttgacacattttttcaaactgctcctctgtccattgctcttcatatgagcgcacctaatacagcaataatttaagattgacaaaatgcaatttcacttgattaaagaggcaacggcagcaacaggcaaagccataaatattagagagagaacaaacctctctttgtctttttcccctcccatattgctgcgtatcaagactgccaagagatccacctttccgttttgacccaatattattattaggctgtaactgagtctttggtgtatcatacaatttcattgcttcataaaattctttcaagtcatcatctgtaacaaggcgaggtggtaatggtggtagaggcttagagctatccatctctgatccacataccaactttttccactttgcctgcatgttttaagggaaaaaaaaggcatcaaaatagaagtaaacacaacaggccaagcacgtttatgctgcacatgagcaatggagaaacttcctgtctaagagacttggatgcataccgtctcttcttcccgcctttgtgtatcaa

SEQ ID NO: 7172 - DNA, 629 bp, Gossypium hirsutum
cttcatccaaacaaaatagttattatataatggtatgtacatatcaatcggaaacttcaataatttgtaaaatggatcaaacattcttagtttctttacctacgaaacatggcttccttatcttccatgaactttatcccccttggtatatcatcagggtagagaagaacagcaatatcagaattgtgcttcccagcaatatttttgataaagtattcttcatcgattggaactccattattgaaaccaatctgttaaactatattagcatcattaaaaaatgaaaccccaaattgctcttagttttgcaagtacaaataggtatcatgttgtgaattaaacatacttagacataggaatggagatatgagtctctaaataaataggaaaccgactcgtgtccaacattccctccctccctcccgagtcagaagatgatggtttagttcctaagttataaaagattgtttatttgggagtcgaacaagaaagtgaagaaatctacaagtacctgtgggagcatttcacgaaagacatgataatgaagaggatcagaatcacataaagttccatcaacatcaaataatactgcttctaaaggagcaagatcaggaacagacttcttgctg

SEQ ID NO: 7173 - DNA, 605 bp, Gossypium hirsutum
ttgatgaagtggtgatctcgcgatggagaaagtaaaccctagagccatccactttatcaaaccactccttgaggtctttccaaacaaaagcggtattagaggcaaatactattccggcagaaagtttcttgctaaccgagttaagaatccaggacaagacgattgcattacaccgctcccactgtgattacaattcctctacgtaatcctctttcttgctgtctccgtcaacaaagacaagtttattcttagtgagaagagcgattcgtatagatcggctctagacattatagttgtcaatgccaatgagttggtgagacaccaaaacaatcccaggcgtatcagaaggatgaagatacagcggatgattgaaatcaatggtggccgccattgacgtaaaaaaacgagagagagaaaagaaatttgaaaatggcccaagaaacccttaagtcgtggctcttgataccatgttaagaaatggaatttgaagaatacttctcaaaaattaaaaagagtaaaagccattacatctatttatatacaagaaaaataattgaactaactactaacaaacttctaactaattaacagatcctaatcataac

SEQ ID NO: 7174 - DNA, 648 bp, Gossypium hirsutum
tgctggtctgcctgtggagtttgagtcgattaggattgtggcttctgcaatgcgggttcctcttgatcttcttacagaaatgctcgctcattgtgaagctcgccaacaagaattagtttccaacgtgacctttcaggctaactttgttcagcaacgtggtagcactgatgacaccatcagtaaaagtgatagaaggtctcgatcgccttacagaggtaatggaagattttctcgaggtagaggtcgaggaagaaattgattacttacaaaatgcactttgaaaaacaagttccaaataatagagaaagtgctaaatttttccacccttttacatacacaaaccttataaccgaataagtgctaaaattctccacccttttacatacacaaacctttcaatatataagagttcaatacttgttatcaatatataagagttcaatacttgttaaactaaaagtgaattactatcaacctttccatcaaaattgtaagataatcaacatataaaatatctttaataaattaaggataagattttaaatcttcaagatatgttattaattaacaaacaagattttaaatctgttgaagaacaaagagaaatgtaaaaacctatcatgttaacaaagcaaagatatggtcgaa

SEQ ID NO: 7175 - DNA, 626 bp, Gossypium hirsutum
tctgcttctctgtttggaaggatgcaggtacttttaaaagtgaatgttggtgttaattttctgagagatcctgtcattgaaattcttcagtttgaaaaatatcaggacagaaacacgtcttctaagaatcaggacaacttagtatatgcaaatcaagacccatgtggagaactgttgaaatggttgcttcctttggataacacttttcctacacctcttactttatcccctccgcctttaggatctgcttctgcaattggtagcccatctcagaggcctggtgtttctgcctcctctggctctccgctcttttcttttagtcattttagaagttactctatgtcttcacttcctcaaaatgttacacctcctgctggacctgttaaagcccagagttctaaaccatcatttgaccttgatgatgtggatcattactcttctcagaagaattcaaagggtaaaataacagggattgaagagcttttatcatatcggggtgtgtcactagagcgagaaagattttctgtccgttgtggattagaagggatccatatcccaggaagaagatggaggaggaaacttcaaataattcaacccattgagatccattcttatgttgctgactg

SEQ ID NO: 7176 - DNA, 698 bp, Gossypium hirsutum
  misc_feature (595)..(595): n is a, c, g, or t
  misc_feature (597)..(603): n is a, c, g, or t
  misc_feature (615)..(617): n is a, c, g, or t
  misc_feature (619)..(623): n is a, c, g, or t
  misc_feature (625)..(630): n is a, c, g, or t
  misc_feature (632)..(654): n is a, c, g, or t
  misc_feature (657)..(668): n is a, c, g, or t
  misc_feature (670)..(670): n is a, c, g, or t
  misc_feature (672)..(676): n is a, c, g, or t
  misc_feature (679)..(679): n is a, c, g, or t
  misc_feature (682)..(682): n is a, c, g, or t
  misc_feature (692)..(692): n is a, c, g, or t
ccacataatatggttagtgaccttgcacctatacccaaattagaaaaatacaaggattcctctcttcccacctaaaggaaatgaaagggtatagacacttcaaacttgctgatttgctgcatatcatggctgatatgatattgtgaattaaggttttgttggttagatagattataacattggcaataatactgtgtagggtattgtgcatggatatatacctagcctggagaagttctaaccttctcttattggaaatatccctatgacttctcttattggaaagtttgctatatattttgctgttctcatgctttacacttgcatgctggaaatggctttaattttttgttttacatattataacttatttcttttatctattagatttgtgtcatgttaattgatgcatgaggtttgcctttggaggttttaacttctttaaaagtggttagagaggtatatatgataggagttaaaaaccttaaggttgttagtacgaagtgtgttcctaaactgcatgagttggttcaactatatatataatttgagaaaattaaagttgagaattacaggattgatctgataggcaaangnnnnnnntttttgtttttnnngnnnnnannnnnngnnnnnnnnnnnnnnnnnnnnnnnggnnnnnnnnnnnnancnnnnnttnatnttcaaatttngaattt

SEQ ID NO: 7177 - DNA, 595 bp, Gossypium hirsutum
catcctcaaagcactaaatgcttagatgagatgtccgaagggagactttcgaagatatgtgattatatgcaaggggttatcagtaactggatcaagcttataaatgacattgcaattggtaatccattaactgctcaaattgatgaggccaagttggctatcttgtggggaattataagctgctatccatatatgtttgatgtccgagcgagtgaatctgccctgatagagttaatagatgcactgcagcggcttctggtgattgaggatggtaactaatcttgcctttcatctttcttttcttgtgtgtactctgaagcattgttgtctcttgttgtctggaatacatatctctgagttgttcagaaatccacatctgtaattttatcattcttcaatctgtttgtagtatcttctaatggtgtttttttttcttttcgttttgtcctattctttcagaaagtattgcaggagtttccaaacacacttgggagagcctagttggtgctgctttaggttctcataataaatggcataatgtaaaaaaggttggatttggagaaattagcaaagttttggacctttccaaggcctg

SEQ ID NO: 7178 - DNA, 559 bp, Gossypium hirsutum
tggagagaaattcgatgtgggaatttgcacaggcaatgtctttgagtttttggactatttggatatcttgtctaattggaaggtaaacaatttaggtatctgcacaaatggttggaattgatttttatatctaagcccatctgaaaggattctcagatgttgggctttagaataaatatcaaaactaatgacaatatcttttcctggaagcttggatccaagaacaattgtcttaacaaaacatccaggaaaaattgtatggtgataggcttacttttcagatatgttgcaaaaggataatttgctgctaagttgaaaaaagctatatgaggtatccaccattctgatggaagaacatctgggttcatgatagtaacagcagctttagtgttaagaaatgcaataacagtaataggcttactgtatttgtctaaatagatcttcactaggacttggggagctggtatagtatcctttgcaacaactgattggtgttgtgtttgttgggcctgcatgacgatcatcatgtaaatggatgagtccgaaaaatcagattcct

SEQ ID NO: 7179 - DNA, 620 bp, Gossypium hirsutum
tattacaagtaggacagcaatataaaggacattccagatagaaaagtcgggtggtaaaaaagccacttgtgtttttctcaaggaacaaggatagattggggtttggatagagatcctaggtttgagcgaaaacgttctccctttttaccaaaaagatgtgggtgttagatataatatgagatacaagtcttgacataaatctggatgtttgtctaccaaagtttcaaaatgtgccaaaactacgagttttcttgcttgagcccttgtgctttaaatatgtatagattagtaatgggttcagtataacttttttattattataaaattggtaagtaatatgtatttggtacagtataatttgctacagtacttgttaattttgagaagaaagaaagagaagagaaagagtggctgctgccatggagagaaagagaggaagaaaaggaggagagaaaagaatgaatatcagaatgaattgcatacattaccctcaaacctcaaggaaatatatacaagtgagactatacataaaaaggaaaggtaatcttctaattacctaaatttcagcctattttaatcctaaatcaacgtctaaggtttatacaaatcttaacactctc

SEQ ID NO: 7180 - DNA, 598 bp, Gossypium hirsutum
tgtgatggagaagcttagcagtgtggatgtttctgctgagataataggacgagtaaccacctcacctgtgatagagctcaaggttgatggaattactcatttaaatgagaaaacttctctgctgagagatatgtgggaggatacaagtttccagctcgaaaagttgcagagattggcttcttgtgtggaactggagaaagaaggtttgaagtttcggcatgagccttcttggcccttgtctttcactccttcagttacagatgagaaattttttactacaactttaaaaccgaaaatagccatcattcgtgaggaagggagcaatggagacagagaaatgtcagcagcattttatgctgctggttttgagccttgggatgttgcaatgtcagaccttcttaacggagttatttctttgaatgaattccgtggaattgcatttgttggaggttttagttatgccgatgtgcttgattctgctaaaggttgggctgcgtccatactcttcaatcagcctcttctcaatcagtttcaggaattctacaagcgccctgatactttcagtctcggcgtttgcaatggatgtcagttaatggct

SEQ ID NO: 7181 - DNA, 598 bp, Gossypium hirsutum
catatccagatgacatatgcaacagggagtgacaaatgcaggagcagttggattgtgaagatggtagagtaccatcatcgaggaatgtttagcccgtctcagggtatcatattgataatggttcccttgacaaagactcaaaaatgcctgtctagtatcaaagaattcactctcaagaatgtcatcttgatcggttgtatcagtagagacatcagttatttcaatctgcacaatgacaatttgtccacaaaaatcaattaaaaaagcaaataaaaatctgtctacagaagcagcaacagacacacactataagtaattattgtagtactaagacaaacttactggataaagaacatgtttttccctctgattgaagggatgtctctctctttcatcacgtttcaattctgcctcatggcacctgtgagggtacaaagaagcaaacataagatccattatctagagaactgtctcatagttggtggaagcagaccaaaataaggacagaggaaggggagttgcgttattgggcttctaacagggggaaggggagttgagtcttaaaacttgaaaaataatcagtttctgaagagcacaa

SEQ ID NO: 7182 - DNA, 653 bp, Gossypium hirsutum
aagtttcttagcttaccctgctaaatgttataagtgtgctaaatttttatctttttcttgtattttattttagtttttaattgaaatggtgttggaatattggagatttaaccccgccccctgtcccctgccctttaaattttcttctttttttttatattacttctaatatatccctatctgatgtcttctatttgatttttttccgcatataatattccattgtaatactatcttagtttctcataggttaagttctgtgcataaagcttttgctggcaaccagattcctggaaaccggaatctttgtttatgctgcatattctatgatttgatatcaaaattggtacccctcagcagcaattatgaattttaaatttattaatcctcaagcttcttattggtcacctagagctcatgatctttttgttggagttctatctgctgaagggcattggttagggttccatcaatataatgtgattctttagagaagcatttttgggctaagttagggatgtttagtaatgttgaaaggtgaatatttttgcctggggggcaaaaacgtatttggtataatagatttaagtgatatagtttatgttaatttggtttcttagtttgtttacaatgtactactaataccagctttc

SEQ ID NO: 7183 - DNA, 621 bp, Gossypium hirsutum
tttttgtctatagaacttgtacgtctaatacctaaatgtaagtagtcaataacttttaagtttcaccattcaattcaattcatatatattattttagtgtaattgataatcttaccatagctccattgtactcgtgaaattatatatttttaaaaacaccgatgttcgccatctctatatatggtttatatcctgttcagctatctagtatattaacacaagaaaaagtttatttattatttatgtaagaaataacataaaaagtaattggcaatttacaacttatattagaaagatgagtaaaattttagtaaaaagtagggactctttcaaaaaagtaaaaaacatgagtagcaaaaagttaatttattgtaacttatatcttaaaacttgttaaaaaaaaaattgttcctaccgatcataacattagttgcaagttttactgaatgtgctttattataattatccaaattcttaacacaaattaaaagattttaaaaaaaatgtaagcatggtgatatattcccttaattgcatgcagttctttaatggcatcttcgattatcattatcccgtgtgaagcttcaatttaggtttttagataggatacgtaccaagagg

SEQ ID NO: 7184 - DNA, 567 bp, Gossypium hirsutum
  misc_feature (538)..(540): n is a, c, g, or t
  misc_feature (547)..(550): n is a, c, g, or t
ttttctccttctcctttccttgtctaacacttaatcaactctcttttctttctttttttaattttttgcctctcattttcaaagtgccttttcacatttgagtagttttccgttaataattgaattttgaagaagtttagtaggtttagttaattatggtccaaaattttctcccttttttttttttttgtttggcctggcgacttcttggttgttgcccctgccgctgagctgccgtgcccggacttcttttatttaattgaacactgttcttccaaaattccaagctatttttgaggtcttttgttggggggagactaatgggttgctcttccaatccttaccttagggaggctttttcttgttttgtacctaacttcatgccaaccaagaaaactgaaggtaagctcaagcaaattctcttcattgggtggtttatattcagatattatttttttacttttagtatctatttctgttactaatttttttaataaaaaaatcctttttttcttcattgacttttggactatgatcnnnaaaaacnnnngtgttggaaatgaaaag

SEQ ID NO: 7185 - DNA, 563 bp, Gossypium hirsutum
ctcggcgcttgtcgaaatcttcatttgttggcccttctgcttctgtataggcagctattacactcactcctggtgcagtgatatcaggctgaatattggatacaaaaataccgagtatgagatgcaatttatcagatgagaaaacaaatatatatatagttgctgctggtagcaagtaccttgaggatctcaggtgtgatggtattaggtccctttgatgaaaatgcagccatgaagggggctggctttgtgccaattagggtggtcacgggcataatacgagccatgggattcctgttcccgatatccatacatagtcagtgaacgtctattactgttgtcatataagctcacagaatgactcgtaagggtaacatatttattgatcctcgcacttactttgttgaattaatgtaagcgaaaacagcaagaccatcagtgtaattgatatgtgaagccgggaggagatgagcatcggcaataatttcattccctgtgagaaagtcattcgcaagaatcatgccaacagcgccagccagagctgcttgctgaccctgtccacc

SEQ ID NO: 7186 - DNA, 644 bp, Gossypium hirsutum
  misc_feature (637)..(640): n is a, c, g, or t
ctatgccctctttgcaagaaaggaccggaagacacggatcatcttctatggacctgcgatatcctttagaatatttgggcgtctcttcaaatccgatctgtttcacttgatagtattatgaattacaaatcctttttcgttaatactttttgtgcagtagatgaccaaagcaaacatttaattgctatttctatataagctttgtggaacagaagaaataaattgattaatgagggtctgaagttttctctataggatcttttaggttttttccgtggatatattaaggaattaaatcagtatcaagaaaaagatgggagttgtctacagatcgttatcggttatactatagagtcctccagatttgggtgttattattaaaataaattttgatgctacttttcagagtgatactaggacttctacatctgcgattattaccaaagatcacaaaggagactatataggagcagcaacttatcttttcaatgatgtggttgatgcgttcgtggctgaagcaagggcgccattgataagggcttccgaaaactggtggtggaaggtgattctatgacagtcattaaaaaactcaagtcaaaggaagaggatagatcgattatcagaccaactattaccnnnnatcc

SEQ ID NO: 7187 - DNA, 677 bp, Gossypium hirsutum
tcattgacacaggaaaatatgatatatcagcagctaaagcttattgtgatagcttgctgaaagctctgcagagtaggttggtgtttgcctagctagatctttcattttttttaaaaaatttttggtatgtatatttatatattttaaatttttactgtgggttggtagagagctatttgaatggattgaacttgagccgattcacttctggcattccttgttatttatggatcaggtatgatttcttcttatggtttagttatttcattactgcaaacgggattgctgtacgctgaaataatatataattagagctacaacctcagaaattatgtcttgtgaatatagccttaatgaaatttcaatatcttgatagtctcaaaacccgattagtgtgaaatctccattgagtttcacgtattggagaattaccaatctgattccaaagtgaaagtctattgggtgatggagttgtctgccatggcatcggtgtcctgtaactagcattgctcatgatcgctgtatttatggtgccttcagtcgtgtcacattactttcccgtcacaatccatagttctggaataaaaatttatcaatcaaatggttcaagtggttttcaatcatattgcactaatagctgagaatttgaaataatttacgtttatctgtctgctcgt

SEQ ID NO: 7188 - DNA, 647 bp, Gossypium hirsutum
ccatgttcttatcaatgaggttatggatacattttggtattttgtcttggaagaaggagatgtcaaaatggttagggatggtccatgcatagagattagcttctcaaaatgtatccatatctttattccacaacttctttgttgccctccacaatattccattggaatagcagacgagagagactccgaaggatctatcatatgatttgttagtatctttaattaaaaacataattttcatttgcattattggaattaatgatattttaatgttttcattgatttattaaaataattccattttgcaatcggaaaccgaatgccttacaacttaaaacgataaaaaatgtaatcttattattattgtttattttgccctctcgtctctttcgaattcggaatggtttaaatcttagtcgtctgaaaatttcttatgtttccagtttaatcgccattgttggccatcgcttctttgcctgtttttttccctcgtgtcaatcatgtcctcgccatggggagaccttttctcaatttcaaatcttttttttatttcatgtccaaatgtgatccgtacatatttggtcgtgtaggacaccaataggacattgatgtaaaaggaaattttcccgttccattgtggtatagtg

SEQ ID NO: 7189 - DNA, 611 bp, Gossypium hirsutum
ccctatctcatatgaaaatttcatatcaataatggaaattaacaatttcaaaaagtagcctctaaaatcatcttttattattgcaaacattaaaaaaaaaagcaaagggaaagagagtttaatatacattaaaatcacccaagattgtttatcttgtttcacttgtcttttttttgctaaattgtctcccaatctctctatttttcaatacagattacacaaacatcttttgtaagacctaaattaagttgtcgcactctctaattatatatgaaagatagtctctccattttattaatagggtggtctcccatgtgtccaaccatagggttcatgccctagttgccctccatttgagagtaaattaggaggcaaattgtatattggaagtgaagatggatcaggcagacctgtgtgtgaaccgccgcctccgctactcccaatttccggcggtgaatcgtttgctccgccttgcatcggtccaccgtgaccggcgcttacaacttcttcttcatcttctaaaggcagtctttcataagttgcgttggaaaaagttgctgcaatgaccataacaggccctgctgctataagtgaaccgacaacacttcctc

SEQ ID NO: 7190 - DNA, 590 bp, Gossypium hirsutum
ctagcttaggtcttgctttatcttgagtctgaccacaattagccttatgataaggattgagatcgacgaagaaaaccagtgggtgttaacaccttccaaagaatggtgcctgaagtggacctatcagtaggtcatcaaaagcgcgaaaaacttgattgtgtcgtctatgctctattctttgccaaggtcaacatcacaactcatggtaccgttgcaacttaatttaaatctgatggagggtactttctggaaatcgaagaaggggacctcgtgaaggtgggaaagcgaatgcccaaagtggtaagaagagaacaccccaaaaaatgtcaaaatccattggaggagaggtactccactcaactatgagtatgcttgtcgaaggttagaccgaccggttgcaccggtgctccaattggtgccataaaatgttaaccgttaaacaatttaagttaatttaaatatctaattttattataatttataaaaaaaaaggttttctatttatatttggttatttgttgtgtttgttttttttaattcataattgatttcaaattcaataaacttatttataggtcgagctactgact

SEQ ID NO: 7191 - DNA, 570 bp, Gossypium hirsutum
tggagaaatttaaacaatatcatataaatataggctaatgctgacagctttcccttgctcttatctccattctccatgttagtatataatattttaactcgcaggttcatatctgcaaacacaatcgtaaatctctcccttgatcagtttttctgccaacctctggttcttcaccattgcaagctgcaaacaaggtattttgtgttatattaaaagttgattgaaactgaaacctttgagcctaaaacatcttctcaagcctcaaacttgcaggttagaatcaaataaacatcattttcatgtttcctgccctagttcatgtgatatttaaagcctttggtgaaaatcatagtttaaagaactcaaaaataacaaataagtgttgggtataatgataaggcacattacacttccaagggaaggactcgggttagaactttagagacaatattgttggaaggggcagccataaaccccgaaaggattagtctctataaagaccgtaaaacagacatggaggataccttggttccaaaaaaaaaacctggataaagaagaggttgatacaat

SEQ ID NO: 7192 - DNA, 617 bp, Gossypium hirsutum
catgcaggcaactgaatgcaaaagcaacaaaactgcatcttggcaagaagacaaatctaaatcatgggagttcttctgcccaagcagaaacagcaaatcaataggatcagatggaagagaaaaaacagcatctctaattggttgtccggcttgatttcccaaaagaacttccacaagtgaactgagcattagatatactctccatttcatcttttcagcaggaaacagtccgagacatccaaatgaaaaacagaaccaagaggatgaaagtaggacttttgctagttctgttgcttggatatcaggatgctgaatcagtataaaatggaatgtttcgaatacccccatgacagtttcctcatcaagttcgttaacagccatggaaaaccaaggtaatatatgtgaggtacatatgtccacaatacaagttcgcagttccaagttggtagatgtgtttgcagagcacgcttcgtgactgtatgaatatgcttctttaagaaggtataaacaatgtaagagttgacctggatctttctcagagatagtcagacaagctaaaacagcatgtttcaatgattcttgaagtaatgctggaagatttgaagccctttgagaag

SEQ ID NO: 7193 - DNA, 670 bp, Gossypium hirsutum
gggaggagaagaaaacaaagctttgaatccaaaaagggaggagcggtgaactttcaccaaaatcaaagctaaaatagtagaacccaacatcgacagcgtatcaagagttccattccaatttgtccttcgtcgccatcgtcatcacagaattaagtactccatcatcctaagcaccataagcctgtcttctccgaccctccaccgccagcatgtgagccgttctattgacagatctgggtataaaattaaaagaaacctcgtcaaaacactttttcagataacaaatttgctgcgttattggtcgaagaactgacctgtccttttcttttttcttaatgttcttgatgacagttagtgagtccccttccacgatcaggcatcgataacctccctcgaccacaaacagaagcgtccgttcataagcccttgcttcagccacgcaacaatcatttacatccgtgaatagataagtttctaaccctctaattcctgcttccgaatctctagctaggactgtcgttgtagcaattcttgacttattatgataagctgcatcaaagtttagtttaaaaaccccacgatctagaggcttccaagcttctttactcttagttctattggtagaacaaatgttctcctgtgacatgttgagatctcggcaatatctatg

SEQ ID NO: 7194 - DNA, 581 bp, Gossypium hirsutum
  misc_feature (567)..(569): n is a, c, g, or t
  misc_feature (574)..(578): n is a, c, g, or t
atttcgctttctagctctgcttttgcatggagaggctatgagattatagagaaatacaactactcgcataaaaaacagcaagtggaataaattttagatgaatgtctcgctatcgttaatcagtataagcaaccttaccctgcttaaaacaaagacaaaaataaaaataaaaagtgtgcatttttggtttatctatgtatatgtatatgttataattactttgagatagtttcacttgcaaaactagattagtgatccatgttaaaaaagtaattagagttgaattttcatattaaaaaagattattctaataagtaattttaagagtaattatttgttcggccataaattctattatacgccagaaaattcaatttttttcttttctttttaataaaatggctacacattgacacatatttttacattttagacgttcagaaaagtaaaagtaacacccaaaaagaaaaatagagaaaaaaataaaagtactgtatttttttttaaggggaaaagagagaacaagggcggtagcgataaataagggagaaggataatgagaaatcnnnacgtnnnnntac

SEQ ID NO: 7195 - DNA, 491 bp, Gossypium hirsutum
  misc_feature (485)..(488): n is a, c, g, or t
ttttctcgagagatagaatgggagaatgcttgcttcccgagaataatagggtttaagccgggttttaaaaatggagactgcgttgtgttgtgtccctttctttgcctttgtacctaccatatgctgctggtccatggtagtaaacaaaattaatgtaaaataatattttcctaattttgttagtcattttgtaataaaatattttcaagcagtcaaatctttaaaaatatttgtttaaatatgatatggatacatataaattacaaaatttgaaaatttctttcatttatgagatcttattaagaaagtaatttattatcaaattttaatttaagagatgagttaagttaactcactcaccaaattatatattctctctctatttcgtacatttatctcatcaaattataactttaactctcgtacataaattaaatcactatttacactaaacaataataaattagtcaaaataaacaaaatgnnnncaa

SEQ ID NO: 7196 - DNA, 194 bp, Gossypium hirsutum
agaacccccaagaataaatgaactgcaaatgatgtgtgatccagagcaagcattggatcaaactgtgctgtgcaaaactattcatactggctgctggactgaaacaatgtattcctaaaagatttagagccagactgcaattttgaggcttcatatatacttattactgtaaaattatactgtaaggaattttt

SEQ ID NO: 7197 - DNA, 658 bp, Gossypium hirsutum
gctgttagctttacttaaaaattttgcatatgatcgccacgttttcatttttgttcaagtattggtgttagataaatatttccaaaaatgggtttattgatatgatcttcaagtgccccaaatatgtgaattttttttataaaaaagtttaatataatcatgttagacatgaatgggagaaatcttgtgcatgaatgggtgttccatctaagatctaaccatgtcttttttttctttggtaagagtactattgatgtggttttattaagagtcagattgtattttattttatttattaaaaaaatataaattaattcttgtatgttgaattaaatagcaaactgattcttttgttaaacattctatccatttttaaaatttttgaaaggttgatgaaagggcagttttaaaacacttcgaatggccagaaaaaaaagctgacacattaagagaagcagcatttgagtatggggatctcaagaaattggagtatgagattttatatcacaaagatggtgatgatgattcaacaatgccttgtgatattgccttaatcaaaatggctactttatttgagaagtaattaaatctaaaataactgttgtttatggcttgcttcatagaaaaacctttgaactgaaaatgtgttctgaatttc

SEQ ID NO: 7198 - DNA, 601 bp, Gossypium hirsutum
cgagctatatatcccattcttgtataccaacctctcgttttggttattgcgtattctaatttttgttttaatcacaattttacgatatgtcttagattatcagtttcaatttttggttattagatatattattttcagttctgaatatgggtatggggatattctccaaggacctttaaaatataaggaataacttaaaaaaaagttaatgaaagataagaataaaggaaggtggttgatgctggtactaaaaaccagctacttttctgttaccatggattattgcaccagtttgttgcagttaggatacatcaagatatggtaatgtaaataaatttacttttacgattaggctaagagtgtggttgtttttgtgatataacgagttatttacactgctagaactaagtgagaaattttttaactgtcactcttcgtaccatatatttattggttctgcattatatatatatatatagagagagagagagagagagaaattatgctcaatgatgtggcttatattcaataatactgggaaatgaaaggtacggtcaaatgctcgtcgttgctacagactgtcaagaaaactggccagagc

SEQ ID NO: 7199 - DNA, 629 bp, Gossypium hirsutum
tattgacctaatatcaactacaaatggccaacaaaaaatgccggtgaggatttagtcccaaattgctcttcctactgctggttgaggaaaagctcagacaagttacaagtgaagctatgcattgtaatttatagcactaatttcaaagagatgaaactgtgcctacctatccttcataagatatgtgaaagttagagacttgaggaaaaggcaaaagtgaactcttttaacttatgaagttggttctctactttatttattctttattaacacccttatccctccgacgtggctttcagttttttatatgatgttctggttgtattattatctaatatttggtcctcaaaggaaacatattatgcttctctgtttgttacagtcattattacaccattactggtacttcggaagcaatcccagtaacctgctttgatttgttaaggaaaaagagatgcttatcacttgaattttgttacatttcttagttttgcacttccaccaaagcaacaatttttgcgttgttatatttacataatgtactcattaaaaacatgactttgcaatgaaattgaaaatattcataagggaaatatctaaacaaatgttcagctcatttaggtagtgtg

SEQ ID NO: 7200 - DNA, 642 bp, Gossypium hirsutum
tgcttttgagtaccaaaatgtcaatgcaaacaaacccaattaatcatcaattaatttattctttgtcgttgaaaaaaattaaaatatagaattttactaataaaaacttaataataatagtaatagtattccttaaaaaattaataatagtaataaccaaaaatggaaaaccttaatttagaaaattaataatagtaataatcatgcgatctagttttgatgtgtgaaacaaacaatggtttataggaagaaaattttcatataaaaaggagcaactaaaagccaagttttgggcgtaaatcatggagaaactgaatatctgagctagaccgcaatgtgatttgagtagagtgggaatgcaagacagaatctcccgcatgcactcatagcttcaagctttttggtatgtttattacattgtgattaattaaagtcagtcactgtctcaaacatttgcaaatgccaattgcaatttactaaacttctttctatctcatatcatcttcttgcagacctttgcttttaccatgaatatcaagtatctctccctatctatctctatatattgacccaaccagttttgggctaaaatatattgacccatagaaaatgggtctaagatatttctttattgaaatggac

SEQ ID NO: 7201 - DNA, 608 bp, Gossypium hirsutum
aaaatacacaataccttgacgtggatcgtcgatcatcaaaatccaatccccagttggcatcagcatacccaactagagacagccgtccagacgggcgaaaaacaaccccatagtcaagtgtgccagacaagtatcgcaagatccgcttgaaagtaaccaaatgaacagtggtaggactatgcatgaactgacaaatcctgtttactgcatacgcaatatcaggcctagtaagaacaacatactgtaatgctctagcaagactcctatactcaatcggatctgacagaggattgccatcacccttagacagatttgacgagctaatcattggcgtataaacacttttagcaatagtcatagaacttcgttcaagaagatcacggacatacttcttttgacaaagatgaatacaaccggaggaagatcgagtaaattcaaccccaaggaaataataaaggtcacccatatcttttaacgagaactcatcaatcaataacttcacaaaccaatcaatggaagtaggcacatccccagttacgataatatcatctatatacacaaggacgtagagtgtagaatcaggttgtacatgaacaaataacgaagca

SEQ ID NO: 7202 - DNA, 660 bp, Gossypium hirsutum
tcagcgtcacttcaatatttttatgcagaaagttcccactaaagggtaacattccaatggaaatcggaaatttgagccgttcgatagcattattccttgcgaataatgatttggttggacctattccatcacttggaagattacagcagcttgaaggtttgggtctatatggaaataaactccagggatcgatcccaaatgacctttgtgagctaaagatgctgtatgacctatcactacatagtaacctgcttgatgggtcattgccagcatgcttcgataatttgacttctttaagatatttgagcttaggttccaacaaactaagttccaacattccctcaaccttgtggagactttcaaatatgttgcaagttgatttgtcatcaaattttttcagtggccctctcccattagatgttgggaatttaaaggttgtgatcagcatggatatttctaggaatcggctgtcaggtaaccagccaagcaccatcaatggggatctcaatggtttgacttatctatcattcgcggaaaatgcattacaaggccatattccagaatcgttcggtcagttaactagcttggaattcttggatctctccaggaacaacatttccggagtgattccgaagtccatggaggcactctcccatctca

SEQ ID NO: 7203 - DNA, 643 bp, Gossypium hirsutum
tgtgtgagaatgagaggaaaagagagaccatcaatggataaagtgaccaccgccttagagcgagctctagcacagttgatgggcagtccatgtagcgaacaaccaattttgccaacggaggtgatcttgggaagtaacagaatgcacaagaagtcctctcaaaggtcttcgaatcggtcggtctcagaaactgaagttgcggaagaagttgaggatcaaaggtttgagtttagagctccttcgtggattacattcccgagtgtaacttcatctcaaaggcggaaatcatcggtatcggaagctgatgtggagggaaagaacatagaaggaagaaacatgggcaatgtagggtatggtggggatggtttgagaagcttggaagaagagataggccctgcatctcctcaacaaagcttgttcttacaacacaatttctaaatgatcccaaccaaatattctatcagtttgttcaaggaaaaggaactgtaaaaatggagaatggatgtaattttcagaatttttatagtactatatcccatttgcatcttgcagctatgacaccagaactttagtcgccctgtcacggttgtgttaccagaatttcaatcgccctgtcgcaagcttggaccgtcagctgttcgat

SEQ ID NO: 7204 - DNA, 635 bp, Gossypium hirsutum
  misc_feature (549)..(549): n is a, c, g, or t
ataccttcaccacagaaggattgaggtcaaaagcaatataatgtaatcccatgaagtcaccatctattccagaagcaagcggagtcgacaaaaaattagcaagtatctgcaaataaaaacattttagacttaactcgagttgctgccacatgataattatcactattactgcatgatatttgacatacctggcccatttgaccaaagccaatgataacaacgggttcacttgcatcaaagttcaccatctcatcggcatcattctgtgaaaatttcttctttaagttcacacagataaactcgtttccgaagcaagatgatgagagaaaaaaatagtcattgatgatactgaaatgaaatactattacgaacatacatcttcattaaacttgttgtcaatgaaatcagcagcccttcttccaacttcattaagcaatggggttaatgccattgacagtaccacaacaataataagcagcttattaagctcaagcggtagcaccccaaggctgcacgaggatggcaaaagactttataagcataaaaacngaagtgttttacttagagactagttactcatctaacgaacctgttagcaagagaaaaaacaacgaacgcaaactcgcctccttgtg

SEQ ID NO: 7205 - DNA, 664 bp, Gossypium hirsutum
tgctttgggcattaaatctatattgccgtacaattgaaatggccttctccaacgttcccagagcttcttccacctctggacaaatagaaaccctttgtttagcatttacgccacttgaatcagcaaaactattggttgaaggttgatttgcagccttaatgctctcctccaagcatgtactctcttcactttcttcttcctcgatttcaccaaaaacttttctctttgcgtcttgtgctatcttcggtggaaattcaccagcaggttcattagcatgaatctctggttctgcatcgtgtgtgccatcttgtatgtctacaattacattctcgttaggcacaatttcattctccttaggcaaaatatcaggttcccttttaatttcttgtgcttcaggaacttcgcctgatttgttattggaaaaaagagctccacgaattaggcaaaacagagggtctcccaaggctttgctgtaatcctcatcgctattagtgacagaagccgcagtctgtaagcattgtagacaggaaaaatgtgagagatcaatcggtagggtaataataatcagcatcatgaaaaatgaagttcctaatctggaagctctcagcaatggaaccttttaagacaaatgatggattgatttttacccattacttcattgcta

SEQ ID NO: 7206 - DNA, 632 bp, Gossypium hirsutum
  misc_feature (627)..(629): n is a, c, g, or t
gcaaccttacgttccacagaagaaagctttgggttgttcgaatttcttgcgggaccaccagcatgttgactaattgcaactctgctgttagcacttgctgttggactagcaccatctttttgagtaggggatgaaacgccattctcccatcctggtttgagaaccaaaagcttcccggatgtcttcagcacatcaggcttgacatgtccactatgaggagattgattactgtgatgaatcaaagaaggttgctgctgcacactcttgacagctgtatttatctcacttattctggcagcaggtttgccttttgatttatccactgaattgagaacctggaacaaaaagttgacttattacgagaaaggaactttctaagtacttaataaatggttatttatccacgcagtagacaggtaataagcaaatagagcaacttccaaaacatttcatgagcagatagcaaactagctaactccagtttatcttggcatttgtaaatctcataaaaatgtgcaagattaattataatttgatcagaactatacatgaggaaagtcgcatgataaagagaagtcctcaggaacttaaaacccaataaagaaatgcagggtggaaagagaaagnnnaaa

SEQ ID NO: 7207 - DNA, 411 bp, Gossypium hirsutum
tatatttcttttttgaatttagacagcccaatatcccattcccatgaacctttttttggtcaactcaaaacccgtttatcttatttccgggtccaacccgaatccgactgcacataaacacttttactagtatagttttgactttggacttcaaaaattcttctttatttactttgccgattatttgaggaagctctcccagttggctcccccttttatcaagccttttaaggattccctctttctctatagccaaacaagataaacaacataattttttttttgaagggcatttcgtcttgttaaacttgcattttttgggtcgatcatctcattttgacatctaggtttgtgtcagtttaagcattggatgttctgtctagggtttttaaaacaaccccattcctattc

SEQ ID NO: 7208 - DNA, 513 bp, Gossypium hirsutum
  misc_feature (242)..(245): n is a, c, g, or t
cagagaataaaagccgaacgacgccgttaccaggttgagtaaagttttaattattattaataatttcttttttgaatttagacagcccaatatcccattcccatgaacctttttttggtcaactcaaaacccgtttatcttatttccgggtccaacccgaatccgactgcacataaacacttttactagtatagttttgactttggacttcaaaaattcttctttatttactttgccgattnnnngaggaagctctcccagttggctcccccttttatcaagccttttaaggattccctctttctctatagccaaacaagataaacaacataattttttttttgaagggcatttcgtcttgttaaacttgcattttttgggtcgatcatctcattttgacatctaggtttgtgtcagtttaagcattggatgttctgtctagggtttttaaaacaaccccattcctattctacttgcgagctcaagaaactatacgatcactctgttagtcat

SEQ ID NO: 7209 - DNA, 628 bp, Gossypium hirsutum
gcgctgtatttttaaaattatttttgggaataatttttttatttctaattttaactttgttattggaagtttcccaaatttgatccgtgaaggacaatcattaaagtatagtatttctaatttctcaaatttcacgtgactatagtttctacatttgaacctatactaatactattgatgtcccccaaaacaaagaaagaaacacgtttttattaagcttgccgaatttacgcaagagtgttggacggcatccagttatacctcaactgtttaacattacatcatcgcatgtccaattaaataataatgtttgaaatagtaaaaatcacatgttttcatctataataatttcacagtgttggaaacttagttaacgagtgaatcaatttaattaaactcttaaataaataattttaccaaatatgctactcaattaccaggatgaaaattttatgcaataaatatatttataaaaaaaattgatataaaattaaggttgaagagtgtaaaaattttattgagtattttaactgtcaaaaatgtatcaaaaaagtcatttaactgttaattgttagttaaccgttaaagttaactacccttaatatttgtcagttaaagtcaccatgtg

SEQ ID NO: 7210 - DNA, 597 bp, Gossypium hirsutum
aagattacgaggctaaaatttggacattttatttgttcttttaatccatctgctgtgacctcattcaatgtgttcatgatctgacgggctataactcccgtatttataactccgcatgtatcatgctattcttcactcgcattaattattccatgttattgtatcatgttgtactaaagtcgaaaatgaaattatctactcttgcagtgtaactctgtgtcgtattcgaccaactgcaagctaatggcctccacatcggaagacacgactgttgcactatgggaattatatcctcctcaaacttgaaactgaactgggtgatatatatatatatcaatatgttcatattgttttatgccgtctcaggcaggtgcaggtgtcacggtatgcttgtgagcaagccatccaaaggtgtctaggcctgtgacacagggtcttggtatgttaaagagaagttactgcaataattgaacttggtgttgaaccaaccaatgttaagttaattccgttaggtcgattaagatttaagtcggtcagctaatgtatggggtcgattgattatactggtttttttataaccgagctagtcgaactgat

SEQ ID NO: 7211 - DNA, 145 bp, Gossypium hirsutum
tcacccctacagtcttaagtttcaataaaccaaccacatctaaataataaatttgaattgttcactttataaatcagtgacagtaactattaacttatcaagcaaaacgagtttaacttaaattttttttccttttccgcccaaa

SEQ ID NO: 7212 - DNA, 607 bp, Gossypium hirsutum
gacttgccaatgttcagcttttcctcttggggttcaattccatgcacacgtcattaaatctggcctcgacacggatcgttttgtaggtaatagtttacttgctctgtattttaagttgggtcctgattttagagaaactcggagagtttttgatgggttgtttgtgaaagatgtcatatcgtggacttcaatggtttcggggtatattaaagcgggtaaacctgagtgttcccttgaaatgttttcggaaatgctgggtttgggagttgagccaaatgccttcaccttatctgctataatcaaggtgtgttccgttcttgggaagttgaggctgggatggtgcttgcacggggtgattgcgaaacgtggttttgattcgaatagtgtaattctgtgcgggttgattgatttttatgggaggatttggcagttgaaagaagcgtgtcagttgttcgatgaattgcctgagccggatgctatttgttggacttctattatttcttctctcacgaggaatgatttgtataaggaagcattgcatttcttttatttgatgcaaaggaatcatgggttgatccctgatggatttacatttggaacagtattg

SEQ ID NO: 7213 - DNA, 614 bp, Gossypium hirsutum
tttcacacatgcacctttttgtggtcctccctgtgaaaaggacagtgaaatgaagctggagtattttcttcaagtttacaaggaaacattcattccttggtgtttgcgtggacataattgtactaccagtgctcgactagatctgttgcttgcattgcttgatgatgagtgtttctccgagcagtggcatgctattattacatatgccattgacttggtaaattctaagattgactcgggctccatggactcaaatcacttagcagtgttgggaatgctttttgacaaagcaagaaatgagattaggataaggaaagtgggagaagattcttttcatccgccgggttctctcccacatcattggcatcatgagcttcttgaagcaactgctgtttctgttgccttttcccttcctccttttggaacttctgatgcacagtttgtgtggtatgtgatagcaaaagcatgatctgttttaccctctgcaatttaaattacaggaagtaatgtgcaagtatcaatattacccagaagactattaatgttttaacccccccccccaaaaaaaaaaaaaccccaaaaaaaaacaaaaaaaaaattttgccccaaaaaac

SEQ ID NO: 7214 - DNA, 632 bp, Gossypium hirsutum
  misc_feature (60)..(63): n is a, c, g, or t
  misc_feature (66)..(66): n is a, c, g, or t
  misc_feature (579)..(581): n is a, c, g, or t
  misc_feature (583)..(596): n is a, c, g, or t
  misc_feature (600)..(600): n is a, c, g, or t
  misc_feature (604)..(612): n is a, c, g, or t
  misc_feature (623)..(626): n is a, c, g, or t
gagtatgcctgctttgagggggaaaagagagggttcagtttaaatcaatttcatcaaaannnntcngtcatatggctcttctttagcaaaattcaagcaatggaactacggtttgttataccccatagcttggacatgtgacagtacaaaaggttacacgagaaatatacttcggccgttacaatttgagaggtcactaaaaacttcttttcctcactcaatcacttaatcaggccagatgtagctactcaaataagtttcccataattaagctatcactcatttttttttaatatttgacttttcgttaaaaatgcgattttttttattatcaattttcgcatgtgtttcactaaaagaataaaacaacacctttaatcataaataccatcgtctcatcgaagacatctgttccacatatcctatgatttgattgcgaatccgctaagttaacaaaacacgatacaaaacctcacccataaataataacctctcaaacggtgaaaaatgaattaactctccaacacacttgcctacacttaactaaattactcctgccaatcacctccaccatctccnnncnnnnnnnnnnnnnnatcncggnnnnnnnnncccccctttcnnnntttttt

SEQ ID NO: 7215 - DNA, 661 bp, Gossypium hirsutum
ctgcaactttctcagcaacaacaaatggttggttcaggaatgggtcctgcttacgttcaaggtccaggatgatcacaattagtttctcaggggcaagtttcatcacaggccccacctaatatgccaggagggggatttatgagttaaatcagcaaaaccttggaatctactggcctaattagaaataactagtctttatcagtgactttagtggctaagcatgaggagaaagtcatgtagtatcatctgggatgaagtaatttttttatgtactgatgataacgtctaacatggtacattcataatgtgccatcattcatgtgtctagagtaactaatgaggtgggaggaagcaagggttttgctgatgaatttcattgcttgtatttcaaagagattagctggtacggaatttcgatataaaagttaattcctcttcatcttatcatgcaaacctgtgtgaactagttaataatataaggctaggctacattaattcattttgtataggatccgatttcgaatgtcatgcagtaactaagccataagttgttttgattatggattttggaataccaactttcatggattatagtagaaatgcttagcatcaatccatgctcaagtctctaagactgattgatgtttactcttgggcacac

SEQ ID NO: 7216 - DNA, 672 bp, Gossypium hirsutum
cagagagaccttcaatctcgattgtagaagatggagttgtccctgattgtgagttgcatccagaaatgaattttgaattgtcagatactgctacgcttgagcaatgccgggcttgcaagattgaactccaagtcagtaatttctttatgttgggataagtatgagtggttcttcaagtagcagttacttatctagcactgaaactgtcacagagggctgcctaaatatatcatgataatttgccctattactattgacttctctacagtcatgtatttttatgtagcttaattttatgtgtagctctccttctgtttacaagcttagttttactgaccaactttactgggttacatgcagaaaggtgtctcattatttaacaggaagccttccaaaggcatcgagtttcttataaataccaaaaaagttggcaactctccagaggaagtggctgcttttctgaagaataacactgctgggcttagtgaaaccgtgattggtgattatttgggtgaaagggaggaatttgctttgagagtcatgcatgcttatgtagattcatttaatttcaaatctatggattttggtgaagcaataagattcttcctatgcggcttcaggttaccaggagaggcacagaaaacagactgcatcatggagaagtttgctgag

SEQ ID NO: 7217 - DNA, 660 bp, Gossypium hirsutum
ccactcgtttcgtgtaatcccgagagaagaaccggcttttagactcaacgtcttgctcgaagaacctacgtgcaccgtccttcatttcctccatgacattcattggtatcccatggttaagtacctgaaagaatccccatgtcttggacgcgtttcgaactttcccgacgatctcctcacgagtagttcgattttgcttcactttttcgaggtctataatgggaatactaacctgtatgccacatgaaaccgggttattctcgaattgatgatgaaacatccttggaacatgtttgattccagaatcaacaagtccttttacaccagctcttgtttcatcgaaagctttcaatttgcttagtcgatcgtattcgggttttcgagtggtgggatcttcttcatcggtacacttggacatggttatcagtgagtaatccgtgtagacaactcaaatcttatgctaactagctcatcttaatatgaatatataatggtaaaccatcacagttatgatatttttctatagccaatgagaaattgatacaaatttcatgaagtagatgattaggtagcttgaaaaatcaaactattggtgtttttaatggtgtagcaaatacacaaataatggaccattaaccccaaggcatgggacacataaat

SEQ ID NO: 7218 - DNA, 646 bp, Gossypium hirsutum
tacgacaagaggaactgacagaaaatctggaagagaacgtgaaattgaaaacaccagcaccagcagaattgaacagaagggcggaaacgaaggagttcgactcatggatggttgtctcgtgccattcacggaggcttacaaggaggaacacgattatggatacaaataagcaaaatcacagtattggctcacgtttctccttaatttctaattggaattgctgaaattatggaagggcagataaaagataacagtagagctgttaggccttctttgggcttctcaatgggtgaaaataatgggcctcgataaatgggtcaaaaaataaagggaagttggcagttagtgttgggcctaagaaaaaggtattggttggaataaaataaggagttaatagcctgaaacaaaaaggcatacaaatcaatgaaccacgttaggaatttgagctgaagaaagttgggatggggataacgtttcagggattgactgaatacaaggaaagtttgagtgggaaaaataagcataaggcagcggtagtcgaagaaaatcaaaatccgaacatcgtggtggttgagggggaaaggggtggcggtagcttggccctggaatttctttattgtgttttagcgtcttctgtaccacctgg

SEQ ID NO: 7219 - DNA, 651 bp, Gossypium hirsutum
  misc_feature (644)..(644): n is a, c, g, or t
  misc_feature (646)..(646): n is a, c, g, or t
tggttgccctaccacatcaagctagctcttgttattctgaactgaactttttttatgtatgttcatgttttgcctttcattttgcgagctaaactctctggtagccttgcaactgaggaaatgttcccagctggacttgtgtaaaaattctgtagggactagggagtgaaaaagtaacattttcatttggtttcctgattttcatttgtactgtttatggtaactggatctttgatcaactagtagtttaatcattcaatcatgagaaaaccattgttcgttttgaatttcaactgccttccagtgcagtgaaccttgctcttgaatatattacttaatctgaagttcaaactaatgcaggttattaggtacgagaagttcatcaacaaatcaaagattacatgaagagataatatatatttatgtgtatattctctcagacttgatcagttgaggagatgatgaatccattgctctacaactgcgggagaaccataccatggtcttgatacatcatctgaaccaacaggtgagtggtacactccatccaagcttatattaagggctccctctaagtgagccgatacttctggcacaactccatcaccccaaacatctgcctccccacaaacctgatttcatgncnacaag

SEQ ID NO: 7220 - DNA, 601 bp, Gossypium hirsutum
tacgatcccatccgtagagatccagatccttagatctcaaccatttactccgttacccttttcaattcccgtatatagaaaaaaaaaaaatggtataatgaggattgaggaagggcattttataaattcccgccaaggggcccacacggggtttcggtttcttaccccttgaaaaacacttttgtaacggttttggagaacggtgggggaacaacacagggaatcccctttaagcagggggttccaaaaaaggattaacccccaacaaaaaaaaaaaaattaaaatgaaatattgaaaataaattttatttaattgaaatttgggtgggggggattggaatttcaggccaaaaaaggttaaggccttgaaggaacatgctggggctaatccaaaggccgaaccacccaaggttaaaaccatcattgacatgtgagtctctataaacatttcttttgaattgctaaaaatgtaaataaaaaaggtaaaagttgaaccaaaaaaattccctttttttttttcccaaatttttttttaaaataaaccaaaaaccaaagggatcccaactttaattttggaggttttaattttccccccaacccc

SEQ ID NO: 7221 - DNA, 597 bp, Gossypium hirsutum
cagatgatgatggaggtgatgaggatttttcaggtgaagaaggtgaagaaggagatcctgaggatgaccctgaagccaatggagatggtgggagtgacgaagaagatgacgatgacgatgatgatgatggggacgaagatgatgatgacgacgatgatggtgaggatgaagaagaggaggacgaagaagatgaggatgatgaggttcctcagccaccttctaagaagaggaaataaatctagtcataggtcttaagatattctactatttcctgctttttttctctctggctgaggaaattttagtagggagggagatttcagcttgtttgtttgcttagagtagaacattcgtcgttccaaacaaaccttatttccagcatttgtcatgtagtcatgctataggtggttatgatacatatcattgcatcttgaactaacagtcaaggcctatttgtttagtagaacctggtattcttagtagaacttgggcttttctagtatccttgtagggtttgatcaagcaattaactcttaaggtggaaactgaagtttattcaattatgccaaattaacaggatgtgactgcctcacaaaa

SEQ ID NO: 7222 - DNA, 685 bp, Gossypium hirsutum
  misc_feature (127)..(127): n is a, c, g, or t
actcaagcaacaaccaaaaactgtgcatccttcgcaattcctttaactttctagtagtatttgcattatgatgatttgcatgaactttcaagattaaattaaataaaaaatggagtcattaggtggnaccagtgacattctcactggattaatggaaagaaaaataaaaggatgctaatttggaaacacatggaaatcacatgctaatcatgtggtcatctgatttagataggtaacgaatccccaaaatcaacaagtcattccttttcagaaaaaaccttttgtggggtcccatttgcatgaattttaccaagagaataaaaaaaaatttggtaggatggatagccagagacaatcttgttttgcctactgcaatgtctgaaatacactcaaaacccaggctggtcccctgttctgtttctgctttgtaacaaaacaattttttttcttttgcataaacaagatctaccctgttcaatcctttatttgggaacaatggtaaaaaattaaaagagaaaggcattgagaaaattcaaaggaaagagctttcagggtttcaaattttggacttttaccccttcaagcagtgaactttcatcaagtcctatgtagctatggaagtacctgccaaagattgaaaaatgtaatgtaattcagacctttggggagacacaatgggacccct

SEQ ID NO: 7223 - DNA, 625 bp, Gossypium hirsutum
tttgctgtcttgagtgactggatatttgcaaaaagttacccgaggggtttctgatcaatcaattttcgggtgagattattttttatggtcatggagtatttacttagtaaaattatgaagaaggcaaacttagatctttttgttaatcattggtatgtggttggagcagtgaacttgaggatgcatcacaagatcgtcagagaattcctggcaccttgtcaggttataggcgcaatgaatatagttcatcaccacctactagaggggactattcgcggggcattcatggacggtgggacagtcgttctagtggaaagagtgatagagacagtgattcccaatctgattgggactctggtaatgtttatagttctttggttctatcaaatagtatgatctatgtttaaaatttttatggactaattagtgttaaattaaatgattctaatgatacatagatcatggaagacgccatggtaatcaatctcggcggtcttggcaaggtcctgagcatgatggtcttttggggagtggttcttttcctcgaccatctggatatacagcaggagcttctgcttcaaagcttcgagctaatgaccagtgccatctaaatagaagcaatgag

SEQ ID NO: 7224 - DNA, 609 bp, Gossypium hirsutum
  misc_feature (524)..(525): n is a, c, g, or t
ggaatatacttaaacataggttgagtaggtatatctgccttccggttaaactgttcttgaattatcctattgtctgcagctttaacctggaaacagaattaataatagactcataagagaaaaccagacgaagcaaagggacgaatggaaaaaaggttgaggaatgttataaacaattctttcttccttcgactcctgtggttcaacttggtcactgaagaaagttctatagattcctatactataaaatgtaggaacttgtgagctgagaccagagttaggatactagaacattgtataaccaaatttagtgtgattaaagcttagtttaacgaaatctcaaaagtgtttttttttttattttttttggaaagagcttctccaaaaagtgttcttgagccaagttttggtttgagagaaatattttttctctctaaaaaagtagcttgtttaagaatgattttgtcttaaaagtatttttctatccaaaagtactttttaaaagtaatactaaacataccatnnctcaagttcacttattatacaatatatggaagcatatattacctcaagttcaaaggatttctcatttaattgcgccaccaaatc

SEQ ID NO: 7225 - DNA, 675 bp, Gossypium hirsutum
acgcgacctaatgtcatcccggaaaaatggagagcctgaaatatagcacaaaattcaataaattaatccaattagcaggacaaacatcagtatccaaagcaaacaatgccactgtcttttgagaggaagtccatattttacgataaaaagagacttaatgcatgattatttgcttttcacagcaactcgatgacccctgaatttgcagtacagctcatagtaaagagatgaaagcaaccagaaacgttctcttaaaattatttaattctaaaaaaaattggatacaggaaacagactattattctaaagtattttccttttttattttttgaggacataaaagaaaattaaaaaggtttattacctgtaaaatccagtgctgatggcctggtagattcattagcagaaagcatcctttgtaagtcatggataagttctggtgggatagaggagaaggcttcactggataagtacgtcaatgtattcatatactgcaggaaagaaacaccacaatcaaccactagaaagacaaaaagggaagaaaaaacgtaattcaaatctagtatggtagaataggatatatcttcaaaatgtaaacttgttgaattcttcagtctctaaagcagtctttcacacaaacctctctaatttgcatgagggaacaatgtatggcgg

SEQ ID NO: 7226 - DNA, 652 bp, Gossypium hirsutum
ggtattagatgtcttttcgtcatttgttgaaccagacagactagtcttctgagaaggcagtttgggaagtgatttccgctgtggcttctttgcattgacaggagaaattactttagaagaggtgctctgaaatgctttctcatccagacttagctggactgattggtgaccactattgctgttaccatcagagtccaaaggagttgagctttttcttctaccaagctttggagatttagctcttgttggtggtatctgcatccatgaaattttaaaatataaatgttgcagcagaggaaaaagaaagcaataaaatctggtgatggataaaaaaagatgtattgaaaaacagaattgcatatgcaagaaacatataataaaactataaaatgctacatctgtcagcacattcaagaaaggaaaaataaaatggtttctgatagttccattcaaagttatcaattcaagatgttgaaccaaagcatataaatgtaagctcatcatgccaaaactaggacatgttaagatagattaaaatatttatcctaaagtagctttgatattacttggcactaagaggtacagtgactagtacaaggtagctccaaggaaagtaagaagcaattctcatgacctagtctaacagagatca

SEQ ID NO: 7227 - DNA, 693 bp, Gossypium hirsutum
gtagttatgctctgttttttatcggatcgagtgaaattattagagttaaattaaaaaaataaacatgtcaagttgaaattttgttacagtataactaatcttatgttagagcacataaatttgaaaccgaaaaaattttcaaagctaaataaaaaaaatacattagcatgataaatttaaatgattgattaacgtacttatttaagtctctaaaattattatttttattttttaaaaaattttaaatttatataaattttagaattaaaaaaagattatatctttcaaaaaaaatataaattttggaatttttataaatattttgaattttgaaaattattttgaattttttttagagacaaatcaatttgttcattttcaaaattgacagggaacaaaggggtatttacaccaatctattattcaaattgtaaaattcaacttaactcaaactacttatttaatttaacttaaataacttgattcaattaactcaaaatttgaaattttttaattttttcgaattaaattgaattttttcatctctaaataccatcaaacgaagtacattaaatttggcatcactttatttgtgaaaagattctaagtgaagagattaagctattaagtattcaaactaatgattaaatgaccaatattttcaccaaagctttggtgaagcctaagtttcaa

SEQ ID NO: 7228 - DNA, 677 bp, Gossypium hirsutum
tagagtagtatagtacatcaggcaataataatgtgagaccaaatttttaggccacttttgcccaccatttgggctgtccagttatagctacgaccctcctaaccccacggactcagcctattccgcaaggcaaggcaaggtaacaaggtcggtcccctcccctgtgatatttgaagctttaattttaataacaaattaactaaattggattagttccttagttccaaggaaatagaaattacttggaactttggttggtttggtccttaaagccccccttgccgattttcagtcacatttataaatttggcagctcttacaagaatggtccacaacgtcccactttcgtccctcctacaagatgatagacgaaagaaaaacagaaatacgaatgaattgaactggttaagcaaatcatgtagcagataacgatggacttgaagtccacacgtaaacgctgttgcaacgcgccgtgcgagggagatttaggccttcattcatccataataacaggctgactttttgccgtgttggatggataggctttaaattaaggagaacagtcatattggaccggagggccagtggggactcttattttgtttgtagatgaaccttatttttccatgcagcgccacgcagacgaaaacttttattcgtggcctggctaagcttgt

SEQ ID NO: 7229 - DNA, 471 bp, Gossypium hirsutum
  misc_feature (15)..(17): n is a, c, g, or t
  misc_feature (457)..(458): n is a, c, g, or t
caaacaccaaaaaannntttttcagtaaatcattttacagagaagtaaaacattttccattaaatcattttccagaaaatattttacagccaatcaaacagacccttaaatgcattatgtccatgtaatggataaatatcatacatatgtttgtaagttgacacacgtgttttaaatgtaatttatgttatatttgaattaacatttagtatttaaattaataacggtattaatgacatgacatgatataattgatatgatatattaatacttaaaaacttaattaaaacattttaaaatctgatgatgaatttaaaatttcaattataattttgggaatatttgttacaattaaccctagatttttttttaaaaatattgtgtcggtgcaaaaattataagaaccggacctttgatttacattttgatggtatagtacaccaaaaaaaaaaaaagnnacaaaaaaatttc

SEQ ID NO: 7230 - DNA, 201 bp, Gossypium hirsutum
tgttgcctccttcaacaagttgtgtaccattttttttttcaatttcttgtaaggattccgttgtttgcatgaaaaagtttgatattgtcatgactacaaacttggctagtataacacaccctactatggataggaggcttgcactccatccgctaagtcgacttcaaactttatcatgcacagactagtacttattcttgg

SEQ ID NO: 7231 - DNA, 605 bp, Gossypium hirsutum
tcagtgattggatcaaaatattcaacagagcgtatggtcactcttgcacaagggaaatgcaatgtggccgtggcaaagcgaaactttattttttttaaaattgattaaatatgaaaagcaatgaagccttacccatcgctgaaaatgagtagtttagaagcacactttacactgttaagaaacaatatccagcaaacgcagaaaagtaattaatggaggaattaattaataatgttatctgtggttaaaatttgcgacaaccaaaaatattttataatccctgcattattggttttttataatcatgtttaatttattatatattttctatattaataatttatataataaggtattactgttagttacactttaaaccccatgtgatggctcgatggttcaggatgttcactgcctcaagtatagtctgagtttaaactatgttagttacattttgatttgttgacaattttttgagtggaaaaacttcgggttttttttttgggggggtgtgaaataaaacaaacaaaaatattacatgcttttaatccaatataaagaaatatcttttccacaaggaaaatccttgcccgcagggaaaaaaa

SEQ ID NO: 7232 - DNA, 646 bp, Gossypium hirsutum
tatttatatatatatatttctgcttccttcactttgtatcaaatgtcactttgttgaatgttataatgcttactttcattggttacttaccatttattattcgctctttatgttcctttagtttcttctacaaatttttggtacactgggtttcttttgggtcgttaatgttgacattaattaacttaatcgtgatgaattttataaagaactgatggtatagagtacacatatattgcatgtttctgatgttggtgttagatgatgcatggatctgtacagcctagtgcctacattagaaactagatgaacatttagatattttagataagcgtgtcaaggtataaggatagtgatttctttggttgactgctgaagctaaacttattgtgaaagttgttagccaatgactttgtaacatctatgtatgacctcttaggcctttatatgggattgcaagtctctaaagaacatatctcaacaacataaaaaatatatgtttaaacatttttaggtgcatcttgtgagctttcttgtgatggcagttgtgggaattaaacattaacttctggtgctttctgttcttccagcctccttttactggtggaaacagagacaaaattgagcaaaagattgtcagggagag

SEQ ID NO: 7233 - DNA, 568 bp, Gossypium hirsutum
  misc_feature (67)..(67): n is a, c, g, or t
  misc_feature (538)..(542): n is a, c, g, or t
gatgacttgcatatcgatgatggaaaatcgacaaaaagtaagaaaaacccaatcttaggatcagtanttttaaaagaaattaaaacattatccaaataaaaaaaaaaccactcaaaggaaccatcaaataagacaaataatctttaatttctcttcttaccagctctggaaccttgcttaggtttaagtgtgaaacacctaaccatcgaaggcaaggggagagcactcatatattttgatggggagggatccacttaataattttacactttttaacatttaaatctaaataaaatgagttagaaagagagaattgagatgatgaaaaggaaaagaccttaaaagaactagccatatatttattttaatcattactagctaaacatagtaactgtagcatctaagcacacattcaccattttcactttaatttaatgttgtttgaatctaattaaaccgaaaattaattaaaatattgattcaaaacattgaaatgattgaccagagcacatattcaatttaaaaaatattgactgtnnnnnaacaaaataattaagctagtattaaa

SEQ ID NO: 7234 - DNA, 640 bp, Gossypium hirsutum
gtcattaggattgtgtcctaagaaggaacatagcaatagtgatactttgataacatttatgaatttagtagatttggtgtcatctttcttgagcttcatttgtgatgcatgggttctttgaaaattaatgaagaatctattccattttctgaaaggtgttgccataggttttatcatggtatttattttccctttgctaagaagggagagttatatggatttgaagtttcttcttccggatctttattccgatgcatgggcactattgaaaagcaatgaactatctgtattctatattctaaatagagtttgcaatcgattttatcatgacatttatcttccccttgcattaatatttaaaatactgacaatgcagaaacatatgatatgtggtttccatttgtactaaatttgttaacccatgatgagatatcatttttttatatatataccatagaaaagaacacgttgaaaaagtaaaaaacctcattagttttgcctatattgtaattcctgtgcgactttgatattactttggtttgtgtgattcttgttaatataatgctcgttctgttgtgcttcataaatgtcaggtttttccccgttctattttcttattacatttttttttctgtcttgg

SEQ ID NO: 7235 - DNA, 670 bp, Gossypium hirsutum
atttgaatcaagctacggagacaggtaaagttggtaatttggatagttatgaattgaatcatggaaaccagaaacgagttgtatgtttgtctgctgcatccgaagattcaggtgtacaaactaaaattgttgaggaagctgcaatggcaattgatgaggaagatttgaatgccttagatggtggtcaagaaactcctatatctgaaccgataaagaaagctgcgagtgtcaatgtagatgccgcatccttgaatgtcaatacactggttactgctgaatgtgttccagattctgaagctaaaggtatgaaaaagtgacatttagtgcttttgatcataatttgaaaattcaagttgaagaacagccatgaagtttgagattaggtgttagcactgaaaatctcgacattatatatgcagatccggtctattcatgtcagtcaactggatcgattgccgcaggccaattaaacgagaaggtacttccaaattctattagtccgatggtaaaaatatgcatctttggaccagactgattcatcgtcttttgcaggttagttccaacatggaaattgacaagcaaggtactgattccgagcaacagcagatggaggttaaaactcctcatctaagcacccaaaaacatgatacgggtgaagttgaaaaaattg

SEQ ID NO: 7236 - DNA, 460 bp, Gossypium hirsutum
cccaaacatgtcttattcatatttttcttcggttctataggatctgtctcttaacattcaaaaaagtaaccaaagtgagcagacggaagagatctttcagttttatgcgtcataacttgcatgtttcttcacagttaaactaaatgaaggagaatcactcactaattttatgatccaatactcccttatcttataaaattttttaaaaagctaaggcaaaaaccttatatggtacagtttatgtaaaagacgaacctgattacatttctgttcatccaaatttgggggtgctgagctagttcgagctggaacctgattcaaataagaatacatgctgttagaaacaagtttttgaatggtgaaagatggaacgccaagatgaatgatacctgcattccgttcatgaaaccaggagttatggacccgaactgtaaagagaatgctttggatgcatcttctg

SEQ ID NO: 7237 - DNA, 591 bp, Gossypium hirsutum
  misc_feature (295)..(295): n is a, c, g, or t
  misc_feature (410)..(410): n is a, c, g, or t
gtatatccctaaaagtccaaaactatatcagttaaaaagcatctagagtataagcatagagagaccaacaactaagatgggcccaaacatgtcttattcatatttttcttcggttctataggatctgtctcttaacattcaaaaaagtaaccaaagtgagcagacggaagagatctttcagttttatgcgtcataacttgcatgtttcttcacagttaaactaaatgaaggagaatcactcactaattttatgatccaatactcccttatcttataaaattttttaaaaagctanggcaaaaaccttatatggtacagtttatgtaaaagacgaacctgattacatttctgttcatccaaatttgggggtgctgagctagttcgagctggaacctgattcaaataagaanacatgctgttagaaacaagtttttgaatggtgaaagatggaacgccaagatgaatgatacctgcattccgttcatgaaaccaggagttatggacccgaactgtaaagagaatgctttggatgcatcttctggtgttaatccatcagaaaccacaaaaagcatataagtagttgcatcagct

SEQ ID NO: 7238 - DNA, 641 bp, Gossypium hirsutum
gcagaaaacgttgatctcaggcatcaaccaatggatcaaaggaaaaatgcagaggaatggatgctcgatcatgcactccaacaagttgtcaccaaacttgctccagctagaaaacgaaaggtggcattacttgttgaagcctttgaaacagtccagccaagaactaaatgtgaaactcatttgaggcaaacttcaacaggctttggccatggacagtccattcaagcttgtaattgataattttatagaggtaattaagtaactcattattccaagtccattccttgttattgttaattgaaggaaaggaggcagtttctcctaagttatgtgtcgagtggagagtgcctagttcaactactagaatttgagtgcctagttcaactactagaatttgtgtactttcaactggataatatctatcatttggaggtctattatgtctatttctaatgttatgtactactatgatcaccagaaataccaaaaatcatcaaatgcttttcatgtactgtttctaaacatgtcaagttacaattgccatacaagaatttaactattcttaggattcacatgcaagagtaggaacatggatatttagttttaacaaaataattaaacattaatatgcaacatggagg

SEQ ID NO: 7239 - DNA, 189 bp, Gossypium hirsutum
gtagcacctctacgctgtcagagatattgtttatgatattgcattatagtttagtgatggaatatagtgcaggtcccaccaataaggagttgtgtgtacacagggttttggagcttgatgaatatgatgttgtgatcggaaagttataacttttattaggtctgcttatttcgggcaccgggggggggg

SEQ ID NO: 7240 - DNA, 671 bp, Gossypium hirsutum
cgttcaactgcctgagggctccagcttaataactgttactggcattgatttacctcccaaagatgttggtcatgcattgcagttcctagagttttgtgcagcttttggagcggtatgtaagatagtttggtattatgtttttttggtttatatatttatgatagaaacctaacattcaaccctagatgcatcatcttaaatcttaactttttcaatagttgaataacatagaactatttgattataaagaccttgttatgatgaaatttctttctgtaatttggattttgagtcatgaattctgattacttaaggatattgtatttattgtttttctggttgaatgtacttggtcaacaattgtttgtttttgtttcatctgcccaagattacttaatttagtaattatttttggttattcttttgtttggtatgccataggttcttgatatgaagaaagggcaagcagaatctgtaatcagagaaataatacgtggacgtgggagatgccgattacagtactctccagtagtccaaatccatgtacaattgttgtctctaatacaaaaagatatggggaagaagtataaataaatgccctaactgctgatttttaccttctttcttaaaattgaattataattttatgctgtattggctgttcagaattc

SEQ ID NO: 7241 - DNA, 655 bp, Gossypium hirsutum
tcccaaacccacacttgagataatgaatactctaaccatcaaaccaacacacagttctaatcactcaattctttgttcagtcaatttattcattttaatctgaattttattaatttttagtatatttaattttgttttacattgtaattatttaaactatttatttataattactcagatttacactaaaaaaatacaaattggaaaaaacacaaatctaaacaagaacatagacccatcatacaccgagtgtaatcatcctaatgtttttaagtttttctatttataaaatgtctaaaattattcataattcctcatcaatttttaaataaaaagataatatattttaaagtacttaaaataacattttttttacgttttgaaatactcaaaatcacacttttttacactaaaaataatattaatactaatcgaactaatattttatccattaatcagactagtgatggaaatgacgcatatcatgaaagttgagctaagtatgtgcggatactcgcaatcaaagtattgtagcgccaccagcacaccagctttgatgatgaaccctgtttgacacgtatcgccatgtgttgttcttcagttttatgttttccgacacttggtttacatgcatgtttttcaaaacacccattta

SEQ ID NO: 7242 - DNA, 420 bp, Gossypium hirsutum
ctcacttttccttgtaggtttgatggttagaggatgctgatggtgattgggactgtgtgcaaactttaggtgaatctatcaaattgtgatacactcacttttccttgttgctgcaaatggtcttgaatgctactggaatgcatttgagttgccttatacttttcctgcttcataccttgaccctcaaaactacacttcattacttccattatattccattccacctgaagtcatcccatacgaaactttcacgatccattggtgatatggatgttgaggagttcattgttcttgttccatacgtaaagcaagtaaaggtttgtcttactctttcataatctacttgcataatgtaatttatatcttttagtttgcctatcctaatatcttgatttaacttgtgcacttaatagcattgga

SEQ ID NO: 7243 - DNA, 612 bp, Gossypium hirsutum
actgccttgtctgttgctggtgttaatagtgaaactaaggacggcttacctttagtcggtccaactacaatttcagtgcaactgactgttacagaagctcctgccaacatttctgctcagtcctttagctctctgaccagagatcaagagaagttctcgtcaatatctagtgcctcaccaacttctgccacttccacaaccttgtctggtgtctattcatctgcttcagatcctttgttggtgccaactgagtcatggcatgttggtgatgcgggtacaacagaacaagaatctggatgccaactagaatcagctgaaacagatcatattcaaggaaacaagaatgctccctttgatattaatctatctaacacagagaaaacagcctcggaaattcggagctcaatgcatgaaaagaatcctcctaggaaatcaaaggttgctgaacagactaagcagtccaagcctatagagcctgcattgctacaaggtattaacacttctgtttgatttgtgacaccataaattacgatcatgttgtagttttttggtcttccattgtatcctccttttaaagtacaatattgtattttgcaatgcatgaatctcttt

SEQ ID NO: 7244 - DNA, 457 bp, Gossypium hirsutum
  misc_feature (449)..(450): n is a, c, g, or t
  misc_feature (452)..(452): n is a, c, g, or t
ctccaattcattatatttcacacatttaccaactattttacaacttgtgcaaaatagtccctttaggtattttcatgctaacacctctcacaaaagttgtctattacactaataagactcatattcttccataaaaactcagcaaacatcacgaatcctttcatggaaaaactccaaacccttaaccattttgcaaaatagaccccttattggaatgctcatgcttcaagggtttaaaaaatgtaaaaatcattaagagaaactatcaaaatcacttacttgagagggctcaaagttgctgaaatttttgaagctttcaaacccctacaatggctgatattttcagcgaagaagagagaaaatatgatagcttttcctttttgttttattaaaaatacagctactcaaattgatgacctaagcttcacctaattttgacattctctccnntntgtct

SEQ ID NO: 7245 - DNA, 615 bp, Gossypium hirsutum
gctcaatacgattagctttgattgatttcttgaggggactagttgagtttgatcccgccaaacggtggtcgccttttcaggtagttgaaatttcacttgaatacttctttatcatgctattccaactaaatatgaagcaataggagcttcaacttcatcttgcaggcttcaaaacacccttttgttactggagaacctttcacatgcccatacagacctccccctgagacccctcgcttggtaagggacctatgtgtgtagctctgcaattgaagaagcttgaaccttatttcataaattaaaattatctatgtgacttttatttcaatgtttggtaccatgcatacagaggaattgcctagttctctcccgattcccatattgatttgtgtttattcatagtggagtggtcattttgtattttttcttaacactggtataatcttattttatattctaggaactcctctcttatttataaaagtttaagtttgttgaaataattcaacatagagttctgtacatgtttgaagaaatttcaatttcctttgtgtgtatgctgagcataagcttcttttggctggtgtgaaagatgtggctttcttggtcttctta

SEQ ID NO: 7246 - DNA, 621 bp, Gossypium hirsutum
  misc_feature (609)..(618): n is a, c, g, or t
ttacaccgcaattctaaatctataactatctcattcattattgctgcttctctacaggaagctttaagggccttatggaatgctgtcttcccagaagaagagctacacggcttaatatccgaacaatggaaggaaatggggtggcaagggaaagatccatcgacagattttaggtaatgtagttcccttttatctgtccatatctctgtctgtaaatgattatcatattggtaagtacatcttaattattggatgtatcttgcaggggtggtggttttatatcattggagaacctgttattctttgctaggcactttccggtatgtacttttacttatcttgtgttgcctaacccacaatgccttgtttttcgtaattctcttctgtttttgcatggtcattgtgtttggttttcttggcgatttttgcaatatcaaaattaagcgtacttggatttgtattgctatatacatgcaatgattacaggtatttcaaataggtatatatattatgatttctggaaagtatttcatgtacattttaaaatctagatatgatcttgctttgctacttcaataaattttactttatcttttggtctttgttcannnnnnnnnnaag

SEQ ID NO: 7247 - DNA, 597 bp, Gossypium hirsutum
tatgtgaacgcgttattcttatgaattttgattgattggtctattagatttatgagaagggaaatttagagtcgaagaaaacgcccaataatgagactgcatgaaatggaattcaaaattaatcaggttaggttttggattcattaactttgaattccatttcatgcagtgtcattatgaccatttcatacggaagactttgattttgcttgagttttctccaaatattttcaatccaaaagactattaaggggatatcccgctagaggtatatcccattctttggatatcccaacttcggtttagggtttttttttgaagaaaaatattggtctattattaagacaaacccaaaaatgaaacaggcacaaagggaaacaaaagccccgaaaaagcagacccataaatatttaagaaaagattgtattttcaatccataatgattgaatggaacttttccatagcttaaacgtagtttaaaaatttatttaaaaatttaaaacaagttccaatcttccataactggataaatatcataaaaaatttatgagtcttgcccgacccggcaccgaattaaatgcctaatgacctaccctt

SEQ ID NO: 7248 - DNA, 584 bp, Gossypium hirsutum
tacactggaggatgtaagcaacactaagctaaaatctcctaaaagtagcattgatatgactaggccaacaagatcctgcaattgtaaacaaggtgttagtgaaagatttgttaataaaaattaatgtaaactaaaatttgtgtgagctacctggtgaccagcaggtttagtattatgaactaaaaacgagagaaggtaaaagatatatctcttatcctcaagctttcgtaagctgttagcatctataagctctccataactcttcttctttgcaaaaccttcattgcctagggttaaaagtgcatcttctcttggataatcagattgattttgcatgtatgtggtgttcaagctgaaggacataggaaggtaaccaggttaaatgtcatataattgcagcaaatgattccatcatatgcgtgctcgtgcacacagacatttgaaaagaatctgaatttctttccatcagacactaaaacaataactactcttaaactaagttccttgtgcttctgtctgggactccctacagctcatcctattccagtgctgaggtatatcaaaatatgccaatatgactttgg

SEQ ID NO: 7249 - DNA, 632 bp, Gossypium hirsutum
atgttccaaagaggtgattgtctttgctacttatttttcttttcctctcaattctttgcacttgattgttttcgacaaaacaaaaatatatatttttgataattagtatgacattctgagttgcttttctgaaatataacaggaggatgaactgataattgagttggtgaacaaatttgggcccaaaaaatggtcaaccattgctcagcacttacctggacgtattggaaagcagtgcagagaaaggtgcgatgatagagctgttacttttaatatttaaaccccatttacatttgtagttttgcagaaggccaaggagactggggagtggaccttggattatggctttttgtagaactggtaacacagctggcctgagcctggtttcattgggttaatgctgttgaattttaacagttctcactctgagatgttatcgtgaacttttttggaaattttatgaaatcatttggtgttgtaatgctccttttccctaaaaaatataagaacaaaaaattgttcctgttttgcatttgtgctcatacagctaagtactaatgtaggtggcataatcatctcaatcctgccataaataaagaggcatggactcaggaagaagagctggctcttat

SEQ ID NO: 7250 - DNA, 636 bp, Gossypium hirsutum
gtctgatagacagcacgttatcaaatttgtgtatctgataaattcatgcatcaattttcataatcaaaatgtactcatctaggaccacaaaccttcaatatacaaataacagaaaaagtagagaacagaaatgaattcaaaaggaaaatcgttgagatctggaactgatgaagataaaggtgaaccacatactgagaagacatattcagaaactaaccataactccgcatcaaatatgaataagaaacttgagaaaaatttaattacctatgattctccacaagtttattaaccaggctatagaatgatatagccctgtcaatattcatggttccactaccagcaacatcttgaaactcggtctcggcccactcaatactcttggcaaaaagaggtttaaacatattctctgttagtttcattgtaagagaaactatcgcattgatgacgcttttttctacagcatcaatagtttgaactgtaacagggtgttgccgacgcaaatcaagagcaaccatgcattggtcaaaaatctttccatagaaaccactaactgatgtcctatccattttactaactagatctgctaacatttggaaagcaatcaccacgcttgaatctccagatttaacagca

SEQ ID NO: 7251 - DNA, 652 bp, Gossypium hirsutum
gaaatcaggtactaaatccttgtttaacccaccattcttttgagggctcctttaaccctttgaaaacaacatatttgctcctcagtttttgttcttaaagccatgaattattgagttttcttttgcttggttcttatttctgtttgaaacaggttgctcaacagtgctagtcccagcgaaggttgttcaagctttaaatctgaactttgctgattccagcagtcatgttcagccacatctcaaagctagctttggcccaaactatggtgagcctacggatcacaccatttttgcactcccgaaagcttaactgaaccaaatttaagtcattgaatcatgattgttctaaattatgcagatgctttggttgccagaagaaatatactgttgaaccaaacaaggagaaattatagagcagaaggaggcctaaatcttccccaggagtggagctattgaaacctggaaattttagttgagaatactcttaatagtatttgttttgttgggaaatttgcagtatagtattaggttagtagttgatgttgtaggtatattgtattttggttaatataaggaaatcaagaatgtgataatgtagtttaggaaccaataaaagagcatttaacatatcttttatatgccagtgattcca

SEQ ID NO: 7252 - DNA, 754 bp, Gossypium hirsutum
  misc_feature (515)..(532): n is a, c, g, or t
  misc_feature (534)..(534): n is a, c, g, or t
  misc_feature (536)..(538): n is a, c, g, or t
  misc_feature (540)..(547): n is a, c, g, or t
  misc_feature (549)..(552): n is a, c, g, or t
  misc_feature (554)..(558): n is a, c, g, or t
  misc_feature (560)..(565): n is a, c, g, or t
  misc_feature (567)..(575): n is a, c, g, or t
  misc_feature (579)..(581): n is a, c, g, or t
  misc_feature (586)..(591): n is a, c, g, or t
  misc_feature (593)..(597): n is a, c, g, or t
  misc_feature (599)..(600): n is a, c, g, or t
  misc_feature (602)..(607): n is a, c, g, or t
  misc_feature (609)..(615): n is a, c, g, or t
  misc_feature (617)..(630): n is a, c, g, or t
  misc_feature (633)..(644): n is a, c, g, or t
  misc_feature (648)..(650): n is a, c, g, or t
  misc_feature (654)..(657): n is a, c, g, or t
  misc_feature (659)..(661): n is a, c, g, or t
  misc_feature (663)..(663): n is a, c, g, or t
  misc_feature (671)..(672): n is a, c, g, or t
  misc_feature (678)..(682): n is a, c, g, or t
  misc_feature (686)..(687): n is a, c, g, or t
  misc_feature (690)..(690): n is a, c, g, or t
  misc_feature (692)..(694): n is a, c, g, or t
  misc_feature (696)..(696): n is a, c, g, or t
  misc_feature (698)..(699): n is a, c, g, or t
  misc_feature (701)..(702): n is a, c, g, or t
  misc_feature (704)..(704): n is a, c, g, or t
  misc_feature (706)..(708): n is a, c, g, or t
  misc_feature (722)..(736): n is a, c, g, or t
  misc_feature (740)..(744): n is a, c, g, or t
  misc_feature (751)..(751): n is a, c, g, or t
tttaattttctttgtttattccatgtgaggtttaggttctttgcttatcttagtgtatttggcatgatatttttcttgccaatatcttgcccaactcttatgtctaaccacatgcatcaattggtggaacccaaaagttgtggtccgatcataaaactggaaagttgaacaaactgatagtaaattataaaatgagtgtgcaaatcatttttattcttaattttttgttttgtcatggttgtattggtgtttgctattattttgtacgatatcgtggtttatcctgtttactcagttgttgaatttgaagttgaaggattggctaagtctagaaattgagagtaaacgaatcctttagaaaacccttccgtacaagctaattctgaattgtgaacattttattaaataaaattaatttttgatggttaaataacaacttgaatccaatcaaattggacaaatatgtagtacgtaacccccaatagttaacggttgcaatcaatagttaaaggttnnnnnnnnnnnnnnnnnngngnnnannnnnnnnannnntnnnnnannnnnntnnnnnnnnnaaannnactcnnnnnngnnnnnanngnnnnnnannnnnnnannnnnnnnnnnnnnctnnnnnnnnnnnngacnnnagannnntnnnanttctcccnnaaaaannnnnatcnnatnannntncnntnncncnnnctccttttcccctnnnnnnnnnnnnnnntttnnnnnattattnccc

SEQ ID NO: 7253 - DNA, 674 bp, Gossypium hirsutum
ttgtctcagaactatttcctcttctagtctcggtcggtaatgctctaaaactttcaccgtgtatttttactttttgtttttaaacgtcatatggcatcatagaaaaggaatgttacaatcattgtcaaatgtgtatcatgaaagccgatggtgaggttcttgcctgtgacgctgcaactatggttcccacgtatcggaactatttcctcttctagcctctgtcggctgaaactttagccaaattcgttttcgtttaaataacatcatacagcgtcatagactgggaatattatgatggtttaaaggaataaaatttttcactaatctcggtgctacaattaccagagttttgatcagatctggtccattaatactattattatctctaggtagctcgctaagttttctcaaacattacgtccctattgcaattgtgcttctcaatttctggcacagaaaaaggattctgttaagatcatcagttgactcgaaagaacataattctaacaactcattcattgtcaacgtatactcgcaaaacttgctacttttctcaatttgatctctgaatatttttttactccaatttagtatttaagcctatcaaacttttcctaattttgtccacgtagtgatgtgcgcaaatattaaaaactgatatgtcgttaaattcg

SEQ ID NO: 7254 - DNA, 644 bp, Gossypium hirsutum
caacattttccatgctttccttgaatgatttatacgttcagaccatttgtgcttttgggtaagtggagcagttgaatttgcctcgaaatctctaaaactgtgtgcaaattttgtccctataagaagagtgatacttggtccttctcttccaataaagcagttgttggtgtaaaacatggcgaatggagtaaaatatgccaacaaccttcgaacagattcgtcggactaccgagccgagcttttgtcaccggctccaaatggagagaatcatgtaactatggcgagtgaacaatcttggcgactcaacatggataagtttcaccttccagagagaagcaaggagtcttcctattttagccttgggtattttatcaaggccttaagtaagcaattccagtctcgttttatgacagatttttgggctgcattttccatggttttaggttaatacttaatagtttgcaattgttttacctttacagagagacatagaaaactttcacagtattacaagagacaggaagagcttctcaaagggttcaatgaagtggacgcatttaatgaattgggcattttacctgggagtttgtcagaggttttttttttccctttctttttgatttattgaaataaggggtttgaag

SEQ ID NO: 7255 - DNA, 655 bp, Gossypium hirsutum
catatccaagtgttgtgtatgtgtgcaactgtcaccttcaatattttgataagttttttcgtgtatttgaaggtctttattgtaatttatgtattctgttctacttgcttcaatgatttgatctttttgaacagtttaataacttgtatggatgccatcactctcttcctgatggttcgttgagagctaccaatgtcacgtttgttggcaaggatgttgtttgtctgtggttatggtgatgttggcaagggcagtgctgatgcattgaagcaagcgggtgctcacctaatcgtcaatgagattgatcctaaatgtgcccttcaggttctaatggtaggactcttgaggatgttgttttggggctgatatctttgtcacaacaactggtaacaaggacatcatcatggttaaccacataaggaagatggaggacaatggtgatcattttgataaggaaatcgccatgcatgatcccgagaactatcctggtgtcaagcgtattaccgtcaaacctcaaatccataggtggatcttccctgaaacaaacaccagcatcactaagtcggcagaggatatctgatgaacttcctagctttgttatgtcatggtggttcaggaaccaggtgatggtcgaactgaagctgtggaaggagaa

SEQ ID NO: 7256 - DNA, 577 bp, Gossypium hirsutum
  misc_feature (521)..(525): n is a, c, g, or t
catctttctatcagaggttcattgaattttgatttcatatgatgttttgaagattgtttttcttttcaaatgatatattagatgagcttgtgctttttatatactaggacgccttcttagaactaaatttatcgtcaatggctggatcgtttacaattacctaggaattttaatcagagacttgacaataattatttgaatgggaatatttttatccatgaagattaatctttgaaaagaaaatatttcctttgtttggaaaaaaagcaatggtaaatgtcctcctctgtcttgaaaccaaataggacaaacatgtttcatgaatgatcttaacgtttcactttcccttgcctccttttctcatgtgagcatgcttaagatacattcgtttatgtgcgtgtgtctatatatatgcatgtgcaataaaaatattctttttcattttataattttttaacagtttttcctccttgttccctaacacagccccgccattaaagttgatagatttacctggactnnnnnaaagaattgtggatgaatcattggtgagtggctgaatgctatttcatcttgg

SEQ ID NO: 7257 - DNA, 673 bp, Gossypium hirsutum
attcggtcataacattaacaccagtgtaagaaaaatagcaacatcaactcagagcgtcgtcaaacaatcccaaaatggaagaaaccaaccttaaccaaacaatccgttgcatcgtcaaacttggtctttctctttctctcaaagttccaaacttcaacatgtctttttccacctcttcaattttctctttttcttttttgggtttaaaacaggaggagcagcaattacttgtaaaaatgagctagagaagatcaatgaagagaatctggaaacagtttcgtcccatttgagacaagcaatgaatctgggttcttgctcaacgcaagttgtggggatggattggagtaaaagagatgcggtttcggatatttcttctagtttatgtgattttggtgatcagtgtcagttcaacgttgatttcagcagatttgttgtcgttcatggtgcaggtgagctttgattatgtttttaatttctgggttttcttttgtgataattggtcccctttcgatatttgatgtagaaagaaatggaattactgatttacgttttccatttgtaggttcatttgggcattttcaggcgagcaaatctggggttcataaagggggattgaatcaacctcttgtcaaggctggtttcgttgcaactcgaatttctgtaagatatggcg

SEQ ID NO: 7258 - DNA, 651 bp, Gossypium hirsutum
  misc_feature (646)..(646): n is a, c, g, or t
  misc_feature (648)..(648): n is a, c, g, or t
tggattcttttcgtttcatgttgcctggtttcagttcattaatttggtctgacacagtaaaactcgttgtagtttgaaattgtcaatggaaccagcaatgttattttagctgtattcttttcttccattgatgaacctttaagctcaacattatgtttgctttgatgtttatttaaatctccttggtttgaagtgcaatagtgtaatgagtttattttgcagccttattagtgtctaaaacgatctcgaactagtatctttgttatgaagctgaacttggagtttagctcggttggttcatactgtcaccgttatgatatgggatctcgaattagcatttgatctagtttccttgttctttttgcatctaaatcgtctcgtgtcatttgttaaagagttacaaagctgaatccgaacccggaatttagctcacttgattcctacaatcactcttgaaaagtgacattcatgaagctttcactttttcctcgttcttgggctctagtttgcttttattttgggggattggtttagtggtatttcacaacaaagatcaataaaaagtagggtaaattatgtataatgtgatttacatcaattatgatttgatcattcaactttaaaaattattgtcaaaggccatctnantgt

SEQ ID NO: 7259 - DNA, 574 bp, Gossypium hirsutum
atacagaggttacttttcaattttcataaagtaaatggtaaaattcagaattaaaaatataaattcccaatatcttggttcacaaaaacaaaaagggttaatataccattggttacctgagtttttcttcaatgtttaatttggtacttgagttttttttttaatttagtacccaagtttgctttcaatgttcaatttagtacctatattaaacaacataacgtggtttgataagtgtgttctgataaaaaaaggacttaattgagtaaaaaagctgaagtaccaaattgaaaaaactcatttaccaaagtaaatattgaagccaaaattcagcaccaaattggggaaaaaaactcaggtaccaaattgaacattgaagccaaattcaggtactaaatagcacattaaccaaaacaaagggagaaaataagaaatttccccaaagaaactcggcacgcacgtaaaaggtgtacgtgtgttttaggaccatttttatttactctcttcgtcttccttttgtttcctgcaaaatcaaaaagcttcattcccattaatgaaaagggtttcaagttca

SEQ ID NO: 7260 - DNA, 666 bp, Gossypium hirsutum
tatttgacatgtggtacgggaagtttgtggaggggaaaattgtaacataaacccctccccctttatatataatttttaattgcgctttggaagttatatttttataataaatttttacaatttattatattcaataattcaacttatgttttgatctatcacttttgagtcacccaatattgcctctgaaccggttgggaaggttaattcaaaagcgaggacactcatagacagtttagacaatcttaagaaaataatcattacctcctcacttttgaaataggtttgttatactctcacttggttttgagatactcatagacggccctcagcctcacaacacttagcttcacacttgaggagtacttagatagtcccccaccttacatcgccgctcgagcacattgtcgtccaagccatccacttttagctagaatacactcatctacatgggggaccactaagggactacaaaggtgtcgtccaggccacccacttttagctagaacccactcatctacataggggaccactaagagactacaaaggcgtaacaactttgaactaccctagccaagggagtgatagattagtaccatgcataaagacaaccccacatacaacggtcttgttgcttggctaaacacacaatcaccatattccagg

SEQ ID NO: 7261 - DNA, 347 bp, Gossypium hirsutum
gggatttactccctatacttttatttctatgaatttccaaatttcaaaattaaaaaattaaggttaagatattttgttggttaaattttgaggatggtccttatacttatcgatttgtgcggatttactccctttacttttctgtgctcaaaattggtccctctacttttcaatttgctcatttttagtccctccatttacttcttccaataactctgttaaaaaattaggtacagtcacaaatttagcccctctacctttataacttttgtcaatttgacccctactttaattatttttgttttcattattaaaaaattaaaaatttatagaaaattaaaaaaaaa

SEQ ID NO: 7262 - DNA, 606 bp, Gossypium hirsutum
  misc_feature (556)..(556): n is a, c, g, or t
tttcttttaatctaaatcttaatatatgccaattttttaaatagaaatccgatacctgcattgaatattttatgttcattgtgtttaaacaactcatttggtggttactctatatacaataaaatgtttatttttcttaatatgtttattttttataagttttttttaaagtacatgctaaacttttataaagctttttgatgtttatgaaataaagttatttaaaaatattttataaaattaaagtattctcataaaaataaaaccaaataaaaataggcattaaaataatatatttgaattttttttaaaaatttggggtttttttcttaaaatatatgtatcaatgaaatttgaaaaaaaaaagatattagttgaaaacaatgcttatcataattgtaattttattttttgagtaagacccaaaataatttggtgactaattaattatacaaaataaatattatttttaaaaattaaaagttgaatccggatgtagtaataataataaacaaatcaatcagctgatgcattaattagctgtgtaagcgttacnttgtaaactgtcccacgttttatattaaattaaaaaaggtaaagcaaatt

SEQ ID NO: 7263 - DNA, 631 bp, Gossypium hirsutum
tatggagattctccacctgcaattgtgcttgctggccacaggttttgctcttctgttgttttagttttgatctaaagctttttgtatataactgtatgaaattctttttctagaggagaagcaggtactaagaaaagtgctcagtgaccaagtgcaccagtcaaggaaacttgccaaagtgcaagttgactgggctttttttcttcatccctctcttttatgcttgtacacgcacaatctacatatgtgcatgtttatgaccctgatgatggctgcaatagtggttctatgtgaacgtaatacatgcatacgcaatttctttccttctgcaattatatgcattattagcacttataaaaatttcttttctcttttgacaaccttaaaatttggagtcatgggattcaaagaatgaagaagtttcagatttttttcttggaaaacattactttttgtcaatcaatttggaaaactgaataatctaagttgctggtataacttttgtactttgagcaaagagtaattatgttggtgatgcactctcttctcaaatggcatatttccataaaatggtattggtcttttggtgattctgttcacattgtcaaaatagaaaagtgggctgtgtgtc

SEQ ID NO: 7264 - DNA, 605 bp, Gossypium hirsutum
acaatataatagtttatggatcatgggttggaaaacaaatgcatgaatgttgttgggcctatggacctgactatggacagggatgaggatccccttatgacaatggaagggatgaaaaggcaacacttagtgggggaaccgtctattattttgaatgaagtaggaatggaccataatgagaaatcaactagctctttcatgcagagcaatcgaattcaatgaaaaccctaagttaaaacgtctgtgggttggggaagccacgggctgttaatcgtctccgggataaaactgagagatgtttcccctcgacttttgtttctcagagaaacaaaaattagtgctaaacgaatggaaagtgttcgaaggaagtgtggttttggcaatggcatcgatgtgggggctatagggtccaagggaggtctattattaggatggaaagacaactatttagttactttaaagagtttctcacaacaccatattgatgtcactattcaagatgatgatgagggatctttgtggaggttcatgagcttttatgggaatccagaagaaagatataggagcttgtcatgggacttactcagacaattcagtcacgatca

SEQ ID NO: 7265 - DNA, 614 bp, Gossypium hirsutum
ataaaaaaaaatggaagaacaggggaacataagcaccttaatatatgcatagtaatgcccagattcaggtgagtaccctgagtgcacaatagtaccaaataggttatacactggctgtggatcctgaatagaaaaataccaacagaattacaaaaacaaaataaaaatattatatagaatgtatggcatataaccagtagaagagattactttgtacaggataaccaagaaaatactttagactgtactatattctattggcagagccatgcagaaatcacttcaaacccttgtcattcactagcattcactctccttcctctaatgtaatggtgccagactagctcaacattgctagccaaccaatgacatgactgaagtatatgtattatttatttaatagaccaaaaagaagtactaacccaaaaacatacccagttatctataacaggtaattcagatactcaagcacattataatcctaaaagtgccaaaatataagctttgctagtaaacacattaagatactacaattttcccagatcatttagtaaaacaaatacaaggcttatagctagcctacacaagcaaaagaaaagctcaaaaaattaatg

SEQ ID NO: 7266 - DNA, 659 bp, Gossypium hirsutum
tgtcaatctttctaatgaactgaatttacaactcaaatatgttaattggaacaccttgttaagtatactatgttgggttgtatggaaacaaaggaattcttttgttttgggaaatgttcctcataattttggtatgcttgtaggatccgcttggagttgcgttgtgaatgtgaaagctaataaaaaaccaacggtcaaggttaaaaactgaatcacaccaagcacctggcagccaccaatagttggttgcgtcaaaatgaacatatatggtacaaagaaacctcataccagacttgccttatcaattaggattgctagagatagccatggtagatggatatttgtctacagtcgcaatattgggaaatgtaatgttgaacaagtagaactttaggaaatctacgatggacttaaactaatttgatctaaagggtggaaataggttatcttagaatgtgattgtttaactgtagttcaagcaataaatggtgactataaaggcatattgaacgaggcactgatatgtagaataaaagagctttacgctcgagcatgggtggttcgcatcgagcatatttataaggaatctaatagactgactaatgccttagttggtatgatatttgactatcaattgggtctcaatgagtttgcttctt

SEQ ID NO: 7267 - DNA, 609 bp, Gossypium hirsutum
gaaaatgctgactctacacttatttcattgtaaagttctaaaggacaaacttcattaaatgccatccccagtcataaccaagatcaacttattaacatatttatttcctcagtacaagacttgcttagcaacgaagatgttgattaactatgtttaagcagttttaaataatgatgcaatttcatgaatgttgagcatttcctagagatgaaatggttgctataggtgctttttttttctctctaaaaatcccaagacataaactggcagcaagtaaccttgaaggtcccaatctttttaaaacaagtacatcagtcatatatgaacctgagagagaactcagagccacacacttgtagccaaatttcacatttaattataaatttatggggattatccagcataggtccttcaagctttacaagattaatgttcaaagagaagcggtgattacaacgcattagaatgcattaatttcagcatcatctatttgataagctagtagttccattaattgcatgccacaagaaaatagatagaagaaaagaaagaagcaacccacctcatcatttgaactgcttgagacttctccatactcgtttctgaaaa

SEQ ID NO: 7268 - DNA, 657 bp, Gossypium hirsutum
agttatattggtcacagccttccatcaacaaccaagaagactaacaaatttatatataattccatgcatcaataaactacttacaattgtcaactaaatgctagccgatgtgtaatttcactgatacattattagtttgacttactatgaaaggaaggtgtaaagaagagaaacatgaaatgattaattttatagaaattaattaaaaaattttgaaaaaggcagatgtttttgacatttttgagtgagaaaacatggtatttttgaactgttcaaattgatgggagttgagtgatgggatttttctagtagctgattttgctgactttagctaaacagacaatttattttcttgtcagacaaggaaaaaaaatggccatcttttgacaagaattctaatttgaccattgaatattggaattaattatcatttcatcaagcaatcttttgataatacatgtacgtggtactgtagtgaaactgaaggaaggagatttcaatttttgttttgtcaaggatttcaatttcagtcttgaaaaaaaggggttaatttgcaaattagttattttatagtgttatattcaaagttttttttggaataaaaaaatttatactacaagaagaagtcagaaaaaaggaaagccactgatatgagag

SEQ ID NO: 7269 - DNA, 620 bp, Gossypium hirsutum
tggtgaccttaatgttcaagtttcaagaaaccggggggatgttagagtaactgataagtcagttaatcttttagctattagttagttgacagttagtttattctctatagatagcatgctttgctataatgtataaaagcattagcagccactgtacaaaaagataatttttcaatatattcttcttgattcataaaacctcttttatctttctatttcttgctatagtttaacagcgaccacccatcgttgtcaaggttaggttgtagagtttgtcaatcgaaattcttctctccctaattttgtttgagttgcatgccaactttgatctaagttcaaaaagacaaaaatatggtggcaaatgataaaaaaaaactttttttccgtacatatcaaagggaaatcaatactatgaaaatatgataaaatttacattaaattgaaggaaaaaagagaagaagttggcacctagagtgaccaacttcaaagttgtcaccttaaagagctgtattccatgaaagtcaatttcttgaagtgctgatgactacaacaaaactgccataaacagatgggcaaaaaattcgtcaatataagtataaaaatctgtcgctataagtcaa

SEQ ID NO: 7270 - DNA, 517 bp, Gossypium hirsutum
atgctatgcagacctttctttggcgaccaactcttgagctcaagttacatatgtaatgtttggaaaataggcttggaattgcagaatctagaaagagggaatacagtaagaacaataaaacgactaatggtggatatggaaggaaaggatatcagaaagagagctatggatttgaagaagaaagctgctctttgtcttatggaagacggttctacaacttgttctttcaatgggttaataaagcagatatcagtttaagagacatgaaattaaacatccttgtagttcaattttgcaattaccccacgaccaaatacccaatgaatttcccaccagaattggcaggttggattctccctaatttcttttcttccacaataagttggttctcaattgttcaacatgatgagtttcgaataccacttgttataactctaaaattaagatttaatataaaactttattaattaggatttatatcaaatcatccagaataaaactagatgtagaagcatac

SEQ ID NO: 7271 - DNA, 622 bp, Gossypium hirsutum
tgcatgaagttttcatattgcatacaaacaggctttggaaactgcaaaactggagtacagtgaagcactcagatattacggggcagcaaagtctgaaatgaatgctatagcggaagaggcattctctgactctgagtcaaacttgaagaatgaagtctatactcagtttgctcatacatatctgaggcttggcatgcttttagcgagagaagatataactgctgaggtttatgaaaatggagctcttgaagagttatctatgccatgtcttggaagagccaggaaagatctcagaaagtatgaagtaactgccaatgaggccattagagaggcattgtcaatgtatgaattactgggtggattacgcaagcaggaggctgcttacgcttattttcagcttgcttgttaccaaagagattgctgcttgaaatttttggcaccggatcataagaaaagtggcttgcttaagggtgagagtggcattcaccagagggtgaagcaatatgcttcattggctgagaggaactggcagaaaacaatagacttttatggtcctcagacacatcctaccatgtacttgactattcttattgagagatcagctctttcattaagcctctca

SEQ ID NO: 7272 - DNA, 639 bp, Gossypium hirsutum
gaagaaaggcacctattacgcctcaaaactacttattatgactagcaaaacagatactgcaaactacagggtttcaagcaatccaaccggtcccgaggtgatttatcatccaacttgaacctctcctgttgctgctcgagtaagaaaccatcacaattacaagagcaaagagaaggtcatgcgcagaagagtttgagatcaagttgtctttcttgtgatagaatcactgttgctgagcttgtcggccctgggcaccgccatacccaccaccataaccaccttgtccaccatgaggaccatttgcctgagcacccccataatttccagaaccttgggatgaatcagacctccatgttgcatttccataccctgaacttccatttacatcaccatacccacttaccatgtaaccaccaccactcccttgtagatcttccacacctgcaccagcattactatttggagtaccaccagaacgacctccagcagccccatagccagcattcccataagatccatcattaccaccatatccaccatatccataaccttgacccccatacccagctccagtgggagactggccagtagctgcagaacctgggccaccactaccagcaccagcaccccaaggagcag

SEQ ID NO: 7273 - DNA, 650 bp, Gossypium hirsutum
catactcacaaccaccagccttggtacctgcaccagtgtatataccccggagctcagagagaatggacccaaattctgtgcaaccaggctttccatttggcatggtaattcgggattgcctgccaaatgcacccgggtggatggagagttctcaaagggatgccactacaagtatgcactctattccttcttcattgcttgagattgaaaatcttgacttgtctactgattttccaggctgtacaaccggacgtcagacccaaggtgtctttgccgacgagttcccccatctcgatatcatcaatgacttgcttgacgaggaacacaatgtggggagggtagccaggtcagcaacacgcttccattctcttggtttattaaaccgtcatgtttcgtctccatccaatttgggcatgttgggtgagacagtatcctcatgcgggtttgaacaagcatggagttactggaacaatgggttccaacaaggttacagaaattccttgggaaaccattgcgatacatcgagggaatatattccacaacctagccccctacctaatgccgatggactaattgatggattgaccccaacacattggccaatggcttcacttggcatgaggaatgctgatgcagtcagttatccattc

SEQ ID NO: 7274 - DNA, 622 bp, Gossypium hirsutum
  misc_feature (615)..(616): n is a, c, g, or t
tattatctttttgttggatttgggaatcccactgtagtgattgtgttggtaaattgtgtggataagtttctctcttgttaaaaagaaggaaataaagtcaaatgagttgttcaataccaagtttgacaaatccagggaagggttgaaaagactttgcgctagtgaagtttaatattattcattgtggcagtcggtggtgataatacagctgttgctgttccgttgatcatgaatgctgctgagctggaagaagtgaagtcagcatgtgttcagaaagccagggttggaaagagccaagagtcttccagccccaaagggtatgatgtccaacatggaacttaattctgaaatatcgatagaatttccaacaaggaaagatgctgtattttggatcttttaatggaatcttattgtttactgctgtcttccgggctctcctaaatttcattgtcttctagttctcatatttttcatctccgtttcttgtagatgtcatgagagcagtgtagagcatgcacttcctgatagcccttttgcttcccctaagaaacctactgaaaataacctccctgagcgtccagctttggtggaatcaaatgaaagttctgctttatnngctgct

SEQ ID NO: 7275 - DNA, 659 bp, Gossypium hirsutum
acaatactcaaactactgaatcatcacaaaagaatggcttgaaaaacccaaatgctggtggtaaaaaaaatgacccatcagtgaaggattcatctaataatctttcccctacttctgattctgtttccaaaggcaaaggtggaagcattcctgaaaaagcagttgtaattttaaagaagaaagcacctgcattaacggacaaagagttaaatcctgaattcttccagaaacttgaatcgaggggttctggtgatttgccagttgaagtaattgttcctcgcagatactgtaattcttcaaacatgaagggtgaggaagaatcagaaccgcatgatccagatgcaagaagaagattgaattgtctacgaaacagccagacagatgacattcatgcatcttccaactgcaaagaccataacatggagagaggagctgctgatgtgggggataaatggcctgaagagaagataaatgggaaatacctaagaacaaaggcatttgaggctgatggcaggatagatgtaaatcaaagagaacaatctggaaatcatttgggttgctcaaaggtggatggacagtctgaagggtcattcatcagcaataaaggaaattggctggctattcagaggcagctattgcagcttgagagacaacaagcg

SEQ ID NO: 7276 - DNA, 659 bp, Gossypium hirsutum
tttctcttcttttttacagttcaatttttttttcacgactttgaatgcacgaatctgcaaactaaaatcacagctactttcttctcctatctccggcactgactgtcagaacatcttggatctaaggtatgttcacctactcgtccacaacactgattgtcaaatcgttatttggagctcactagctgaagtttagaaaaaaaaaagtccaatgaccattttgtaatttttttacaattgaatgagtaaaacgtaaacttactaataatttagtgataatttctctttaattttataagttcattaagtattttaaactaacaaaatcgactatttaattaagatggatatatagaacaataattattattattgaaaggcataataattgcactcaacgggaagttaataatgtgttgctctaaaattaatggtgatgtcgtcaacagctaaaaaccctaaataaaaagcaaaattatgacattctcttgtatgaaaagatcaaatcatgattatgatatggataaaagagaatagtatataattgaggtggagctaaattgagggctgggttcaccctttaaacacattaattaagttatgccagcatgttatggtaatagttaaaattgattacgtaaaatccaagttacaacgag

SEQ ID NO: 7277 - DNA, 795 bp, Gossypium hirsutum
  misc_feature (512)..(543): n is a, c, g, or t
  misc_feature (549)..(550): n is a, c, g, or t
  misc_feature (552)..(552): n is a, c, g, or t
  misc_feature (554)..(562): n is a, c, g, or t
  misc_feature (564)..(567): n is a, c, g, or t
  misc_feature (574)..(575): n is a, c, g, or t
  misc_feature (577)..(588): n is a, c, g, or t
  misc_feature (590)..(596): n is a, c, g, or t
  misc_feature (600)..(601): n is a, c, g, or t
  misc_feature (605)..(611): n is a, c, g, or t
  misc_feature (613)..(627): n is a, c, g, or t
  misc_feature (629)..(631): n is a, c, g, or t
  misc_feature (633)..(635): n is a, c, g, or t
  misc_feature (638)..(642): n is a, c, g, or t
  misc_feature (646)..(649): n is a, c, g, or t
  misc_feature (657)..(663): n is a, c, g, or t
  misc_feature (666)..(667): n is a, c, g, or t
  misc_feature (669)..(701): n is a, c, g, or t
  misc_feature (706)..(706): n is a, c, g, or t
  misc_feature (709)..(712): n is a, c, g, or t
  misc_feature (716)..(719): n is a, c, g, or t
  misc_feature (724)..(725): n is a, c, g, or t
  misc_feature (727)..(734): n is a, c, g, or t
  misc_feature (740)..(747): n is a, c, g, or t
  misc_feature (749)..(760): n is a, c, g, or t
  misc_feature (767)..(772): n is a, c, g, or t
  misc_feature (774)..(774): n is a, c, g, or t
  misc_feature (777)..(786): n is a, c, g, or t
  misc_feature (789)..(792): n is a, c, g, or t
tggtgtgaaggcgacgaaggaaacaaaaggagctctctctcttctcttctaacatcaaaaagaaaaggaaaaaagaatatatgcattataaaaagtggctatattagatacacgtgggtggacaacatatattagttaaacaatcaaataattttgataattagtttatataaaccctgaaacttaaatcattatgttaataactgtgtaatccaataattttataagaaaaaccttaaatcctataaaaaattatatgttaaacttttctatttatagtttatgtgctcagggtaaagtgtatgatgaagaaagcacaataaaacctgtaaattaaagcattaatttaaaatgtattcattatgacgaaataaataaattatttatgaataaaagcgctttgacccacaaatgataaatttccttttaggtcctctagaaattgttatattttttaaagttaatacaatgacaaaatttcttattaaatcccaaaatatttatgattcacnnnnnnnnnnnnnnnnnnnnnnnnnnnnnnnngaaagnnantnnnnnnnnncnnnntaacggnngnnnnnnnnnnnnannnnnnnaccnnttannnnnnngnnnnnnnnnnnnnnngnnntnnnggnnnnnaaannnntaaagttnnnnnnnaannannnnnnnnnnnnnnnnnnnnnnnnnnnnnnnnnaacanaannnntaannnngatanntnnnnnnnnatatannnnnnnntnnnnnnnnnnnncaaaatnnnnnnantannnnnnnnnntannnncaa

SEQ ID NO: 7278 - DNA, 681 bp, Gossypium hirsutum
cgttggtctcactgtcctgaaaaggaaatgcagagaatttggtattcctcgctggcctcacaggaagatcaagtcccttgatggtctaattcgtgatctccaggtcctttctctttcccttttgctgtcattttgccacaaaaatatatatatttatcgagggaagggggtttgatactactgtataccatcctgatggttgaattcagctcttatttttatctggctgcgattttctttgaaagaaaacgactgaagacacaaattatgcaggaagaggcagagcagcggcagcaagacgaggctgcagcctatgctgtagcaaagaggcgaatgatgttggagacagagaaagaaagtatagagaaggaacctttcattgaattaaagagcgagacgaagcggtttaggcaggacattttcaagcgaagacataaagctagagctcttaaaaattagcacctatcagttttcagtgatcaactttctgaactagatgattgatatatttcttacttcaccaagtcctacttaaggactatagtgagataaacacttccttatgtgaactttttgcctggccaatattgtcactagtcactatgctctaggactatgagcaaatgcattgtaaagttctcgttacaggcttcatatatgtatgggtcctttaagtggtgc

SEQ ID NO: 7279 - DNA, 669 bp, Gossypium hirsutum
gttccgggagatggatcatcggcgcttttccatgatgttaaatatctttcctcacctgtctttaagttccatccaattttcatgcctggcaagagtgtgtctgatgggtgatcaaagctttgccacaaatagctttctggcatgcttttgttgtccttgagaacaaggtttccagtatctaagagccgtgccacaggatcttgtactgtcccagacacattggatgaccagataacactatttgtctggttgaaaaggacaagatttccagtttcacttaaagttaaaacccctttccgttcagcaatggggttgttcccgtttgcaacccaaacaactgctccagggctgttcttgtaccatattcccaagtacctgtttcttgattttcctggtgagaagaagcctagttcaaaggtttctaatgatgaaatcagtgtctcaccatcactaatagatccttctacacctaaaacatctgcttcctctgacaattccaagtgtgaaaaaactagtactacaaagcagatcaaagtgaatacaggagccgtctccatgttaaaactccagtgttctcctaaacaggttctctctactagcctacatatattgcaattgattggcgtgtagaaaaaggctacaattgactttagaagttgaagcatagac

SEQ ID NO: 7280 - DNA, 669 bp, Gossypium hirsutum
tatcatggaaatgcaataatatacaaataagtaaagctatttccagttcttcctagggaaataataaatgtaaaaggatatctggtgccaatatatttcctttccgcttggatgtctattatttcaaagcatcaaaatgctacttacagtagcaccatttatttatttgtgctaattatcggaaccaacaaaaggaaccacatggagaaagctaatacttagtattagaccgttcatttatgcttaaagtaagcttcaagcatggagtatcatgtgcaaaaatcatagatacggtattttccaaaacaatcccctactctaagaaactgaagactgatatattgtgtaagcataacatcttagttaccttaacagcctgagcaaactggttaataattcctggaactgattctatagcctgtttctctgtcattgacttcaatgcacagtcaagatcattttgcccaatatcaactgtgtaaagtgcttgtgagaagtcctctggtcttggaagcttgcttttaatgtttgaactcacacctgaaaaaaaaatccatgccaaaatgttttgagtattattaatagtttagaatttacagtacttttgccttaatttttgaattgtttctaaccttctttatatagctcatttattcgctctttgaactg

SEQ ID NO: 7281 - DNA, 691 bp, Gossypium hirsutum
cccattaccatacaaaattacatattaaaaaaattggttttaaaaaataaatattttgaactaattgaactatgtatttgcaattttagtttattttttttagaaatattttctttgatggaatcatgaacgataaaaatataaaaaaaaataacacataatacaaatgataaataatacattataaactaatgcacaagtgtcacttttgcaaaaataagtccaaaagagaaaaataaattgatattaaccaaacactagaaaatttcaaaagcaaactagagatgcttcacattgactaaattgttgaaaacagcatcctaatccactaaaatcagactaacctgatgataaacttggatcatccaataaatcactactaagaaagggtcctaccacattagtgatacaccaaaggaaatctaaaatgacctccattatctttatatcaagtccaattttgcgaacattgtcatagtgctgtatcaaaatgaagaccttctaatgacacatttgtcaaaatccaatacatacatcaagacataactaaaatcaccttttggagaaaaatggacaaaataaccacaataatgtgttttgaaataagaacaccatattttttcagagaaaatagagtgaactgaaactaaaaactagaattgaagcatattgtgagactacaactagtacc

SEQ ID NO: 7282 - DNA, 672 bp, Gossypium hirsutum
tctgaagtcgtcggatgttattgttaaagactagtttaccaatacttttgaaaagtgacgtgtaaagtacttttgacaagtgcttttaaaaaatttaatttaaattttgagtgtttagcattgctgtcaaaaagtgttttgaaatctaaaatgtcccttttagatatgttattatcaagtaataaatatgtatttaaataatatttaaattagttaatattattatattttagtaaaaattaaaaaaatattataacttgttgttaatattttaatatatgaaatataaattataaatatttttaagcaataaatattaattatttataaaatttaattagaatatataaactatattttaaatatttaaatataaccattaaatatttgtaattagtattttaaaaaatatgttttttatttttaattaataattttaacatatttgtaattactcatcaagaaaagaaaaaaggaaatactatgttataagaggagtgaaaaagtaattaagcaccaaaagtgcttttggagaggaaaaactaaaaatttcaaaaacatttttgaaaaattaaaaatttcaacctaaagaatttatttagcacatctttctctttcaaaagtacttttaaagccagaaatacttttcttaacactactaaacatgccagc

SEQ ID NO: 7283 - DNA, 603 bp, Gossypium hirsutum
aagcaaacggatgaacttttgcttttaattatgcggtaaccatataacttcatataccaactatgaatttataggttaattgggttttagatctgaaacttactatttcgaagctacagattttctaaacaaaaaaatgcatgcatgtcaaactgatcataaagtttctactaaaccaacggctagccatgtaaaattttacataatgtgattgtttttatttctagttactaccttgtttataattttttataaaaaaaactttaatatcaatatataagtcaataaaaaatcaatcccgggttatattcttaatttcatataagttttttttttattttatcaattttagaattaatgtatatatatatattaaactttcaaagaagcattaactttttattatcaaataaaattatttctctaaataaaatcgcaatttctatttatcaaatgcaaaaatttaatcaactgttgttctgcagtgaataaattaaagatttattagtgaataataatacggaataacataatactttggtatttatatatatatttttgttcattttgatctttttggtcctgagcttgtattctattaag

SEQ ID NO: 7284 - DNA, 522 bp, Gossypium hirsutum
  misc_feature (485)..(486): n is a, c, g, or t
  misc_feature (489)..(491): n is a, c, g, or t
  misc_feature (493)..(493): n is a, c, g, or t
  misc_feature (514)..(517): n is a, c, g, or t
tctttctctccatgaaatctattttactaaattgtaacgtttcgtacctttaccaaaagaatcctttacagtttattgagtaacaagcaacggtaatagggggggggagcggaaacaggacattaagtcattgacataaggctagcaaagatatgtacaataatattttcttttacctcaaatcactgccatttcgaaaaatgcgaatggatggatacccttgaacgtgatgcctgtaatgaaaagaacacagaacaaggaagcacacaataattagaaaacaagagagagaaaaaaaattaaacttgtaggaaagctatggataatatacaacatttgaaataattctatattagaagcaaaacagtattgtttaaataaatgaagtggtacctgtaacacaagtattggttagtggtcaaataatgacatataatcatattctaagacaaaaagtgtcaaaaaaaaaaaaaccctttaacaanntcnnntngttccttgcaattaacttttnnnnaaaaa

SEQ ID NO: 7285 - DNA, 613 bp, Gossypium hirsutum
ttgcaaattggttaaatcagacctaaaagtatatgggaaatggtcccttgacagttcagccattggtttggcttggttggatgatcaggtatagttgttttgtttgcttaatcacataggcattttatcttcttcaggattttattttgcatctaattttgccttcataaaacaatttgctaatggagggtttcatgcctatgcagatgatggtggttcttacaatgacaggaaaactcaacttgtttgctagggatggaaccctgattcaccaaacaagttttgctgtagatggcttgggaggagatgatctcattacgtatcatactcactttgttaatatctttggaaaccctgaaaaagcttatcataattgtgtatctgtaagaggagcatctgtatatatactaggacctatgcatcttactgtctgccgtctccttccatggaaggaacgaattcaggttctacggaaagccggtgactggatgggagctttgaacatggcaatgacactttatgatggtcaagcccatggtgttattgaccttcctagaaacctggatgcagtgcaggagaccataatgccctatctgtagagtgctttgtcgta

SEQ ID NO: 7286 - DNA, 603 bp, Gossypium hirsutum
  misc_feature (597)..(598): n is a, c, g, or t
tcttcgatagcagaagcactgcgattaatcttggtaaccaactaccagttttcctaaatatgaagcccgctttaggataccatacatgtttcttatccatcaaactttttaacttattagaatattcttttttttttaaattcacaattaaaaaaaattatgattttaatttagaattgttagttaaaaaatattgaaataaaataaatactgtgataattacatatttataaataattagaatttgtgttaattttaaaatagagttattacttaactagaactggaaaaacagaattattaattcaatagaattttaagcatattaattatcacttaattaatattaaagttaattagttattattttaaataatgttactttgcatgaattaatggaaattttttcatttaggctctttataaagttttttaaattttaaattagtaaaggtaaaattacactttggccccttaataatgataaaaaaattgatttaatcctttaaaaattatacgtttggttcactagaatgaagtagggctgtaatggaataaagctataatatataattcaattgtttggttgaatgtaanngaata

SEQ ID NO: 7287 - DNA, 610 bp, Gossypium hirsutum
tgctctcgagataatctgaggcagcaccggcaagggccttcaaccaaaccggcactagcgtttcagcttctccctgcttcagataatcggcaggaagagcctgcacctggtgaaacagaagaaatttaacaaatacgacagattgaaccaacacagcagctcaaattagatggcctctctcccccacagaaagataataccatttatatatagcatacacggaacagtaggatgcctgatctactggtatttactattccctcaacatatacaactgcctcagatagctaggcctatttttgagtgactgccattgtcttagactactagccacgaaagctgacatttggcatatctatttaagaagaaaagcctagcaaagtcaattcagcattggcacaatggtaagattgttcaatggtgacatggccgtcgtgcgttgaactcacaaaaataatgtcctacttaaacacagcatatccaatgagtggtcttgtcaaccctacattcattttggcatctccatgacatgcatataggagaagccaaaatagaaattgacataacaggatataagtcaaaaggaaaatcaaatcagctgcatatattg

SEQ ID NO: 7288 - DNA, 653 bp, Gossypium hirsutum
  misc_feature (648)..(648): n is a, c, g, or t
gtcagtgctgatgccctttgatttcttgaagacagttagtggcattcattcgagcttgattgactctgcaaatggtcaatcaaggagcatcagcaatgatactcttgctaaattgacaggtgtggtcaattcactgcagcaagagaagcaaaaacggttacaaaaggtgacattttggggatttaatcaatatttttcatgtattggcacattgcatgtctccataagtagatgcccctagatttatatgcttatgcatatgcatgtctaactattgctgcttactcttgcctaatgatcaatataatttttctttccttcacttcaatatttctgctatgatgaatgttttggagttttgagatggaaagatgttgcaatcgtatgtagcaatgagcaaatggttataaaggactagaatcatgaaaaattaattggctttctgctctttggtaaaactaaaatcatgtccagtatttggaaggaacttttgcttatcatgtattgcataaaattttgttccacactaaatcttatttataagtcagaatctcaaggagttgcttacttaataaggtctgagcagttttgtcaaggtgcatactaagatgcactgccagacaacaaaagcacctttgatattttctngctag

SEQ ID NO: 7289 - DNA, 675 bp, Gossypium hirsutum
acatgcatgaaatggccaaaaggatttcgagcctcaaaattgtttagtggtgctatgatcaagcctcgtggcttttgttcaggcatgagatttgtgctttagatttgattaattttatgtgaactttttactcctcgagtctaatttgggcgataaatttttttaatgctttttagtttgactcactcttattagctttagcatatttatctttcaattaatgacaggctgatagcaggaaatggttgacttgttttaggtcttctttcacatgatcgcttatcaataatgtacatctattccaacttttcttctttgttatattagtttttagcttgagaaagtttaaaagaagccttgaaaattaagaatgatatttgaactgtgagtcatgttttgttacaataggaagtcagaagtacaaattggctgcttttgtactgtagacagatatctcagggtatcctaaaagaaaaaagggcattgaaattggattgtaagtagtatgcttcttaatgaaaaagcttggatatccatggttagttgcaggaactactaatgaaattcctttatttttcatgtccaaaatgtttaatgatttcttcaaacgcctttcagttgtacccgatggcgggtctgatggaattttaaggcataggaatttgattataggct

SEQ ID NO: 7290 - DNA, 572 bp, Gossypium hirsutum
ttatgttttttgaatatttgtttttatccgcggtaattttctgtggcaccttggttttgacgatcagtggtcattttcataatacagttgggcccaacaatggtggaatatgagtcggacactgactttttgaaggaattctacattcctgcgtatatatttaatgatgaaacaaaattttctgatgttcgtgatgcacctaagtttccagtgcttgtgtttatcaactccaaaagtggtggtcaattgggtggcgatcttcttaatacatatagaagtgtcctcaatgagcatcaggtacctttactctttcagaatgcatattggatatttgatttattgctaatcttagtgtgattaatttcagattttcgatgtgggggaagaggcccctgataaggtgcttcgcaaagtttacccccgattagaaaagctgaaacaagaaaaagatgaatttgccccgaatattcatgagagattaagaataattgtaagtcgagcctgatactgtacaatcttacaggtctatatatatttttcaggcagttataaataacagcgaccatcactgc

SEQ ID NO: 7291 - DNA, 654 bp, Gossypium hirsutum
tgatatgacaggagtacgcctaaaatcacggtgggcaaaggaatttagatgggttttggagcagaaccgaagcctgaaagaggtaaccttgtcaaaaacctgccttaaagacaagggaatagtgtatgtagcagctggactattcaagaacaggcatttggaacgcttgcacctcgatggaaactggttcagcggtgtgggactcgagcatctgctgtgccctttgagtaggttctctgctttgcaatgccaagccaacattacactaaggtcggtgacatttggaggcagtagaacaaaaataggaagatctggttttgcagccattttgcatatgttaaccaccaatgaaactttgactcggctagctatcgtggatgatcaaagtatgagaccagatgacttttttagaatcttcaagagcttagagaagaatgccagtttgagatgtttgtctttacaaggctgcaaaggagttagaggggagaggttgttgcaggcaataatggagacactgcaaataaatccttggatcgaagatattgatctcgttcgaactccattgcataatatggggaaggcagatgccatttatcatagattgggtcagaaatgggaagcctgaaactgaacctgaaaatgatttgctcaagg

SEQ ID NO: 7292 - DNA, 566 bp, Gossypium hirsutum
tcatgcactcaattgtaagcaatacttttatctaatcccaattcttaaaaccttctcaaacattactattttaaaagttacaataatctactaatcctccctggattatattaccaaacttcaataagatactggaaaacacaagaaagcaaacataaaactaaaacccaaaaatatgttattttaaaagagtaattgcttatctaatttagtcctcaaccgactacaataaatcagtgcaaaaaggagattaactgatttgctaggggcaatataaaccagtatttgggtaaaattaagcgatgttcagaaaagcaagctaaatcagacagtatttcaactttgttttaggtgccatattccaaatttgtactaaccaaaaaaaaaaccttgagtggtaaagaatcatatcatcatgaatcgacagaagaaaaagaaaaaaaagaggatggagtctactccccacaaaagaaaggaaataagaaaaaaggaatcttatcagttcagagtcatacaaatcaaattctaaccgttcaaatttgattctgatgagaacccaataaagt

SEQ ID NO: 7293 - DNA, 629 bp, Gossypium hirsutum
ttgcatcaaaatcttcaattaacaacgaaaaatctttgaaagtttgaatgttattctagttgctatgtatgatcttgacaaatagcaataggcttggaactgcaaattttccctgaaaatcccaagtttccaatttgaacaaagctggtcaatgctagcgatgggggggtttgcagatccttgtaggaccccaaaaagacaaaagttaatcaaaaatctttgcttattaccacaatcatagcataaacgcacaagcctctgctgcactaacataaaaacatgattgctaagatgcttttaatatttgattgaaatgttggcaccttttacttttcataaagaaatattaaactaataaacttgtcttcatgttattttgcatggtcacattaccaaacagcagcataatcaatccccatggttttcatagtttcttttatgcaatattattagtcaatagggttttcatcggtaaatgcgaccccagaagcatcatgaaagccaatttactcaaaaattaataaattattctctatatattaaattaaagaataaattaatttttttaatttcattatctttactattaaaaactgataaactaacgaactaaagacaattacacatgg

SEQ ID NO: 7294 - DNA, 676 bp, Gossypium hirsutum
ttttatttatccggagtaagcatgaagctcaatgtaaaacttgagcaacaatgtaataaatccggataaagaatgaaggaagattgagtttcaaaaggctcgatatttgcacgataaacaaacaaattttacttggtaaaaaaaagtaaaaattgagagagtatttttcttgaataatttctattgaaattcattaattaaagaagatgtcatactgccaatacatatatcagtcataagctagtcagctttaacatatttactatttttagacttacttgtaccgcttgcacattgcaatttgcaaattaacttgcacaattaagtaagctgatctatcaatcttattagcacccaattagattaaatacaatacctacttagttataatttaactaagttacaaaatattagttaaagtaacaaaatgaaaatgaaattgaacagtagcatcaacttcagtagctacatgtatatcatccggaaatactacagcagcttgatcttcatacttcatccacataacttggactgtatgtattttatgtgcagtaagtgcggcttgatctgcttcttcatacttcatccgcataatttatgttgcatggtttgctccttggttgctttatctgctgcatgcatgccaacttcaacacaggataatgatggatactcg

SEQ ID NO: 7295 - DNA, 680 bp, Gossypium hirsutum
caagagtttggcaatggcacccccttcccggcccctacatactacagagtgaattttccattaagagcaaattggcatgaaatgatatgttgcatatgcttccatcagactgacaacatattaaactttgaaaattttcatgtagccttaggcagcctctgttgtagcagagtgtgagtaaaggagccatgatataccaagttccccccccccaccccaacaagaatataccctcgtgaatttcatgtgcttagggacccgcaatggccaccttccccaatccattctgacagcatgaaaacctagtaggggccggcccgtcaataccggaaatcttatttgtagaatagggcagacaagcagagtgcatgcatacaaagaaatacccaagtatggcgtagtcaatagaaacaagacagggttataattacaaaccatggagcagaaagtagagaccgtgaactgtctttgtgaagacagttatcattggatcttgtaaaggggggttgtgaaagaaaaaggtggagtatatgcggttgcagtgtgtagactggggagattattaccagatatgtgcgcaaatctacacttccttttcttactatttttaactcaactttttttttagaaaccaaaatagaaaggcagaagttaaaccccaaaatacaaagcacacagac

SEQ ID NO: 7296 - DNA, 650 bp, Gossypium hirsutum
tgttagatcttgatggcctttgagtcgctggttgtcatcgttttctggattttacatcaaatatgacagcagagctttgggctcttcgcgacggtttatcattagcatcatctcttaatgttgattctttaattgttgaagtggatgctacagcatttttttctctgatttctgttgacgcacaaaactttcactcaaatctttggttgtggattgcaggactctatcggcgaccttccacatcggttggtccatgttttcagagagagcaatcgttttgcagacgcattggcacgcaaaggcagcaacccaacttttctccaaaatttattctctcgggactaatcgcttgcctttgttatatttactttgaacttcctagttttatgcttagttttattaatgccggtaaggcaggacttgctatgtaccggacttgttcctgaacttcttttatgaatgaatgttcctttatttaccaaaagaaaaagcacaatggaccgagagatagtaacttactttctgagttcggtcaatatacattagaagcattaataattcatgtattaggttcagtttttaaacctaatggttattccccaaggattcgtgttgcaacttaaggtttaaaaaacagacttctatggcca

SEQ ID NO: 7297 - DNA, 669 bp, Gossypium hirsutum
ttgtttggtttgaaggaaaacgagggaaaagatacaaagaggggaaggaaacaaaggccaaagggagggaatttgtgttcaagaatttaattagagcagtaggatttagtgggtaaacaatttactccaaatgctaaattgaaattatgtcaataaataaatttctttaagaaaataataaaaaaatggtttgaatcggcaattcgcgccttttgttaatgggtaaagtggcgattatttagcgtgcatacccaaaattaggagctacattgttagggcaccatttcatttatggtacgaaattcaaatattaaaaaatatcgattgtttttattcgatcttaattcaaatcacaagtttttattttatttttagtttgttggtaatcatttattttaatatttttattatattatactttttaaatttatttttatataaaataaattaaaaaatttatacgacctagccgaatcaagcacgagtttatcatttttaatatggatcgaatttgaacaaaattataaactcatttttttggattgaattaaacttaagaagtgagcttaaaattttacattgactcgccgatgataaggtctactattaaagtaatctgagggtagaattagagtttagatggctttagttgtgtgacaatttagccat

SEQ ID NO: 7298 - DNA, 673 bp, Gossypium hirsutum
ttccatatgaagagcagcatagtatcagatgaaaaaagttgaaagatgcatgcattaaacacacaggtcactcctgtttttagaatttgtactctcacagatattagatgtgttgatacaggaagtaatggtgggcatcagaggtggttcacacccaacgttgcgagttgagagtcattaatgatcaaagtacggatttaagattttactctaaaaaggtaacatttaagattttactctaaaaaggtaacatttctaaatccgaatgacctttttttaaaatgtaaaaatgtttcaattcttctcgaatatttatttttttatcagataaattaatttaatgttttttaaaaagcatgaataatttaactataaaatttttaaaaaaaatcacactatataaaattatatatttctttccaatatgcaaaatagaataattaatactatactaaaaatttcataaaattcattataatttcaaaaattaaattaaaaaaaaatagccttagtcctatttctcaatactaagcatcttaaattgcacctatcgcttttttataatatcgaactcatcaatgatagaatttgttaaaaattttcaagttatctcttttttgatgtatgccaccaagcaaattgaaagaaaatcattctccattctattgcgaaa

SEQ ID NO: 7299 - DNA, 474 bp, Gossypium hirsutum
aatccaccacccattgccgccgttgccatttcctttcaccccaaacaaagctttttcagtggtattcgttgtggcatttgaaacttctagaaggcaaaaaggatatttggagtttattaaaatatgccctacacctttatctaatttgaaatccgaataagaaataaaaaaacgcagcgttttctgcgggcctgcggccctgtttaaaatcatagtcgataaaaggcttattacaaaaattagccctcatattataccctttttcatatttatgtacttacaatttttaaaaataatttgaaatctaaattatcaatttcgttttattttactttaaaaattataatatcctattaaaaaaaaagtgtcacatgccatgaaaggcattttattgaagatagaaaattattcgacatgtttgccaaactattaataatgtgaaactaactaatgacatctaagacacggtctcat

SEQ ID NO: 7300 - DNA, 475 bp, Gossypium hirsutum
tttattttttatttttattgttttctgaaagggaatgtgtgatcgtagagtggagagagtttttagtagtggaaaaagagcgagcgggcgagcgggcgagcgagcgagaaaagaactagatgcttagaaacaaaagggtgagctgagccagccaatgagatcgagaagcttttgcacgtgcgattgtgaccttccgtacgtgtcaaccgacgcttccttctttctagaaccgaccgtgagtgaacccagctatgcttaaaaaaagtcttttgcgcacgctgcgctttttcgagaatttctttttttttcttttttctttttttgccgaagcttgtcacgtattgaatatatataatcaacacatacaccaattttctttttaatatgaactcataaacacaacttcttaggcaaattaaatgaaactttttatcatttctataagaggttaatctgtataatttttaataaatga

SEQ ID NO: 7301 - DNA, 632 bp, Gossypium hirsutum
  misc_feature (543)..(547): n is a, c, g, or t
  misc_feature (571)..(571): n is a, c, g, or t
  misc_feature (588)..(588): n is a, c, g, or t
  misc_feature (596)..(600): n is a, c, g, or t
  misc_feature (608)..(611): n is a, c, g, or t
tttgtcccttccaccaccttacctatatttcctgcttaacgtaatcattataggatactccatctatacgtttgattatttatttgtattaaattataaattaaaattttaaaaattaaatatattttaagtagaattttcaaatttaagttggtaatcaaattgattaggccactgactcatacgatttgattaaatgaatcatcaaaagatattaaaaaaatcagttcaattaattttttagtttggtttaacctacttatacgggttctcgggtcaaccaatctgattcctctctccagatcgatactcgatcggttaggtccggttcaaacaaccattactctaactttctacacttcgtacgtttggaatttagtcctccaacttttattttcaagaatttaatctctttattttatggatttaaaaatttgttttcaaattatttataaccacgtaatattttaattgaatagttaaaatattaattatttgaactagttaataaaattataaaaatatagagaccaaattatgttnnnnnttagaatataatgattaaatatcnaatttaagtatattagnagaattannnnngaaaatannnnatttttataaaatgaaaaaaa

SEQ ID NO: 7302 - DNA, 451 bp, Gossypium hirsutum
ttgggaaccgcatgaatgttggcaccaaccgtggtgatgcgcatgccttcaagctcgacacactcttaaaacttgttgatgtgaagggcacggatgggaaaaccacacttctgcattttgttgtgcaggaaatcatcagagcggaaggttcacacctttctggtgccaatcaaaatccaaaagctgagaaaactcagcagtctgattttcaggatgatgttgaaataaggaagctgggtctgctagtagtttccggtctaagtggggagctaaccaatgtgaaaaaggctgctgcgatggattccgatgttctcagtatcgatgttgcaaaacttgctactggtatctctaaaatcagagaagttataaaactcaatgaagggattgctctgaaagacaatagctgcaaattctcggagtcgatgaatgagttcctgaagaaggcagagga

SEQ ID NO: 7303 - DNA, 671 bp, Gossypium hirsutum
taatcattcttcatgtaggcacgcaaaaccgaaacctgaattatagaacaacacaaacaattcacaaaccgtacaatcccgatcacagaacaatagcaatccaattcagtatgactaacgattcaattatataaatacaaaagctacatgcatacattcaaaccgacgaatcgtatttcgttcctattagactatccctatcgaataaggtttcctataagtaaccatttgcgtttaaatttccattcctcatactgaactgatccaatgacaaccctccattcaaagtacataatcatgaaaatcatggaacaatagcaatccaattcagtatgattaacgattcgattatataaacacaaaagctatatgtatacattcaaaccgatgagtcgtatttcattcctattagactatccctatcgaataaggattcatataagtaaccatttgcgttcctcataccgaaccaatccaatgacaaccctccattcaaaatacataatcaagaaaatcaatgaacaatagcaatccaattcagtatgactaacgattcgattatataaacacaaagctatatatatatagattcaaaccgacgaatcgtattttgttcctattagactatcccctaccgaataaggtttcctataaacaaccactcgcattcc

SEQ ID NO: 7304 - DNA, 382 bp, Gossypium hirsutum
  misc_feature (275)..(280): n is a, c, g, or t
  misc_feature (303)..(304): n is a, c, g, or t
  misc_feature (329)..(330): n is a, c, g, or t
  misc_feature (332)..(340): n is a, c, g, or t
  misc_feature (348)..(348): n is a, c, g, or t
  misc_feature (351)..(359): n is a, c, g, or t
  misc_feature (361)..(364): n is a, c, g, or t
atattttgtttgagctccacttgcaattccctatgatccatgaccagtgagaacttaaaaatgaagcatccaatggttctcaccatatatgacaaaccatttttttccatgacattagattttgacaagacagtattatagggaaatgaaaaattattcgacgccagcaagacagctgcttccatctactttttttttaatcaagctgaaaacgtatactggaagactcaagtccactgtagatctactaaagagtcaattatggcagctaaaannnnnntgaattggagtcatgctgggggnntcatgtcaaacaaatgtctctgcannannnnnnnnnttggtgcntannnnnnnnnannnnaagatcaaacttacaaaa

SEQ ID NO: 7305 - DNA, 680 bp, Gossypium hirsutum
attgatgtatcaagcaacgcaaaatgtgtaaatttgaagaaaattggagaacaagtaaacacctaccaaaggagtgggctaccaactccagctccaaaatatctaccgactcaataattaaaaaaaatacaaattaagcttaaccaagcatgttaaaaaagtgaacagtttctacctggatgccattaggggagttggccgccgtgaggacacggacttgctcccccgtctccggcactagtttctgctcgaaaattcgaacagaggcgagcctgggggcagttcttagaagcgatagtttgaaggcatttttgtccatgggacaatgcaaaaaaaggtctgaattggggtaccgtttaagaaccttctccaggatggaaggtcccgtcagctcgaacctcctggctccaccaaccaagcaaaccgcaatcctcgacctgtccaacgaccgaacagcgttggccgagtggggatgtaaacttataaaatccgacaagttgctgaagataaaggagcggagcgagacgacagaattgagatgcgtagaagttaaggaagaaacaaaaaacagaaacgaaaggggaacgacgactaagaagagaagacgccaatcaagctcagaccattttttaataaacatgttgaccttttgtggcttctttatcatctctccttaatcc

SEQ ID NO: 7306 - DNA, 656 bp, Gossypium hirsutum
actagacggacacgtttacgtccaacaactgtttgctgattacttgttgatttagacaaactttttggagaagtttcatctggctccttagaaatattgttatttgctgtgtcagttgttttatctttgggtgattttttgctgggtcggataagtgatattagaggtaaatcatcatttgactctccactagctgctaaaggcactgatccattagaaccggatttacgcaaaacctccaagcatgcactagacatgtcatctgaacaatgatcatctccttctgtgtctgtttcagagcagcaatctgttgcgatatgtttttcatcaagctcctccacttttgactgcttcagtttgtcaatttcaagctgcaacctcctaataaaatcggttttcatcagcaataataaaaagtccaatgttggcaatatcacatatattaaaccctcaaaaacttgaaggtcaacaagttatctttagaactttagaaacttcaatttatattttagcatgtcataaaagttaaaagcaagcagctaccttatcagggctcatgtaaacaaatttacctggcctcttcaacattgtcaaatcttatcatgtggctatagtgcatattctctagtgcagaaagctgaatggaaggaagttta

SEQ ID NO: 7307 - DNA, 638 bp, Gossypium hirsutum
atcgtgagaaatgctttggggcccgatgttgattttgagttaataagcacaagccaccctacgatgactacaccaatattgcagagttacacaattacagaacctcctcgagagatcaaatctccaaagaaagtggcatgtcatcccctcccatacctttacacgatctacatgtgccattatgatacctatgagaccaagatttttaaagttgcactcgttggtgacaatggcgataaagtggatgctctcattgtttgccatatagatacctcagcttggagccctaaacatgttgcgtttagcttgctcggtactaagcctggtatccctgtttgccatacttttactgaaggtcatggtgtttggattcagggctccactattgcagccatttaagacgtagctttacttggattcaggcctccactattgtggccatttaagacgtagcttttgccgtcacattcacaactcaaaccacccttgtgtctctctagtatataataaatgcttccaatgtaataaattgaaggatgcgaggctttttatgcttttaagtttcaagtgactcaatcaccattgtgtctgtagtagataataactgtttccaatgtaagaaattgaaggatgtgaag

SEQ ID NO: 7308 - DNA, 594 bp, Gossypium hirsutum
gcgattgagtcgcagtgacatacttgggtgtaaccatatttgtttttcaaacctgtaaaagctccattgatcatgggaaattccatggggaaattattagcccctatcaggtttctctccttcacagctccggtgcgcacgttcaatctccattcatacggtcgatgaaacaataactggtcttctgaaatggcatcttcaaatggtttaccaggggcaggcttaaattttgttggaaaccacgcaaattcttttgaacccggatcaggtcctggtatggctgatgcaagagctctacacccccatacaacaacctatacatatatacacatataaagctctctcaaatttcaaatataggtgaatcctacaacatatagcataaccaattaagttacctcatcaccatcctcaaagcaattgaaaatgtgaaaagtgcaattaggtttcactttaaaccagtggattgaaccagcatctccatagcaaggcattataccaattcttgcatttccttcactttcatattttattaacctatgaataagtaaaagaaatgttcttgttaaacccctccccccaaaaaaaaagaaa

SEQ ID NO: 7309 - DNA, 631 bp, Gossypium hirsutum
gtggagtttcgaaatctttgacccttagcttcttctttaaatttttcctttgggtttcacatcaaattgagggaaagaaatccattaaggaaagtgtatcattatcagatttgtcagctataaagtcattccaccgcccaccactagttgcaagtcaggactatgaaatcaggaaacatggaacatctgtaggttcacctgaggttcatctatcatccaggcttcaggtatgcaaattcacaagctatacttcttactactgggtttgtagtttcaaggttatttaaaccaattttaagtggagagttcaaaatgaagggttctggttatattttcttttagaattatgctagtttctgatgttttgttactgatcacatatgtgtaccctgctgttgatgcttgcattcttaaacctatgtgtatgaaatttttttcttgtattggatgatggctgacaaaatcaaattttactgttccaagctctatttggttcctgtgctctctttatgttttttgtattaggccacctggacacatcattagcaacagattgcatagtactctctcctgctgttaacagatattgaataagtgcttttgattcttacttttcaccgagttttatctc

SEQ ID NO: 7310 - DNA, 629 bp, Gossypium hirsutum
agggttccagtcggtcattttttaaggcaattctttgacggtgatccaaaaactcctctctcctcagcctgatgcattgattttaggtccttacatcagcgacattaacaccatggttgtgcagcttcgcgggtgtcacattgtgcatattcctcgcatcacaaatcaggtggcacatctgttggcatctgcgcatctcatggatagaggttctgtttaccggtcattggcagagcctctctttattttggcggcggtgtaccataacaggggtgctttctaatcggatatgcgcggaagctgatgagtcattgcagagatctgttttgaggaggtttgggaggtgagggagctccataggttcgtgggttttacgggattgggttggattttggtcttctttgttggagcacaggttctcgttcattgtttgttcacttcttggatgtcatagctggttttctggacttctgtggtcatcggaattattcttctcgtttcatcagtgacggcatcccttcagaatatgcttttctttttggagggtttggatgacaactcgttttagggtttcgaatgttgatcttgcttttgtttttggagctgttatattctgggcttgtatttgg

SEQ ID NO: 7311 - DNA, 604 bp, Gossypium hirsutum
tatgcaagcacccgtttgccaatgaaccttgacgagtttcacttgggagactgttttttaattaacatgacatacggagagggcgccatgttcttcagaagaatcagtcccaagtactaacaccattttgcaactcagccaatagagatttcatcaactcttgtggccaccatattcggacagacaggagggatcgtcttacggcagacatgacacctaaatccaataatcttgcttttgttccctgaattaagcccataagcatctccatgaaaccattctgcataaattaatttaaaggaatattatgaaaaagtataaaggaggaaattttttcaagcatcagtagtcgatgtctataataataggcagtcgcctacagtgaactgatataaaaatgctgaaaactaattacctccacaaatttcacatgcaatatagcttgaattagatgcatatcctgattcacaacaaagaaaacatctgggtggatcaggggagacaatcttatgctcggaaggatcaaaaaccatttttctttgaaattgcatcacccgctcatcatttggcttactagacaaccgaagaccattaagccagaaac

SEQ ID NO: 7312 - DNA, 647 bp, Gossypium hirsutum
tccaaagctccaaagtcggaagagaaattaaagattagtgttaattaattcacgtgtgttaaccttgaattggcgggaaagtggatcacgtagatgagtttgttgttgacggcgctagaaacgggaaaggatctacagtgtcaagttgggatggtgtcggtataatttttgcaaattttataatgattagtattaatattatattatgaagcaatgggtaaagaaggcaggcaggcaggcaaggtctgatagcgaggaatctgattcctttggaaaatcaatatagtttgcaaaactttagccaagaatgatagcaacacccatcataatttacacctcggaagcttatattctttgccatatatatttcttcaagcacgtaggtttgttaggtttgatcataacttaaccaaataattaagattcttaattaggccaattcatcactagatcctattctaaaggaaatctcttatcgacccaaaattggccaaaacaattatatatatatatgcatagcagttgattttagctactgggattttcattgcggaagtcaagaaaaaaaacaggattttcacattaccagcaacagaaatccaacatgtttgcaaagcaagaccgaaattatatgcaaggaaagtagt

SEQ ID NO: 7313 - DNA, 671 bp, Gossypium hirsutum
  misc_feature (665)..(666): n is a, c, g, or t
gtaaagttgattgcacagttgcagaaaattggtagtgagctaaagaattaagaggcatagcagacatttgaccttctagtactttagggatcaagccagtctgagctttctgatgtagagtttgtgctattggctgcttactatgctgaccatcttgtatagaaatctctgctagttgaccaggaggctgttgaatgtttggcatctgcaactgtaaatacaacaatatatatattatacattatatgaactttatatgaacaagctaacaaaacttttttgagacaatgaaacgaaccacttctttggtgaccattcctagcattatttgtgcctgaaaagcaaagtgaaagatgtaagaccagatctatatttttccttacagataaaagtgtcttaaagttaagggtgtaaaacttggcaaagacaaataatacctttttattttgattgactttctaacaaatgccttttgttgttaaaaaagttaataatttctcaattaattctgctacaaactgagtctaaaacaaagggcacaaatcaaagactatggggctaaattaatattattcaattttttatatattaaatcataattttattaagaaaactacttcaattttctaacctttacatttaataattcaaccaaatgcagactnnttatc

SEQ ID NO: 7314 - DNA, 653 bp, Gossypium hirsutum
  misc_feature (323)..(323): n is a, c, g, or t
  misc_feature (376)..(377): n is a, c, g, or t
  misc_feature (381)..(382): n is a, c, g, or t
  misc_feature (395)..(405): n is a, c, g, or t
  misc_feature (431)..(441): n is a, c, g, or t
  misc_feature (446)..(446): n is a, c, g, or t
  misc_feature (448)..(455): n is a, c, g, or t
  misc_feature (476)..(476): n is a, c, g, or t
  misc_feature (478)..(484): n is a, c, g, or t
  misc_feature (488)..(491): n is a, c, g, or t
  misc_feature (504)..(510): n is a, c, g, or t
  misc_feature (522)..(524): n is a, c, g, or t
  misc_feature (534)..(540): n is a, c, g, or t
  misc_feature (573)..(577): n is a, c, g, or t
  misc_feature (582)..(593): n is a, c, g, or t
  misc_feature (598)..(608): n is a, c, g, or t
  misc_feature (611)..(612): n is a, c, g, or t
  misc_feature (615)..(623): n is a, c, g, or t
  misc_feature (632)..(632): n is a, c, g, or t
  misc_feature (634)..(637): n is a, c, g, or t
  misc_feature (641)..(648): n is a, c, g, or t
aaaattcaggcccaaactgcatgtacatttcctgaccataaacaattaattatttatagtagcttgcctcttgctttccttttatgatcctagaggattagggagctcaagtgtattgtctatctacatcaaagaagaagaaatagactgcaaaacgtataaggtgttgtatggatatgtgattaggaactttagtagcataattcagaaagtcctctttcaccttactcattcccagaacaattagctgtccagcaagccattctcatatttcttatttaaacataaaaaaaaaaaaaaaaaaaaaaaaaaacccaaaaccnaaaaaaaacacaaaaaaaaaaaaaaaaaaaacccaaaggggggggaaaaaatnnttannttttttttgggtnnnnnnnnnnncaaaaaaaaaaaaacccggggggggnnnnnnnnnnnccccncnnnnnnnngaaaaaaaaaaaaaaagggtntnnnnnnnaaannnnaaccccccccccnnnnnnngtttttttaaannntttttttttnnnnnnnccccccccccccaaaaaaaaaaaaaaaaaaaannnnnggggnnnnnnnnnnnnttttnnnnnnnnnnnggnnttnnnnnnnnntctcctctncnnnncttnnnnnnnnctctc

SEQ ID NO: 7315 - DNA, 624 bp, Gossypium hirsutum
gtagtccatacagaacctgcacgaccaaatgttaatccataagaccaacctgcacagcaacatgctaatccataggctcaaactgcatggccaaatgctaatccacacggccaaactgctcagccaatgctaatgcatatggccaacctgtacagctaagtgctaatccatatgcccaacctacatagtcaagttagaataatggatatggcaaatttgcctcccacagtgtctgtggccccccaaattcccggggtctgctgcacaggctcctgtcagttcacaaatggctgctcaacctcaaaaccctgccgtaccagctgctcagcttaacactggaaacgttttttatggctggatctgctgtgccagttggttctccctctgctcctcaaaccacaaatgaatcaggtgcacatagtaacaacaatgtcctgggaggcttcttttcactacctggatcatacacttcaatggcacaacagacggctcctcccttgtcaacagcagcacctgttatagttcccaactctcagaggataaatttcagcccaagtcaactgtttgggctgatacactgagcagtggactggtcaatttaaacatatctggaggtaagtacta

SEQ ID NO: 7316 - DNA, 605 bp, Gossypium hirsutum
  misc_feature (517)..(525): n is a, c, g, or t
  misc_feature (529)..(552): n is a, c, g, or t
  misc_feature (554)..(568): n is a, c, g, or t
  misc_feature (570)..(587): n is a, c, g, or t
  misc_feature (589)..(592): n is a, c, g, or t
tctctgagttaaaaaggcttgtgctaatatcttgcactgtgcaataaataaatgaccttaaaaatgaaaaacgaggttatataactaaaacatgcatatgggtgtgtatgacttgccactgatcaaccagttaaaggatttatggttgaagaggtgatgggacatgcaatattaaattggaatgaaaactaatttggtatgtcaagatttttttttcttttggtctttctctaaatcattcaatatgcaaaaaacattcttaatttgtttggtcctaccatattttttgtttataatattaaattggaatgaaaacaaatttggtttgtcaacaaaagttcttttatgttcggtcattccctatatgattcataaatgcagagagcattcttaaatcttttggtcctaccatacttcgtgtatattattgatatacactgcttaccttgctctttatactgaattattattgtaaacggtgcttcatttatttgctttggttcttatgcttgatatnnnnnnnnnctcnnnnnnnnnnnnnnnnnnnnnnnncnnnnnnnnnnnnnnntnnnnnnnnnnnnnnnnnntnnnncctctgattcttc

SEQ ID NO: 7317 - DNA, 670 bp, Gossypium hirsutum
gaactcgagtccaaatgaagtcctgtttctatgcagcttctacttgattgaaaaagtcttgcttttcttttcttaaatcactctccttgttaccagttagtgtaattttctcatgtctaattttgaggaacgtacttataacttatttcatcttgttctacatcaatagcaactcttgtgacagacagaacaaatagagaaaatggcttgatccctcggttaatgtttttagaaaccaacagagcttcttgtgcaggaaattagggtggccgagagcttccgtttattttcaactatttctacttccaaaagtgatatctctcacggaatagaaggtctgttaatgctttcttattctccattctaaaacttgctggttgattttttcgtttttttcctttttactgtttatttttctgagtgaacttcaatttctcagttgtttatgtgctgagctctgtgttccgttggagtgttgctccttggttacttttaccagttttctaagggtacctgacattatctctggagagatctttgtagtttgatcttggttaaagttgaaggaatacttctagtattcaatcttctaaaaccaggtgcttcattgtgtattttgtgttttcatggtttctttttctccttttcttgttacaatatgctgctggag

SEQ ID NO: 7318 - DNA, 524 bp, Gossypium hirsutum
ctggtgatgccgttatggcgcggtggttacagtctgctggattgcagcatttggcctctcccctggcttctactggtatcgaccaacgcctccttcccaatctcctcatgcaggtaacggaggctttgcttttgatttccgtatatttatttatatcttctgttattttcgattattgacttttcattgctctattcagattcatgcaatttgaattgggttaatttgtatatttaattgccgtgaatttactcattttaatgaattatttagtgaaatagcctttgcgttttcaacggaaatgttgttgacatctgtacattgttcttgatgtgtcctttttgccatttatactccatgccgagtggatgggggtgcgtactttttcatttgcttgaagttatgaaattcgcttttagtattgacaattaggttgatgggctttttaagaaagttggagttcaggattaattgatcattctgatgttttttcgtattgtttctcatgaggttttttcccttgc

SEQ ID NO: 7319 - DNA, 686 bp, Gossypium hirsutum
  misc_feature (450)..(450): n is a, c, g, or t
  misc_feature (467)..(467): n is a, c, g, or t
  misc_feature (536)..(536): n is a, c, g, or t
  misc_feature (552)..(552): n is a, c, g, or t
  misc_feature (590)..(596): n is a, c, g, or t
  misc_feature (599)..(655): n is a, c, g, or t
  misc_feature (657)..(657): n is a, c, g, or t
  misc_feature (659)..(681): n is a, c, g, or t
ttgatcctactggatgggaacttgcccttgtcactacaccaagcactgatatttctgcaccaactgaaagacaattggtatgccctttctgatcacttctcatgtatttcttttgcctgagactatgttgtttcaactaaagtatccaagtccgatacatattcatacatgactcttaaggatatgacaccttcaaaggtctgtacattggacttggatgattggaggtgggggatatggacgaaatcttaccaaatataaatgtgtacctgtaagaaatggagatctgctaattctggaccttttttttttttggaaaaaggggtttttttttttgggtttaaattttgggggaatttaaaaaattttttttccccccccattttaatttaattttttttggcccccccctttaaaaaaaattcactggaaaaaaaaaaaaaatcccanacccggggggggggaanatttgggttttttccttggggcccgggggaaaaaaattaaattttcaaaagggttttttttaaaaaaangggggggggggggganggccccccccccccccccaattttaaaaaaaaaaaaannnnnnnaannnnnnnnnnnnnnnnnnnnnnnnnnnnnnnnnnnnnnnnnnnnnnnnnnnnnnnnntntnnnnnnnnnnnnnnnnnnnnnnnggggg

SEQ ID NO: 7320 - DNA, 663 bp, Gossypium hirsutum
gcgcacgtggattttgctttccttgaatctttttaattttttatcaatattttccttcgacctttaattttttaccacttgctaattagcttcattttggtattttttttgttttggtatttgaatttgataattaaatttattttgatttttaaatttgattttgtcaaaatttaataatataatcagtgtatttgaaacacgattagattagttagtcagattaattaaattaagtatagattaatatattgatccaaataaaaggattaaattaaaaactgtttaaaaccatacaaattaaaaattggaataaaaatttatagttaaacaaattgaactgatttaatatttttttataaaattttaattatttatttaattgttgtcggtctaatagttgaacagatcaaacagattaaatcatgaattactagtctaattaattcaatcgctaatctaattattaaaatattatatgtgatgctctaatattatatcatgtccaaaaattatttatataatttaagaactaaaaattctattataaaaataatgagaaagattattctctccttaataaatacttttatttaacgaacagttgggttacaaacaatacaagcagggaggcttggatccactgtccaatggaccgaatac

SEQ ID NO: 7321 - DNA, 574 bp, Gossypium hirsutum
acccttttgctcttcagatgtaatgtgagttccattttttttttcttttatgaccttctttagttactcacaaaatatgactacttaacggttttgtagttataactggataatttctttattaactttttcaaatgcttgttgattagttgattgttgttgtttatttacttccttgtaggttacaagggcagattatctaagtggaagaactgctctccatttttctgctgtaaatggacatgtacggtgcataacacttcttgtagctgattttgttcctaatgctccttttgaagctatgaacaaccaaattgaaggtgaaaagggggacggttgtactgtgagaaacaaaaatgatcaaaggtgtgtgttttattaattcctgaacaaccatgttttctggctggctctgatttgaattaaatggagaagtaggtctgggatctattgcatgtaatattgtaaaaaaagattaatcaggaaggaaaaattcatttccagcaaaagcttacttttgggatgagaaaagaatttattctcataataggcatatttctctctagtgatttca

SEQ ID NO: 7322 - DNA, 735 bp, Gossypium hirsutum
  misc_feature (689)..(693): n is a, c, g, or t
  misc_feature (697)..(697): n is a, c, g, or t
  misc_feature (699)..(701): n is a, c, g, or t
  misc_feature (703)..(706): n is a, c, g, or t
  misc_feature (708)..(720): n is a, c, g, or t
  misc_feature (722)..(728): n is a, c, g, or t
cctaatattgaatgcaaacggtaccttttatatttagcttcagctaacataacaattaacacaactaaggcctaagatgcagaatttattctgaaatggctttatacaggggaaagaaatttctgtagcaacacaagcttgatcatctaaaaggtagatttcattcatgtagaaatacaggacaaagcaatctctggttcattctatgtcaaaagttagtagagatatggggattggccctcggaatggtaataggaacaggcaattcagtttctttccgataagctgctggctattttatgtatgcttccgttatgcatgtttgaggcttgcttaacaaacccaactgagaatgtctcatattctttctttagcattagctaaatgcaggtgtgaatttggataactgtagatattcggtttaccttttacaaaattgaacattgcagatttagataatattcatatctggatattatcactactttcttcgacatcatccgattccattatacttttgtggataaaggttctgatacttgaacatattgtttgaatccattttacttttatagataatagctttgaatctcttttattttatttaaaattgtatatattttttaaaattttctaattaaattcagttgaaatttgaagttgaagcctctactcaagattaaagtgcnnnnntaantnnncnnnnannnnnnnnnnnnncnnnnnnntttttcc

SEQ ID NO: 7323 - DNA, 437 bp, Gossypium hirsutum
acaaagtaagatggaagaatcatcagaagaatagaaacatagaatctaaaagtcaaatggcagctgatctgaagcaaattatgaggaccttcgaagagatctagaagcaaaaggcgatgggaaaattacttcgtcaaccagattacagatcaagctaggcgagaagtacaaacaacttgaaacttcattacaggactgcaaggcaactattgaagtctcggaaaggaagatgcaagaaatggctggagagcacaattaagaacattcaatccaaccatcaaatagtagctgatttggagcaaattattgaagacttgaaaagagatttagaaataaaaggtgatgatctgagtactttaggcgagaacgttcacacaattgaagttaagctctgcttgtcaaaccaaaagcttcaagtcacagaacatctgttcacg

SEQ ID NO: 7324 - DNA, 573 bp, Gossypium hirsutum
ttattgaaaacttttaatggaaaacattgagagattattagcttttcttgttcttttggttaaaggaaagtgctttcacaaaataaggcgatttctaatcatattcttatggttttcttagttcttcttgattatgaaatggaatgtatctttgcatttacactattttacccgaactgttttactatctttcaaatatatgggaaaactttaaaagaaacgagcacatacacatgttggatgcatacctgtatcctacactcgtgatgtagcaatcacttaacatgtgtttctttgctctgcttgttgaggattctgtatttaataagttgttccctcttgaaactgtttgttttgaatttatcgtaagatacttgcactctatctgtacatactgtcatccttgtgcatatgcacattaacctaatcatatagaacttcctcttaacatgctaattgtgtttttaggatcaatatcaatgtctgaatttctgtttctttgccttcgttttgttccgtgtataaatctttagttggaaacctcatgcatacattcccatagttggagcattt

SEQ ID NO: 7325 - DNA, 675 bp, Gossypium hirsutum
caggaactaaagatcatctgaagacatgtaactcagcctataacacctataatctcattctatggaagagaaaatattctacattaaaaggctattctgattcctgtcaatgctgtatatcacatactgctgaatcgacctaaaaccaaattttctgcaacagtcatagctaataaagttcattactcggaccaagttgacatcaaaaaagattcatgtacaaaagccgagaaagaggtcatgtacaaaagccgaaaaagaggttaagtagagagaaaagatggaatacctgttcatgttccctatcagaaagacgattcctttggaggtcagccatcacctgaagatattaagtccgacccttgcttagaacaacagctaactcctagaaaatatcgaaagaataatccccgtatccgccccatataaaacctttcctcgagtctcctaccagaatgcagttcatactattccattatgagaaagcctcaagtgacagtatcctcatgagaataacctatctcaaaaatactgagttagagacactatcattttccaaaagcattgtaataaattgtaaaaatcccgaaccacaacatctattcatttggtcttacctgcatttgaagcaatcacatcaaaagaaacaaataaatcggatgcaatctctaacct

SEQ ID NO: 7326 - DNA, 222 bp, Gossypium hirsutum
  misc_feature (214)..(214): n is a, c, g, or t
  misc_feature (219)..(219): n is a, c, g, or t
ctcaaatttcttgaatttttgttatactatatgtattatttttaaatttgttaaataaaaagaatatttaagtttattaaaataaaattcttaaagttgagtttacaattgagaaattcttaattaattagttaatagctagtaaaacgttaatatcataagaggctaactatagtttatttaatgagttattatacatgaaaacaccgaccgnaatanaat

SEQ ID NO: 7327 - DNA, 610 bp, Gossypium hirsutum
caggcattgaagaggccatttttgttcagagatttcgaaacaaatgaagcagatgaaacaaagttctttatctgaatagttgtgggtgaagaaaacaaagcacggtattgaggtttatataggcattggagcagtgaatagaaatcccctggccctaaacaatgccccatgcatgcccccaaaccaaaatagcgccacatgttttttatttttttccattttagttgtagttcattttttaaataaaaatttataatgatttggatgaatttttaacttattatcaacgtttttgtttttgttttattttctattaattttacctattctttaattaacaaatttataatgacttggaattaatttaacagtgttttttttataatcgttcttataataaaatttaaaaaggtgggaacgagtcccacaatgacaacatgatccttaaattttgggtggtggcatgcctttagtcaaaggttcagataacatctgctcagtgttaatgtgctcaatgacgactttcttttctttaacatgttcccttatggctagatacttaaaatcgatatgtttacttcgactttcacttttgtcgctcttagccata

SEQ ID NO: 7328 - DNA, 604 bp, Gossypium hirsutum
gctagttacacagctggaaatagtggtggtggggctatagacaacatgggaaattccactgcaaatattttaaccggatccgtaggttacattgcaccaggttagtatttaaggattcttaatagggtcatcaatattgcttgctccaatgctcctatgattaaaaataatggtgtgtgaatgcagagtacggatttggatcaaatacatccttcaggggagatgtgtacagctttggagttgtagttcttgagatggtgacacgaaaacgacccaccgacgacatgttcgttggaggtttaaacctgcaaaaatgggtgaaaaatcactaccatggaaggctagaaaaagtggttgattcatgtttggtgagtgattcaagggatcagtcagctgaagtgaaacgaatgtgggaagtggccattgaagaacttatagagttgggtattttatgcacccaggaaactccatctaataggcctaccatgcttgatgccgctgacgatctcgatcgccttaagagataccttagtggggattccactgtcaccttcgcctcttctctggaaatttcttcttccactctcagtaatgactaacaccc

SEQ ID NO: 7329 - DNA, 636 bp, Gossypium hirsutum
tttttttatgtgatacataatgttttattgtatggtttagtacaaagcggatatgataactcggaaattgttcttgtttatcataacagactgcatatctcgacgtttgcgatgatacaaactatgcgttccgtgcaaaatcgttcaaggatagagcagttgatgcaaatatttcagccataactactggaggaatctatcctggagtgagcaatggtatggaaattctttctatttgttccacaacttaagagcagagaacttgctggtatgtaactttcagtaaatagggctacattagttagtgactagctaaagccttattgcattgctcactaaacttctatcttaatcccagagaatattgatggttttgatatgacagtgatggcagcggagcttgttcatgctgcaagaagcgaaagcaagacagaaccagataggttaaggtaattacaccttgctaatgcttatatgaagtccaaaagtatttcttcttgaaaatctatttccattttattacatcttatatgaatgtgcattctcaggttctcctactacacggcaggcagtggcggtgctgggccaactatattagccactagttttttactgcttggcgaggaagttgttgca

SEQ ID NO: 7330 - DNA, 595 bp, Gossypium hirsutum
ttattagttttaatgggaatttatatgaaccctttagtgggtaacattcagaaaatattttctttgaatcatcctaaggaatactttaattaattcactcttctgatatttcagaggattacaagtacacaaatctacttttagcttattaatgtcttttttcactatatgctgttaggatcatcagtgctcttttataaaatagagtagcaatgcataggttcatgttctattcaatcttcagcacccattcaaatggtgggcggggatttgatgctctctttctaactcatttcttatgaaaatttcctggtgattagtttctggagggaaaggaacccgagctgcatgcttctcgccaagctggtctgcttgattttattgcttctgccttgcctgcttcacatacatcgaaacccgaagcttgtcaagtgacgatacatcttttaaaacttctgagggtggtgttatctactcctgtgaaccggagttattttcttgctcagaatctttttacctcctatgatccccatgctgtcagcagcacttgagaactatataaagatagctgcatctttaaatctacctggaagta

SEQ ID NO: 7331 - DNA, 614 bp, Gossypium hirsutum
tgatgtggctgactttatggcgaactttagcatcggtgctgcactggggttgccgttgttccgaaggccgcctagtgaagttctccagctgctataacaggatctgtcgaatgtttatgttggtgcaacttagtgcttcagcttctctttgtaattaaatatatatatgtagataaaaaaacaaaattatatagaaaatatattttaaaaataaaataaatgacaaaatatgatgcaattcaaatcatatattatttttctaaataaaaaataaaaaataaaaaaaataatttcaaaataatacaatttatcttttatcattagatggaaacaaagtcagtaaaggatttaaaaacagtgaagataaaaaatccgaatcatgaccggattgaggtggtggacaactctgccaactattactattacttaaaattcagttcccaagacagtgataaaccctagctagtgagtagccaccaccaagtttaaaacagacctcacaaaagtcggaattggtttgttggaaggattgattgactactactctgcagatttcgtccgatttgcagagtcagaggctgagatttagggtttagcagaagtctgtaaatgga

SEQ ID NO: 7332 - DNA, 344 bp, Gossypium hirsutum
tgtcatagaacttgtacgtctaatacctaaatgtaagtagtcgataactttaagtttcaccattcaattgaattcatatatattattttactgtaattgataatcttaccatagctccattgtactcgtgaaattatatatttttaaaaacaccgatgttcgccatctcaatatatagtttatatcctgttcagttatctagtatattaacacaagaaaaagtttatttattatttatgtaataaataccataaaaagtaattggcaatttataacttatattagaaagatgagtaaaattttagtaaaaagtaggactttttcaaaaaagtaaaaaaaaaaaa

SEQ ID NO: 7333 - DNA, 666 bp, Gossypium hirsutum
  misc_feature (208)..(208): n is a, c, g, or t
  misc_feature (386)..(386): n is a, c, g, or t
tgaaggcagctggaagtctacgtgactttggatacctcagagctgacagggaacatttttgtctatagaacttgtacgtctaatacctaaatgtaagtagtcgataactttaagtttcaccattcaattgaattcatatatattattttactgtaattgataatcttaccatagctccattgtactcgtgaaattatatatttttaanaacaccgatgttcgccatctcaatatatagtttatatcctgttcagttatctagtatattaacacaagaaaaagtttatttattatttatgtaataaataccataaaaagtaattggcaatttataacttatattagaaagatgagtaaaattttagtaaaaagtaggactttttcanaaaagtaaaaaaaaaaaaaacttgagtaacaaaaagttacttaatttattgtaacttatatgctaaaacttgttaaaaaaaatttgttcctaccaatcataacattagatgcaagatttactgaacatgctttattataattatccaaattcttaacacaaattaaaagatttaaaaaaaattaagcatggtgacatactcccttaattgcatgcacttctttaatggcatcttcgattatcattatcccgtatgaagcttcaatttaggttttgagata

SEQ ID NO: 7334 - DNA, 611 bp, Gossypium hirsutum
tcacagatcttagagagtcgatcgttggaattcgaccatgttcatgcaaatcagtgcacatggtccagacatatgggttaactccatgaattaaataaaacccatcaggaactttctcaaagtatgataagcagccattcacctgatgcacaaaaacattgaaacagcaggatatttaaagttccaattttttatcacccaaatcctgaaacagtaaatcctagtttccacacatgtaattcaggtgctttgcagctatatactcccattgtacccacatttaaaatacataagcttgccaatatcagaataaaagaactaaccattcacaaaattaacaataataataataataataatcatccccactccaaatgttcagattagcagaactaactcattttttgataggcgagtaatcgatggaattacaaatggagtaagcattacaaatgtttttgtgggagaaagtataaaatatctaggggcaagtcgcatctcgttttatctattattgtatttatcttatgtattaatttttttagtaatttactactttaagtaactgcattgatctggtagctacgccacctacagaatttaaaggccct

SEQ ID NO: 7335 - DNA, 664 bp, Gossypium hirsutum
tcatatttggacaatccgtcaaatagaccgtcaagggttgtccgctcgatagttctccaactgacagttcaccaatcttcttatatttggtcagtccgccaaatgactcacaccaatgttgtccgcgggtctacttgatctgttcacactttgcttatccgtaatatgtgcgagtcaatgcatgaatgaccatatcgcaacaagaaaatactatgtatgccctcctaaacacatcaactgaagctacctcatccttaaaggacaatgtaaaaataagccaccaattcctaccaggaggcctttatcagttgccctagtgcgattccatgtgaattcagaacttcttcaaaaaacgagtggaacggaagatgaaaggcctcctcgaacacatacagcggtaccaaaaaagaggatgcatcgccttctcttaatcccacctcacttggacgatgtttacccttggggatcaaaaacctatacattccaacaactgccacatctcctccatggtagtggtacacccaaattcatcactttcaacagaaacatcctccagtttcttcgattccataacttttaaaagaataaaaagcaacaaaaaatagaaaataaatgaaaatatggagtcatataaaagatttgggcataggaattacgtacaatg

SEQ ID NO: 7336 - DNA, 656 bp, Gossypium hirsutum
ctctagtgtcagtaccaacactgatggtctggttctgttgcaccacacgtgtcacctccaccaccctctgctcttgttaattcacatgcaatggttatgcgtagcaaggcgggtgttcttaaacctaaggtatacgtaagtaaagcagattgtacgacatatgaggtccctattactatttatgaagtaatgcaaaagcaatgttggcaagaatcggttcataaggagttacagacacttctccaaaataagacatggacgctttgccctccacctgctcatcggaaaatcattggctgtaaatggctatttagagtaaaaaaaaggctgatgggacattggacagctataaggcacgattggtgggtaaaggattttcgcagcatgcaggtgttgattttcgtgatatttttagtccagtagttaaagcaacgactatacaaactgtccttaccattgttgtcgtgaagggttggtcgttaagacaggttgatgtgaataacgcttttcttaatggagaattaacagaagaaatatatatggaacaaccacctggatttgaagtagctaaagacaatggtcagcaattagtttgccgtttaaacaaagccttgtatagactaaggcaggctcatcgtgtatggtttcaaacactg

SEQ ID NO: 7337 - DNA, 248 bp, Gossypium hirsutum
actgcttgaccgacgtttgacctttaggtcacagctcacagcatttgacaaagcatggtgctcctacttaaattgctttgtggtgtggaaggtaaaggatgctcagttattggaggaggacttggtaagagcggcatgccagctcgagctctctatgattcaaaagtgcaagttgactccagaaggagataatactgctcttactcatgatatgaaggctattcaaagacaggtcttacttttcatcc

SEQ ID NO: 7338 - DNA, 667 bp, Gossypium hirsutum
gagttatgaagagcaggagcagccaaattatgaacaacaagatttagaagctgtaccatgtatctgatttcaagtcatatggattaacacagtgtcagaaactggagtattcatactaataaaagactttcacaatgaagaacatttaaaactgagggaaggaatatcccaatgtaataatacacaatgaggtgaaaataattgtagcaggatagagttgttgcatagccttaaaagaaaaggcaaaaacaataccctaacgaggcagcaagctcttctgagggaacagagtgtggatcaagcccccttggcaagcgtgcattgcaaatcagatcatactgaccactagatccatctcttcgctcctcatctaaatgtacctgtggaaacagaaccaaacttagcttatgtcaaagcaacatgatttaacctaggagacttaggcctagaataagagggaggaaaggggaaataaggcctataagttttcggctaagcatcctcattttaaccacattagctatgcctttatgtcttgcaaaagcaaaaatatcacctgcatatttggcttgcaaatatcacccgctgtttttggttaaatctcaataacttacatatcgtaaagataatgttgatagtgaaaaaaagcatatcaatagcacagaac

SEQ ID NO: 7339 - DNA, 590 bp, Gossypium hirsutum
cgttgactgtccgttgagtgaaagtaaaagtcgtactaagatttgtaaggaaattggccttacgagtagtttcaggtgcaactgcccactcagtcttccggatagtgcagttgggtatatgagtatacagcagacggagatgcaaaaccgtctttgcccacttccctgtgcaaagaagctgtgcaccagttacaataaaaacaccacttgagacttcttgcaaccagttaggatcatgcttaactacagatgtgcaaacatttgagtatctcttccacctgactggctctaaaaattgatcgctgggcctatagtcgtctgaacctcgccattggcatggcctgccggatgttgtcatcatatttggaagacttgagagatgttgcacatgtaatgccaatcggttgcatttttttccttccaagtacaaacgaagaccaactactggttttagatcacttgaaacctgcaattgtacgaaatatttaaatttatttttacagtaaaactgtctttgtctgcaaagaatagctaaaaaaatggaagaaattcgatagcaattcggagggggaagcagttaaacctatata

SEQ ID NO: 7340 - DNA, 507 bp, Gossypium hirsutum
cgactcactttattttttcttctttgcttacttgagcatgatgtggcataactctcttatttctaaacttgctaatttcttttttctaaaagaatatatttattttaggaatattacaacatgcacataagaatttgactttaaaaaaaatttaggctcatggtctttaaatggtttagggatgtgtacgtgagcatgcgtgtgtatgcgatgggcaaagaaaatgagaggccgagtggtggtcaataactccttttgaggcttgaaaagcaagcgattgaaaatttaatttaagggtactaagattgtttaagccaaaaggaagctcccaactaatcgattcatttactcgaaatcacctacaattgaaagcaagaaaccaaaaaaagtgataaaagcgattacgatttctttgtgtcctctggacactgatagacaaccaattttgattgttggaactggaaaaatgtgttactttcatgtattttccaattggagatggcactg

SEQ ID NO: 7341 - DNA, 648 bp, Gossypium hirsutum
cgttagatttaggttttgggccataggtattgggcctgtttaatgtaattgggttagtttcatttttttgggtttattatttctagtgatttgagccggataattttggcccattacacttaccaatcttgcacacgtgcaacaacctattgctagacgaaaagaagaagtagggaacaaaaggaaaagaaaagggaaaagagggaaatccaagagagaaattcggcagaatagcagagaatcactttagaaattttggggaaaaagaccgaaattttgaaaaaagaaaaaatgatggagataaatcccataacttcttcatatccctcaaatctctccactaaacccactacctagaatccccatgcaatcgaaacactctcccaaagccaagcaaaaagtttaacaatacgctcacacaaagtttagaacataggacctttagcacaataacactccacttaaccactagactagcaaacccattctaatataattttacaattaattaaacttaagcctactgagtaaggttaaggctttattcagaaaaataccaaaatttgcccaagctaagatttacacttgggacctctcatacacacctagaatacttaaccactaaagcagatgcacacttgtgagggg

SEQ ID NO: 7342 - DNA, 661 bp, Gossypium hirsutum
gagacaagcagaaatttaccatgcttgttggaatatatatagaggccaaataatcaatgtactacacctttgcatctgaacaaggaagaggcgccacatttaccaaaataagaataaaaataaaattgtagatgacataccactagaagacaagactgagttttcttaatttaaaagaaaatttgatggatattaaataaaactaagatatagcaccctaatggtgaaactaattgcagacaactcataaatacggcaattctaaacaagtttaggagctatgaaggatatctagtaagtttttatagctttaagatggcagattgcataaaactagtagattagcaaaaatgccacagaaattgagaagtcaaagtgcccttgagattactctatcccgattaccaaattcatctggattgctttttctttttgtccattttagcatttggtactcatgcagatccattaagtttttatttacactgtttccttggaaaaagagacatggaaaattagattgtccaggttttattagtatatatgtcaacaagtttgtaaatgatattttcgaggataacatattaaaaaatcttaaatgttgacataacttcaccaaatagacattaatgctaattttttaccacatcaaggtatttgc

SEQ ID NO: 7343 - DNA, 651 bp, Gossypium hirsutum
tgtgtaaggagattggcacaaaggtcaaagaatttgagactatagtatgtactaggagtgaaatgagaggaaaagtgaaaggagaatggaatgggagcaggaggtttggaagtagtgagagaagaggagtttgaatgtgatccatgagattgagaagagaatcccagccaggaaagcaaaggtcagattatgggaggagtagattctggataggataatgtttagggagagcttggcttcattagattccttcttcgagtttacagggcctatcatagcttgccatctcagaaccaggggccaagtaaaccaagagcagcagccacaaccacaagtcctacatgactcgtgcatatatacatccatctcacttaagccttatgaaaaaaatcatcaactccccaaagcctgggagataattggatattagtgttggagcccatacacactaaggccaggattttatgcccagtttacatgagggcagatgaacttgataaatcctaggaggttctaggaatccaacccaagcccatatatttgtaaaatatattgggactcagggcttctaattttataatttatatcgtttttgaaactaggcactaaaaatttaaattcatcaacaaagtcatagttggagggaatagg

SEQ ID NO: 7344 - DNA, 551 bp, Gossypium hirsutum
  misc_feature (500)..(501): n is a, c, g, or t
ctatctgctactgtcagatactcgacaacatcccttccatatcaactaaccgtagcggagccacctcctgccgatgaaccagcaccgccactatctcttccacctaaatctgaaccaagactaaattccattgaaagccagcttccaaaaggaactcttgatgataatgatgaagaagttcgttttctagttatatattttattaattttaatttttttacataattatattttaaaaatatttttaaaaaaatgaatttttagaatttttaaatatttttttgatatttttaatttttaaataaaatttggaatttatgatattttaaaggatattttgattatttttaagattttttactttattataagttttaaaaaacatatttttaatttcaaaaaataaataatgaaatttcagaattttttaaagatatttttgataaatttttagaatcatcattaaaaaaaaagttgtaaaaggactaaattaaatgttnnagctatagtttaagggttaaattagatattaacctttagattaatatgcc

SEQ ID NO: 7345 - DNA, 667 bp, Gossypium hirsutum
  misc_feature (663)..(663): n is a, c, g, or t
gatggccgaacaatccgctacccagatccattgatcaaggctaatgacaccatcaagcttgacttagagagcaacaaaattgtcgatttcatcaagtttgatgtcgggaatgttgtcatggtcactggaggaaggaacaggggacgtgttggagtgattaagaacagagagaagcataagggtagctttgagacaatccatgttcaagatgctgctggccacgagtttgcaacccgtcttggcaatgtgtttacaattggtaaggggacaaagctgtgggttttgcttcctaagggcaagggtatcaagttgtcgatcattgaggaagcccggaagaggcttgcagcccaatccgctgcgtaaatttgataatatttggagcagttcaaagaattaatgagttggatgcttgctggctggtactttgtgttggttcttctttaagttgtatcctctgcttttcaactcacgagcggcagttttggaccaatcgtcttcttgaaatttagttgcagtagtttagtttaagttacatttgtttttttgatggaagtttttacatttttaataaaccattatatagcatggtaaagttcttgtttgctaaaatctgttttacatcttggctcacctttatttcgtctttaggtcaagccaggtcantgta

SEQ ID NO: 7346 - DNA, 644 bp, Gossypium hirsutum
caccagatgtgcaactatctgtaagttagcctttcaaagtgttcatcatatgattatcataaaaatctcgaaattttctcatccatatgttttgcaggatctacaatttgattcccaggaaagcataagttcatggttagaccagttatgaggaggatgttgcagaggtgaagtaccccaatgacaaagtcaaagttttcgagctccttgaatctctttcatggctgtttgaggctcttgaagttgttcatcccaccggcactgccggactgctctcctacgtcagtttccgatgatatgaactccaattctatgtcaaatgttaaagtttcattcttgtattgtgtgtgcgaacaaatactataaaatttataaacacaattcgaatataaaattatcgcgctgaatgatctcagttagagtataatcttgtttagtcgagcaagcttgttaaattgaaggatctcaattaaattagattaatcaattaatattaggactaaaaaattttaatattaattgttgaggagttcagctttcttgaaagaagtttcaaagtgctacctattgtacaactagtcgattccaacaatagtttgatattgtatccatgctagagttttatcccttgcttctatttaggg

SEQ ID NO: 7347 - DNA, 644 bp, Gossypium hirsutum
aggatttgctctggataaatattgaatttgttggtagcatccatggagtactcttctgtcttataacggtatatctcattgatctttttcatgtcaacccaatagtattctctgatgtggaatgatagtgcattcagtctattgtttatagtcctcaccaaattcttggaaccctcatttactgagagaatctcacgagaagaacgtagagcagcataaaacaaagcctgtggaccaagcatgtgacaattaggacaacaatttcaacatagaaagggcaaacgaaagcctctgttaaaaatgaggcaggatgagaaaccatgtgcaaattaagataatgagtaaagaaaacagaaagcaattatggtctaaaaaagttaatatagcatcctttttagaggttacagataaaacagcaacctaactttttgagatcaggttaaatccgatatgattaacaagagcaacataaagcaacctttttggctgttttttgttcggaaactttaaaacttctagcaatgaactcacttggatctcaaggggatgaccatgaatacccatccttctatctatcatgcaggatccatcagtgactaacagagaaggaaacatatcaaatccatcagctaaacacaagttga

SEQ ID NO: 7348 - DNA, 673 bp, Gossypium hirsutum
aggttggccctttgggggaaaaagtagagtagtcctaaatttagtaaacaaaaacaaaatttgggaggtttgaacaccaaattttgagaaaatataaatcatgtattctaattctaaccgaaataaagggaaaagagaacccacacccaaagtaaacaaactctgacagaaaaaatagagagagaatttctgttccaaaagctgaaaaaaattagcagatggcagacccaaagggatattctgataaaattatgaaaaaaaaatataaaaggggaaatagaagcaatcaaactgacacccaagaaagagaaaaaagagtttttttttataattaatcaatgactgctttctacccgaaaaacaaaaaaacatggcgactgctcccattaattcagaataataataaatgaaaatttctcaaattctgaatccaaattatgttaagaaaggggaaaaaagccacctataggcaatgaattgaacgggatcatttggaatctgattatcttcggaggaaccagaagagctaaaactacaaaccgaaggcgacccagatcccaaacccacaacatgatcactgtgcatcgaggagacagatggtgtaggcaaagggatccctcttttttcccctgaatccgaatcgaaacccgaaaatccggaagaaccactaccg

SEQ ID NO: 7349 - DNA, 675 bp, Gossypium hirsutum
  misc_feature (647)..(664): n is a, c, g, or t
  misc_feature (666)..(669): n is a, c, g, or t
  misc_feature (671)..(671): n is a, c, g, or t
ctcaacctgagataaaggaaccgtataaattatatttacatgcagaaacagtaattaaaaaatcttggaattgccagtatatggcactgagacagtgccaaacataaaaccatagcaccacattaaagaggagaaaaaacatgtaagaaatgtggtacaaactagaaaataaaagaaaagagatacagtaaccaagtcaaaaacagaaaggaacgttaggagaaccatcatcacctcctcagctagatcctttttaggcattttcttaactatctcaggtggatagccagagaaggtgttatacctgcatggagcagtcaaataaaaaagttaggaaataaggtagcgagagagtgttaagaataatctgatggcctgactgccaagagtaagctcaaggaagtaatcagaatacacaatcagttaaaaatggaaaaaaaacaaataacatcaatgaacatcagcaatagaaatcttgtcacatcatgaaattacatcatccaaacggctctctttacaatcttttcttgaactttagtttctttaaaccataagcctcttttgcaacctccacagcccgaagtttaaaaaaataacatgaagtaaagcaaataaaactcaaatgaaaagttaccagtgtcatctgnnnnnnnnnnnnnnnnnncnnnntnaggg

SEQ ID NO: 7350 - DNA, 668 bp, Gossypium hirsutum
gttgaactagactagcaggttcaatttataaagttgttcatctcattattaatgaactagctcacttcttaagtactccatgtatgcggctaataagtccttggtagcaacgaggttgttttgtttgcaacaatttatatcatggataaaaaatacatcgaaaccattcaacttccaacgtgtgttttgtatgaaatggcaaccagtgcaagctcaagagtgtttataggcattcgttgccatctgcctatgaacaattgtggaggcttccctaatgactcaacagttaagccccattgatatgcttggagcattattggcagaaacaaatttttggacacagattgaagctgatatacgatcgttgacaagcatgttttttggtttaattcttaaatgcactcttggttagcttacttgtcatcaagagatcaatcagcatagtaataggacttcgagtcggattgaccttgcaacaaagaagagaaaatcttgcaattccagccacaatggggatctgctcacttcttcaattgcaacgaggctctattgcttctgatgaacagatcgagaaacttgtgtcaatgggttcccaaaaatcacaccatttattataatgggatataatcttcaactgtactggtctgttgttacagatgagttgattc

SEQ ID NO: 7351 - DNA, 624 bp, Gossypium hirsutum
cctcattacttgaggaccggtatcgcttcaaagaagaacgatgtttacagtttgggtgttattattttggagcttgtgactggtctggaagctttttgtcccgaaaggggacaactattgacgacaatggtggcgccgaaattaagggatattgcgaagtgtggtagggcggaggagacggtggcggaaatggttgatcggcgtttaggtggtgagtttgatttggaagaagctaaagctttgcttttgatcgttgaactttgtcttcaccggtcacctactgttaggccttcagcttcacaaatcttggaaatgatgaaggataaaatcggtgccgttgattctctgttttcgccggctaaaggttgccggtgttgattaattacagtgtttttgccaaaggcaaaaaccaggcctttgaaccaacaaaaaaaaaaaggggggttgccgggggtttttttttttttaatagaaaaataattttttggggaattttttacttttttaaagggggaaaattaaaatttttaaaaaaagggttttttttgaaaattttccaaaaaattggaattttttttgttttttggtgcaggaaaaaaattctatttttttccccaacctttt

SEQ ID NO: 7352 - DNA, 558 bp, Gossypium hirsutum
  misc_feature (299)..(299): n is a, c, g, or t
ggtttctttttctccctttctgggtttgtcctttgggattatcatagaattccattgttttcccttcctttgtaccgcatgtatcttgtaaaccgaaaagtttttggattttgtaaattaaggtttggattttagttacatgtttcattttggactaagtaagacttttgatatgcttcggagttcacttttcaaaatttgttccaacatctgatgatgctttaatatggaaatagaaaataacaagagccttgttaatactcagcattccttgcatgagcttcacagtttacactggnttcttgcgctgttagttttaggatgagtgctgtaattgaatcaaaatagactgtaaatgatactcgattacatgtaaatatttgaaagctacatttcttattggacagtttcatatcttgaatgtctttctattttaagctttgacatgacatcttcaaaaccctttcagtttcctcaggatttagcatgatttctcccctatttcttgttcaaatttcccctctctctgtatggctctttggtggatcttgtttatga

SEQ ID NO: 7353 - DNA, 635 bp, Gossypium hirsutum
tagctggtattgcatgaaatgccaaaacttaccatactctgcactctgttgaatacatgaatgtttctgactttgtacatgttggagtgtgcatataggttgctggagctgtcttgatctttgaagttcaaagaagttctaggtcggaagccaaaaaggaggaagcacgccgaaaagatttggaggtattcattgagcagtctcctttctttttattgttttcctcttttgtatcaaggtgataaacatgatgctaaccgagatggagtttagtcctatgttgctcttaactcttcatatttgttgaaatacccatgtgcgagatctatgttcatgatccaacacatactcagaagatgatacaaaaagttctaaaggaatttgaacatactcatgttagatatgcacctatatctgatactcttcgtctgagttcgagtaacataggtttaatctatgactttatccatgaaagaagcacagtgatcgagtattttgcatctcctattcagggaattattgatttctaatccctctaattcacaagcccaattcttcattattatttcaggcaatgaagcaaagaaatgaagaactagcaacacaagtagaacttctcaggcataaacttgaaa

SEQ ID NO: 7354 - DNA, 645 bp, Gossypium hirsutum
cagcctctggaaaggcaatttcctgataagaagctcagtactcttttggtactttcgaatttcactgtaaaaatgaattacaatatgttaaaaaacccataaaaagaaacacccacactcataagaacaagaacaatgtttagaaaatatgaaagaataccgaagagcaacagttccaggacggtagcgatgaggcttcttcacaccaccggtggttggggcagatttacgggcagcctgttatacaacagagatatatcagaagttaattacagaacaagaaagctcaaatttggtaaaccgtataatgttttgaatgcaataaaatgaatcaccttggtagcaagttgcttccttggagccttcccaccagtcgacttacgggctgtctgcttggtacgggccatctctgcaaagatatgaataatttcagaagacaattaaaaaatataaaactagttacattttctcattaactaccaaacataacacggaaaagccagatcttagataattactgtataattcccaaaagccctaatcttcaaactagaaaacttctaagccaaaaaagaaaatcagaataggatttaaaacagaagtcgaaggtcctaaatgaactcagaacagaatcagagtggccct

SEQ ID NO: 7355 - DNA, 617 bp, Gossypium hirsutum
tctttaatttatcagtttaataatcaaataatgttcattttttagacagtttcgaggaattcgaactttatcttattagaattcaaaccttaaaagcttgagcctgaactcggctagataaacaaattaagaacaccctgccaagttgctaaaacaaattaaaactactaaatactaagcaaaatttagcaccattgaagttcagagtggaagaacccctattatgaaaatgctaatatgcagaaattttagaatcagagccgggatagaccattctaaaaatggaggctgcaattggaagaaaagaaactagtgctatatgtaattgatctgaactgcttgttttgatattgatttgtccgttctgcttgttgttcaatccgacacgaacagccattgaagacctatgtccgatagagaattgagactgcaagttggccattagacccaggtctcgcctccatttcaccaaagacagtccgaatgtggtctggttttgctcaacaggaaagtccttatcctttagccggaattcgatgttagctccatatgctgtatcaccgtggcatctcatagccccagcagttccagccaaaagcaagcgtttgcttactgca

SEQ ID NO: 7356 - DNA, 660 bp, Gossypium hirsutum
catggttgtagtttctacaaattcttcaagttatttggctgcaacatccaaatttctcatcgttcatgctattagtattttccgttgaaatttgcttactatcaactatgcttactgaattcataatgatttgcttttgaagttggtatggttctcgatttacgaccattcttaacatgcaatccttaatgccttcgttttttgacaggttgaaagagtttctcacagagacaatttgcagagctttgtgcaaaaatccgagaaccttgagaagcaatgccttgcaaaggctttgagatggtactgtgaattgcgagtgttaccatatgaggaaaacaggactgttgtattctgatgagagaaattagaagataaaaacacatctataatttgcatttatatatatatggcactatataccacattaactgtaattgcagacattttttcatggtttctttggatataagaaaatgaaaactatcaaggtatacaccattgctctaagttaaggtgcaatgattgtgaccccaacaaaacaacagtactgggaaagttagaatattgtttaagggatgcattgaggggttaatgtataattttatcttttgtaatttcatattttttaaaaagattaaaagagacaaatttaccatgtgg

SEQ ID NO: 7357 - DNA, 630 bp, Gossypium hirsutum
  misc_feature (204)..(204): n is a, c, g, or t
  misc_feature (331)..(331): n is a, c, g, or t
attcagttcaccagggacatctctatggcaggccgtgccaaagacagggataaagctggcaaaaccaccaaacactttgccactgagagggaaaggagagtccatctaaatgacaagtaccaggctttaaggaccatggtccctagtcccaccaaggtacataaccaaccacttcatccttaaacagcctgtttcttttatganaattgcactaacaatgtttcattcttttggtgtttgttattatgtttctttggtggtgggggaaacataaatttcattgcctataaccaagaatgatagagcatccatagttggagatgctataaantacatcaaggaacttcttggaactgttcgtgagcttcaaatactggtggacaaaaagagatgcggccaagaaaggagcaaaaggcttaagactgaagatgcggctagtgctgctgatgcaggggatgttgagtgcaagtctttaggtgatccagaccaatgctataatacttccttgaggagttcttggcttcaaaggaagtctaaggattctgaggttgatgtacgcatcgttgatgatgaagttaccatcaaacttgttcaaagaaagaagatcaactgcttgctgtttgtgtccag

SEQ ID NO: 7358 - DNA, 468 bp, Gossypium hirsutum
tagcaactacaactttttgtaaagtacatgtgactaatagcaaccaaaaattaaagtctaaattttaaatgggtttctatctttttacctcttctgggatttaaaatttagtttttatattttaattttgagatattaaatctttgtatttttttaatttaaaaatctttctccttgagttaattattgttgttaaagttaataatgtcaaacataaaacaatttttttacctctcaacatttataatctattatcaatttgtaaaagtatataaaattttttaatctttttttttaaaattgaattatactcatattttaaatcaaaacataaaaatttaaaatttaaaaatataatttaaaaaatatgaaaataaaaataaaaaccctttaaaaatgatttcaacaatataaaaaaaatcaaaaatccaattttatctaaaccaaactaaagtggttagctggatc

SEQ ID NO: 7359 - DNA, 660 bp, Gossypium hirsutum
  misc_feature (11)..(11): n is a, c, g, or t
gatagtgcagnatgatgaccaaatattgaaatctcaaacttgaaattccaaaacagtgagggaatagcagctccctgatcaattgcaacccttgcatcacacataaaccatactgagcagggagctgtcaaaatgcatagacaaaagatcatatatgcataagcttaaaatgagaaaatttatgtgaacctgagaatctacaccagtgaatctggaaacaaccaaagacaaccttcgtgaagcaaatagctccaaggccaatctgatggacctcaagatgggtaaaacagaaccctccccagcattctcaaggctacaaggttattcaggaagaaatcaaacagtattaggatcaccttgtcggcatataatcaaaagggaaagaaatatgtgacagaattagacaagaacaaacaagtactgctaaatgactcaccttgagattgaacaacaatttgaaacattccatcatataacatgtaaagaaatgaagcaatatatgttgaaatacgtgttgtgcaaattagtgtttacatagaagcatcttttacttccgacaaaatacgctggtgaaatatatgagttaatatgggcataggcatctcaaaagccagaggaaagagatgcaaatttaaatactgcttgagtaagcaaccttct

SEQ ID NO: 7360 - DNA, 328 bp, Gossypium hirsutum
  misc_feature (121)..(122): n is a, c, g, or t
  misc_feature (177)..(177): n is a, c, g, or t
  misc_feature (247)..(251): n is a, c, g, or t
  misc_feature (253)..(253): n is a, c, g, or t
  misc_feature (260)..(260): n is a, c, g, or t
  misc_feature (262)..(264): n is a, c, g, or t
  misc_feature (267)..(269): n is a, c, g, or t
  misc_feature (289)..(289): n is a, c, g, or t
  misc_feature (294)..(296): n is a, c, g, or t
  misc_feature (301)..(306): n is a, c, g, or t
  misc_feature (312)..(314): n is a, c, g, or t
  misc_feature (320)..(325): n is a, c, g, or t
tgcatgagaggagctcgatgtgctctaagtcacacttttcaatgatttcccccttccattcatccagctgattaatctgagtctcctgtaaaattaagaatgagatggctagttattctanntctgacttagccatatcctaaaataccagattgtgatggggaaaagaaaataacnttggacctgaaactttatttggcgatggcgattggatatggatgtcgaagccgcagaagcctgcttctgnnnnncntgatccngnnnctnnntctcttctgactcggacttncactnnngctcnnnnnnaacagnnncacatnnnnnncta

SEQ ID NO: 7361 - DNA, 642 bp, Gossypium hirsutum
cttgctcttcatgcattttttcgattaaattttttcttgctactatttactgttattatgttgtgcaaaatttttgtccttcaatctaaaaaaaattgttgaagacagtgccaaatcaattgaattctccacttacaattgacaccttgttacaacatatacttttcttgtatgtcttcaaactcacaagcatgatttgcaacaacaaattctcaggaaatgactcatgaattcactatgtggagtcttgaaccatagcttttcgtttcaatgatttgctttaatctaaatttctcatatttgtgccaagatgaggatgtcatgccccgaaaatatttataaagagattggagactcatcacatcatgagagagagataccaaaccaatcagaactttcaagatagagagaacgaagagctgctcaattataatcagataaacgatttgatgtcgcatataaacaagagaagacgcttttaagagcttgacaaattggaagctaaaaaaaagggcacagaggagccgtgcaactcccaacaatcaacaatgcggaaaaataaaaaatttgccaaggaagagcttactgaaaagaaaactgggccgcaaataaggttactatgcagacatcggattgacagac

SEQ ID NO: 7362 - DNA, 631 bp, Gossypium hirsutum
ttgttagaaccactaatctaaaatttctaaaatccaaatgggagtccaattgaaggcaccgccattgcttcaggcctcaaacgcatgaagtatcttcaaccagaaatccaactcaactcttacatggtcacccataacattaatagttggatcaatttgactgcgagtcattcagtcatctatctttcgctagctattttgtttcgaaagaggttttatataattttcatatcttaaacacccccaaaagttaacaaaaaccatgggatttggcaactagatgagctgacttttattagtaccttgttgtaagttataattgacaatgaaataaactttcctttcaccgagaaatgagaaaaacccctgaacttactagcaacgttgactgccaattggccaataatagccaatcatagggacacgcttttatttattttttatttttgaagtgttcttacgggtcaatttagtggttgaggttgcagtaaaaggttgctgtcttcataaaaacatttcccatttttatctcccgtttagatctttctctctcttatttgtagcaaatttcaatttcggttacattatatccgcatcccattattccacatttaagtacaaacgtgtcttc

SEQ ID NO: 7363 - DNA, 566 bp, Gossypium hirsutum
gagccaacggtggcgagatttggcgcgaaccaacgaagcggcggccaattcattacgaaccgacttggaacgagtcctggcgcacgccggcgaggaacggctccgtgggatgagcgcggcggcggatgatggcggagagtctagttgttgtggcagcagcgaggaaggatggcgcgaggtggtggtgccaccgtcgggggcggcggtgatgagaaagtgtaagaagtgtggggagggagaggcgagtgtggtgttgttgccatgcagacatctttgtgtttgtaggatgtgtggatccgccatggttggaacttgccctgtctgtcattttattaccaatgctagtgttcatgttaacttgtcatgaaactaaatttttactaatataatcacgtgtaaatttcgatttataaaaaaattatattaaaagcaaatgcattttatgttcaaatctcaatcaagtcttgttttaaattgatttttttttaaaattatataaaatataaaaagacaaaaacacatttaaaatatactttataaaaagaagggttaattccactatggtc

SEQ ID NO: 7364 - DNA, 265 bp, Gossypium hirsutum
ttgacaactgatttgcacccaaggggaaggggaaagaggagaagaacagtaaccaaacatcagaagaaacaaaagaggaaaagaaacaaaagaaataatatgggtaaaagaggaaaagaaaaagcaactgaagttgctaaattcttaccagaccaaaaatcgccagttgatttggggctgaccagcgtggtggaggctgcttctcaccggactggcatgttgaaccaaaaggctgactagtgaggttgctgccattccccccccc

SEQ ID NO: 7365 - DNA, 631 bp, Gossypium hirsutum
gtggaatcttctttgcaagacatgtcaagaaacccaacatgaaaagtttgtctattgttgttcaacttgcaacttttctcttcatactgagtgtgcattcctaccacctattgtgaaagataaaaatcaccaacacccattcactttgtttcagggacaaccttcgttcgtttgtaatgcatgtggtctcgagggaaattatattgcctacatatgttctacatgcaaccttatgatccatacaaaatgtatttcaataccacttatcatcggagtcagacgacattaccatcctatataccacaactatttcatttcagaaaacgagtcaaaaattcgggattgtagcttttgtgatgttgaagtgaacatagattatgggagttactattgcttacgctgcaatttcattgcccatgtgaaatgtgcaacaaaatacagagatcgttactatataattgaagcaaaggacatagctgggaatcatgatgatgatttgggtgtaaatcccatcacttgtgtcatcgaacaaaatgaaagtggagaaatgacaagaataaaacacttcagtcatgcacatgacctaatattaagtgacaatgtcatggagaatgatataacttgtgatggt

SEQ ID NO: 7366 - DNA, 610 bp, Gossypium hirsutum
  misc_feature (604)..(605): n is a, c, g, or t
ttagtaaatagtagttgagaaatgcttgtacttaataactgttaattcctagttcaaaaatatatttaggttagttcattttaaaatataatagtttagcaatgtgattgcattttgccatgtttgttatgctctggtaattttctactacccataaaggaaaaacaataagtaaaagtattaaatctttttgcttctacttagaattagttcttaatgttcaactgatgtatttcatgataatgaaggtaagcgggtaaagtttgagcttgttggtttttgtttctacattgttgttttagtgttcaaatttatttgcatggtcctgtatgccatgcatactattctaaggcaattttgtactcataaaatcaaatagaaaatcaataatctgttataaattgtacttctttttaaccttgctatactaagtctaattgtctgacatctcatgtttgtttcctcctggactttatttttttgttttcattttcaagaaaatgaacagttcaaaatgtactaaagcatgcactttttgaggtaaatgtttacggttaatattaccggatattaaagattttatgatactatagtgtgaggtgcnntcttt

SEQ ID NO: 7367 - DNA, 642 bp, Gossypium hirsutum
agatgatgatatcaagttggctcaactttataacaattggatatttgtcttacagtacaatgttcatgctttccttgagtatgtacttgttggaatagtagttgttgcttttttccttttgtacaccatccaaaatggtgtttgaaacattgcactgttatttttactagaagctttataattgaactcaacctcatatggagatttatggagacggtatttttccatcatataagttgtccagtagaaagtaacttcatcttgttgtgaatcttccattctcagaaatatggaatcttacgggcaggcagtgacaagtggagaggacatacctactgataattggtggaacttagttgacaatatatgggttgttattagtgagatgaatggaatgggtccaagcaagacaagactcagaaattcagcatctgttggtccatctcttggccaacgagcacgtggcttggtagaatctcttaatattcctgctgcagaaatggctgctgttgtatctggaggcattggcaatgcattgagtggaaaaccaaataaaaatgttgataaagccatggctttaaggggggaaaggtgtccaaaaattgtctttcgacttttaatcctatacctctgtaaatccct

SEQ ID NO: 7368 - DNA, 607 bp, Gossypium hirsutum
ctcgggttcttcattgactttaccactaccaacatcaccttctctctgcataatcacatacattttatcagttcaacacccttgttcgatacatatccaggcactaaaaataagaagttcgaatcttacaggacaggaagcagtagacctgggtgatataaagagaaacgcctagcatcgttcaacgactgacaaaccttaacccaatccttcgaatctaatccttcaactaagctctgaaaacatcaaaccgaatcagaatcgtgaaattgcaaacagggttttacttcattttttaaaaagtaaatagtaaaaatggatttacttggatgtttgattctgggtcttgaaagggtttgagatcctcggaagcgacataatcaacggaggcatctatgggttgcggtaaaggagctttgttctcatcgtttacgctgatctcggaagcttttttctggggttgaatcgacactttggcttgtttcttgggtctgagaccgtctggtacgatggggagtgcattatctatgggtcgcaacgccatttttttttttgctctgagcaaaaggcgagaggaaaaatctttgatctcaaaacaaaggggttc

SEQ ID NO: 7369 - DNA, 629 bp, Gossypium hirsutum
aagaagggaataagagaagccagttatgcaattggtattcaatttatatttgctttttggaaaatgaaaattcaatcgaaaatgatgttgctattacatttattacaggtttggcaaattgttcaacttgaaatgtctatttatggtgttgcaacttggaaatccaccattgttggcaggtgctagcagagcaaactactgcaaaatgttgaggtaaatatctgacatggattcttgagccaaggcaatgcttggaattttctaattagttaggaatagttctcacaaaggatgttttctgtcaaagtttaggcagttagaaattacttgaaaagtttttttttttccacgtttataaggaatcatgtactattctgtatattacgtatacatgagtttcctttttccttatatccattttctttttgactagttaactgattaaattcccaaagctatgctggtattaatacccatgtcactcagaattttcatttttattttcagtacctatggtcggcatccatgcctgacgcataaccaggcatgattatttagatatggtcctaaaattacatgaaaaaacttttaaaattttgaacaaatttgtatttatacctatgtctgag

SEQ ID NO: 7370 - DNA, 671 bp, Gossypium hirsutum
gtgttctgctggttctgtgtcgtaaggcttactttctacaactttttttatccaccttgttgagcatgctttagatattttatgctcggtatttcaaattttgcaggagtggaactgattttctggggcccctacttcctgctgttgctgaaatatgttctgattttgatcctacgctaaatgtggaaccttcactgctgaagttatttcgcaacttgtggttctatattgctctttttggactggcacctcctatacagaagactcaaacacctgcaaaaccagtttcctctacattgaacagtgtgggaagcatgggtaccattgcccttcaagcagtgggtggaccatatatgtggaatgaactttggtctgctgctgtccagcgtattgctcaagggactcctccccttgtaagtacatcttcaagaattcttccgtgagcgctgacattatttcctctgacaaatgagtagcttatttgacaaatcattagctttttctttagtctgctgtcttgctagtaacctttatcaggctgatttatatttaatagttgtatttgacactttttcttatgtttttgatgtacttgattatacacaaataagtttgacattaacacattaataaagttctaattgtctagttgaaatggtcttaatcaggtg

SEQ ID NO: 7371 - DNA, 647 bp, Gossypium hirsutum
ccagacatttgtagcccttatgattagaacataccccaagaaacacacactgttgagaacgatactgaagtttacgttgcttaaacagtctcaggtatggatagcaggtactcccaaacacttttagctgagagtaatcaggttgagtctcgtacagcctttcaaacggagtttgtcgttgtaacacaggtgtgggtaacctgttgataagatgcacagcatgagaaaaggccgatgatcaatattctaaaggcatggaggctcgagcaagtagtgtgagtcccatttcaaccacatgacgatgtttccgttcaaccaccccgttctgttccgaagcatagagacatgtaattcgatgctgaattctcagttgagagaacgtttttgatagtgaccgatattcaccaccccaatcggtttgcaccattttaatgacactccaaattgaacttgcaccattttgtgaaaattaaggaagcaatgaaacacatccgattttgatttaagaaaatatagccatgtatatctgctatacatatctacaaatgaaacatagtaggaaaaaccattggaagacacttgagaaggtccccacacatcagatgttactaactcaaatggagatgaatacacagtctgtgaactct

SEQ ID NO: 7372 - DNA, 538 bp, Gossypium hirsutum
  misc_feature (414)..(414): n is a, c, g, or t
  misc_feature (416)..(416): n is a, c, g, or t
  misc_feature (450)..(450): n is a, c, g, or t
  misc_feature (492)..(492): n is a, c, g, or t
catttgcagagtgtatatacttcaggccacgtaagatttgatagatgaaatactgcaaagcacaaggaaaggtggttaatttgatttcaaggtacttctagtcgctgcttctatgacagtataacttggtttttcgctcagaaaattttaaattaagaatgttaaatataggatgaaaaaaaaagaaggcaaaatttaataatttataaaacagttatgtcaaaaaaatggagttgccacatattcgatgtttaaacaaacccccctcccaccccaaaataaataagcatagatatttgcttttaaacctaaagtgcatgctgtctcacatcaagtatgaactttttgaaaattagaggcttgaggcacaaaaattagctctctgaaagcctaagaaagttctctatagcatantngtgtcaagcacaatagaagggtgatgattgcttnatagcaactgatattaccaattcaatgaagtaaggagataanagtgattaggaagaagaaaagttctgtactggctaaaggcttggat

SEQ ID NO: 7373 - DNA, 637 bp, Gossypium hirsutum
acgcgaggcatcgctcggatgttcccctaacccaacccgggaacggaccggagggaaccgcagcatggggaatgtccgcgtctcgtcgcaaggctcattttttgttgtgggtcatagggtgggtttcgggcgggcagctttatctgatcaagggccggggcacaagggtcctggtactatccaggtgcgaagaaccccggagatgactgcaatgagcagaaatatcactcactggcctaaacgacgagcaaacactcgaacgtgagagcaagggatcacccaatggacgagctccaaggagggaggagagagggaggcaagaaccatgctttcagaaaagaaaagtggcggtccgaatcttatctgaactgcgagaataactgactaagccatgccataagggtcattctccaaactggacggggccaagcctttaggttgtttaagtaggttgggtgacagatcggccataggagtactccgggatataaaccagggcaactaatgtcgagcatacgacgatgccgcccgttttcatttcatggaagtccccggcagaggagagggctgtaggtgatggcgcgttttttttgcttcttctctagagaggggcgctgaaagcattcctattttggac

SEQ ID NO: 7374 - DNA, 598 bp, Gossypium hirsutum
acaaatcaatttttaatttaacagacaattaaaatttaatggtaattctaacaggaaccttctgtataaataaaaccatgcagtttacccccccaaagtattaccatttttatttttaattctttaagagcatcttctttaaatccaattgcacaacagaaaaatcaagcattaacagtaaaacaaattcatagttcatgctatctactatcacgaatctcataaataaacaagaataaataaataaatttctctgaaaaactaggtttttaattttaattctttaaaagtatcttctctaaatccaattggacacgcacagagaaaattcaagtattaaagcaaaacaagctcattttcatgttgtctactatcatacatctcataaataaacaagaaaaataaataaattcctctaaacaagttttttaattttaattctgcaaaagttaacttctttatatccaattaagaaataaataaacgaactcatatttcatgttatatatcattatacatgtcgtgaacaaacaagaaaaaaatacaataaatttctctgaaaaaaatttaactcaaaaaggaacaaaatgcgaagaga

SEQ ID NO: 7375 - DNA, 697 bp, Gossypium hirsutum
  misc_feature (20)..(20): n is a, c, g, or t
  misc_feature (523)..(527): n is a, c, g, or t
  misc_feature (536)..(537): n is a, c, g, or t
  misc_feature (587)..(590): n is a, c, g, or t
  misc_feature (595)..(600): n is a, c, g, or t
  misc_feature (605)..(608): n is a, c, g, or t
  misc_feature (612)..(616): n is a, c, g, or t
  misc_feature (626)..(670): n is a, c, g, or t
  misc_feature (675)..(681): n is a, c, g, or t
  misc_feature (685)..(694): n is a, c, g, or t
agttgcattgatgcagctcnactcttgttgagttccacaatttgtggctgactcatcaatattcaaggtaaataaccttagtgattaatctctttggctgtttttccttaaaaacacgctaagaaatttgtaaacttctttgcagggtgcctgcttttgagcagcgtattgacaatatagtaggtattgcatatgccatggatcttctagattatgttccaaaggtaagacaagtttctactctttgcttcttcttcatcggtaagactttgcttgttgatgtatgcaacaatatcatagtatgcagaattatataatctgtttgattttgaagggtgaactgctagaaagtactactgtgggagatatggctcacaaacctgcatactttgtgcctggtaattctgttggtttcaacctttgaattaattttacctttttatctcactattcattaggctacatggtagatattgcttcagtttgttttcattcattaatccattaacatattttgacaagnnnnnaccataaannatattttaagaagctataacacaatagtattctcaattttttttgcaaannnnatgtnnnnnnggaannnncttnnnnngtttcaaatnnnnnnnnnnnnnnnnnnnnnnnnnnnnnnnnnnnnnnnnnnnnnttttnnnnnnntttnnnnnnnnnnttt

SEQ ID NO: 7376 - DNA, 592 bp, Gossypium hirsutum
  misc_feature (357)..(357): n is a, c, g, or t
  misc_feature (359)..(359): n is a, c, g, or t
  misc_feature (364)..(365): n is a, c, g, or t
  misc_feature (371)..(372): n is a, c, g, or t
  misc_feature (374)..(374): n is a, c, g, or t
  misc_feature (377)..(377): n is a, c, g, or t
  misc_feature (379)..(379): n is a, c, g, or t
  misc_feature (385)..(385): n is a, c, g, or t
  misc_feature (388)..(388): n is a, c, g, or t
  misc_feature (390)..(390): n is a, c, g, or t
  misc_feature (393)..(394): n is a, c, g, or t
  misc_feature (457)..(457): n is a, c, g, or t
  misc_feature (549)..(549): n is a, c, g, or t
  misc_feature (581)..(583): n is a, c, g, or t
aatggcctgcaaaaacccattatggtacaaacaggcaaacttctcaatttcaggggaaatatgcctatgttgggaagcaagatagtgacaaccattaaatgaattatgttgctttggaataatggcatgactgacagattggttgtaaaattggaagagttactcttatcactattctagtaattattattataattagcaacctcgtaagaaatagcgcacaacttataattcataagtttaagttgttccttaaaatcaaaccaaacccaatcaataagccctaattctaatatatttagggttggctacaaaataaagacaaaaaattacattgaacacatataatccttatcntnctagnnactatnntnctntntttaanttntntanntcttttttctttccactccttaaaccttttaacctgtgcaacatcaatttgctccatccttcnaatagatgcatcactccatctgcttatgcgaacaaaccaacataaacaaatttctactaacttaacctctataagagctatcccaatttacngttggatatactcatttctaaatctatgcttnnntggttttgc

SEQ ID NO: 7377 - DNA, 617 bp, Gossypium hirsutum
gagtttacgaacgacatacagcaaatccccctaaaaaacaacccaagagagacccagatcgcgagcaaagtccacgaccatgataaaagccaacgtctccgtcgcaaaagctgaagagacatgttgatgaagacgagtgcaagccttgagcacctggccgtggctatcacgaacaactacacctgagcaagaaaagctagtaccccctgtacgcaacatcaaaattggccttcaccagaggtgcagccaagggtagccagcgtatagtacacgagcccagggaacccacaaccggcatgcccaaagcagacagaccacctagatatgaacgaatgaaagagagcaatttcagaggtatttaggagaggttttcgtggtattgacgattcctctccaaccaaagagcccatatcgttataagtacgaactcagttccacccccagaaaaagcattacacaagaaacccagccaactcacctaatcggaatcattgtaggacactggccagtaaatgcgcaaacggtcccacatcaaagcagcaaaagggcaatcccgaacaacatgggtagtcgtctcaggtacagttaaacatttaggacaaaattgggtttgagag

SEQ ID NO: 7378 - DNA, 525 bp, Gossypium hirsutum
ctgaagggttcctagaaaggatccaggagagggggatgatatgcaggtgggcgccacaagtggacgttctcggccacaaagcagtaggagggtttgtatctcattgcggttggaactcgatcctggaaagcttgtggcatggcgtgccgattgtaacatggcctatatatgcggagcaacagctaaatgcatatatgatgaaggaggtgggattagcagtagagttgaggttggattataggggagggacaagtgatattgtggaggcagaggagatagaggaaggagtacgacaggttatggatgctggcagtgaggttaggaagaaagtgaaggaaatggcagagatggctaggaaggccgttatgaatggtggatcttcatttaattcaattggacgattcatagaggatatgctagccaacacctgatatatctacctctatatgcatatcagtgtactcagtttatattgaaaataagccctgggttgcgtccttatcttcttagcccttgttcaaggaa

SEQ ID NO: 7379 - DNA, 623 bp, Gossypium hirsutum
gtataattcgttagaaaacaatataatcatttagatcagtttgtcagtttggagtgaaattgagaaagtatagatgtaggttataattatatctcgttgataggatatcaagtagtgcttccatttacggctgtagtacgtgtggagaaactccatgaatgatttctgtgatatttggtagaacaagatttggttcacgtatatatatatctgttgttgatatgcattacaaaggtggccctttgaaaagcaaattttttagggtttatctcctaaatcaagattttcaagtcatatattagtattattgaattgtaattatataaaccaagttgcagtcaaccagaaatggaaccacagaaaacagaaaattagttgcattaatcattagaagggtcagatctacatatatgacagggcaaaaggacctgtttacaagaatagcctttctactcaaaaaatgattgtattgcagaaattttgggaaatacaaaagaagaattagaagttcacattgagtaagcaaaggtaacagagatattatcacggaaaatggcgtcaacagagaaaataaagcttttcataaaatcagtaaggctggatacatctattcaggtgctttg

SEQ ID NO: 7380 - DNA, 680 bp, Gossypium hirsutum
gctggagagggaaaaaatccacagaagaatcctgtatcatatcagatatcttatgtggtgccacccagcaaggttgtgatacttttgcctttacccatgtaatatttacatatttctattacaccttgtatggtacttatgggaaggcctaataatgcttctatggttaagtgatgcactctggagctttacttccatgttttgcattcttctttcttctgccatgactcatggcatttcattgacagattgatgaagacaaaggcaaaggttcttcttcagctagcactaaacctatggccgaacgtttacaagaagaggtacttgcacaaatgtttatgctaaccttgatatttggtaatcaaatagttgcaaagtttttttctcatactttttaaatgttgtcaaactataataatctcttatattaacttaatgattttttttgcccatatattcatataatcactttggtgttttttgctttgaatagttcatttattttgaaaaatttttactattgtatggtatcgattaagataaccggaacaaatttcatcaagatcaactagctttttaaaacatttgttttctctggtgttaacatatggagtaatgcttgttcaattcctcaatcaggttcgagaggcaaaaataaaggtttttggaagcctgaagca

SEQ ID NO: 7381 - DNA, 636 bp, Gossypium hirsutum
  misc_feature (169)..(169): n is a, c, g, or t
  misc_feature (315)..(315): n is a, c, g, or t
  misc_feature (331)..(331): n is a, c, g, or t
tatgctggtttgattgtgaaacgttctcaatatttcctcatatggatacccaggacttaaaaacaatctcaaccggctcagaagcacctaaaacacaaaacattggttatattagtgatgaacataaaagctatctccaaaaggttctatcgctaaataatgacaaaanttgataaaccctgtacaggcaaattgggacaagtagtaaatgtataacctgttactgcaaacagtgacgtacacaattaagcacactaattaaaaattaatccgtctaggaagcataagtagcaactttaacagccttgaagctanctagatcagatacagnaaatgtatgatcaatgattttgtagtgcaatgatatacaaagaagagaaaaaagaccaaggaaacaaatgattaatgacaaaaaatgagcttagtgctgagtggccatggtgcttcaaatattgttaagactacctgatatcgaagacaaacaaagacaaagaaacaagatctacgataaaattttacccctatgaatatagggcaaaaaactggaagaatatttccaaatgatagaaagatagctaattgattgtatcaagaaaattcatctaaattgcatttgaatatcatatagctgcaaac

SEQ ID NO: 7382 - DNA, 355 bp, Gossypium hirsutum
  misc_feature (21)..(22): n is a, c, g, or t
tgtgtgagctgtggtgctcgnncatcaggcgatataactgcccaattgaaacatatcgatttaatttaaacttcttaagtgaaggagacctagccaccagcctgtccaacgcctcgaaatttatatggcattccacacaatcaaatatcaaggactcgagatttgattcaccctcgggaaaacaagaaatccaatccgtctcatcatctgaaacctcggattcaatcagatcaagcaccttaagctgtctgcaattatagaaatatatctatcatctagatatccatcctcaaactctccttttattcattgattatcacaacacattacataaactcaaaacattttcaaaccc

SEQ ID NO: 7383 - DNA, 650 bp, Gossypium hirsutum
actaaattattacacatttgcgccactcaaatttaaaaggttaaaaaatgattattagactattttaaaatttttatttaagttattaggctgttaaaatttctgttgtataaccttttttgttcgctctcttattctccttctcttctacaatatatatatattttttatgaaacaacttcaaatgccaaaaaattacgaattaaaattttaacaattttcttttgtaatatttaacattgatcatcaaatcgacttaaatttaaaagtatgttttacttgtcaataagtactaatccactgtattgatagttgaattagtgcttagagctcactcgtcagaatttaaaaagaaaaatcaatagccaagtgacttaaataaagactttcaaatagtttaatgaccattttgtaacatttaaaatttgagagaccaaaacgtaaactaattaatagtttatatctctattatatcaattaaaaatataatcattattaatatatatttaacaaaagaatttttatatcaaataaaattgttagaaatatttttagaaaagtaaaggaaaaaaaacaatttgttagaattttcgttttttgccaaacattatatgttgataaaaggttcaataagggagtaagacaagggg

SEQ ID NO: 7384 - DNA, 646 bp, Gossypium hirsutum
ggttgaggctatcaacacattctttgtcgtattactgtcacaacagaaattttaaagtaaattgaataaaaacttcccaataaccaaaatccagtatgtaagcagtgaatcagaatctagttacgaaaaaaacagaaggcacaaatatgatactgtgcaaaaggaatagcatgtggttgacaatttactgcataattaaccaatggactcacaaaatatgcaaaagagaagagaggcaaaagaaataaacgcgataatccttatcaggttcccaacatataggcattaggaatgatcgaattatattcccaagacaatacaaaagagcaaatccgattaagagcaaaaagcacacgatttaccttaaaaaatatgggaaattttcaaatgagatgtctatattatccggactgagaatgccttcctgtaaagcatctttaaatgcttgccgcttagcagatattgaagttgtaggaggatcaaattccttaagcatctttctaatttccctttgctcgtcaagaattttggctatgctgcctgtaaaatcgaagtcagtagacggtgtaccagcaaggatacgcaataatggtcttaaggggtaacctgccccagggattttcatattgccagcatccatactatc

SEQ ID NO: 7385 - DNA, 630 bp, Gossypium hirsutum
gattgatcatttgatggtttctttgcaggtttgctcttatgatagtagatagcgctactgccctctacagaacagattttactggaaggggtgaactctctgcccgacaaatgcaccttgcgaaattccttaggagtcttcagaagttggcagacgaggtagggtgtttgtatatttatttttgcaagtataattaatgaattgctttcctgcttgattactaatatcagtttatcatgtacttgaaactttttgttatgagctgctataggtatggaattgagccctttatatcacttgtaattatcatgttttttcattgtctatgattgtagtttggtgtggctgttgtaattacaaaccaggtagttgctcaagtggatggttcagcaatctttgccggtcctcaaatcaagcctattggtgggaacatcatggctcatgcttccacaacaaggtttgatatcaaaagacctaatatcccactttcctgactcttttctttaaaatccgctaactataagctcttactgacaatagattggctctccgtaagggaagagcagaggagcgtatttgtaaagtaataagttcaccttgcttggctgaggctgaagcccgatttcagat

SEQ ID NO: 7386 - DNA, 696 bp, Gossypium hirsutum
ctccatactaagaaaaacctcattactcctttcccaacatcatcataataatataagcccgttatcccccattttatttacaacctttcccattctccattctccattctccattctccaactactctattcaattattcatggaatatgatttaattttttttataatccttaaaatagacaagaaacctgctatatggaataaatacaccaacccctttctctaccagtaatcttaattctccacatttaatactaccaagggccccatttggatggtagaacatgacattaaaaattttttaaatcatgtgatgttaagatatggtatttttattaaatatttaacattattaattacaatatcatttattcgaaatttaatggcactcactcacccactatcctccccagtagagttgtgaaatagccaaaagtcagaataaaaagctcactaatggggatggaagaagtgaatccctgaaataaataattaaggtaggcgccatgttcacattctggtgtgaaatgcaggtttaattttaggcaatgtgtcttcaaagttgaatccaacatggtgtgagctgaatccaaatttgaaaaaaatggggtcacacatttaggaaggtattgaataaaatgatttgtcataggtatcatgacctgtcggaatccaccatcggccatggttagagg

SEQ ID NO: 7387 - DNA, 630 bp, Gossypium hirsutum
agataaggcaacagtctagatgataaaaggcccaactaaacatcctaaaatggtaatcaactcaacataagaattctaatatggtattcactattaaacccatagataaagttagatgttgagaaagaaaagaaaacttgtaaattaagacccatcctgaatccgcagttaaccaaacatccataattagttttttctatatgcaactgtttacaacaataaaggggaattccacacaaacttcacccctgcttccttcctagtcttgatgtgatcttcattcactgtttttatagcttactctcagacactacgatagctcaactaatcacaaccatcaatcgttataaataaaatgaatcttaaaaactcttctgattgtacacaagcaaaggaatgaaaaaactcgtatcacacctatatatagactatatgtatgatacaacccgttcaaaacagtatagggcaagttccactaattgctagaacaaaacctcagaagctcgtgcagatgtcttacacatgcacatgtgtaactttgaataagtcaataaaactttgatcgcaactcacttggatgtactgaaagcgcagctctatgcccaagaacggttataagcacctctattg

SEQ ID NO: 7388 - DNA, 686 bp, Gossypium hirsutum
aaacagagatgcgtttctgttagggcctgcaatgggtaggaaaagcccacttaattgaaaattcaggaagattgaaaatgatttgggttgtggcatcgagagcctatcttttgcaaaatagttttccaacattccaaggcgagagtttagcgtccccactcaagcaaagagcataaaattgcagctactgcgtgtcgcatgtaacaaaaaacgcctttctccatttattgacctccatttatgaaagcactgcacgggagttaactgtcacactgaaacaagttgcaacccatttgtcaaaaggatcatcggtggctacagtttcttcgcataaatgaatctaatgcatccgccaagatgaaacttttggtcaaacttgtcacttctaggcttctagctcatgcctcctgtcttgcgcattcaaaccgatttagtgaactgtagtctagttggagattctacctttttcagattgtgattagtgcaacaaaaattgtaatgatgtaaagtaagacactggtgattttacaagataaggttgggtcataaacctaaccaaatcattgtcaagttgattctaaggttcaaataaacatactgccttaaattttttgttcaggaaacccgtcaaataatctttatgcattcaaacttttgttcttaacatccttattcccatttccctc

SEQ ID NO: 7389 - DNA, 659 bp, Gossypium hirsutum
aattagcgtaattaatgcaatttatttacgttaaatggtgtattcaaagaaattaatgctttttcgttccagattttctaggtaaaggacacatgaattatcaacaaaaacaataataattctttaaagaaacaataataatactaataacagagattaaattaaaaattagaaagacagatgaaagcgtcgatccattagcaaatagaatcaaattaaacaaaaataaaaagggagcgaaaattagaaaaatgaaacaaatataaaagagaaaattatggaaaaaaaattaaaagacgaaagagttaccttggacgtgagaattgagaacgaaaaaagtcgattattaggttattcttacggagcgaaagaaaaaaaattggggctttttttttttttttttaaaaaaaaaaaaaaaaaaaaagggggggggggtttttccccccccggcccccccccccccttttttttgggaaaaattaaaaaaaaacctttggtaaaaaagggggggtttttttttcccttttttttaaaaaaaaaaaaaaattggggttttttttttttaaaaaaacaaaatggccttttttttaaaaattttttttttttttgggggaaaaaaatggggggaaaaaaaaaaaaacccaaaaaaaggggggggg

SEQ ID NO: 7390 - DNA, 511 bp, Gossypium hirsutum
  misc_feature (12)..(12): n is a, c, g, or t
tcttatgaaganggtcttaaaccaaggatgggttgtatgcttgcccgttacaatgatccgggacgaacatggagctttacaatggtatgattttaactttcctttacaattttgcttctcaagtcatttgttgcaagttttagttcgttcttagcatgctaaagggattttacttcagcagattgtgcaatccacttctcatagttctgttgcagcacctaatcattgatcatagtaaccgttcttttttccacatatatagctgctggatttagccataaattttcccttcttgaacaagaagtaagctatgcgtactttgtaatttgcttctttaatgcaatttgatggttctttaattgattctggggctagctttgtgatagcacctagataatagctagttttctttgcctgctgacatgttgggatagcaatgttgatgttaccctctattacatgttatgctcatcttacttattgatttcatcctccacattgttctatcggc

SEQ ID NO: 7391 - DNA, 618 bp, Gossypium hirsutum
tgtaagaatcatatattatacaatatacattcacttacaacaactcattttcaaggaaaacaactgggtcaggatctctaatagcagctttgagcagtccacgagcatcttcagaactgtatggggacagaactttcaatccaggacaagaagcataccatgatgcatagcactggacaagaaccataagaaaataatcaaacaagcatcttcttactatattgaagcctagctactcctcaataacatttaaataactaaacagtaatgacaaaacctagtagaaaataaatcgaatttcaacctaagtagtatctagggaacagggagtgtgaatgtatgtaagctaaataatgagcgaaagtaatagtatgtaaaaactatacctgagagtgttgggcacctacaccagcagcagcaccgttaggtcctctaaaaacaatgggtacagacatctggccagcagacatgtagttggactttgcagcagagttaataatgtggtcaatcgcctgcaacaaaatccagaaacagatcaaagaaatgtttacaccagaataagatcctgtaaacagatttaagggtaaccaaagtcatttaacttgcttaccaccactg

SEQ ID NO: 7392 - DNA, 591 bp, Gossypium hirsutum
acgtgagtcacaaaatgaaaataaaattgtaaaaagaaacaatgctagtagaggaagcaacaagattccatctggttgtctggaaaattgtgatgcaactgaaacagctcctgtgatcttctctaaattcaaccaaaaaagtgaaccttctcatgcagaaaatctgctgtctaaaaggcaaacgaaacatgtgttatcctcaggaaatagtggtgaaagctctagggtcattcctaatgacacagacattgtgtttcttggctcatcttggggatcatctagtttagggtcatctagaatcaatactgggcgccatctgaatgttttggatcttgatgagttatctgaaatgagagggacaaatgtggatgccaatcatggagactgtgtgaatgacgaggaatcagaggctagggcaagacaagttgaagcagatgaaatattggcccgtgaactccaagaacaattatatcatgaggtctcaatatatggcaacaatgaggttggctctgtttttatttaacacctttctccctaattaatgataacttgtttatttctattagctacttttaaatgtttacgaatctt

SEQ ID NO: 7393 - DNA, 619 bp, Gossypium hirsutum
tattcatttcttctgtgtagccaatagacctgatatttagaatcatcagaatggacgttaataatcacacccttccaccacccacctttgtacaaagcttcaacttgatcaagcatttcgaactggtcaggcaccggaatatcaggtggacaaggcctaatctgcaagatatccatctctttccctaaaccagtgtcatcttcggtttgcacggtctcatactgaatcatgtacctattattccccactggtttaacaataattgcagcaaaccaagcacggttaaaaccatcttcatcattggccacctcaacaagtgctccctcactcagctcttccatctccatcgttatctttgttggatcttcttccctttgtacttcctatatgccaacaaccaagcgcatattaaaggagaaaccccaaagaaacaagaattgcgtatacccaagattcaagatggaaagaatcaagagacaagaaatacccgaatagagtttatacctccacatccagctcagattccagctctggtggcatccaatacccaccaaaccaggttctatgaagcctcaattgactcactccaaacactaagcactttggccactgatactca

SEQ ID NO: 7394 - DNA, 384 bp, Gossypium hirsutum
tttatgacgataaactataacatctgctatttcatagtaatttgtaagtcagagataatgaacataactcacttagaaagcagaatctaaaattcccaactttcaattacataaatggcttgattttatggaaaaagaaagaactttttgcagggtgagatatccagttacctaacattcaaacttcatctaaacaaaggtcctaactgttgacatttccaaatgttcacaagttttatatgcaatttttggaaaagatgcgacaagaacatcagctttaagctttatgtaacgaaaggaaaacacatctactatcatctatgaatgaattcaatcaaattaaccaataacaccctcaaaatataccaattaacaatagatgac

SEQ ID NO: 7395 - DNA, 563 bp, Gossypium hirsutum
ggttttgatttcatgatctcgtttttatatatttcatatcaatttttcaaaatttcagttaatttttaatgtgattttattttatctttattttttatttaaatttttggtaacgctccatttaattctcagatttttttttatccagttttaagtttctgttattaatctaatttttatatttcttttttccatattttctaaatattttatataaattatatataattataccttaattacatacatatttatatgtaaatataaactttaaaattattaattaagttattaaataactaaagttatttttaaatgtaattatataaaaaaagttaaagataaaaaaaattaaaatcttgtaccaattgataaatgccgatacatatcaatataagttaatattcaccaaacaaactgaaatacattgaatgttttattaaaataaaactcaaactattttgtatcaatttaaaattagaactgtattgactatcatgtttaaggttcaaagataattagttgaccaaaaggtctacatcccacaaatgacacgagatgag

SEQ ID NO: 7396 - DNA, 676 bp, Gossypium hirsutum
tagaccatgcagatcggccgtagtagtttaacttaagggccagattctggaaaatgccaatggaatccatgttgcttggatgatgggagctgcttgaatccttgtgatttgtattattagaaaaacagaaatttgagtagtccattgtgcagtgctctgtgtctttgcttaaaaacatcagccatcaatcatcatcagcatgcaacatgtatcatggaagttcccgagttcctatcacagctatcatctctttctcatgttgataaaaccctcatttactgtaactgttggaatacccgattcttctctcaacattgtgtgaaatggtgaaaattttagttgtaggtctctcgatgccgaaggctattgagataaactagtttttaaagtgagaatttaaatgttttatatttcatttcaagacaggattgcaggtgggggacatagaatataaatacaatgaaaagtaaaaaggggtaggaattgtggcccgttgatgttgctttgaaaccgtaattcctgcaagcaaaaaaaggctgaagttgacaggatctagcacatggcattcccattttttcttgctgttttcatgtgctggtttcctggcccttcctttttttatactttggaaatgcttctttttttccttatataactaagccaggctgcctggtat

SEQ ID NO: 7397 - DNA, 585 bp, Gossypium hirsutum
agtaattgcaatgaaaatgagacaataagtcaagattttatgagacaataagtcaaggttttaataagtaaaaagaagcagaggaagaaaaacctttcttttttaatattttattttatttaaggaagtcaggttgtagacatgtgttggttaatgtgtgctaacctcctaatctcatgataggaaaagttactggtacaagacaaatcatgaaaaaggcctaggatgggttttcaacccactcaaattagttgtttgcttttttgatctttgttatgtgtgctaagtaaaaatcataatgcaatgttacttctgttattatgtgctttggctccccatagttgctgatattcataccgaaactgatggcaatattggttatgtctgcaaccgtaaaaaaacatgatgcaactgaaaatgcatccatcaccgcaatttaagtccatgattctaacctcctaatctcatgatcaggaaagcttctgctagtagatgaaaaaagtaatacatttgtttttaaggatcaaacagcttatgaagtgaatggagtcttggctccctgtgaaagacttgtagggtcttctc

SEQ ID NO: 7398 - DNA, 659 bp, Gossypium hirsutum
taaccacttcagtaatttcacaacaagggataggaaccgagctgctattaagatccaaaccgctttcagggcacatctggtgagcttacctttgaatatataactcgaggatatcaagcatcattcctttagatgttcttcaatttggactggtatgatactcatgttgctgttgaacaggcaaggaaagccttacgggcactaaagggactggtgttacttcaagccattatccgtggccaagtcacgagacgtcgagcaatgaaaaatatgaaatgcttgcaatctggtacggacatgtacccagagatcaaggagaaagttatttgtcaagacaccaggagaaatcagagcctcgtacataaagatcagttgcaaggcaaggacattattaaagtatgtttcgtaattcaagtcgaactattcttttaactgttcttttactcttcaatacatagacaatatgatctttcaaatatatgcaaaaactcggaacccgacacataaatcgggaatgtagcttttactatcctcgtaacattttgtcatggccagcatgaatactatagccgaaggaactggaatgatagtgtgttctctaaagaagacgctgaagccgtatggttaagaaggcaagaggcaatggccaaacgagagcg

SEQ ID NO: 7399 - DNA, 597 bp, Gossypium hirsutum
  misc_feature (529)..(534): n is a, c, g, or t
  misc_feature (545)..(552): n is a, c, g, or t
  misc_feature (554)..(555): n is a, c, g, or t
  misc_feature (557)..(559): n is a, c, g, or t
  misc_feature (561)..(574): n is a, c, g, or t
  misc_feature (584)..(588): n is a, c, g, or t
  misc_feature (590)..(590): n is a, c, g, or t
attttaatggtaaaaactaactcaacccttcataaacttcaaaaaggcttccatcaatattgcatgcaatgtctggttaacaatgataaatgcatacacacacatcattgcaggccaacattgaaatactagagaaaaaatatacattggttgtggatagaagagactttccttcttttatatctgaactttttggccttctttgaacaaaaataaagaacgaaggggtgcaagtgtagaggctttcctcactggattccctctctttgtttctttgccaccgtcactggctattttattggtcctctatcatcatcatccttgaagatatttttctcaatattcgttcagatatgtatatagcatctcatctttcttcgatttcggacgactaagcaatgctttgaggagtctcttacttttgtttggatactgatcaatgtctttggggctacctttctctgattgaagacgcatcgaggctgattttcgaggctctgatggatactagcaaaaaaaaaatgaaatnnnnnntaaaaaaaaannnnnnnncnncnnngnnnnnnnnnnnnnntattttatgnnnnncngctgcat

SEQ ID NO: 7400 - DNA, 584 bp, Gossypium hirsutum
gggttcgatgcattcatcgggttgtttttacaagaacgaggatcgttctccagctgcccgtacaggtctcggttggcgtaccgcaccaaacagagctcggaccaagcggtggcgaccttgttccggggacaaaactgcttgagttcggttgcggtagagttgaggcaagtgttgcaatcgacttggttcatatcacccctgcaaagtgcgattgagtaaaccttgttggggctttctccagcagatagattgaaaaacccgtaattgaaataactaagagtggcgaatcgggagatgatgctattgaggttggcctcgtaagtgctgtttggggtgtaattgccgctgccttgactacaatcgtgctcaaagtaaacaggattaagctgtgcaaggataagagtagggaggaaggaaagaacaagtgaataagaaaacaggggaactgttgttaaagatcccattgccagtggaacaatcaattacgaaaacatgactcacccttcttacttataagtttggcgcagccgcgtacgccgggcactaaccaacaatcagtaagtcaatattacaaggccatacaa

SEQ ID NO: 7401 - DNA, 628 bp, Gossypium hirsutum
gatatgaatctaattatttatgatttataccttctctcattcttacgagataagattaagttagcttcagttgaagtttgattgaaagggttggagtttgaaagtggtgaacaaaaatactttatatataatataagattgattcaattcttaaaaaactggtttcagccagctactaacaagtttgtttgatgttgtaagctagtgtacagtatttgtatcaacgaaagattaacaatttcatattctacaattttctctctgttattattattgttattattctttttagattttactttgttctttcatggttgtatatatagagagcttttctggtacatttaactaaggagaaaataaataagaaaattaatgaatttatatcaaacagatgaagaacgctaaaaataactagaaacagtaaaatcggttcttaaaaatgttgtaaaattatgggaaattaaggagcacgatatttgaattctaatgaaccacaaatcacagttttttttttttaaattctgttcgtaatctataaaagaatctaaaaacttttataaatgaacccaaaaacaatccgcttccctacggggttcctttcttgtttggagaacttgaaaccaac

SEQ ID NO: 7402 - DNA, 607 bp, Gossypium hirsutum
ctaagtgcagaatgaaaacatgggtgcagggagagaaaattaatttggggtggaacaatactttccatgaacttcaagctccacagagctcaaatctgggctagaagacttgttctgaataggaatccagcgtttgctggaagctccaataatacatggcatcaaggtttgataatagggagtatcatatccttctttgcataggggtacttcatttttcttgctatattcaagaaacattaagttagcaaaacatcagcacaggtcagattgttaaggggaacaaatacaacaaaatcaaagtaaaagggtagagcaaccaaaaaatggttttaatgagttgtttaataacgaaattgaagaaagattcactttgaaaagagtgaacattttcagcatatactcacagagaagaatagcaatgagcatcagcagttttctgccagatgaatgtctcatcttgttgcgcaataagactccaacaaatcttttcagtgaattgtgccagtggggttaacatgcttcttttcttcgaacttgttgcacgcccaggtggcttacttataggtgaggttataacaaaataacctccaggcttgagtaaccg

SEQ ID NO: 7403 - DNA, 607 bp, Gossypium hirsutum
  misc_feature (564)..(565): n is a, c, g, or t
tatgagatatgacccttaagtacatggactaatttgcaaaaaattgtagatacttatgttagacacgtaatgacattgacacccaaggattgagtaacataggcttttttacttgtagaggaaaaatagaagaaaaaacgatgaaattttaagatcattaatggaaaattatatgattctttttaggtgaaacaatcagatttaggcatcaaacccataagttaaaaaacatgaaattatggttttcaacaggttaactctttaaataggtaattctatgaatatatcctttataagttataacttatttgttttcaaattatttttcaatatttatctgctttaaagattttaaaacttcatgtacaacaggtaatctagcaaaaactttttgactatagagtttttatttcttttccctagaagttattttctatcatattgtgtgattgacaactacattagacaaaggggctttgtttctgccttatccggttctgatttcatgtattcctcacctattgtttctttgggctttgattccagtttttgcttcctacattnngcggatcttcaaaaacatttttaagcatgcaaagcaaatctc

SEQ ID NO: 7404 - DNA, 658 bp, Gossypium hirsutum
  misc_feature (642)..(644): n is a, c, g, or t
  misc_feature (646)..(653): n is a, c, g, or t
aggcactccatctcccatgccagccaaagtcaaaagcaaacctacaaagaaaaaaaaataattaacacctttcaatccagccagataatcacaaattatctctcaaaagttgagacacaaacctggaagtccaccaacagtctctgagcagacacgggaaagacatatgtgatctatctgaaaagaattgatatcattggtagcaatctaaagaaatatgtgtacattaacaaagcttagaagtatttattgatagcaaaactctaatctggataatacctttgatagtttaatcttatgttcagcacaaaatcgttgtaagccctgtaataccaacaagtagattaagggatcaaatataaacgtttcagttccttgaggcttgaatatcaagcaccatttacaacacaaataaaattatatggataaaactgagattatctaataatcacacaaacaaaagtaattttttaatgtcatcataaaacaagaattacctctccggcattaaagataaacctttgtctgtcaaagaaaagtaaaattgaaggcattgtatcatgagtatccattccaacacccaaaatctgtacaaattaaccaacaaagagaaatattgaaacaagtcgtgaaacccacatnnntnnnnnnnnccccc

SEQ ID NO: 7405 - DNA, 415 bp, Gossypium hirsutum
ttcctggccttgcttgcctttaagatatttgcagcagagcaggtttgatgtgtgttatgatccttctatatgaagctgttcccatgtcgcttctaccatttcatgatcatcctctgccatgaagtgaaaatattgattgtctttaaattgtccatgcaggttgatgttgcaattctggaggttggtttgggtggaaggtttgatgcaaccaatgtggtatttttctaattttgttcacaaatactctacatatctgccaagctaagcttatcatttctggccattgtggtgctagaatataaagctaatgcctatcttgttctaattttttgtcaatgtgtctttttttcacgttaaaaaacctattgtatgtgggatatcttcccttgggtatgatcacatggagattcttggg

SEQ ID NO: 7406 - DNA, 619 bp, Gossypium hirsutum
tctaaatcttttacatcaagctctagcgcagtctgcttctttatagcttccgcttgtttagtttctaaggcttctttatctttgtttaaaccttgaagctccttcattagatctttagacttcttgtctaagtccttgaacctttcatgggaatccagcacagcattatacatctcagatgatttttcagaaaccttggttcgagcttcttctacctaaatgaaaacagaggtcagagaaactgaaaaaaaaagtaagcatattgaataaatcactgttcactaaaaatttagtgggtatgattgcacaaaatctgtgcaaacaaatctgaaaagataaccttcatgttttcaagcacaagaggctcttacaaggacctgagaaggagactaagataagaaaaaaggggcacttaaattaatctcacccctctcacatatgcacaataagattattcaaattgtttaaattataacaaatgagtgctgtctgcctcctaaataacctaaaacaagcatttctctgcatttatgaatggcaactgcactaaatctctatatatcatggcagcaccttcaactatcccaaaattagtaaagcaaagccttacacaacagct

SEQ ID NO: 7407 - DNA, 616 bp, Gossypium hirsutum
  misc_feature (608)..(611): n is a, c, g, or t
  misc_feature (613)..(613): n is a, c, g, or t
ggatggcagtttgggtgatgggatgtaaaattataatgttattttagctgttgagttgtcgagcatttgagactgtttccccattgctcaatgctcctaaaaaccttcactttttgtcggatttgtcatgtgatgactgccacttttgcatgaaactcaggtggattctccatcaactttcattttgttccccggaatttataactatcacttaaaatgggaagggggaatcactaaattctccccagttttatttatttatgctcatattttatccatcggactatgtactgcaattgccaccaggatcccccactttcattttctattataaatcttaattattatcctacgccaatctcctggtatggataaaataataaagcaaaagaagtaaagataagtgaaaaagctttggcagtttgcagtttgcagtttggagttatctgaaagaaaaagaaatcaatgattacgcaaataaaaaggatttttggttgaaatgcaaaacccagagaatggccaaaaaactcatttaaggctactgggattctattctggcattaagagatggtgagggtgcgtggggggggggggggaaattttcaaannnnanaaa

SEQ ID NO: 7408 - DNA, 653 bp, Gossypium hirsutum
cggccattgtacttgaacttttccttatatgaaattaattgatatatttttaaaggggtgcgcttggatatgggtaatggtaagaaagtgtaattattaatatagtaattatatatttgtaattacaaagaatttttcttaaggcagaatgcaagtacatctaaaaataaaaataaaaataaaaattcgaatataatcatgactagctatacatatttgaattacactcaagagattaattaattaccataattactcaaatgtattacatgggtgcaattacacatagtatccaaatccaaaacaaattatagttgtgggtgaagcgcaggtatctctcatcctaagttataaatctaaactgaaaataagaagttgatgttaaattcatatgaaatatatctactaaataaccaccgaatttgcatttcacaatctaatttaaaaaggggaaagtatattcttgtttgaatttaaattcaaattagttttggataaaagaatattattaattgaaatgatagcagcaacacttaattgtcaacatagtaaaggaactaataacggtttaatccaatatcgagaataacgctaggaaaacaagagtttggtatgaaaagagaaaacaacaactaagcaacaacccatgaaac

SEQ ID NO: 7409 - DNA, 618 bp, Gossypium hirsutum
atctggattgagtgcggcctggaggatcggtaagcctaaaagccttgaggtctttttttttattcgttaaatgcctacatcaattacgggtaataaatccaacttctggagaagatttattaccaaggttgcactaacgtagaatgtaacgcaatataagtaaaatggaggtccctatataatgggtaaattactcacaatacattagatcaaagagcaaaatgatcattttgttaaaaattttatccatttttactgttaaaaattggtctccatacgtcaacatgaggtataattggcataccacatattactgtttgattaatccatcagccacgtcaacttttaacaatacaagtcgatgaaatttttaacaaaaattaccaatatgctctttgatcaacatatacggactaatttgcctatttttttagtagaaaaagcaaaatacaatctgactcctagtacaggagcttccatggtactgttaccaatgtaagactgttagcagtggagatactttgatgaagatagcttttaatacattatggagccatgtaaacaaattcaataaataaagtatcaaggttcagacatttctaactctggcactagaat

SEQ ID NO: 7410 - DNA, 611 bp, Gossypium hirsutum
  misc_feature (59)..(60): n is a, c, g, or t
taaccaaattaatgaaaattaattgcagcaacaaaagaaaaatggacaccatcagaaannaaggtataacaatccaaaatgaaaaaaaaaatcaaacagaaatttatatttcattgtcgtgaaggatgtctgctaagtaatgataaaaagatagaatatacaacctttgcagtaatatcgtcagaacaagaggccaatagtgaaccagtaggatcccatttgacacaatttacttccccctgaaaagcacaaagttcaatatatgaaaagcagagtagagataaaatttaattaaaaagttctacttatcaaactcaaactcaaaatcaaaatcaaaatccaaatctaaaacaaaacattgtttttagttgctaattaaagcccattactggaaagttattgaagccataaggcttgtttcattgttgtaaaatgtttcttagaaaatggtatagcagaaaaatgtagagagaggtaaatgcaaaatatttaactcttaaaacattcccctttgaaggtaacaaaaatttaaacacgatatagaaggaaaagaaaaaaaagtgagctgggaatagagatgaagttatgggggacattataggcagtgaaga

SEQ ID NO: 7411 - DNA, 657 bp, Gossypium hirsutum
ggatagatttatgctttgaccagataaatcactgtatttgattctttacatttcttgacctgctttagcattttgttttacttattaataagctgttttagtgacttactgtttattatgcattttagattaagcatacagtacagttgatccttttatgtatattcttgaattgtctacttctaattgatattgtctgtcataccatttatactggagttaaaactctgctcttctctacaagaggcatggatgagtaacttatccttaccactaagttgagatccgtaattatctcagtatagatcaaacattttagtgctttgtggaagtttcatatttaccttgacaatatacaaagaatcaagatcatatcaaaagtacatcactcaaaagtgattgtgcatgctcattataaccttttatattccatgttattgatcttgttatgcaagggatatgacctatcccattgatttaaaaatggagcattggtttatgtggtaaggctttgttgaagggattgacgagcttagctttaggtgataagcggccaaaatgtaatcaaggtctgagttttcaatccaattgatgcaaaattgtccttattcaagcagtcaagatattcagtgaacactatggagaagccatgatgtg

SEQ ID NO: 7412 - DNA, 670 bp, Gossypium hirsutum
tcacaacattctcggaattaaattgccatatttttcttcggtcagcaaattattttttttgaattaattcagtcagcaaattagaatatacatataagggaaattacatgtaatttagatgcatgtctagaaaaccaagaagtttgtattactcaaatggatggcgtgcctcttgaaaaatggaatacttaagggacaagatttaatcatatagaaagaaaacagaaaactttaagcaattactcatggggtactgattgagatattttttgatttataaccctatcttattatgtgcttcaaaacaattcatcagagcccccaactgtggacatgatataaggcaagatggaaatcagcacacgccagaggcagagttctaagtagtttccaaactcttaaaattgagacaaaaaagagttttactccaatgtgtgagtcccttttatgaaagtggacaactgacaacatcaccatcagataaatgcaagttgtttgttctatcaaattgtaaaactagttgcacgaaacaaggaaataaaagcaccttaattgctaaagaaaattacatataatatattcattagatgaaatgcattaagaggcataccgttgtctcaatgataactgcaaacagattcagtatgagaatgaaggatattatgtatcc

SEQ ID NO: 7413 - DNA, 652 bp, Gossypium hirsutum
agcttgtttgttttgcttgtatttggtgtatgcatgattagcttttgatatgacattttgtacttcaacttcatgattatagtgttgcatttactgatttattgacctttcaaattgtggctgcggatgtatatcaacattccattattcttcagttattatttacttgaacttatttgcgttgcagatttttgcaggagcattcccagaaaattatgaacctccaccaggtttctactttgaagttaatgctgattcccctgttgttcaagtaagctcaatcttatttgtttagtcagtctgttgactcgagtatgtaattggttttagttaaatatggttgcctctgttgcaggataatgtcaatttgtttgattacaatgtccaagacagagtgaatgactttgttgccgcggcaatagcacaggtaaatgaagttaaattgcaatgttaggaattttctatcttggtttccttcccatctctttgtggaattttggtactttatggaactctcttaaggtttttgcttttgcttcttgtgttatttggtcttaatatttatggatatctttttccttactaaaatttttcctttttctttattcctctttattaaatattttaatgttgaaataataggtctagatta

SEQ ID NO: 7414 - DNA, 669 bp, Gossypium hirsutum
tcgagtgaggaacgacaacatgcatgtattagacttatagcccaattacataatagaagtaagaagtaaggctatatataaacccttttaatagtctatacttaatcaatgtccatgtcctcgaacagttttcatgcctcatgtaaagtttcctttctatatgattagaaattagtgatgtcatttcgtaattttgttgtaggaaacaactacaacttgatcttaagttgtaatcaactcatttggtaggtcatctaattaattcgtagcttatctaaataaagaaaacaaaaacaaccttaatttaatagcttctactgaaacaccattagatttgaatgtactgcacaatttgatgaactttcgtaaatgttggttgggatcttcacgagaaaaacagaaaaaaatgattagtttcgaccatctgaataattgttgatttgatctcaaagttgttcacttccacaaattaaaaaagtgaatattagttcaaagcccttcgatataaagtatggcatagtctctaatagacctaggaaatatgaataacaagagtagaaggaggagctcgtaaattaatttgtgcattatcaatatcattcgcattggtgtcatccatgattgactcttcagattcaacttcaaaaatgatgttcaatcaaccgagcc

SEQ ID NO: 7415 - DNA, 642 bp, Gossypium hirsutum
tttacgtgcttttgtttgattaagcatttccttgatcttctttgggtttgaatttttatggataggctggtgagcttatgaagtttgagtaccaaaggaaggttgccactctaaacaaactaaagaaacgaggtaccaactctgaggcactcgaaaaggcaaaagcagcagtaagtcatctgcacaccagatatattgtcgacatgcaatccatggattctacagtttcagagataaatcgattacgagatcagcagctctatccaaaactcgttgagcttgtcgagaagtaagttgcagttcatctttttaactctatactagactttctcagaaaaaggcctatgacttgatccaagagaggatttgaatggcagggcagttcccctttttctgtaaaaacagagtattaacaatcactcttagatacttgtaaccttacacagtttttgtcttctgcctttgtgttttctccaacgaggcttaattattgtcatcaatttactgtatttgcatagggtgtatctaagatgctttaacatttgatgaaatcattgaattttcttttcttgtttcaagtttggatgatatgggttgcaatgtgtcaattcgcaggatggtgatgatgtgggaaaccatgaa

SEQ ID NO: 7416 - DNA, 593 bp, Gossypium hirsutum
cgattagggaattacgaaaacatcttttcatatttaaaataattaatattattcgaaagtattttaatctttttatgcaaacttatcaataaaaacatgaatctaattcgaaagtattttaatctttttatgcaaacttatcaataaaaacatgaatctaatgggatttgacgtaagactcatctatagatgaattcaaaatttttactcgattcaatcgaacaatcacccctaaatattacacattttgaatcttcatgttggtaaagataaaatggagaagttatcttttgtgtgtatgtgtgttttagtatttcctttaattgtgtggctaattaagtgcctttaatgacacttttaagcaatcatatccattttatttatgaaggaactttgtggtcatgatcgggagatccgaatttagcatatttacagagaaagaaatcttgtttcagatatcttggcccatacgggatctggctccggctttgatcgaagtttactacgagagccacctggaaatgctctctcaacttcaactacactatgtgattatattgctggttctttgccctagcgcctctgttcgtttg

SEQ ID NO: 7417 - DNA, 621 bp, Gossypium hirsutum
gtctctttctgtcattgattgttacttttatgtggtgtaatattagctatgcacttggacaatgttgttgttattatgtggtgtactactaattatgcatttggataatattattaatttctagtattaattgtggtttggaagctaatttataatgattcaatccttgttttttattttttaacacaattacaaataatttatttgactttggttgttttcaatttatgacggttaatattgtagcttaataattgagtattttgatttatttatttataaataaatcatttcaatatatgtaaaaataatttaaaatataaaaatttattaatatgtatataaatttattaatatatgtaaaaacaactttttcggaaaatattttcaggaaatctaccaaacaacaaaaaatattttacacagattcatccaaacactagaaaatattttcagtaaatcattttccagaaaagtaaatcattttcaggaaatcatttttcgaaaaatattttactggcaaacaaacgaacccttattgctcatggtcatcaacctataaacccaagagcattattagcttctaaatccaaaacactaatatcagcatcccacccaaaa

SEQ ID NO: 7418 - DNA, 642 bp, Gossypium hirsutum
ctaccttggatatttttgaggtatttttagaaaggactggttcaaatgtttgctaattcacatttgccttcatcagtgattcaagcacaggtaaatcagtaaattcctattgatattgtgcttaaatttctatgttggtcagtccattatgatcttgtcatgaatttgtgttggcagcatagtgtggtaatggaattcaataaaaatgaatcatgttgctctactactgaaccatatcatggcaatctgaagttggtaagtcctggccctgctttttgttggaatacatgtgaattagcatacttaaacttttcaagtgtctaattgattaatacttttgctagtttggttttcttgttagccatcacttttaatgtcttgtgcttatttttaggtggtaccaatctctaatttcatccatcattgtgagaatttttggataaaggaactactaccatcagataatatccttcctgtgtcatgtgggggcagatattatcaacaatcaataaggaaggcttttcagagtgaagatttgggtatcattttagtaggaactttaaaggttagtaatttagcttgtatgtacatatgcaggcaagtgaggccatttagttctaagtgaatactgaaggtacgaat

SEQ ID NO: 7419 - DNA, 666 bp, Gossypium hirsutum
ctactgacttcttgaaaagccattcaacgtgtttaatggaataacgtacatcgtcaagaagtctaggacatcaggagacaagggtgaagcacctgaactcaagaaacgaatccgtcctccgagtttggcttttattttgttgaacaccaatttgtcccacaggggagaaggactctttcctgaagaaaagattatacatataatcaacacatatatcaatgcaattatgaggtgaaaaaagggcatattctttaataacacacatacatgagtgcgtgtatgtgtacgtatgtttatgtatcattgagtcccaatggccaaacttttagtgagggggaactcgctaaatagctaagcttcaaaaatagaaaaaagaaattgcacctctaacatcagatgccaattggcatggttacttatgttctttaagaaaagcgttaatacactatttggggcttgaacttggtaaatgttttcacattagggcttaaattattattttttaaagttagtctctaaatttgacaattatttccatgtcttttttttaatccaagttagtccttgaatttggcaattgtttccaaaggcttgaacttcttttgccctagtcttttgacatttccttgaaaagaagttggactaaaaaagaaagaatcctagcct

SEQ ID NO: 7420 - DNA, 593 bp, Gossypium hirsutum
tgttgttttctagagcttttgagaagtttttgattgaaacaaattttgtttttccaggttcttctcatgcatatgcttttggaactaataaagaagagaagctaggacatcatcaatcattaggaaatgaatcaagcctacataaaaagacctcgagttacgggaatgtctatgttgaatctaatgctcaacaaatctcctttgatggtgggaagtcatcattcggaggtgttggtgctgccaacaaagcctcaattgaatcttttgatactattccaccgctaccattgcctccaggaagggtcggtgcttcccaacctggattacctcctttgaagtctactcttcctccagaacctcctgccccgattagagctagttctcctccaccaccaccacctgctgccccaattagagccagtcctcctgcaccaccaccctctatgaaacctgcttctgccactatggccccccgacctcctccaccacctatgcctccaggtgccaaacctggtccccgcccaccacctcctccaagtaccggtatcggtcctcctaggccacctccaccaatgcccttaggtccaaggtgc

SEQ ID NO: 7421 - DNA, 661 bp, Gossypium hirsutum
ctaactggaaacctgtcgttgaaagctgtggtgtccctgaaccagccagcgttccaggccatatcgtgtaagggcagtagtttgctacagtgaaagtgtaagcatatgaggtgtaacaaaagaatgagaggaaaatgaggaagaaactaggcaaaatgggacaatgagttgacatatgaaacaatttaaggctttgggtttgggtgttgaagggaaattaaggtgtttttggatcttcaaatcatgattatgtatatgtgtgtatatatatatatgtatgtacgtatatacgtttcttttgatgaggttgtaattagctgcaagatagccttttggggttttagtatttctttttttgtttattgtttaaagtattggcgatgcatggcctctttaagaagcaattctttgctttgggatttgtgtaggaaataccatgactataaactaatgtaggaattttagtgtttaataattaaaaatacttttcattgtgaacaaatttcatgggtattgtggctttaaaatagaaaaaaagatctccaagtatgtggcatgttgtttttaaattgtatgaatctaagataaatcctatactttaagtttcaataaagggtgtagggtaaggaatttgattgttttaagtaatgtctcgagtttg

SEQ ID NO: 7422 - DNA, 636 bp, Gossypium hirsutum
tattctggatttcctggagaagcaaaaaggctgaagtctaagattcgcatcgctcgaatattgaatcattgataatttagtcattattttcgattttagtgttaaaagttggaagattatttatttcagttgatttaccatcaaggataattcattttggatctaggtcctgattgaaataatgtgtttctttttgttgtaagttcaatggttctcttggggtagtaatcctgtaggccatgatagagatcagcaactctgaatcaagctgcatctaccgtgtaatgcatgctctgtatctgtatttccagcatataaaagcagatgaagtgatatgcactgcttggaaacactagaccagcttcaggaactatgtagcatgttcacaagagattcatctaagaagctttttacatgattagcttctggattatttaacttcattttctcccttccaaaattcaattcttgaagaatttccctaatggaatcatgtaaggaatcccttcctttgaaaagtgaaatattttattcttactgtgacataaggaagaactttgctgttattttatactcttaaagacttgttgcgtgagggaactggcattgttttaggaggtgtgtagacaaaccttg

SEQ ID NO: 7423 - DNA, 645 bp, Gossypium hirsutum
ctccaaggggttcaagggaggaggtggaagagaacacatattttttaatgttaaataagtaattttgaaaaggtaactttagggattgcataacaaaataaaataagagatgaattcttgaaaattaatcacatggttagccatcaatgcctaacataaatcagcaagtcaagaggaacttatttatctcatgcctttgctcaaaacttgataacaacataaataaaggcaagaacccatgcctctcctagaggaaatggaggataaaggtttaagttcaattcccctctcccctaccttattgaaaaatttcacccaccggggccaaaaagaaacataaattgcaaccactaattcatattaagcatttcaataaatatttaatccaataatattttcccatgatttttttattccttaaaaagggaatatattaaagggttctggtacctgctgcttcaaataggcaatatctgcatcagatatgaaaccaagaaaaggctccatctgcctccaaaaggagttgggaaatgcatgggctgcaatgcaagtaaaatcaaccaatgcgagtagaaattttaaaccaaataaaaaatggaatcccaaacctcaccaaaaaaagaccaaaatcagaagccacagtgg

SEQ ID NO: 7424 - DNA, 659 bp, Gossypium hirsutum
  misc_feature (654)..(654): n is a, c, g, or t
ctgatccctgtaactggctaccttcaccatgggtctgaggttccacggttgatgtgttgtgatcagaagatttctcagggacaggtcgcctgagttgggaaacaagcagctcttcaaggccttgtggtacagtagctgcactagacccactgctttgctggctctcatcaacccacaagttcaaacgatggctatgacgcccattcctcaaagaccggaaaatagtatccaaccgtgatgaggtgctgtctgagtttctatttgaaataatcatatcacgggcattttctggagaggaccaaaatagagagagaggtgaagggttgttaaaaatagagatgcatatagaactacaatcttagtaagcattaagttgtaaattacaaaaagtatacatattattaaaaatacggaaaagaaaaacctgactgccttgtagatgctgagtgcagtgatgaaggtcccactaaaagaggatgagttgaaggccctgaattctctccactgcgccccaggggactgtaaatggatgtggtacgttcatgacgtctagaaccaaaaacttcaactggcattacatgaagagcttcactggtaaagctgtggtctctgcctaagacttcaatctggtcaaacacatccattccattgatnaccct

SEQ ID NO: 7425 - DNA, 663 bp, Gossypium hirsutum
cccttggttcgattatcatcaacattattatttataccaatgatgcatttggaactcgcaaaacaaaagccagcaagtacacagctgagcttaggtgccccttggatgaccccatgcatgttactctgtatgacttgagtctcttcatcattaaattttgctatctaccaccattaatgacttttattacttccattgtttcaaagacgcagacacttgcacgaaacatgtttgaatcttgaccgttgatgaattttcattttaccctccatcaccatttactttgatctgaaaacctgaatcgaagccatgagccatcactgaattgagaagatgacataaaattatatatgcatattggaataggaccactgtaggtctattatcgattagtgtaactttttgcatgtgatggagttgccattttttttctgttagatcaccaatatatatgatgacgatgacgatgacgatgatggtgatgatatatatatatatgtatatgttgagcatttataggattgactttccaaatgttattttcccaaggttaaaaaaggctgcaactatatatggcttatgtataggtgtaattaaacatccaaatgtaagaaaaaaacggggcaatgaaaacgataaaccatgtgcacatcatcattcaat

SEQ ID NO: 7426 - DNA, 731 bp, Gossypium hirsutum
  misc_feature (509)..(509): n is a, c, g, or t
  misc_feature (588)..(588): n is a, c, g, or t
aaaaaataaaaaaaaaaaaggaatcatgttcagtttgaataattacggtttctttgtcttcacagggaaggtaagcttaaattactcaattactagctgaaccagaaccgaatcgaaaactatggtttgaataagcttttattggtttttcagcttagccataatgacttgttttctatttttgcggattcttcatttatcttatgtagggaaatggttctaaacccgaagaaatacatgaaataatcaaagcgggagcaatgggactgaaactgcatgaggattggggaactacacctgctgcaatagacagttgtttggctgttgcagaactttatgatatccaagtcagataaacaaaattgccaattatttccgagatttttcgttttcttttagttacattttaaaccataaactcatcgtttatatcgattgactttggcaggttaatattcatactgacaccttgaacgaatctggaatacttgaaataaccaaagccggancaaggggactgaaactgcttgaggatggggaaactaccccggctgcaaaaaacagttgttgggttgttgcaaaactatntgatatccaagccaaaaaaacaaaattgccatttttttccaaaatttttctttttcttttatttactttttaaaccaaaaacccttcttttatttcgattgattttggcaggtaaatattcatactgaccccttgaacaaatc

SEQ ID NO: 7427 - DNA, 687 bp, Gossypium hirsutum
gatggtcgtctgtctgctgggaaaatattatcctcaaaagacaccgctcgcttccacttttgaatttcacttgaaataattttgacctactcctttttatttacttatccaatcttttacccgcattcttttagagttaattgcaccaaacacccttaaattatgctctcattttaaattggtctaattacatcctcaaactattaaggttaaatcagttaagtcctttcattactaaaaccgttaatttaactgttaaaaatacatatgtagtataatttgaaatgaaattatgaaaaaattaatattgtaaaaacaaatgttttaaaaatattggtttaaatttcaaagcttttactgaagctttatccttcacctttttttagctttattttatttttatttttttacttttaaaaattataccataatattctagttttatttaatttttttcattttaaatttagctacagatcatttaacagttaaatgaacggttttaataacgaaaggaggtgattgatatagcgttaatagtttaggaactcaattagaatattttgaaatttgaagatcaatttaaaatgagagtaataattagaaaatatttatgcaattaactccttttttttaaactactcataagtccttgaagttttgcacgcctgccgaaattcaaaccct

SEQ ID NO: 7428 - DNA, 616 bp, Gossypium hirsutum
gttttctctgatcatgttacattgaatcgaaaaaaagaagattattgataaaagggaacatgtacttcttgaagttcttgaaagaagcagtgtcatcaagctcgcctctcatatccaaaggataaggctttccgttaaccaatgtgaaagggttcatctcaaggaaagtgaagtcaagatctaacattttggcattttgaaacgtgaaagagttaatggtaagatccaaatgttgatatgaataccactagattcaaaaccgatatatggcataccttgaaatagagtaaagatcactttgatgaactgctcaatttccccttttacctataattaaagaacatacaatttttcaaagattcagagcggattttacagcatgcatatatatatatatatataaattttcagatgtatttggtaaatccatctagagttgtctgttggacaaggaaggaatgtgctcaagttatgaaatggaaaatcttacactggaaattaatgacctaaaatacttgtgaaactacgatcaagatgcaggaagagcacacaaaagcaattaagtaataggaaaaattacctccaagggaagggttgcaacaagtggagccatatt

SEQ ID NO: 7429 - DNA, 683 bp, Gossypium hirsutum
gagccatatctgatgatatcatctaactcttcctaaagtaaataataacaaattaaaactttagctaaataattgcaaccttttctttccagagaggaagcaagatctgaccataaactctacgttaacctaacatctaccaatagacaccaaaaaattagacttacaagttccattcaacagaacaagtatgagaaacagagggctaaaacttcaagaagtcactccacacggacaattagcaagggcagccaagggcaaatgcatttccataattggttgggatatcaaacttcaaccatgttgtcattcttcaacaatctgttcatttagggttctcctaatttttcttctaagacccagtttattccaacaaaattatatagggataaatcccaaaagtacatatgaactttgagccaatacgcaacaaaatataggaattctgatgtggtgcaattatgtacctgaaactctgattttgatttatttttcacataccactaacactatacctactaggcacaattttaaatttacttactgcatacacacaaaaaatatttatgcaacacaaaaagagctggatatattcgattttctattgtgtacaatttgaaccaaaatcgaagttgatatttagaattgaaccaaaatcaaagtttctcgtgtacaattgcatc

SEQ ID NO: 7430 - DNA, 674 bp, Gossypium hirsutum
ccttatggatgcttttatatagatgtaaattttacattccttgctgagtcaggaaccttaaaatggctaaataccaaatgccacaagattaacttaggctgtcagctatttgccttatggtattattccaagcggagcttgagaaagccttgttgaaataccagcctaaaacttagaatagaatcatttctagcaaatgcatggtttacatacaattttgtcaatgctgtcaatcaaccctcactgtcaaatatgatctcccaattataattgctttgcttgtaccctgcaggtgaagattaagacaataagcaattaccatttttgcttagaatctgcctacctggtagttttgacatgaccacttattgattgatttaaaaggaggctggcttttgctactttaatacccattctcttctgtctgctggcataaggtggctgcatttatgtagatcactttaatagatattaatacctatggctacccacacttgatcatgtttatgagatgaaagccataggtataacatccacaattggcataggcatgttagctaaatagagcggaattctggatccaaacaagctttccatgtgacgcctagtcaatcatatagggacaacagggaacctacccctgatttttacttatagctctctgtttcatctct

SEQ ID NO: 7431 - DNA, 611 bp, Gossypium hirsutum
tgggtcactccaaagaataatcgggtcacctcgtcctcacaaccgtgaggccatgattacaagtgacgtggaatccttggggtcccatttttgaaaaccctattgaagtcactgtctctgtacccttggggctcacagccatcaaacaatgcttaaacatctttctgaccatgacaaccctggagacatctaagggattaccctttcgaagggcattgaactgtgttgtcttaaagttatcaaccaattttggctcagacaaacacagctcgcttggaggcagtgaccacgtggttgaaatattgagatcatcgatgaacatgtgctccaccaaaatatacttggaacgatccgaccccaagttgctcccatttcccagcagtagatgctcaatcctcatacctaccatttattgaaacacaacatcctaggatgctaccgatcatggtttgtcgaagtgaagctgaacaaattttgaaatacctttagatagggcacctcatccctctaatgacatagtataagaaacccaatcaaaatccaccacgaggctccaaacagttgcctaggggccactctatcttaattcaaaaccgcgcaaatgaattcat

SEQ ID NO: 7432 - DNA, 697 bp, Gossypium hirsutum
ctaagcatgaaagagtggctgaaaaggcttaagggctcattttgaggctgttttggggatttgtatagttgaggtaaaatgttaaaaaaacctattgaagttcaaaattttgtgaaagttaaaattccatttgtttcttttttacagtataatgtttgcttatgatactcatatattagttgttgccaccacaaggatgattaggggtggcaaatctgtttaattttaggggactaacattctccttttccatgaatatttggtaacttccttttttactctctttgattctccttataattcaatggttaatttttattttggttttgttactgcttatggttgtctaatttcatctcttttctttttttacatttttattcattaaaatcgagaaatatatataactttcctataatcttcttactgttttaagataacggtaagattaaaattctatattcgaaataaaaatattttacagattggatacagaatatagaatttaaaataataataatattttttaaaaataatttaaatgaaatttaggttcttttttcctttcaatatattagccatgctcaaatgttgcatctcggaaactgatttccttaaaaagtagagtatattttatttagagtaaaaaaacaagcgtgattaagagataaaaaggaaacatacatggaaattggag

SEQ ID NO: 7433 - DNA, 300 bp, Gossypium hirsutum
cacattctgccgacacttcttccattatgatttccaatatatctaataaaaatatgataaataccatatgtttctctacttaatacggtgaccggtggtttaaccaattattcgttttgtgttttaattactaatatcttattataattatattctggcatcatcttaaaataataaataaatccaagacgaattaaaccgaatttgtatctctttttttttataaataaatgccatatggctaataatttattataacattatggaaatttaatttggtttaccctcatgaaaaaaaaa

SEQ ID NO: 7434 - DNA, 589 bp, Gossypium hirsutum
tctttgacaatctttacatcagaaactctcaaaattttgagattttgcaagaaacacttgggagattggtcattgtacttgaaatccatcattgcttgggatatatcaaccaagcattcaccatcttgccagccgtcaatacagagggaagttaatccgtctaaatgttccaaatctataagatctgggacgagatttttgtgatctccaatattgtagagaataagatcgtttgtattgcataacaattccttgaataccgataatccagttttctaattgtaattcatcacataaatgaaaataaatcattaattaattaaggaaagaataaattaaatattagattaatataataacatattggtatcataaaaatatatatataacacagattggcataataattaccaacaagatatatgataattatacacagcgaatacaactatttttatatattttttaagctcaattttaaggttgggaggggcatggcatgaaaaagtttaataattagaaaaatcaaataaaaaatccagaaaaggaaaaaagagtaagaaaagtgtacctctatcgttaactccag

SEQ ID NO: 7435 - DNA, 634 bp, Gossypium hirsutum
gtccaactgataatgagctctaaattcggagctagaaaagaaggcctccaaattagtgatttcatattcttcagcctgcgcaaaagaatgtaatccaagttcaattattaatctggtaaagggattattagtaaaataaaaaacttgattcaagttagtgtaccttggcttgtagatctgccattttcacatcaacatgggtaagccctgaagttgatccagaaagtatttcttcaaagcgcactgcattattcacaagctccctaagaagtacaaggagaagtccatcgtagtctttcttgaaggttatgtattgcctgaagctctgcaaaatacgataccagattcttctaagccttgttatgaaggtatgtatattatttttcaaattaagaaccaatcaactttggcccttcaaacatatatgacaatcaacaagtcctcttggagagcaagagagagagcataagcaacatttactgtttgaattcaaatagagaaaaattcagacaatctaacagtttcagttcaaatagatcacataggaaacttctataatcatattgtaagctaacattcaagattgcattagcaaaagtgtgacagagcaacaatgcccatggaagcctgacat

SEQ ID NO: 7436 - DNA, 643 bp, Gossypium hirsutum
cttcttccctctttcccaagttattttcgagttaaaatgtttcagaacaacaacccagaaattaatcctggtggagttgttaacttttccaatcaattgtttggaaaaaaagaatcatatttctgaaaaatgttccccatttgtggattgtttaaagttcagaaaaactgtgaaaaaccattggactgagaaagttggaagatgttaaactctaaacaaagaagaacaagtcctaatatacttaaatttattattatacctgaagtacacaaaatacatgatcaaaggcaaactggagcttaattacatactgattgtatattagatgactgcatcaccacccagataattgctacttcattgatacagtacactagtgagtttttctctctctctctctctctatatatatattctgagttacttacgaatctagtatttacgtttggttttgtaagaatccaaggcatacttaacaagctggtccattactcagactcagtgatatagccatcaccgtctttgtcagctatgtgaaacgcacgttgagttctataagcaggccaacgcgattgcagctcccggaaaccagccttcacctcctcccaactaagccttccatcgttattggcgtcacaacact

SEQ ID NO: 7437 - DNA, 651 bp, Gossypium hirsutum
tataaagagagagagagaatttcacaaactgcaaaccactgtaagtgatacaagagcaagccacttacagtgcgtttgtaaacaggctcagttttagactgccttgcatcattccatagaacctcagtatcagtaccagcacgaattacaaattgatctcgtgccttttcatcagcaagccatttttgaagattttcctgcaattacaacaaaacatttaagtaattaacatataagcactaagaagcatagatagagcaaagagttttgtgtcataaaaaagaattaagatttaaggttatctttgctatagatacttatatagttcttagaaacacatctaatagcaataaaatctgataatagcactcaaagaagaatctatggttaacttcactaaaatcttaatgcaagtaaactgatatacaaaaaaaattgaaatactcagcagtgaccctgtcctcaatcaaaggagaaacatcttttacatcttcaaaaagctcgaataaggtataaaaacatttgatacaaactccaaaagcatcctttataagtagcttattatcaatgtttgaaccagaatagtatgcatatgagaacaaactacaaatcaacaattttacttccaatgcgtgtttatagccattgcag

SEQ ID NO: 7438 - DNA, 656 bp, Gossypium hirsutum
  misc_feature (648)..(653): n is a, c, g, or t
aaagaagtcaccgatgcataaaatttacactacatttgtgcattaagaagtgcttaggtttttctctatctccatttggttttgattgcttctcccgcatgattcaatgaacatagacaattccacacattccttacattgtcatcaagtgtggagtaatcagcgtagaatcctggaatttaaggattgtcgccatattcttcgtcggcgtcttctacaatggtttccaaacgcggtgaatgggaaggtttaagagggaaaataataggagtaggagctacttccatcgccagacatcttattacactttgtttagccattggaaattaaggtggttttcgaatcgtttatttgatgatgattaacaaattaagggttaatcgatatatgaatctctctctctcttcctccttgatccagggaagaagagagatgtttaaacaccaacaccttcagaagaaaaaaacaaaagcttttgtgatttttttgttttagaaaagggataaattcagatttgtaaagggttgaggatgggaaaagaggttaaatggacaaaagataatgactaaaaatatcaagaggaagaaaatagaagagtaggtcgagtcatagggtccattgatggtagaccgcaatccatgggaggannnnnncgt

SEQ ID NO: 7439 - DNA, 612 bp, Gossypium hirsutum
atgtgtgataattcaccaagttgtagctgcatgacggaaccgtgtcttttggctaattccatcaagcgtcgatggggaagagcaaagatcaaaagatgcaagtgacctataattggtagtttccatggtgaaggaggtagatttttgggtgtctcctttattttggatctcatccataacttaagaaccatgaaaatgaacacaaagaaggtgaaggacaaagggagcaacttatccatggtaaacatatgcaagactaaaggataaactgttcatgaattgatgagaaaatttcgtttatttttttagtttatgcaggtttctgatcttgaaacatgcttgcctgtcaaaactgactccgggtatgggtgctttaaacaaacttatccttcgtcaccagaacatgacaaaattgaataattttgttgctatagtattgggaatataatagaattttgaacccaaatattgggaataggaagcaacagctgccatgtgaaatgggatttcacaatcttcacactggttttacaaagagatcatccctgatatttatgtatatatttctaactactgaacacatagcgggtggtaaggaatgggaatcaagta

SEQ ID NO: 7440 - DNA, 583 bp, Gossypium hirsutum
tggagggacagagatcatctggcacagcaggagaaacccgtcttggaagcatttgccccatccttgactagggtgactttattcccagacaactcacctttatatgaatcagagtttagggcttttcggcttacattgttgtagatttcccggataacgatctcaaaagcagtctgaacgttagtagattcgacggcagacgtttccaggaagaacaggccttcttcctctgcgaggcttttgccttcctccacacttacatctcttatgttctccaaatcacatttgttccccaccagcattcttgtcaatgtagtttcacaatgagctgcaaggattaattacaataaggttcaattttttttacttgaataaaacaaaggaatgtcatttaatttagtttcctagaaagtgaaaacttttctaggaataaatttttttctcatagcttaaacaattcctcttatccctagaccaagaagaaccatgggcaagtactaactttttgcacagaatctaaaaaaagagctttttggtataaagatcataaatctaagaatagacaaagaaaatgtaaatctaa

SEQ ID NO: 7441 - DNA, 611 bp, Gossypium hirsutum
ttttgtgttggactggtgtgtttgtgtgtgaggcttaacaattaagacgtcggagtccggtatgtatgacaataaatgatgtaggctcggatgtgcttatatagagccaagtacattggcaaaaaaggtttcaaaaattgttgtaacatgtctggatcatgtcgtctttgtaaatttttctgtctaagccggcgcaggtataaaaatatatcaatgaccttgttgtatttcatgtcttttggtgggtagactggtgttgtcttaagggctaaatgtgccatttcgagagtgatttaagggaacaagaaatataaacgtcagaataagaagttaagatctgaggtgtttttttcttgttttatcatcgtatggcggggaatccaaaagctgttagtgtcagggaatgaattccaaatcaaaatttactggaacctttttcccttttgatattgtcgaagctttttattttttatcgaagatattgtccaagagtttattatatgataaaataataattcatttacaccttacaccttctttcccttttatctgaatttctcatctaaatttattttagtctttaaatttgaaatttttaaatgtttcacgat

SEQ ID NO: 7442 - DNA, 639 bp, Gossypium hirsutum
  misc_feature (601)..(601): n is a, c, g, or t
  misc_feature (609)..(610): n is a, c, g, or t
  misc_feature (613)..(613): n is a, c, g, or t
ttttatgttatatttttttatattatgtaatttagaacatattaaaaaaataaatccatactaaatatataatattataatataaacataaaataatatgattatataaaaattttcaataaataaaaaaatgtataaaattattaaatattaaaataatataggagaatttaaaataggtttggattaattttttataaatatgagtaaattttgacaaacttttaagtatatatttcaagtcgagtcaagctaaaatatattaatattatgtttaagtctgacttgacttgcccgtgataccctttaatttgaatacatgtccttaaatgacatcaatgggcatctataacattcgcttgattaactatattaaaaccaacccattaaaattaaaaaaaataaaaatataagattttagttattgcatttaattttaatttatttaaaaaactcactttgtgtttttcttctctctcctcagatgttaaatccttatctcggtaaaaaatccgaaatttgaatttcgacatataatcactgcaccaaaggtagagaaacagtgaagttttatatagcatacaatacaaccttaatttanaatcccanntanatacatatgcaaaaaaaaaaaccata

SEQ ID NO: 7443 - DNA, 657 bp, Gossypium hirsutum
aataaagggtccacaatagttgatcttttgtaagatcattagagtaggtgagctattaatgagtaagttattgtttaatttcttattatcttaattcttttttccaatttgaacatttcagtatggtgaagtagacatcgatggctctcttgttgctgctaaagctgctggggctgaggacatagtcatgcttaacaatggctgtctctgctgtactgtaaggggtgatcttgtgaggatgattgcagagctagtcagtaagaagaaagggaaatttgaccacattgtaatcgagactacaggttggaaattatctcaaagcacctgtaaaaatttatagaaagagtaacaactttttgtttgtgttgttgcatttggtgtatatctgagttttcctctttgcttgagcatgataagttattatgtttgcttcttttgcattccacatccaccttaccagggttggcaaatcctgcaccaataattcagacattttatgctgaggatcaggttttcaatgatgtcaagttagatggtgttgttactctagttgatgcaaaacatgctggctttcatttggatgaggtcaaaccaaagggagtggtcaatgaggcagtagagcaaattgcttatgctgaccgcataattgtaaacaag

SEQ ID NO: 7444 - DNA, 644 bp, Gossypium hirsutum
tcccgcacacacaattcagcatgctcaggattagttatcggagggaaggtgcatgtccttcacaaggggttgtcaacagtgcaagtcctggaccacataggttctgggtggaccgttgaagactatggttggctccagggtccaatggcagttgtacagggagctctgtacgtgatgagccatggacttatcgtcaagcaggaaaaagaagttagcaaggtggtgatttctgcttccgagtttcgtaggagaattgggttcgcaatgactggactaagggatgaaatatacgtgatcggaggggtgattggccctgatcgctttaattgggatatcaaaccaatgtctgacgttgatatcttgacagttgggggcaatagacctacatggcgtcaggcagcttcgatgacaaagtgccgaggaacaatttttggttgcacgcagctaagaatttaggtcccccacttttttttcttcttttaaagtagtctgctggtttttttgtgaaaagttaactccttattttgtcgaggcattgcaaatcttccttattggagatgagaaatgaatgtttctttctaatggtaccttggttttgtaagccataatcttgtctgtgttaaaagttaatgatctgtttcatg

SEQ ID NO: 7445 - DNA, 621 bp, Gossypium hirsutum
gactgactttctgggatggcatttgaaggtagaacagttctatgaagctgtgggaatttcggatcaagacaaagtccaaacagtcatatgattcatttggcaggtaaagccttgcaatggcaccagcaatttatgaaatccaagggtaatgttcgtgatgttaaccggagccagtatgtagtagagatgaaggctcattgcagtgacagaatacacagatccaatggttaagttggtaagccttaaacaatcagggtatgttgaagaatattatgaagaacttagggattacttaatcttttacaattatcggatgatcaagcccttagtacttttgttaacctcaagccagagatttcaaaatccataaaattgttctatcccaaaacaccgacccatgccttgatttggccaagcaaatggaaagcttattgtataacttgcctagaaagccttttacccctaacaaaactccattgacagcacctcccatacatcatataacctactctacctccaaatcacaccttctaaacagcatcttccttgcctcccctattacccactcccaaaacattgtttccagcatatccgaataaaactaacccttacttcaatggc

SEQ ID NO: 7446 - DNA, 232 bp, Gossypium hirsutum
attagcaaggtatagtcatctacaaatttttctattatgctgttaggaatatcggtatttgctgtatattgtgctcttaataagttgttactagatgtagttgaatttggcaactaaattgctagtattatactagaaaccgggtttatattttatattctctcaatcaatatcatgtactttccagattttggactggatgttgggtaagggacacgctgccctccttcgg

SEQ ID NO: 7447 - DNA, 238 bp, Gossypium hirsutum
  misc_feature (223)..(223): n is a, c, g, or t
  misc_feature (230)..(230): n is a, c, g, or t
agctcatcacatcaaaaatccatgctttttaatcctgtaataactcaattaattggtcctaaaactggacagcataatgcaacaaatgggactgtctttacagcccccaattggcatgaaaatagaaccattaatttgttcaaattttggacagcataaaaaggggcacaaaattggacagcattaatttttacaatatttccgagcagcatgtaaccttacnataaacnaatctaac

SEQ ID NO: 7448 - DNA, 615 bp, Gossypium hirsutum
  misc_feature (462)..(463): n is a, c, g, or t
  misc_feature (541)..(544): n is a, c, g, or t
  misc_feature (548)..(548): n is a, c, g, or t
  misc_feature (567)..(571): n is a, c, g, or t
gatgtgaatttgttcgcatccctactgaggtctttatcggtggtggatggcgccggtaccgcctaatagcagccgcgccactgctacgccgcctccttatgtttagaagtttgaaaaagctaacttttttttttttggggggggctttaattttaacccaaaaaaaaaaagggggtgggaattgccaaaaaacccggaaaaggggaaaaaaaaagttttccatttcccgggttcaaaaaaaattttcccggggaaggaagccccccccccccccccaacccaaagcccccaaaaaaccccccccccccccccccttttggggttttcaagggaacgggccttaaatgggggatttttttttccgggggaaaaaaaacccttaaaaccccttggggggggccgggccccttccaaaaattttgcccccggaaggggccccctaccccggggggcttttcggtnnttttttttttaaacccccagggaaaccccccctttttaaggaacaaaaataaaccccccccccttttttaaaaaatannnnaacnaaaacacttttgaagggcnnnnnggggggaaaacccccaaaaaaaaaacccccccagaccccccccc

SEQ ID NO: 7449 - DNA, 636 bp, Gossypium hirsutum
atatatatatttttttcacaaaattaaaaatattattcttagaatatttatattttttatattgtaacaaattttaaaaaatatattaaataataaattttgaactcaaaatattacagatatactatttcaactaaacatatttagtttttatatcgaatttttataaatttattgtatatatatatattttactgaaagtaccctaatctaattattagaatagatagaattaagagtttattacataagtattaacggattttttttcaacttgccggtgattcctagactctatatgtagcttcttttttttaaataaacaatatatccatatgcagttattaagtttaaatttgactttttctatggaaactttaaattttactagagatttttttatctggtatgattgtttatatagtaaaatcagcgtaaagcaaaaaacaaagattacattaattgctcaaagaaccgaaatgtttggctaaatttagtactgattgtggagattctccaaactattgaattcctgtgaatttattaccgtaaacttagctatacgattaacaactgtattttgagacctcgaaacgtgacgaataaggatcttccagttacaacttaatagataat

SEQ ID NO: 7450 - DNA, 637 bp, Gossypium hirsutum
ctatcgatgctgctctggcgtagaactaatggaccaatagtgctatgcgaggagcatcttctgataattggccactgagcttccttgtccgctggtagtgaacatggagaacattcggtaatcttcgtcaatgatttaccgtacttgttatttgtaactaagttggagttattaaaatcaagaatctcttttgagggaagagcacaaactagaaaaagtcgttaattcaaatcaatggtgaagcaatactaatctctttcaagatgctattccaatatgagttgcgtactatactgtcttataatgtccagttcgccattgaacatgattgggccttgtagacctgatattgtcaaggctttttccatttcacctaggaattctcggagtgaagaaattgtaagcattcatgccaatgcgaactgaactaaggctcaatcaacatttcaaattatgagttttaaattgaataaatctactaagttgaatccattcatagggggagtcggatacccgcaaatttaaatatcgatttcaactgaattaagactcaatcaacaattcaaattatgagttttaaattgaataaatcaattaagttgaatctattcaaagggatggcagcgagtcggatacc

SEQ ID NO: 7451 - DNA, 688 bp, Gossypium hirsutum
aagttcaaacaggcttagccttgtattatatcatataacaataataatatttgatatgcaatcacaattaaattttatttaatacaactctcatctgcctacttatgtattaacataaaaaagaaaatgttttagagttgatgattaatatatcaaaatttatataaactagttgatgagtagtccgcgtgtacaaagacttttgatggagagaaagaaagtgattgtatacaaatgaaatagaatgtaatggggaatgataaagagggatatttaagtagattctataacattgaacgtaatgataagtgaagatttgtaagggggagaaacatcattaatttattattattttaaaaaaaaagatcttttggttttttcagtagaattagtgctgactctaagttaagcttacaaataattagatacacccttatataagatatacaagtgtgaatacgatgcatgctcctttgggtgtagcaaaattgcatagaatatagacaggagagggatgcatcacccactggatggggatatatattttttataattttgttattgttccatgttgttgttcaaaggtgataatgttcaaaggtgataatggaccctcaaaagggaatagtacagagcaggaaagcaaggagactacacagattgggacgagcgaaaggacaatgtagta

SEQ ID NO: 7452 - DNA, 608 bp, Gossypium hirsutum
  misc_feature (544)..(544): n is a, c, g, or t
  misc_feature (550)..(550): n is a, c, g, or t
ttgtggtgctagttcccacttacatgcatgcatgtatgcataatcatgacttcattcacacttggatggaagctggattagtggtttaaattcttagtcatacatacatagatacatgcatgcagtcatgtgcattcaagcatacctatggacatacaaacagaacagtgggatgaaagatggatttgtggggggtgagtttctagtcccaccaccacccagggaaggcatcaacttggaactaattgttttccccattaggaatgcggggaccctataagaagagtgatgggcatcatgtgattgggttagggagggtcttgataaagatattctataattatacaatatgaaaagaaaaaaaaagggtttgaaaaagaaagatgatgatgatgtgggttgcactaaaaaaagcatgggttgggttggggttagagtacaatttttgtacacagactgaaacgtggcataatcatcaaccaaaaatgaaaacgtacatgattgtggtacgtttattattatttttagggtctggttgagggangggganttttcaaacaaagccgtactaaaacatgtgcactcaccagctcttgaatcaatctcct

SEQ ID NO: 7453 - DNA, 663 bp, Gossypium hirsutum
atattggatacaatgcccatatccaaacatggatatgaggtatgattctccaaatggcaactttcttccctgttcaaattagatctagtaatctgaaatccagcttaccgtcaatataacttattattttctttcaaaagtacaacttttacacattaaaatggaatgccaaaaagagagtaatttttcaatagagctaaaaaaagaacttctaagaatccttccccaccaaatccccctgatttggaaggttcaaaaaaatgaaaagttgaaaggtcttccccctcccccttccgaaacaggagaacaacagaattcactttgcaagcctaaaaaataacagagatgatgacaaccaggtctacagtaaattaaaaatattgctagctgaaactattgcccaaactgattgaatgaccatggaaacagggatggcatggtgtgttcttcttgcagcattgtgaaaaatttgaaaagacagtagagctaatgacgaggacgataagattggtctcatagtgagactaatgctacttgttaaatcctcagcacatgtatcaaggatggagtaattgaaaccaggatctctgtttttgaagaaactgcatcaactttcagtagacgatttatctttatataagcatgcacatgtataggctcatt

SEQ ID NO: 7454 - DNA, 674 bp, Gossypium hirsutum
tgctgcatactgcccacctccttttgcaaccttgtcgatacaccgccgccgaccatcagaggaatcgtgaaagctctgatacccttgatacgagagaaaatccgaatagagaatagagaaagatttgaaagagaaaagagaaagactgagagaattgtttgatgagtaattccttgaatatctcatgcaaaacatgcagatttaaagaggttacaaataaaatgacgtagactattctgttataacaaaaacgctccgtatcattaatcttaaaactccccgttttgactttggctgtgaaaattcttctgctagcatttcagctcataacaaggacattacctatcgggggtggttccaggccatgttcatcgtgaacgagagaaccggcggccgagacaaccaaactgaaaagattaaagaaggcttcaaagaaaattgatagcagaagagtaaaaatcttttggaaactgctatcattaaagctgggacggtgatgtgaagagacaatgtattgtgatgtccagctgttgtgattgacttgactaggattaggtttcctttttttaaattgttttaattttgttttttatgggccattcctgtttgagtttgtcctgttgttttgtttttttagtttttgttggatgtttctttttggtttaagcccaata

SEQ ID NO: 7455 - DNA, 678 bp, Gossypium hirsutum
ccgatagttcattcgttacgccgacaagctaatagctcttccttctgcttgtgtaggcccatccccgtatcgtgtgagtaaggttctataaagtcttttctttcagaacctctcgctttgcctccctttgcctcctcagctgtgaaattcgatcgattcatcttgaccggatcacatagcgttagttgagcggtagaatatggtaatattgaatttctctttagcttctaattacttatatatataatgtaatataattactaaaagcgaatcgaatccaggcggactgcaggatgtggggtttgggactttttctagagaaccagtcccacgagctgaagccaagccgtacttagtcatttcagaacaaaaagtagaccatgccctcgcctagcccccacttcaatgatcaatgcgctacgctggcaaacaaaagggaagggaattacttactctagcaaaagggacggatagactaattggcttactaactctatctctatctattctagcaccggggttaaaatagcatgacgaactgactgactctatcatgagtgattttcccaactcttgctctagaaaaaggggaattactacctacgcatacataccttactctagctctagaactcgaaagagcttgttggcaggttggcttcttctatcctcaccttg

SEQ ID NO: 7456 - DNA, 685 bp, Gossypium hirsutum
  misc_feature (400)..(400): n is a, c, g, or t
  misc_feature (446)..(446): n is a, c, g, or t
  misc_feature (449)..(449): n is a, c, g, or t
  misc_feature (518)..(518): n is a, c, g, or t
  misc_feature (559)..(560): n is a, c, g, or t
  misc_feature (579)..(580): n is a, c, g, or t
  misc_feature (583)..(589): n is a, c, g, or t
  misc_feature (599)..(600): n is a, c, g, or t
  misc_feature (608)..(630): n is a, c, g, or t
  misc_feature (634)..(643): n is a, c, g, or t
  misc_feature (649)..(651): n is a, c, g, or t
  misc_feature (653)..(653): n is a, c, g, or t
  misc_feature (657)..(680): n is a, c, g, or t
  misc_feature (682)..(682): n is a, c, g, or t
tacttctcaagcaagtaaccgctgcttttgtcctacattgtataaatttgcaagaacaatgaagaaaggaaaaacagaaccgaaaagaaaaagaatattaacctcttctccatcaaataaaaactcctcttcatcaagtccaactgcgggtaaatcctcctcctcatctaatccccccaattcaacttcctcaagaacatcatttccgaaaaacgcatattgtgatgcatcaaatactgcacctcctgcatcatagtaaagctaattttactaaaaaaaactcctaaaaaaaaaaagaaaaaaataacaaaaaataagggaaatggcataatacttaaaaaaaggtgtagaaaagtgcccgagaaaaaaacataattaaaccaaaatttttccccaaaanaaaaagtccccacaaaattatgaaaaaataatgatgataatactanaanaaagaaggaggggttttttttttctttttcctcttaacataaaacaggaagtaaactattttttcttcnacaccacgaggcgccgccaaaaaagcttttttttgttggannccagaggccggggtgacgnnaannnnnnnaaacacacanntttgattnnnnnnnnnnnnnnnnnnnnnnnccannnnnnnnnnttcacnnnancccnnnnnnnnnnnnnnnnnnnnnnnncntca

SEQ ID NO: 7457 - DNA, 540 bp, Gossypium hirsutum
tgtgacaggaaaagacattgcaagaccagaacaacatgctagctaaaaaggtaaaaaattattacagttttttgtagatatgttcaagcatggcttatattctagtttcatttaatgcctctctgccatggataaagcttaaagaaaaacagcagacaccgacggaacatgcacaacatgaagtgcaacaaaaatttgtccaaaactcaccaccatcaacatccgtacaaccaccaacaccaccaccggctgcaatacagtttccttgtttgactattgggtattttttaactctcttttctcttatacaaaataatgtgtttacctgctagctcaatatccattccataatgggtaaaagcatggaagacctcaaactaaactaagagttatattttacttttttaattaaaaaatatgcaaattagtctctatacactagagtaaattgattcttttgttaaaaatttttattcatttctattgttaaaaattgattcttgtatgtcaagaatgaagtacacatggcacgtttatgtg

SEQ ID NO: 7458 - DNA, 618 bp, Gossypium hirsutum
tgttctctctgttattgtgatgctactgaagtcaagatcttgctgtttgcataagtttggtgcagagtatgacccgaggcatgtcttttgaatttgtcttctctgtgataaagatgtaaaatatttcaacatttggatcactttattcatctttcataaatatagtggtttagctcaggcattagttttacatctagcttctttttctggtgtttacactctcatgaatcaattgctgggcagttaagaattcgtctaaaacaattatttcagagagtgcaaaacaggatgaatttgggatctatattattttttacgaagatttataatttcctctatctaatataaagatttttgagatgcaaacttggtgttcttcagggaatacattcaactgcaatcatcctgttgtcatggagctcatacttgacagcttaagacactggtatggatacgaatcctataggaactcgtgcctttttctgctaataatatagatatttctttttagttaaagcaatttgaaaccttttttttttgggtttaaacacccggcccggaatggtttccttccctccctaattccccttttttttggggttgggggggtggtcctaa

SEQ ID NO: 7459 - DNA, 675 bp, Gossypium hirsutum
gcctgactgtagaacatctgtttcaataaccaaaataggtttcatgttagcaattacatttggttgttcaattcagatgaagatgtcacagttttaataaaaaggatggatatgagcattgttgtcataaacccacgatgtttaggacaatttgaagacataatcagagtatgctggacttgacatcatgatatcaatttaccttgtagtaaagacgataataatctctaaaagggcataaatgagaaagggagaggagataaattcaaagtgactgccattagaatagtaacgattaataaaaaggaacaataagaaatataagcctcgcatataggattatattgtcttgcacatgtacctgagatgccgcactcagatctgaactcttctcaactaaactgtccagcttctcacctcgtgcaagcacactatcaatagtttgatgctgcatcaaaaaataatcatttcaatgagtgaaagaagaattaataatcaatcaaaatgctaacacaagcatgctaaaactttcaaattttcttcaagttgcattttaaatggcaaaagtttaatagaaaacataaaccattagctagcaaatattcctttataatgttcaagttgagaacatggtaagaaaacaaagagatgacacttattaagtgcttgatgtgc

SEQ ID NO: 7460 - DNA, 624 bp, Gossypium hirsutum
tggatattcaccaaatctgtcagttattaataattaagtacatgccgattgagtcttagttcgactagtatgggcattgttactaatgcagaaggacatgagtttgtgtgcgttgaaatacattatcttcctatttatgggctgcgatgggctatgggtaattttaagcatcgtgtcaaaaaaaatatgatcaaaacttataataaaattgttttaataataataatagtaaaagtaataataaagacattatttaatgctttggcttacgtactctttatgaggtatgtataaacaatccaagcaataatgccaagaacaaggacaaggatgatagaagagagaatccaaatctaaggatcacaatgggacacgtggcaacacgagaactagctaaagagacctgcaagcaaccctttgctttggattgttcatatggtcatctagtgaccgactatcccccccccctcacgataagaaagcatccatccttgaccacctggtcgagccctctattaaaccatttgttattaacaggtgcactcttctcaagaggggatcactcgagaaccatcacatctcctataaacacccccaaagcacaacatagaagaggggtctctc

SEQ ID NO: 7461 - DNA, 670 bp, Gossypium hirsutum
ggtgttcattacttcattgcacgttgatgttgttgattttgttggcttttgtatatgctattgtacataatttgttacataagattgataggtttgcttgtaggccagggaaggatatgctttgtgctgagacaatttatcgttgaggctgaatgacttaagctttgagctgttgtccggtggttttaatttatcttatttagaatgttgctttctgtagatttggactgattgtaggaaatcttgatgtttgatgcacattttctttctgttagtgatgtgtggcaagttgtttcaatatgttgagttgtgttgcttagtcgaaattgctaacttactacatgtagtgaattcttgttgccttatataagtagattatgatattgcgattccaggggtagttaatatattctttcttggattggagatttatgtacattgaataaaagtttgatgtctttacactttaagggaatgattgtagggtaatcaatctgtttccatggaggctaagataggttgtctgttaacctttgatatctcaaatatttaacctctctttttccttcatttctaatgtagattctgtgaatcccctgaaggaaaacattttaattttaactcttgataataatctgtagtcagtgtgcttgttgactgacctatttgg

SEQ ID NO: 7462 - DNA, 545 bp, Gossypium hirsutum
tgggaagcactggcaaatctgctatgttaatactcatcatgtcaaaagcaatgcatgtcttgtgcatgtgtgtctcatcaaatacaggaattttcgggtatctttggctgaaatgggttaggacgatgcgataagcaccagcggagttccccacttcaatggcttccttggttgtgctgtggtttctagcgatggcctcatcaaccaaaccatcctcaaaagttgcctgtaatatgatcaagtgtaagccggtcaatcaaattagctttgagaatgtgacggtgatggctaatgcaagtacaaaagagatccagtttcaaattaaactcaaagctgaataaccactaaagaaccctaaatagttggataatacaccaaatagacatggagaatacgaatgcatctgaatgcaccaatcaaatatcttatttgtatgtcatgtcctccatgaaagtatgtttaaatttacaaacttgcattgtattatctaaggaaggtgatggcagaactattagttacgatgatgatcaattaaacatgctata

SEQ ID NO: 7463 - DNA, 687 bp, Gossypium hirsutum
caacaatgatctcccctgcacaatttacatacatgtatatcaatacaagattgaatagctcaactattcaacatgaaatgattacctgtggtcaccctcttcttctgaccaccagagatacctctttgaagggcatctccaactattgtaccagcacaaatatcaagtccaagaatctgctgtgtcaagggtttggaaacataagacctacgcattataaaaggaagcatgattaagcttggtcactaaaatttacttttagtatgtagtccgtttgaagggttcggctttcccatgtagcctgtataatcagaccaaattgttataatttataaatttctcaaataacatccactagtagaacaaactatatgcaaaatccaaaaaattaaagttcaaaccaaatattctgacacttaaacttcatcttgttttgtcatataccttcatgtaagcatcaatatctggatctggaacaatccttgcttccttctcccttctgcttacctccatcattaattcttcgtaaccataaaacaaatgttattgagtaccaaccaagccagaaaaatttccgaacagaagagataaatgttatttcgagtattaaaatagggagataaaatctcgagattaaaactaagcataaacacatcgagaacaatatcttcatcattgaaccgagtg

SEQ ID NO: 7464 - DNA, 656 bp, Gossypium hirsutum
ctcaaagcaaacaagatggtctgtggtgtcaaagttgatgatgcacaagggggtaatatcgtgtgaagagaatgtaaatgaattggaaagcgtggatgctgcacttcgcagacatacttgcgatgttgagaagttgcagatggctcataaaagattggtggagttggaaagtgggattgaaggtctagagaatcgtttggaatgcgtgtttaggcagttgatcaaagcaaggacctctctcctgaacatcatctctcaatagtgatttcccaattctatttgttgtgccgaggcatccaaattttagaggacatgcctcggatatttttatttatttatataaactccaaccaattgtacattacacaaaaactattgttatagaatgaaatatcatgtgttttatcttctgctgatattgagatttaatagtttctcccccagttttggaatttgagaccttgtaagtttctctttttccaatttttcttagacttcagaaatgatatatgggagaaagtgataagacgaaaggattagagactgcggagcagatctctcaaacttatgttcataactccaactaatctgatataactatattatgtatggttcttgtggattattccatccatcctctccatttgagtcatcag

SEQ ID NO: 7465 - DNA, 644 bp, Gossypium hirsutum
cccaaagtctgatgctccattccttctgttgtaaaggactatgtcaaacaatgttgcatgacagatgaaagagaattagttatgcagaagcacctaccaggaaccataaattcaggtttccctgaaggcagtccaaccctgttccttttagaaccaggagagagcgagctgttagaactagatattgaactggatggttcaatttcccagggagagaccctattatgcctattggcatcaatatcatcccaccttacctgcaaaataagcccaaaatctactagcttaactcctgagtaatttattgataaaatcataaaccaatgaggtggtattcaaaacattgcctacgaaagaactaattagcaagaccaaaccaaagcaatcaaaacaaccatgtgaagctcgacagccgaacgaactcgaaacattatttttaagttctgaagtgcaagcaccttccaaatatgcaaacctaaataattggcatctaactaagagtgagtacagcgcttcctcgagaaaataaggtccaccaaacaaggccattttttgttatgttcattctgcttaatgcatatctaggctggatgaatgagggttaattattgataatacaagagaagtattttgcaggataagca

SEQ ID NO: 7466 - DNA, 670 bp, Gossypium hirsutum
tgagaaacaaaggaaaataattttcttagaattaactttatttaatagcatgctcatgcatttaatgacaaaagagaggtagaaagtaggattaaagtcatacaaatgagaaacattgaactttgatgtgtcactttcgcggctttgaaatgctgctttcaggactttagagaagtccatagggttatcaactttgtcctgcacaagttctacagaagattccggtaactccaaacatatctttggtaaagtactccctgattctgagagcaaatcccttatctacaagaacatttaagggctcagcattagtacacttccgcattaccatgttgaaatgatcattcaacaatataaaccaaaaatgagatatcgagattcgtgacaaccactagaaatgtgagaatacagtgagaacagttaaaaaaacctgttcattatagagaccaaaggctgtgactgagaaattgaattttgatgttgaagttaaatctgagttggctaaatcaaacagctcctcaaaacaacgagcatataagccacgatcatggttagatccctcctgagataaataaagccaaaacaaggctaatattagcatatgaaaggccatgaatagacataaaattcccatttaataaggtgcttctctaataaaggtgaacaactc

SEQ ID NO: 7467 - DNA, 565 bp, Gossypium hirsutum
ctggtactgcattcattgttttactgtaattagtcttttggagtgaaagtttttggctgcaattttctcatattggccctcacctagctcccttgttttgtacatgaaccctgttaatccaagttgaaactttagaattttgtaattggtatatgattgtgctcctaaacttttctggtctggtactcttgaaattaagaatgtagaatacagattgacctttggatgtagccatctaccttgattgcactgtctgaatatttatttagctctataatgtggattgtctgcttaatatattacatttcctcaaccatgcagaagaggctggaatttcatcacctcatccttctgttgttggagttctcccccaaccttgttctcagggaaataggtaagaatacctgctggaactttctcttgtttattttggttttgcaatacagactgttaagttagatatagaatgacattttattagaagccaatttgagggttattgtgaggccaaacatcctttcatcaaacaagaaatagtagcattttatgtctcatataaatctgt

SEQ ID NO: 7468 - DNA, 657 bp, Gossypium hirsutum
  misc_feature (645)..(645): n is a, c, g, or t
  misc_feature (647)..(650): n is a, c, g, or t
  misc_feature (652)..(654): n is a, c, g, or t
gtattttacaagttgcttttattaattaaacttataatctgagcatcttaatatatatacttaaagcatcgtaaattgcagcagaaaaatcgacctttctttttcgatattattatacacaaacaagtaaaaccctaagccaaggaactagtgaaaattgacttctcaactcttaaattaaaattgattagtgcattctatcatctaagaaaatcaaggctcaattcactaggaacaaaaagttctcaaatttaatataccaacaaagtacaccttaacaagctgaaacaactagaagcaaaattcagtgagcatatattcaatttgacctaataattaattatttaaggccgaaagagatagagaagataccatggctgaaaattgatggcaaagaaatcgaagctctgcactgatctgttgcaggaaagaaattaagaaaccctttcggagaagttgtggtttaggggttttaattttcataagtagaagtcggtgtaagggtccgactctatctacatgggtcaagaggaccgggcttttgcacttgcagttcaaacaacgcttatgcttatctcacgtgtttggcgcgcggtttttggaaaattttccaaatccataatcacaaaccttctacttcgggcntnnnnannnaaa

SEQ ID NO: 7469 - DNA, 593 bp, Gossypium hirsutum
tgtaaatgcatgcaccttgttttttcaatctttaaccctactaattgtatttctaaagctcagtgtgattagaaaaatagcttggtgagtaagaggaattaattttatgtaaacttctattacttcattataatccttctttaatatttatatttgatattatcaatcaagttttagtagggctttaaatcctgaatacaatcaccgagttattgtcatgtctttgatattaatagttctaatctttaacccatttcttctaaaataatttgattctatatttaattatttgagcatgtatttttattatattgtactcgtaaacttttaaaaatatattcatatttatgaggttttttaacatatatttgatgagttaaagctctatactaaatcaaaagaaaattatctctctttttttttggacgaattaaaaaaatttgtcttaataattgaaaaaaaaaattatttccaattattaaaattgaatcccaagcgtctaaagtacaaaaataaataatcatgggaaggaaaaaaaaaataacctatttttgcttaatacgggaggggaaggtatagggtttgaactctaa

SEQ ID NO: 7470 - DNA, 414 bp, Gossypium hirsutum
tccttttcatgccgtcatgttatacgaacccgcatctcatttctctacttcttgtggcaattttacatgaccgagaatttttaagcacctactgtttaaaaattcaaaatttgaatgctctggttcacatgtaatcatgttgtcgaccgaatgaatttttgaaagtgtgctaatgatgatagcagtaaaatgttggtatgctgcagtttcctttcatcaataatttggagaatttttattaggaaaaattctttccttgaattctttctgctgatgttttatgagaattatgtccctatgcattaggtttggtttatggggccagggatagtaaatgttttgatgctttgatccttcaacataagttttagaaaataatttcataacatggactggcatgatcttgtgaaacat

SEQ ID NO: 7471 - DNA, 667 bp, Gossypium hirsutum
aaacaagactcagttgcagctaggtgtggattttcattgttttcataacaagagagaaagagggtggtcccttatcctttgatttccgttaggataattcaacaaatatctttggttggttctaattgaaggctggaaatatatttatcgtttcgctttctctttgttttcttatgacagaaatcaccactttactatttactttaagtcctatgtcaagcaaccagcggtaaaagtacagaagcctcaactaaaaaaaaagcaaattagttactgtacaatagatccgatagcaaattgggtcgatatgaaatgcatgtggcacgccatatgtaactaactgattatttcatcaaccacaccaaatttcaacaatagaaatggatgaaaattttaattaaaaggactaatttgctcttttatttaacccgtacggggactaatttgctcatttttggagtaaaggggcaaaaagcaatctaactcctagtacaaggacctccatggtacttttaccagcaaccaaccttatctttttctgatggtaggaaatgagcttagtacctttagattgatttctggttttcttggttcttaactccctagtgtgccccacttttgatataattcaaaatcaaacatttagaaagcaaaccaaccctagtcg

SEQ ID NO: 7472 - DNA, 641 bp, Gossypium hirsutum
tacacattgttatccgagtatgcacatccgttgatatgaacaataacgtacatgatattggtaattctgacatttgatattaaagatgaataattgtttcaagatatggtcatattgagaacaaggaatacttgttgaagtggggaggatattatgaactcctgttaaacattgtttcccagatttgacattaagactgacatgaataaacaatgtttgggaaatttgattaaatcagcaacggcttaattaaataggggaaaaaaggggtcattggaaggatttacacaagaatttcttcttctatcctacgggtattgtttataacaaagtgggaaacactcgacttgatttgtaatagattgttgatacccatagcaaacaaattaacaatacatgggatacttggagttttctcttataattccaatccttcatcaacttgatagcaggaggtattcattctaactccactgatgctgttccttgcagccattaatccattgagggaaagtctcttctttgctcctggctctggtctttgctttggggcactatgagatcttaacttggccttgaatgattgtgtcttcgccatgtagtttggtaggttcgaatgaggtcgtctaaaatacccttct

SEQ ID NO: 7473 - DNA, 609 bp, Gossypium hirsutum
ctgtgaaagcagcatgaatgtcaaaactacatgcatgcttctttacatgtatcaatgttgccatcaccatgggcaaaagcaaaaagttgaagttgcggctctaaagtcagaatctatgatgctcgccatcaacgaagatcgacgcgtatcatcagtctttgggatggaaaagcttgtttccagccccgaaatcgcaagtgccatgactttttacgaggtaacttggttcatacttatgcatgtatatgtaatttacatattagaggatttaccttcctcccttagctgtaattaaataacctgataaatgaccaattgtatggcatataatcctcagtacttttgaggatagtgaaagttttcctctatgaacttcatttttagttccttgtataagacccaataattttgcatgcaaaacaagaaaaataataaaaacataaaaaaatttagttattattatacccaagtagagcaggacacatggagggctgccgtttggcccgtggtcaaccctttgcagacctccagttggactaatctgagggtccgctatgcacccttagcgtagcacccctcactgaggttacctggcttaactgtttgtac

SEQ ID NO: 7474 - DNA, 598 bp, Gossypium hirsutum
ccaagatagtgcttatattggatgcatgaagtcaggagaagtggtttctgaagagtacgtatttttttatatcttagtctgtcattgtatcacgataaaagatagttcttatgtcatgtttggacattctttttttttcttgtaatttttgtatatttgactctggttactttcccccgaaaattttggaggatattcattctttcaaatgctactttgagcttgagtcgtttacattctaagttcaacttttggatatcttgttttcaggggaaagctttggtatgaacctgaatggtggaaatttggggatgagaaatcgtaagttatctagcttgatgtttgcactaccatattttttctattttgtgttttcatactattatgttcttcccttcaggtatttccggcatgcatctggttcacttattatactctccaaaaatcttgctcattatatcaacacaaacaggttagtttttatttgttgttgctataatcttgaaagaatgagatagacattctactttgaggttctcaaactgaaaagaaaccaatcattttgctttgcatgcaaagttgaacatagtccaaacat

SEQ ID NO: 7475 - DNA, 604 bp, Gossypium hirsutum
ggtatattaagaaaaatgaagtttttagtaacaattgcttacactttaatgcatctaaacggtctttgaaagttcatagtctcatacccatttttaaatatatctcaaacacgaatactttgagaaaagtaattagtgtctgagctaacctagagttttaacttcagcaaataacatggtaataaacatttgtagaccagcttacccatgttaactcttctgaagctctcacatctctagtagtaaaaagggcaagctgttcatagaaatacaaagtaaatatataaataacttagcacttcaaatgcatttcagtaaatgcaggcaagcaccaatcctatgtttcgattctagcctcaagcaaactcgaaaatttgttaccagtccgattcatacatgataataatggcgatcaggagtctccacttcaactggaatgtcaatcaagtttgcatcaaagcatctgaaatgttaataataaacatcatgataactgttagcaaagatttatcacacagttgaaaggaaccccatagcacattcagcaaatgtttgaaagtttgaagtactagcatctgtaatattaagcgatggtgtttcagat

SEQ ID NO: 7476 - DNA, 645 bp, Gossypium hirsutum
cttgttcttcacgtccacccagcatcaatgcaggatgcactttaaagataaattgttttaataattccaaagcatatcttaagttgacctcacttgtgccaatctagtgaaatctagaaaagaatgaaaaacaatgggggaagaaagaatgctgttagcagaacagattacgttcttgttataataaaaaaattgaggcctttaagttccacttatcacgttaagcatctatgtcttttgagtggcatgacgaaacaagcttctccaaaacctaatagctgataataaactaattcctagactgaaaatttgtgaaatcgaaacagattaattatggaactaatgctgaccaataatgtgttgaggaaatactaacaggattaacacatctctttgtggctttaaaatgactaacctatttgattattatcttagacaggctgagccatactaactattaagctctctacctaaattgaaagtagtaaatccaaccaaaaagaatccttttccttccctttttcttgatttctctcttgaataaactcaattgtttaaaacatggtgactgcatcttaattctgatgtggattggggaagaaaacagtagcaattaaaaaagaattagggctgaacaaacgaata

SEQ ID NO: 7477 - DNA, 646 bp, Gossypium hirsutum
tacgtttcagtcatttggaactgtgttaacgtggcaattattcagtggtccagttagagaggggtccactctacaagttaatttgtgcctttggccaaacttaaatttcataatttaggagtaggatttacgttttttatttatttttcttaaaaatggtattgattacctgttatatttaaacattatcctttgcaaatatccattcaaattttttaaatatatgttttatactttttaaaaaaatttaatcatttttagttttttaaaataattttttaaatttataaatttttaaaaaattaattagttgctgatatgacatccatacgtcaattcacgtgtacatcatatctaacaatacaagtttaagggttaaaagagacgaaaaattaaataaaaaatttaaaaaaattaagttggagggcaaaataaattattgtgcctttagattttagataaaaaagattaatttattttttgttcataaaaaaatattatgattttaaaagtaaaaagattatcaatattaagatttagatgaaggaccgtttattaatgatgattgttaggaccaaactaaattatacattcgattagtatagatattgttgtcaatgtaagaggataaagggtttgagtgcac

SEQ ID NO: 7478 - DNA, 623 bp, Gossypium hirsutum
ttgatgcatgcttttcaaaactgttagtatatgaattttaagacgaggatcgctgaattcctttgatgcctgaaacatggaaaacaaagtaacatgatataaaatggtgcaaactttttaaaaacataatagaacatcatcaagcaatgaactcacaaagacaacataatatttaaaagaaaaagttcacaaacaacgagcttacaacttggaacactgtgtcaaatgagtatcctccaatctgagcttcacacaaaaatccaaccttgaagaagacaggggaaccataagtttggagtcaaagaaaaactgtcattcagaaataaagtaaaaatttatgatggcatacccaatcattgtctcttgctaatactgcaagatattttgtactcaagggcagctgatgtatctgacagaagacggttactaaactccagtactgactagcagctttttgttgagatctcaattcagttccgtcaccattaccagttaagagccaagatccacaggtttttccctccactaactgtggaagactagccttctctaaatgctgtagaacaagcataagagctcgagaaggctgtttaccataaactgaaattagagaatccctttgt

SEQ ID NO: 7479 - DNA, 620 bp, Gossypium hirsutum
  misc_feature (527)..(527): n is a, c, g, or t
  misc_feature (580)..(580): n is a, c, g, or t
  misc_feature (584)..(585): n is a, c, g, or t
ctacgagaagaagaaacgccaatcagaacgtgaagcagaaatttccgaaagggataataagaagcaaatggatgaaacagagctgaaggacacaagaaacgatcattcagaaaatgaaggaagtcgaagcagaattgaacgtgaggtagcagaggccagcactggagaaatagacctgaattgtcaccccattcgtgaagatgtgcaacttgaaggaggattgaatatgatgagttttgttgaagctaccagcttgccagtagaaaattacattaagcaaaatggaattgaaagcttaaagactgagcaacagcaacagggtagccttgggtcccattttcagtcaaaagttaatagagagaatgagagacccctctctgatgaagagtttcttgcatctgtaggatgggagcatgtagggcataaggggcccagcttggagagaaatagtcttcaatgaaaatgtccttggcagatttgctgctctttttttttttcctttcctttttccgggaatttaattttgnagggggtaacccccccttttcaaaaaacccccccccggaaaaaccttttgtanggtnngttccttttaaccaaggaaaggggggccccttttt

SEQ ID NO: 7480 - DNA, 621 bp, Gossypium hirsutum
aagcacatatattttgatcattttgttcctatttaactttggctagttcatttttaatttgttcactaagttagtaggattagtttatgatttgagttgatgtaatagctgatatgtcaactatcttttgtgtgtaattcaagcaaaatttagtcttgtattagtgggagcagttaagtcattaggtaattgcccattactttgcaactcatatattattcaaattttgaatgaaaaattaaggtgaatttttcagtcatcattctcccaattgttttcattctgtttatgcttcgatttctttgcttggtctgctgcttttgtttttattttactgcttaagttccaacaatgtgacacaacaatcacaactttcccaagcaaacactaattagtaatagtaatcaaattgtaatgatcagttaaacctaataaaggatcattatagtaaatcatgaatctgattgtgacaaaaagatgatgtgttttccattaattatggtggaaaagaaaagttttacttagggacaagtgctaagtacaaagatatacactattttctcctcatcatcatatattctgcaggaaggttcctgcacctttccttaccagtgtgatcat

SEQ ID NO: 7481 - DNA, 614 bp, Gossypium hirsutum
  misc_feature (592)..(596): n is a, c, g, or t
  misc_feature (601)..(602): n is a, c, g, or t
  misc_feature (608)..(608): n is a, c, g, or t
  misc_feature (610)..(610): n is a, c, g, or t
gatttctggtttttggtgagaatgtggagaatcactgaatgagtttcaagggaatgtgaagtggggtttcgagttttaacccaattgaagaactcaagagaaagaacatggtccttttgaatctttaacaaaacatgcttaactctaaatggggtaaagtgggtagataaagcattaagcttattccaatcagagtgaatgaggtgactatgggcaacattcacaaaatcaaggtcttgacctctgggttcagagattgttctgaagggaattggaattggattccacttctttctccttgaattcacatcaattaagggttttaaagaagtaggttttacttcaacagaaccgaacaaagttgagaagtgacgactcaggaaattattcatgaaatatagcagataaaaagaaacttgcaatcttagagttcaacataaaccggcaataaaggggaagttttcgttatcacctaatatcaccatttgaacgcagctactgaagtagtgaaggtctctctgcaacgcccttttttttccagactttcacgagttcagcaacagtagagttttttttctctcttttttttttnnnnnaaaanngggggntnaaaa

SEQ ID NO: 7482 - DNA, 669 bp, Gossypium hirsutum
ttttagaaagtgggcaggctgaatgaagaagctgagtccatatatgaactttacaagcaccccaacccggcatgtgaagctggttcaatctggaaagacattgtactatcaccttctagactaaatattcaaaaggagctgaagtttaccatccagaaagtggaaagaatgacacagcacaaaaagagttaaaagcttatgaatattcaccaaaaaatttacatgctgaaggtgtctcaaacctttttctatagttatgaccaagaatgtctactaaggttgtattaaatcatgaagaatatgtgtaaattttttgttactagcttagctcagttcagaatctggaactggaaaacagaatattcccattaattgtttcaaataatcaactagtatcggtagatgtggggctgagcgttggaactccaaagaggaatttaaaagtaaaagaaagagcaattacagcagcaacttaagtgagataaattcttacttcacaattcaattaacgcagactgtgcgtggttgcaattaccatcaaatctaaagtcatgcatccacacaaacatgcacacctacaacaaaagatgagtatggatgctagctttcaagcaataaataagcagaataaatatgataataaccaaaaggatctgcagcatgggataa

SEQ ID NO: 7483 - DNA, 617 bp, Gossypium hirsutum
  misc_feature (606)..(607): n is a, c, g, or t
  misc_feature (612)..(614): n is a, c, g, or t
cttttgcagcggtgctattcgggtttatctcagagaggtcagggagtgtcaagccaaggcaagggggatcccttataagaagaaaaagaagaagccgcatcaaggcaagggaggtgatgaatccagctccaccattcacttctcttaatctttggacgatgtatggtaattatttttatcatccatccgcttctcaattttttctaaatttcaatagctactttcactttcaaaatgctagatctaggaagcagtgctagtatcttcatttcatgagaccactaactctatgtagtttctcaactaaaagactgctttgtggaaggctactgacatacaaacaacagatcaaatctaatcgtttacctaattggaggaatactaatacagattactcagttcccaatattgtagacaggcaatttccttggctctcaatgaaaacttataactttcaagaaccctaatttgcatatatagtgacatggtatggaaaaacattggagtgatggacccatttggatgtttccagagtagcttttactagctagctaggtattttttacttttatgggacattcaaatcgatggtataatttatttcgnntaacnnnaaa

SEQ ID NO: 7484 - DNA, 657 bp, Gossypium hirsutum
tacaggctgccctttcaactggagttttgcaggtatgttaatttttttcaactatttatttttctttttcctacacatatttatatttgaaatatactcgtattaaacacatatcggtgtttgcactactggaagcttgtaggaactgatcattgtacctttaattcttcacaaaaagctttcggcatcgacgattttcgaaaaattccgaatggtgtcaatggtaaaatgcaaaaaaggtttttgtattttaatttccttcgtatttcggaatggttgttattgtgctcttttcgtgattgtttgttgtggtataactctatatcaatgggggcgaatttaagggtatgagccgtgcacaacagctttttagtttcagtgtcttagagaattatatatgagattcttcgtttttaaggatttaggttgattgaaacaaatttaaagtgaattcaatgcctaaagccacactgtttgcgaggctaaagtctagtttagtgacaatttctccacccaacaaatgtaaaattgaaattcttttactgtatcaaaaatgataaacttataaattaataaatgataaaattatatttgacttataaaaaatctataattcaattatgatcccgtaaaagaatttttatattcgcccttgct

SEQ ID NO: 7485 - DNA, 642 bp, Gossypium hirsutum
  misc_feature (635)..(635): n is a, c, g, or t
  misc_feature (637)..(637): n is a, c, g, or t
tatctaaaactaaaggttggcttatgacaattacacgcataaaagcataagcatgaccttatgctattgatatcaagatatcctaaatcagaaaatcaaagaagagatccaccaacgttgatcaataaatgaatagaacacaatcaaagtcgatacaaatatgcaagacaattcaaaaagcacggcaataaaaccttttcagaaacaaaagcaatgaagcaaaaagcaaaagacttaagctaccaatgccattcctctcgtccttgtttcaaccttcaaaaactattatatttataaaaaaaaacaaaaaacaaaaagagaataatagttaaataaccagctataagacaaaaataattacgcaaccagaacaaaagaaatcacatatatagcattaagcaaataataatccagctaaatctagatataatcataacaaaaatatatattttctccatttatctacgaatgaagaaaattgaataacaaaaaaaaacaatattttcggtgagcaaaacttataaaagaaatccaaaaatccattccgtttttctagcatttctataaacattacaaaaagagagattagcgtcaaataaatccatgaaaaaaacaagaacttacgggatcggagnanctaaa

SEQ ID NO: 7486 - DNA, 650 bp, Gossypium hirsutum
ctgtgtgtgacaaccatggggtgacctaagggttgaattgaccaagcagagatgctgtttcagctcatcactttgaatgaccttaaccggatttgcatggcagtcacagatcatcctaacgcgattctgcttgaacaagaaacgagcagcttgagggatatctgtagcagggtaatgcaaacccaaataaggctctaaatcagacctcctgatttctgacacaacttcaccatgaccatcatcatggaacttatacaccataaccctgtcatagccagtaagcttctgaacatcctccacaaccgtatcacacaatactccgatatcaccaccaggaagcgactgcaacctagcaatcgcccgaacagcgagtttctgtgagtgcacagcaccagcaaccgacaatgccggatcacctaaccgagcaggctctaaatcaatcacaatccccacatcaattctatgcaaaatagcataaaatggcttttgagtgctccttgaataaacccaaatcgggtttaacaatgaaatctctctagatgcggcagcttttgccaaagaagcacctgatgcaggcgtgaaaaggcttttcacatcaatcccaatcaaactcttcacccctttaatctcatcctcactatccaaaatcc

SEQ ID NO: 7487 - DNA, 676 bp, Gossypium hirsutum
cgtgaagacttccttttactgaattgtcatgtccccatcatattttcctggcccactgccatggaaacattgcttgtatgctctttgaatttgaatacagaggctcagatacagatatgtattctatttattttttaaaatgttatattttcaaaattatcttcaaacatacttcacgggaaaaatcatggtaaaaatataatagagatccatgtattaaaagtcatactgaaatttgatcattatattaaaaaatgaataaattattttagattaaaaagtaaattagtttttctattaaaaatttaatctatttttactgttaaaactagctcatgtatttccgcatgaaatacacgtgacatgtcacgtgtcattgcctgattattttgttaaccgtgacagtttttagctgtacaaagtaatgaaaatattaaaagaaaggaccaattttcttttacaggaaaattggtccctgtatgccaacatgagatacacgtggcataccatatgtcactgtccagttattctgtcagctacactaatttttaacaatacaaaatgatgaaatttttaaaagaaatgttcaatttactttttaacctaacatacatatattactttgcataatttttacatagaaaaggcaaaacgtaatctaactcctaatagagga

SEQ ID NO: 7488 - DNA, 575 bp, Gossypium hirsutum
gtcctttgctttggatcatttcacagggaaattaaataattcaaataaatctaaatggcgggcggtttcttaaattaaacccttttttaaaatattgtttcccctctctaaatctctgccataggatctggatattacttcatctgttgtagtattaacgcaagtgctgagtccctctttcttgtcctgctttggcggaatctctgctattattagcatgtcatctatttatattcaaacataaatcttaaaattataaatgaacattaaataaattttaattttatatacaattgtatatataaaattataattttgattagatttttatataccaataataatatctaacatcatttttaaatttacattaaagtatagggtttgtgaagacggaaaatgatgccaatgagtaaacttgaggtttctttgaatggaagaaagcaaaacttgttcatacaataagtctataaacatttagaattcattgttacttgaccaaatatcaccgaaagtacctgaaaaagtggggttcagtttactgcagctgatgataaggatgtaaatgttgcttc

SEQ ID NO: 7489 - DNA, 562 bp, Gossypium hirsutum
  misc_feature (514)..(516): n is a, c, g, or t
  misc_feature (547)..(549): n is a, c, g, or t
ccttttctttggagtattagagtttttggatcaaattaatcaggtttcttggtttaactgcttcatatatgcatttagagagcactatataaaaatttttctaaaaccagcgactttttcaaccatgtgaggtctcaaaatctaggtgcttccatccctttgatatattaaagttgtgagctctacatggattcccaatgcttggtagcataaattaaagaattcaaaagaaaaaaaaaagtgttgaatcagctgtctgcatatgaaatatactttaggtgaaaggcatcaactttaaagctgacaaatttgaacatatgttattattctaaagtaacatgcttgcttttcagcaggaacaaggaaatatagccaaagaaacagctatatctttactgctaaaccccccccccccaactttgctggcacttatggatcataaaattctaaaaatttagaacatagtatttgcaaattacatttcattttttattaaattttttctttaaatccnnnatacatatcagatatgaatataaaacacgannnaatttaagaaaaa

SEQ ID NO: 7490 - DNA, 659 bp, Gossypium hirsutum
aaccaacggcaaccagacctctgaccaaaccaaatttctctttgcttttaatgttgctggacccacaagttgccttgcctgatgagttggtgggacgaatgatacaagagttgaaaggccagcccttccaaggaccacctatttctgcagaaggaccttctttaagtttcgatgtcacccagcaaagctctgcaaaatgagggcattgcaaaatctgatacccaaatgaagttattgccagcatcaagcttgatttgcccttcaaatttttactgttggttggtggtgtcggcaccgtaacggacaaatcaccacgaggttgtgatccaacttcacaagccaaaccatgagatgtattatcattttctgtagctgcactagtttggacagaattttttcttttgggaccttcatggacatgagatctttgatgaatcaagtgaacaaaagattgaaggagatctcttgataactctgcagcagatagtttaacaaccatatcatggtcgaaatccctgccaagatgcacagtaaatctgggtactgcatgccctaatgtagttttccgattgcaatttggtagatcactcctaaaaaattcccttattctatcagggagttccagatagggagtttcagaagtagcctgtttggagata

SEQ ID NO: 7491 - DNA, 612 bp, Gossypium hirsutum
agatttttaatttcttctgtcttggcaatcgagaagtagaagattctttggttgttagagatgccactgcatcaaacactcctcaggtaaatagaccgtttcagctctctttaatattccagtcttgctcatccatgagaaaatatgaaccaaatgttggtaacacaggcacttgctaagaagaaccggcgctttatgatttacatccactctaaaggtatgatagtggatgatgagtatgtcataataggatccgctaacataaaccagcgctcaatggaaggcactagagacactgaaatagcaatgggtgcttatcagcctgaccatacctgctcaagcaaacgatacaatccacatgggcaggtaaggatgtcttaacatttctttgtggttaaggtccttgtttgcttatttagaaccaaaacttaataggtttcacttaaatgagtgcaggtttacggatataggatgtcactatgggcagagcatattggaggtcttgaagagagtttcaagcaaccagagagtctggactgtgtaaggcgggtgcggtctttgagtgagcaaaactggaaacaatacatagctgatgaggtgacagaaaatgaa

SEQ ID NO: 7492 - DNA, 639 bp, Gossypium hirsutum
  misc_feature (619)..(619): n is a, c, g, or t
  misc_feature (629)..(632): n is a, c, g, or t
atagagaccttgatacaacaaatcagattgcattttatccatcaactcagaaaatagataaattattctttatatgttaaataagcaagcaaatagattttttctgttaaaagttttatccgtttttattattaaaaaatctatacgttaatatgaggtacacatgacatgttagtgtttggttatttcatcagccaagttagttttaactgtagaattgaatgaaaattttaagagaaagagttagtttactttttgatctaatttaaatgaattaatttctctattttttgattaaagtgggtaaaatacaatttaatttttagtataatgactttcattgtgcttttatccattgattgccaaagaacgatgtgcatggtaggacctcttcagaggtcgtggggttcaagcctcttagtgtgcaagacttatgattaggcatcgagagggcttcgagtccctcttcagagccgagcataaaattttgaaggcgagctcctcgcggcaccttgaggacaaaacatttacatataaatacgaggtcaaacaagaaagtcgaaatttgatgtatcaaatgctttgttcacatgtgggagagtagcacttgcatatctanagtttcttcnnnnacatcag

SEQ ID NO: 7493 - DNA, 599 bp, Gossypium hirsutum
  misc_feature (31)..(32): n is a, c, g, or t
cgtcgaaactggaagctgccagagaaatgtnnggaggatcaaagcgaaattaatgaaccagatgtaagcatctcttgcttttttggaaatataattctttttaggctgtataatgcttatacaccgaccttacatgtcactaactttgccattgcgagcctttctagactcccttaactgttaaaattgagcgcagtcaaaatgtttatttctcaccactagaagatgttttactgtttgagtttttctttgtgtgtgttaagagctagcaagttttgtttctttattttatgatatagcttgtgatactcgtatatgagaattgcagggtagtgggaaaaataagaaagagaaggaaggtatatctttggttgacttggcttaccggcgagcaaaagcagtaaaagctgtgaagaaggctgtagattctggcaaaattgtgaagaaatccaataaaagctcaaagcagtataaacaaagaactcaatcaaggacagaggaaatgcgggagctattcaaaaatgacatgagtgagagaagacagaaaagttctagtaatgctggaaggaaaaagcccaaaagttcatttaagagcaaat

SEQ ID NO: 7494 - DNA, 628 bp, Gossypium hirsutum
cagcagcatataagcaataattggaggtagcacaagcagttgaaattgaataatttggacccatgagaccaagatcaatggctagcaaggcagatgacatgtttgttatagcatagggaatgaagaatggtgttatttttctatagcctttctctatcagattttggacgccgtcagagaacaccgttagaccacccatgccagttccaactagcactccagctcgctccttgtcgatctgcaacgtattcaaaattctgtaagcattacagggagaaaaagtagtaaaggaacattgtttaacgaagcaccgctaacaagagccgaagctaaatcacaaaataaaaagtgagttgataatctaaacaccagacgagagaaataatgaatccacagtcctgtaagcactcatgtaattctaagaacaggtttcactctcaacatatctttttcattctgtagggtaggattgatgcaggcgactataccgatgctataaaacataaaactccagtaaatatgctcacaaaaaatagaaatcaaataaaatcaataatgctaaaagaacaatcgggtaacaagcacaaaaagcatcagggtttgtaaagttaaattaaatcttgctgag

SEQ ID NO: 7495 - DNA, 606 bp, Gossypium hirsutum
ttttgctttcttcgcccaacaaatttgacattgttaacctattaaggggcatcttattattaagccaataaaaatgaaagataagcaatactctttcatatttccttttgacacagtcaaagaggatattataaaaaggatcgaacagcgcatcatagcttttggttaacaccaaatttggatattacacggtatgctccaaaagaaagaacaacagcaaacggtagcagtaaaagaaagaaaaagaaaaccaagatttgagccaaagggagaggtgaggtgagaactagttttagataatgtagagttaccctcggcttgaggtcttaacatagtcagccctaattgcccataactgttctcccacagatttcatctccggacgatcatttctaacaggtgctgcgcattgaaatgccaatgcaaacatcttcgttagtatctctgcatctactacctccagccttggatccaccaattccactacatgtccttcattatacttgtcaaatgcctgtatatacacattcaaaccatgaatgaattcccaggtgtaaaaggaactagaagcaaacactgtgttattgtttttgcagacacaatatc

SEQ ID NO: 7496 - DNA, 588 bp, Gossypium hirsutum
acccttgcagcaagtgtggtatggctcgtggaatttactttcacatttgcatttcactgggagctcctaaaatggttaattcatgcaaagatggtatttgagtgcagaattttgttgatttggctggaagtgagcgagcatctcagtcattatccaccggcgcaagactgaaagagggttgccatataaatcgtagtttactgaccctgtcaactgttattcgcaagctaaggttaattggatcatcatatactttgagtgctcatagtgttttaaattcaaccatctgccagagactattttatgtatttaaatttgttgtcggatgtagttggttattgtcccagtagttatctattactttgcttgattgagttcctttttcctttttggtttttacttttctcaattttaaatcgaaacggagaacttgggcatagttttatgatggtttgcgtattagtttgtgttattaaaattgtgttgaaatacagaatattgatgatttaggcagtgtcttgttaaaattttctcacctactagattcatgattgtggttctttggtggatgcagtaaaggcagacaag

SEQ ID NO: 7497 - DNA, 601 bp, Gossypium hirsutum
tctaggcaaggcttgagaagaagaagaatgatgaagagatcgaagaatgggtacgtgctctacatactttttaagtattatgatgtttcatgatcatctcaaatagtcgctcttacatgtttattttttttcaataatattttccagtgggttcaatgtgacaaatgcgaagcttggcagcatcagatttgtgctttattcaatggtagaaggaatgatggcggacaagctgaatatacatgccccaattgctatattactgaggtcgaaagaggagagcgaaagcccctacctcagagtgctgtccttggggccaaagatttgccaagaacaatccttagtgaccacatagagcagcggttattcaagagactgaaacaggaaagacaagaaagggcaagggttcaaggaaaaagttatgatgaggtgatcaatattctcctgatgacagttgattctatgttgtttatggcaatcctttttctactttcgtgttgcttaaatatattcaaaaaccaattcacactgcatatacacacagaaggaagaatatattgattgttttctcattgattttttcaggtgcctggggctgaggcac

SEQ ID NO: 7498 - DNA, 644 bp, Gossypium hirsutum
aatttcattttgtgtgctatcagtgcatccacttgtcatcaaagttgtctacatttcattcattcatttcctctgtacactgttttgctgtatactatggagtaatttctactttgtgttatattggattttatgttttttattaaaaaaattgatacataaattaatttattatttataaatttcatccaatttttctgttaaatattaatataattgataaaataaccacaattcaattgcaatgcattttcaagatattattattatccgagattacttaaatggcatgagtttaaatctaaccatttcctcccctccaatattccaattataaaagaaaacatacaccttccatcaataaaataatacactatttagtttattaactcgtatgtatgtgagctttaagtattggtatgttgtttaggagtagatatctatgatacctctttcccttcctcttaaaatataatataaactttgcttgtttagagttaaggatattggttcgaacacccaaattacctattctcaacaagactacaaagagaaaatgtatttatttcctactaaagattttggtctatccatattctcaaatgatttgtttttatcaagtaaaaggaaagattcctggaatg

SEQ ID NO: 7499 - DNA, 688 bp, Gossypium hirsutum
gacagtgaaagcacgtaagaacatcttatattgtttgaaatcctcaaatcttgtttctacttgttttcatctgctggatcattgttgttatagtcgatactatcttacaaatatatatatattttcctttcaaattacttttagcctctctgaaaagcttaagaaggagagaaaccagtccaccttaaagtatgccgaagattttgtcatcaaaacgaggaagctggagaatgatttacagaggtaagtcacatctagttcttctcaccaatatcttttatgcatgatatttcatttgttagtcttttgcaacaacgttattaattatgaagttcaatgttttgtggtaagaacttcccctcacaaaccacccattaaatttgatcatattgttgtcatcacagtgtgctgcatgtgtttcctggttatgttcctgtagtactttgacctgaagggataacgtcttgctagttcaatggatgaaattgctcataattatatgccttatttagaatcatcggacatgaatttacctgtgggataaatttttgctttgattcgcatcatgttttaagggtttacttaggcttctaattattcatgtacttaattatatattctttttgatttgtccatcaattattttgccctaagctacttttatgaccatgccagttatcttcaaatg

SEQ ID NO: 7500 - DNA, 617 bp, Gossypium hirsutum
cattcttcgtacacatatcattatggtaggcagcatttccatctgcgaaaacaattaatactcggctttaagttatatgcgtatataccatagccacaagcttataacatgctgctgttaaatttcataatgattaagaacatatcgtactgcaaaacatgcaaatttccttgtccgtctgtctggatcagcacatcgatcaataaggagcccaatgatgtgatgtcttgcctacataaatgaattggttagtcaagaatcagacaactaaaagcctgcaatataaattttcattcgatgaccaataataatgaaataatcacaatatctccaacaattcccaaattcctacgtaatgaattttaaaatgctaacaaacattatagaataatggttcttacagtttaccacggccacaaagctatgcgttgtctggtacttaccagtgaatcatagaagtatgcactatgccgacacatgttgcctagagcattgcatgctttggctcgaacattgggatcttcatgagagagaaagtcccgtaaagtgtctaaaatcaaagccccattgatgaattcatagaaaccctgcataaccacattatccaaaatttaatc

SEQ ID NO: 7501 - DNA, 661 bp, Gossypium hirsutum
  misc_feature (592)..(607): n is a, c, g, or t
  misc_feature (610)..(614): n is a, c, g, or t
aatatgagcttttagggggaagaatttgttggaacagtttcaaaacatatatagtctttcaatcgttgcaaatgaaaagttatatcactttattattaaccaaaagtgatcaaatctcataatgatgaattatgtcttttaaattcaaaaattatatcactttattgtcaacaaagaatcatgattattcaaggatacttctattgaataatttgttaaaaggtgtgactatccatttagatagtcatgtttctatgaagagacatgagagcggagtgtttagtggactgttttcattagtgcaaaacgtagacagtcattggacttcattgtatcctcgaggttcatttgtagtaactcttttgcacactaacaattctactttctttaagttaatttttatccccacaccaacaggattatggctgctttattcatggtcggctcatgcagtgttgatgcttgtatatctctataatatttactgtcaacaaccaagagttttgatgcctggaaaagggacttgattgtaaatactgtcagccaacatcagaatatatggcaagttttcaagtacttgagtttggacatnnnnnnnnnnnnnnnncannnnncatcagaatatatggcaagttttcaagtacttgagtttggacatgca

SEQ ID NO: 7502 - DNA, 528 bp, Gossypium hirsutum
tttttatagtagaatagatgaattttttaatataatgatcagtttgttctttgatctatagtataaaaattaatttattatctaatacaatctaactcctagtacaaaggtctcaataatacttttacttgttttttgggtccgttttatcattcttgaaaactaatccttaatgtcatcttttgggtccgttttagtacttgaatttataattagattcattttaattcttaaatttaaaaatataaaaatttgataatatgttaatattatatcatattatcacttgaaaattaaaattttaaataatgatgtgatacaattgttagatataacaataactaaataaataattaaaaattcataaaatttttaaagaataaaaaattattaaattggttcaattactgatttttatcctagtttcaaagtgatttttaattcaattaattcaaccactttgttcgaactaatatatcaacaatcgatgttcgatctaattaatccaacagatcaattcaacccatg

SEQ ID NO: 7503 - DNA, 653 bp, Gossypium hirsutum
cacttaggttatgcttagatagagtttgtaaactttaaaggattcctggtaacctttaggccaagcaaaaccagtagaaatgtataagcaaggggaaggagtagtaatgaatgataaaatatgcacttactctgaacaagaaggaaatcgagaagagagcttaaacagagcaatcaaagccatagctttagtagtgagacccaatctctgacacttaatagcaacctccatggcatccacagcatcagattctgttacctgctcaggaatacagaaaaatttccaaacagtattagaagatgtagagtgataaatctaagcattcatactgtacaaaagaacatgatcctgacattaaggactctcagggcatcatatagaaggttaagaatctcctaagtctaaaaatcataattgaattgatgtgatcccatgaggaaaccctacatttgatgacacccattattttatctgactgcatgtaatctcaaactacgttgttagaactcaagtgtgagtgtcaaatgtgattatgtgcccaactaaatgtcaaacatgattttatccttcattttagacttaaaagtcataagtctgtgagcttttgtagtgtttttagcgtgtttttgtttatttacgtattttggtggcat

SEQ ID NO: 7504 - DNA, 620 bp, Gossypium hirsutum
ctatctttattgacacccatcttgaatgatgtggattaatctgtttcagtatcactgacgattaaactgacagtaagttatggttcaatatcaatatgactgaatctattattgcttaccaatattgatgcctgtctgattatgggtgatatacacagaagaataaaacagaatttaggattgaagtaactggagattagagaggggtgtcttgaaaatgcaactattttgttttctaaaaccaggcctttcaccatcaaagaatgtgaaattccctttcaatcgtcgtgcataggattgcatctagaacagtgatatcattatataatttatattttaggtccttcatttgaactttttggtaactaaaatgcacttccaactctagtagaatctgaaatgatcaattcccgaggatttttgcctctgaatttaaaaggatggagtagaggagataatatatcataaccagatggaaatcggaataaagctatgttactcaaactcgtttgtgagtatcaggcagaagtcctatgtgtatgtttgaacattttccaaattttccatgtacttggaggcttcttgggggttcatgtctctatatgcttgttctgatattc

SEQ ID NO: 7505 - DNA, 634 bp, Gossypium hirsutum
  misc_feature (6)..(6): n is a, c, g, or t
  misc_feature (616)..(618): n is a, c, g, or t
tttttnagatcagtaatgaaggctacaagattaccatttttttttcctccaatgtactgaaaaataagagccaaatgtagttaagtttaaggataattatgatttttttttccatttggttagaaaatttctaatgaatgttatgaaacttgttcggtgtacaatgtcttcaggaacagaaggattaatgttcataactgttcaaatggattcattgtttatatgttcttcgtttaaacttcaatcattagagctgagtagggtaggattgttcgaagtgtctcaaggttcaccattaagttgtttctactgatttaaaaaggaaaaattctttcatgcatatgaattcttgacccttttcctattagtgaatttaattggaattgacgttgctaattttgtgattgtgtagcatgtacctaaaattaatggagatataccatcggttgatgaagagatatcagaccatcaaaggctgcttgataggtttggcttgacattatcttttatcttggtctgtttcatctgtttctcttttgattttgaggcaaaatactatttttgggttgctttgctttcatatcttaattttcttattatgagaattaacattccnnnatatgatgcaattccc

SEQ ID NO: 7506 - DNA, 670 bp, Gossypium hirsutum
ggtgattgttccagtgaactgttcttgttcaggtcagtactatcaggccaacacttcttacatcattccaaataagcaagtcgattatttttcgattgccaacaatacctatcaagggttgtcgacctgcaagtctcttaataaggagaatagtgattcaggcttgcaagttggttcggttttacaagtaccacttagatgtgcttctcccacaagaaatcaaacattaaatggtactaaatttctaatgacttatgtggttgattgggaagacaccatccatgatatcagtaagagattcaatgctagtatggaaagtgttggtgatgcaaacggaattgatttagatgacgcacttatttttccctttacaacagttcttgtcccattgtcaaccaaaccttcaagctctcaaactataattcactttcaacaaccacccgcttcttcacccaccactccaatagatgtgatcaaaccctcaaggaaaaaattcactgtttggcttgcaatcggagttcccttgctggcacttttccttttgctgctgctgatgtttttacatcataagaaaactagggaggctgccagaaaagataagagaaagaaatgggagttacctaatgatgttctggtgagcatagatcaaaatttgaaagtttatgatttc

SEQ ID NO: 7507 - DNA, 636 bp, Gossypium hirsutum
cagatgttaccgcttgggcagttaccaatgaagaagttagtagctataggacaagctggcaatggcaaactgtggaggtggaaaagaagccatcaccaatggctcctacaattcaaatggaaatggcagaagccatggagactttcagaatggatcagacacagtgatgaaacaatgataagggcaaggcctcgttctcaagctctaacacataaagtctgatatttgatgtttaccagattacattggccatagtaatcttggtcatatgtatgttcctaatccaaggtgcagggtgaagcctacaaaagaatgcaggtaatttcttctgcctttgtattttcatgttggtataacctcaaatcatgtgctattgatgcccttattacagtttcttttaattagcatggtttctaagttgttgagtaaagaaccattaacaaagccagccatgactgaaacaatgagacagtacttacagaacaattaacaaagtaaactgatggactgctaagttgtccacaggatagccaactctaatacaaaatgtcctagttgatgaactgcttggttgagctatattttcatctgacttgagggaattgacttagcaaaaccctgtttgccattggacag

SEQ ID NO: 7508 - DNA, 691 bp, Gossypium hirsutum
taaatttcacagggcttagcatgcatcttttcttttgtagaaaaatggttttctgtatcagtttgagattgataggacttcaaattaattgaattttttgtattttcttttgctgtttgagtggcaggttttagagttaagtaagaattgtgagagttttctctgctttctccttttccaatactcttttacagggtagtttaatttgtgattatgttatttcatttctgcccctcaatttggaaaataaaaatgcacaagtcttattcccttgtgtttttcaatctaccatgatatttcagggcatacaagatagtgaaaatagcttttagtacccactaagtgcatctattgcttctaaatttacactgatacgagcagactatgcaacaaggcagtcacattctcccattttgactgacctggagcatgtagtgttcatttacacgcatgacacatgaaagaaatatctaattcaggtatttgcaccctcataatgctgaaggttaatatatcatgcccgttcgagcctgaattccagcaataactaagtaggggataaatatgttatttatatataatatctgaccaaatatatgttttataatgcacaatgtgatgttatcttgttcccaaattttaggatgcccaacccgtagcaatgatgctactgattgttctgttgctgcag

SEQ ID NO: 7509 - DNA, 600 bp, Gossypium hirsutum
  misc_feature (555)..(556): n is a, c, g, or t
  misc_feature (593)..(593): n is a, c, g, or t
gatcatgaatttatatatattttttctagatgactcagtttgacgatatgggggtttgcaggagcacttccaaaaatactatgatgcagttatgccttatctgaaagctctcttggtgaatgcaactgacaaatctaatcgtatgcttcgtgccaaatccatggagtgtattagtattgttggaatggctgttggaaaggagaagttcagagatgatgctaagcaggttggtacaagtgtaaaagcaccattcctgtgttaatttgttttcttttcctcttctagttattttcttacatctcagaagtcatggatggttaagatatttgagtttagtgataccattagttagggagtgtaatggtgcaatttggagcaagtatctgccttccccctgtgacttttgtaatttgtagcatatatttttctttttctttcatctcattgctgtttaatttcattatactgtaaaatttattaattatattgatatttccaccaagtgtttacatcttggttttgttctttcatcaaatataagcttaccttttatcnnatccttcttccttattgcgaggttatggaagtgctangtcatgc

SEQ ID NO: 7510 - DNA, 650 bp, Gossypium hirsutum
tttctagactatctgttcaattttgagcattcttcacttttgctgtagaggcttcaacgctaagaggaatcactggatgatgcattttttggatgacatcaaattttcagtagaacttagcagtgtacttgcaaaatataacctctgctgacaggttctgaaaatgctaaatgagttctttgcatttatttccttttcttttcatttttcctcctcactgtaagcaaacattttaccgccaccttacttttaccttacagtatccaaaatgtaggatcaaagctcaccttgcaagaaaataactcaacaatgcagtcttcttttgtggggatcactcgcaagtcaagtacaggacttgcttcaaagttgaagagcgcaagttttggaagtgtgcacctgaacagcatcgaagaacatatatataatcaagagataaagaagatgaagataaaaggcatcaaattaagccctgaggttagaggtttagaatgaatgagaaacttggaataagtcaattaaaaaaaaaaaaaattcctttgaaacccaaacaaaaaaggggaaaaaacaaactaaaaaaaaaaaaaaagggatttttttacccctttccttttccccaggggttaaaaaaaaaaaaaaggcaaacccgaaaa

SEQ ID NO: 7511 - DNA, 591 bp, Gossypium hirsutum
ctctcattctttcttattgcctcctctatcctttctgccaacaataagtcctttttagccaccaaacttgttactttccctgaaaacaaaatattttgtgatttaattttgctgaaagaaatggcctttgcctctaagtcaagacaagaagatatggcattagaggcaaaaatgtcatggtatccgcttaaagaagatacagaattagatattactatgtccaaagattttcataatgagtgaccaaaggggcgctttttaaggatgctatatatagtaatatctcacacagtgcattggaaatgtagaataaaattgtcaattattgcatctaatacaatgttatcactataaacagtaaagcagtaacctaaaagagtgccctaaggacacttgttagcaaagctctcatggaaagaaggctcaatggacaaattgatctccaaaagggaagtataaacagtttattgataataatactatggttgtttgggaatatgatcaatcaaaattttcttaggcaaatttccatacagtacactttaccttgctgttgaaagaagaaatattaagattggtgaagttgataaa

SEQ ID NO: 7512 - DNA, 645 bp, Gossypium hirsutum
gaaagaagagaaacgtgtgtttttctctgatctttcatccgagtctgctcgggatttatttgcagactttgttaaagactggaataaccagaaactcggatctcaatactatgaaggcattgcaagtggaccacggactgcacataactggaaaatcaaactgtaggaagggagagagaaccttctgcagcttgatccctactttcttttttcttgtttgcactccttttatatgtactgatttgcagtattagtatgggataaatgttgtaacttgcggtgtgcatttgcagcaattgaaatatatttgttgttttgctcattgttcttccatggaaactgagtatggcaaagaaattattttaagccacattgcttagctcttttatcaatcttcgggctttgctctaaaatatacttgggcgatgttcaaattgacttgctgcaatttcaaacccagttcttggattggactgagctcaacttcaatgaaattaaatcaatattacattcctaaatacttactataataatattcccatttagtcaaatgtattaataaactgaagttcaaagcctttagcctccaagtccaatccagcgaacttgacctttgtttctccgcttttgttccataacgaatac

SEQ ID NO: 7513 - DNA, 599 bp, Gossypium hirsutum
ggcggccacaagcatattggttgttaatgaagtacgccaaatgatcgaaaacgaatgtaccgcatgagtgatagcactcctttttaaagaaaaattgagtgtacgttacataccttatctggtactcatttctgaatccgagtaacataggaaaaattttgatcatatacttgaatttatttctcttttaatgtcttcaaatataatgccatgaattgcttgtgattataaggatgccatgaattcctcagagacttaaaatctgcagattcgcctttgaaactttttgttctagcaaaagcagtatacaggtttacattgtgttttgtttttgtactagtacgtaacgatatcaatgtgttctgttgtaatatttttggtttatcaatgtgtataatatatataaatgctgatagacttcaattacatgcatataaatcgaatataaattttaaaattattattaattaattaaaaatataatattttatctctaaatataattatgaaaaacaaaaattgtttaaataaaaaagattaaaaatttgtctaaatatcaaatctagtatcaaccaagatcaatatatattgatacaggg

SEQ ID NO: 7514 - DNA, 647 bp, Gossypium hirsutum
  misc_feature (595)..(597): n is a, c, g, or t
  misc_feature (607)..(611): n is a, c, g, or t
  misc_feature (613)..(616): n is a, c, g, or t
  misc_feature (634)..(634): n is a, c, g, or t
  misc_feature (637)..(639): n is a, c, g, or t
gcgagcttgagagcttggatttgtgtgttgaggtgttggatcttttgtgttttctcctcatgcactttctgcagtgtttccaactccgataccgcttgagcttgagcttttaacagcacaaaacaacgccttttagtatatatgagtgtaaagtgaaagaaaaataaaaagaaagtggtacctggaggattattgcaggagctgttactgcgaccttccatgatgtttacagattcctgaacaaaatatttttagcaatcaactaaattaaatccaagataaaactggatggtatgaaatcctgaaaggtttacatatgtatttcctatttcagtttgttctgtgaaggcattataagccatttgtccacatatgccagaattacactagtctctttccacaatcttccattcttttttagatatgagtcgactttgaatctcttgaccctactacgtctctatttcatcaaattttctctcgtcagaattatgagtgctctattttgcatcaatggaagtatgagctaagtccgctgacgcatgtcgccaacgtgtcaacatgtgggctcaaaattttttattttttcttaaannnaaaaaaaagnnnnnannnntttgcctttttttttggnaannnaaaaaaaa

SEQ ID NO: 7515 - DNA, 634 bp, Gossypium hirsutum
tcttcaaaaacaccatcacccaaacagcttcgtgtctacacaagaaaaagaagacatatccctgagactgttttgcaatctgattcttgccgagaattggatttgggtccagctgccgaaatggaagaagaaatcagtaagtccactactctagatgactttcctattgctattagaaaaggggttagacagtgcaccaagcatcctattgaaaaatttactggttataattcattgatgccgtcttttcaagcatttacagcaactttggataaagaacaggttcccacaagcatagctgaagctctaaaggatccaaaatggagaagggctgttgaagaggaaatttgtgcactagagaaaaatgctacttggaccattacagaccttcctcaaggaaaaaaggctgtcggctgtaaatggatctttgctgtaaagtataactccaatggcagtatccaacgatacaaagctagactagtggccagaggtttcacgcaaacatatgggatagacttcacagaaacttttgcacctgtggcaaagcttaacactattcgagtactcctaagtttggctgtaaattgcgattggaaattacaccaacttgatgtaaaaaacgcatttcttaatg

SEQ ID NO: 7516 - DNA, 606 bp, Gossypium hirsutum
ttgatcggtcatgtcatataaattcggtccgagttgtacatccaattgctttgaaaggagtgttttttttaaaaaaaaactacttttattcgtgtttattaaatatgttgtgtagtatatattttatattatacagtacatcttggggagacatacacaaattaagcaaacaaatcaaatggtttatgtggatggagaggcatcattacctataaataaactctccttccacttactgctttattgagaaattggcagttaaattcatagcacacaacatcacaagcaaagccgtttcaggtttcagctttcgcggacttaatttattgccaaaatgcggagaatttagattttcgaatattgaaatataaagacataaaagaaagaattttataaaccttggcataaaaaatgcgtggctttaactttatctggcttcaactcattattggtctactctacctattttactcgaaagtctatataaataagtttacattacagtgactcagctttcaaatagtaattgaattatttgaaagtttttatttaaataattagaatgttaaaattactgttttatgaccgtatttattcgtattgcct

SEQ ID NO: 7517 - DNA, 612 bp, Gossypium hirsutum
  misc_feature (533)..(534): n is a, c, g, or t
  misc_feature (536)..(536): n is a, c, g, or t
  misc_feature (538)..(539): n is a, c, g, or t
  misc_feature (541)..(543): n is a, c, g, or t
  misc_feature (546)..(550): n is a, c, g, or t
  misc_feature (553)..(568): n is a, c, g, or t
  misc_feature (586)..(593): n is a, c, g, or t
  misc_feature (597)..(605): n is a, c, g, or t
atttgatctgatttcattaagttaaaaatattaaaaaaaatttatgaaaataatacattaacttttaatcaatatatttttatattattatttcactaatcaccaatgtaatccgagtttgctgattgccaagtccatctgtagtgagtagaaccaacaaggggcaagggccaatcaaggctgtttttttttcttttaatccacatatttaatatatcatgtcaattttgtcaattgtgtgatgctcggggaaaaaaagagcatttatctggcttatccacaacgagagtgcaaagaaatggcaatggctctccttagctttaatccacttcactgtctcctgtcttcaccggtttcttcttgcacaacattcttgcccattgctgttttaccaagtaagtcacgtttatcttaacttggtgttcattggtgattttgatcgaacacctctcggcattgtgatttcttcgataactcgttgtaacgtaagcttatcttttatcttgtttgaaaagttttgctactggctgtcnntntnnannntgnnnnnaannnnnnnnnnnnnnnncatcaaaatgttcatttnnnnnnnnaatnnnnnnnnnaaaaaaa

SEQ ID NO: 7518 - DNA, 587 bp, Gossypium hirsutum
  misc_feature (580)..(581): n is a, c, g, or t
ctgtattctatcagtaaaagagtttgctgttaagtttacaaagtccaacaatgaaaaaggttatcaagatgcaaaatttaataattagttgatagctgcccaatcgtccaataagctcatccttcaatcatttgttaagagtaccgaggtaaaagtcacatagcagaacaatttgctaacaagtcagcagacaaacatcaaaacttagcccaatcttgaagaaaagagctaataactaaaacagattcagctaaacatccaagatagggcatttggtctagtggtatgattctcgcttcgggtgcgagaggtcccgagttcaattctcggaatgccccaactccttgtttattttcaatttgatcttactacttgaaatattgatcaaaagaatctaaccagaaatcaaattcgaaagcacaataaaaaaatttatcaacttattctagattttttgctgacatcaataagtaatttgtcgctaaaacataaagcaagagccacaatgttggtctgccctaacatcagggaacattagatttgccacaacctcccaaagaaaaggccatctcatatacannaagaag

SEQ ID NO: 7519 - DNA, 651 bp, Gossypium hirsutum
cctgatatatgcatgcaatcaagggaagggagttcatggattgtttgcttcaaatttgttactcaggtgaaaaggggatgattgcggggaatagcgaagatggaaaagctgaaactggggtgaggattggctgttcactgacggaggtaggctcatccagaggcggttgtgccgatggtaggtcccgagaaggagaggaagaggaagaggaagaggaaggctcctccaataagaagaaagttagaatgaggagcttaaccagcatttatgaggacatccgaagcctaatgcccagctcttcagagctgaacacacatccagaaaattcctaatggaaagtccgtaggtgaagaagatcagttcagtcagtaaagatatttaaatgatatacatagtgcatgtatgtcgtttcataattgagttatattaaacttcaaaaactatgggaatttgacggtataaaataaatgctaaacccaaaacaatggctttgattaatttctttctctggtttattatgaatcctgaggactgatagcttcaggatattgaactaggtttgttataattcgatgtttgtctatgttaattttgagtattagagggtaacagggttctttgttaattttttgcttcacccaattatgaact

SEQ ID NO: 7520 - DNA, 592 bp, Gossypium hirsutum
ccagatgtgttctccccagttgtgaagcatagttcgattcgagctttgcttggtattgtggccatgcatgatttggagcttgagcagttagatgtaaaaactgcatttttgcatggagaacttgaggaggatatttacatgcaacaaccagagggttttacagtctcagaaaaagaggactatgtttgcttgctgaaaaagtccctttacggtttgaaacagtcaccaagacagtggtacaagaggtttgattcctttatgacttctcatgatttcaaaagaagtagttttgacagttgtgtttactttaagaaaaacagtgatggttcttttgtgtatctacttctttatgttgatgacatgttgatagcagcaaaagataaaggagagataagaaaggtcaaagcccaactaagtgaagaatttgagatgaaagatttgggaccagcaaagaagatacttggtatggagattctcagagatagaaaagcaagtaaattgtacctaagtcagaaggggtacattgagaaagttctttgcaggttcaatatgcagagtgctaagcctgttagtactccttagcagcccattc

SEQ ID NO: 7521 - DNA, 661 bp, Gossypium hirsutum
  misc_feature (626)..(629): n is a, c, g, or t
  misc_feature (635)..(642): n is a, c, g, or t
atgttacctgataccgccattcattcaccacctccttcctgatccctgccccgaaaagtgcagatgctgagacatgatggaagaaaccaaactgtacatacattataaaatattcagaagataaatttctatcatggttgcagttggaactagattttcctattgtacaggctactttaaatctcctttgttcataaagctactctttccagatatgtaaaaagaagggaaaaaaaatctgtaaatatttctcagcatttgccttttatgtttaacgaggtccatctcatttctttgacttgtaaaattataatcgtctgagaatccctcttttgggcacacaaatatcgttcgtggaattaaaagaaaaaaaacactatgtaaacttacaatttaaaattattaagttgaataatttcatttaataattattaatttgaaatgtaattatagaaaaaaatggaatggttaaaattaaaaaaaaatagactttggtttaaaatataccaattgatatagtttagtatagttgaaagatactaaaactttgatcgatacggtgctggctattatagttactttagtttatatgcctagtctcgtattaccaagatgttggatgaggnnnngggccnnnnnnnncaaaaaggtggaaagggga

SEQ ID NO: 7522 - DNA, 686 bp, Gossypium hirsutum
acaatttccgcatctgtagataattcaaagatttggccataaatgtgtgtattatacattgacattattgtcaaaaatcaacattaaagatggtgttccttcaaattttttgttgaccaatatgatagaaaggagcagatgagagatctcaacaactgcttggtttggttggtaacaactgaatgctctataattaattctcttcaattttataaacatttgcaagattccgttccttcttccaaaaaggcagccataacttttaatggcattacttgcatttaacaaacgctaggttaatgacgatactcatggtttagttagagagattatgtttaagttaaagttcccaactctaaaattaaatggtttaaattcggagaatcattctatttctagcctcttaggtctattatcataaatcaaattaaagaagatgtataggaatcgaaaggaattaaagattaaacactaaactctaatgtaacgtacatgtaatgttttagggatcaatgaatattatccaattaattaagattttatatttgatacattgatattgtatattaactcatcattaaaatgaaatgaaatatatttattttttaaaatatttgtaatatattattatctgactattagtattaaatataaattcttagttgttgatattggctgatagagtg

SEQ ID NO: 7523 - DNA, 592 bp, Gossypium hirsutum
  misc_feature (542)..(544): n is a, c, g, or t
  misc_feature (575)..(579): n is a, c, g, or t
caccacagcattgaaaccaagaagccttgggagcccagtacagttatcagcaagttttcggatacgatccaagcagagatcaacaatctctttgccaattgtataatggccacgagcgaaattgttggcagcatcttctttgccactgatgagttgctcagggtggaacaactggcggtacgtaccagtcctcacttcatcgataacagtaggctccagatcaacaaagatggcgcgagggacgtgcttcccggcaccagtttcgctgaaaaaggtgttgaaagcatcgtctcctccaccaacagtcttatcacttggcatttggccatcaggctgaaaaaaataaaattctaaaaagatcaccaccattatccacattcaaaaccttatatctcgcctaaattatctatagaactggaatcgttcagctaacatttcaattaatccagatctatccatttttaacgagtccgatcacaatttacaacaacagaaacacaattaataaatttaaacatagccaaaccaaatcacagtgttannntaattaagggaaaaaaagaatcttacagcannnnnaatgaaatataca

SEQ ID NO: 7524 - DNA, 635 bp, Gossypium hirsutum
ctgtactatgagtcaaattgtattttgcctcttttactcaaaaaagggggcaaattaatccctatatgttagatcaaagagctaattggtcatttttgttaataatagaaatggatggaattttaatagaaggactaatttactctttgttctaatgtataaggatgctcattttccgggtggaggagaaaaaatgcaacccgactcccactacaagggccttctacttttactgccaatttcttaaagttctttcatagttagctctcaaggttcagattttactcataaaattaccatgcaggtgactactccattgcttttcaaactgattccagctgttgttcgtcttggtgtactattacggtggttcccagctgatagtcctgaggtaatcaatctgcctttgaatacaaactttgtagaatagtcatataactcttctgatagcaaatcaccgaacagagggttgcatcatctgtttttaaattgttgtttcgaaatttttgtcggaacaagtcttttgaggttatgttgaatatgattctcctcccagattggtttgaaaggagatagtcttcgagtcttcgggcggacagcgcgaagcgtattactttgatggtccaaggctctca

SEQ ID NO: 7525 - DNA, 564 bp, Gossypium hirsutum
tcacttatgagtattgtgtatgtataaactgtctgatcacatccttcatcctccatcctgttaaacagcgttaatgcttcattgaccctcccacactttgcaagggcatcgataagggcattgtaacaatatgaatcccgtgggcagtctttctcaaccatctcttcaaaaagcttctgagcttcatctactctaccagccttacccaacccatcaatgagactcgaataaaacatggcattgactgccacttcattagcacgacaaaacctgagatactccatagcctcatctaatcttccactcttacacaaaccattaacaatgaccccatatgaaacctcatctggttcaagcccatcagttttcatcctctcaaatagctctagtgcctcttccatctttccacattttgcaaatgcatctatcaaagttgtataaactgccacatttgctttaagcccattccgaatcatattctcaaaaacaacatatccttcaaggcatttcccttctttacagagtcctccaacaactaaactatatgcatgaggtggaacttca

SEQ ID NO: 7526 - DNA, 611 bp, Gossypium hirsutum
  misc_feature (602)..(606): n is a, c, g, or t
ctttatactctcgcagttgttggttatagactttagtttctctttctcccttaaattcatctttctgtaccttgtctcctacatcttttccgtccttctcagttctataatttttgttatttgcatctctggtaaggtgttaagatgtttagtttatatatttcaagccattttcaagggaaaaaaaaggaaacaaatcatcttcacattcctttacattttttccttttttctttttctgataaataatttactaggaaatttttacaacaatgaaactaagccttaaggtatctgtaacttgccagccatgagctttaattagcaactgaaaacagttttccattttgggttttgataagcaaaacttttgaagtgaattgtatctctgctcttctattcacatatttgaacgtccatttcagggtgaagtaaattgtgtcaaatgggatccaacaggttcattattagcctcttgttctgatgatattacagcaaaggtttttactcatccttttatcatcaattaagatcctacattacatgtaatatacagtttcatccgattgcatttcttttctttttttttttttaaaaaaggnnnnnaattt

SEQ ID NO: 7527 - DNA, 668 bp, Gossypium hirsutum
aacaacaatgttaacaaaaacaaaagtcgactagagaaacagtaaaatcgattagagactgcgacaagatggttccccgatacacgaagttggattttccgacttttgatgggacagaagaccctctaatttggttgcaccgatacgaaaagttctttgcgaatcagaagacaaagcaagtctacccgcttttcacttgacaggaaaggcacaattgtggtattatcaaatggagtaggaagagattaatctttcatggaaagcattcaaaaaaggttgtactctacgatttggaccaccactgcgcgagaatcctttgggggaattagcaaagttgaatcaaataggatcggtggaagactatctttgccaatttctagaattgttaacctgtgtaaattccatgagagtgtttcaacaaattaatttatatactataggattatcacattcaatctaaattggcatcaacttgtgagataaaatataaaccaactcaagttgtcgacttacatagttgggaatgacaaaggattttggtgctagcaaaaaagatcctccttttattaaaaagttgacacgtgtagagatggtagagcgaagagacaaggagctttgctacaattattattaaatcaagaggagtttaaatctcaaacttgtggaca

SEQ ID NO: 7528 - DNA, 564 bp, Gossypium hirsutum
ttatgtatggctttgtagacatgtaagatcaagcagagtatatcatggaaaatattccatagatttggtgcaacaatatgtggctcttgcttttataagtctatatatatttcagtgatagaagaggcaaaaatgtaaagtcatcctttaaattggaagctagacagttatttagccttctgagcagaggagacagaggaagataacaataagggtctgaaatgtatatacttctaatgttaagagaaaataatacagtgttctatatttgctgtcaagggttgcctcagacagtttcctagtatgttttcaacattgtcttcaattaagttttaaagagggaggaattatcctcaatagagggatgcaatcaagcatatttaactttttcggggtttatttaaaaattttaatatttaaaggatttaatgaaaatttttaaaaattttgataaatgtgattaaaactttttaaaagaatttacaaagagaatttttttatagtacttctccataccataattttctagtcttaaaaatatacatgatttagctctggtatatt

SEQ ID NO: 7529 - DNA, 639 bp, Gossypium hirsutum
attctacctcttcccaccaatcttttctcccttcgatagtgatatggttcccttttgcactgtcagaattgagaggaagtttcttcaattttgagcaatcaccccatacgccaaaatgttttagaaatgggaagggtaggacatcccagtatatgctcttcaattctggtagaacacataacttgagcatttcaagcttcagaaacacacttgcatctctccatgcttatctatactatagtgattcaggacaagtttgactctattgtatttttgtatcattaagcacatgttaagatcagataagtcatcaaaataaacaagaaaaccatattgcagcaagcacaacctattctagggcagtgactaccttttgttttggcagttaccggctcctctatgatgtaccaagtcctggttcggagccagacaccacaatctcctctctagtaatttctcaaggttaaataaaccatattccgggacatctaacgtgactaccataactaatcagactaacaagataacatggaaaaataaacaatagtttagaatctaatacaatattggaaagaaatatcagacacataattacataaccaaaagctcactaggagtagtcgggtcctatgttacacg

SEQ ID NO: 7530 - DNA, 665 bp, Gossypium hirsutum
ctacagatatgattttgatatggttgaaataaaatatgggaattgggggtttgtggaacttgactctgggttttgctgctaaatttttattttttgtcaattcgcctaaaaataaatgaaaaaaatattcaaattaatatttgttgatatggtatacatgtgaattatttgacatgaatattttaataatttttattagtgtgtaattttttaaaaaatttataatattttttaatttttaaattttttaaaaattagttaaatgttgatatgtcagttaatttttccatttattttgaaggtttaaaaagaagaaaataaataaatactgagtagaaactttatccatatatgttgggtttatgatatcgacaatttaaaattatatatacttatcttaatttcattaaatttttctaaagttacatatgtttatttttgtatatgaatgatttaagttgttccttttttagaacttatgttctttaaagtatattatattaatcttacataattttgtttaaaatgttaaacattaacaatttaaatatttttagtatttacattaatttttatatgatataaagtaaataatatgttataattaaggcttaattttgaaagtaaaactcgaccattattgtaaccgtagtgtatattagagg

SEQ ID NO: 7531 - DNA, 761 bp, Gossypium hirsutum
  misc_feature (159)..(160): n is a, c, g, or t
  misc_feature (459)..(463): n is a, c, g, or t
  misc_feature (469)..(469): n is a, c, g, or t
  misc_feature (521)..(522): n is a, c, g, or t
  misc_feature (622)..(623): n is a, c, g, or t
  misc_feature (630)..(653): n is a, c, g, or t
  misc_feature (656)..(656): n is a, c, g, or t
  misc_feature (658)..(661): n is a, c, g, or t
  misc_feature (664)..(665): n is a, c, g, or t
  misc_feature (670)..(672): n is a, c, g, or t
  misc_feature (674)..(674): n is a, c, g, or t
  misc_feature (677)..(677): n is a, c, g, or t
  misc_feature (679)..(681): n is a, c, g, or t
  misc_feature (684)..(684): n is a, c, g, or t
  misc_feature (686)..(693): n is a, c, g, or t
  misc_feature (696)..(710): n is a, c, g, or t
  misc_feature (712)..(720): n is a, c, g, or t
  misc_feature (726)..(730): n is a, c, g, or t
  misc_feature (732)..(738): n is a, c, g, or t
  misc_feature (741)..(748): n is a, c, g, or t
  misc_feature (755)..(758): n is a, c, g, or t
tattgtaatgtccgattggtcccaccgctagcttcacgaaagctcgattggactgcatttgaatcaaaagaaaatactatgactcttggaaataatttaattgagttgatttattcgatgtggaattaaattaccgcaatcgtgagaattgttcaactnncagaatttgattaaagaattttattgaaaaattaattttggaaaatttcaatgatttttgggaaaattaattttgatcaaataaaattaaattaatcaaattaattataattaatatgatatttttataaattaattttcaagttagacaattggcccaatgggtaattaaacttaaaaattggacctgagatagaaaattgggcccgagaacccaaaatcgaggccgagacccaaaaactattcggatcagacctggtatgtgaaaccaagccaacggtccagccggtggcaagatcnnnnnggctangccatcactaggctcagaccaaccgagaacaattgaaccgactcgagggtgnngcatgtgcgatggcaccatcggacacaacagtaccaacgacggcgacgatgacattccggtggccgatgatttgtccttcgacggatgagcagtggaagnncacactnnnnnnnnnnnnnnnnnnnnnnnnttntnnnnatnngaatnnnanatnannnccnannnnnnnnggnnnnnnnnnnnnnnntnnnnnnnnntttttnnnnnannnnnnnttnnnnnnnnggggttnnnnaaa

SEQ ID NO: 7532 - DNA, 585 bp, Gossypium hirsutum
  misc_feature (578)..(578): n is a, c, g, or t
acttcacagacagataagtaacatatgcacgatttaaaatgaggcccaagagcttaaagttttaaataactatgctactaatgcttcagttaaaaaaagaattttcttatcagaagcaccataagagatcacaacaaagccatgtcccagacaaaccaagtatattgacattttattactgcatgaaaagcaccaaacagttctaagaaagaaaaagaaggtaagaggaaatgaataaacacatgaaagtgagaaaaagacaaaggataggattacaagttttgcccaattctccacaatgttctgaaaggggataggtggagcataaaacagaagaggtaattaaacacaaaggtaagagagagagtttttacagaattctcttgcagatgatgggggaaaggcctaaagttctatgagttgtgagcttgctttgcaccaacctgctctctggaaacttgtcctattaatttatcaaaaatcaactgttgttgtctagagatgctttttctttactcaatattgtcaagggagaagacttaaaattgttctagaattaactttacatagcagtttanaaacaga

SEQ ID NO: 7533 - DNA, 641 bp, Gossypium hirsutum
tgatgtataaaaattaagggaatgaatccagacttaatcaaattggttcctaagatacacctttataagttgagcatccagtacatttgggttccaatttcaccatcctatgttaatcccacttattttaaagtattcatttcaactttatgcttatatttagataagggtatagggataccgccctttaaagagacagaaaaacatgaaaaataaacatgtatactcaacactcgtatccaaatatggggttaaagtattacgaagctccttgtattagttgtcagattacatcttatctctctctattaaaaatatgcaaattaatccctaaacgttacatcaaaaaagcaaactagtctttcgtgttaaaagtttcattcatttatatggttaaaacctgactggttgacgaaataactaaataatagcacctaacgtgccatgggtacatcatgatggtgtacaactagtttctaacaataaaaatggatgaaatttttgaaagaaaaattgatttactctttaatctaacatataaagactattttatccatttttttagtagaagcaaattacaatccaactcttagtacaaaaaactcatacttcttttactccaaatatgagcattattatat

SEQ ID NO: 7534 - DNA, 565 bp, Gossypium hirsutum
gaattttggagtagttcattcctttacctttcatcccttgtgaacaagtaagctgactcttttcatttcattatacttaccattggactacaaagcaaaaataagtattgtagcttgataaacaaaggttatgtaacccacactaatataatcatttatttgttttgcttaaaggatcttttatttatttaatattatttgaacatgactctcacgagaaaaataggttaaactctgctctttgtgtaagttgtggatttaatttttatactctgatttggttagttttagtcccatgcattttgaattaggcaattttactcttatacttttcaaaatttaaaatttggttttgctactagtgaatttggtttttattctccaatttgatcattattagttcttatgctttttgaatttttcaatgttaacttagacgataaccgttaaacttattaattaaaatagcttggtttttctatgaatattatatgaaaataataatctcacataatatatgtttatagtataagatgatgtttgtagtatatgttgtaggcgggtc

SEQ ID NO: 7535 - DNA, 663 bp, Gossypium hirsutum
caagttgccaactttttaaaccttttctaccttcattgcatgtaaaacaactttttgtctgcaaaattttcactcaaattcaaatcactcgaaaacttaatttacaattaaatttatttatttatttttaaaaattactcaaatgattgaaatagattatgaataatctaactttacgttttttgacaatcctggctcatggcacgaaagtttggatttcctcttacttgaaaacgagagtataaaccttcccacatgcacaacgtaggcattttctctttagtagaacactgacatgtgctatgagacatagccatgcatatcccaaaagtttcttttatttatttatttatttatattgtagtccagtcagacatcatttaggattgtttatctttggggtaattggtttaaaattatatattttttaaataagattatcacattgtaaaattactaagcacattgtctaatatgttagattgtttggtttatttaactgaaatataaaattttgttgtgggattgatggtgttgaaaaaaattctcacttacttgtttaatacacagagtatgtttacatttatagactatttgtttaactaactaactaatcttgtaactgcctaattttgctaactactaactacattaacttctcaa

SEQ ID NO: 7536 - DNA, 425 bp, Gossypium hirsutum
tctgatctatagagcggaaaacctgccaattcaaagaaccccttagcaaaaggttaaatcaaacttacgcactttgcttcaagaggcatgtggtacttacctgggtatgccagttctctggatcttcttccttggaaacccataatgaaggatcatcatttgcaatttttgcggaagggcttagtatccaagaaatccgttctaactttattaaagaatcatcatgccacctagaaacccttttgaatttaagtccaaactccgaccattttgtagctttcctccagcgctgctcaaaattggtaagaatatcataagcagctggcccttcaaccttacaatgtaaatcatgccatggttgccttgggcccttggttcctgcctaacaattacaaaatatttaaaccggtaagagcaatgaccta

SEQ ID NO: 7537 - DNA, 670 bp, Gossypium hirsutum
tgttaccattgagttctatttttgtactaaattaaatatcaatgtaagcaaaggttattacagtcaattaaacaaggtttttttttaaaatttttgatataatgtaaaattcaatccttaaagtttacatcttttgtcaattttaactcattttttattttttttaaattaaattttactctcaactttttaaaaagggccaaatcatttattttaatgagatttctgagtaaaatgttaatgtttttaacaatattagcatgacaatctgtttggtagtccatgtgtactttagagtttagactaacatgacattatttgccttataggccaacacaacaaataatttaaaatatataaaaaaaattcataaaaattcaaattaaaaaaatgaaaaaaatttaaaaaattatcatgaagtatatatgaattatcgtgtgagctactatatttaaaattttaatattttagtcggtttttctattttaaaaacaacagtttgattatttttaaaaggttgatactcaaattcaactcatttgaaaaggttgagggtaagaaaagaatcagagtcaaactgataaaaattgtaaaaattgagggctaaatttgctattatgttttttttcctttcttttcaaagctataaaacccaactattctgcacaat

SEQ ID NO: 7538 - DNA, 711 bp, Gossypium hirsutum
  misc_feature (672)..(704): n is a, c, g, or t
  misc_feature (706)..(706): n is a, c, g, or t
atgagacactcacagggtttataacatcaatggttgatgttgatttcgaatcaacaaaagcacctcctataagattaggaaccctctgtataaaacccaatccgatcaatacataaaaaagaattgaataaataccattttgcattaaaaaaagggatctcgatagaaccaaaaatacacatatcattggaagaacgataaatagaagcaaaagcgttataccgaaggattacggtgattaaaagaagattcagtagcagtagagaaacgaggactcgcagaagccaaaacctgaggccttaaagccggtaaattcttcactgcaacaaaagggaacagcaaaataataaaaaattaaacaaataaatgaaattcgtccttttttttcttttaattgattttgtttttttaagtttttgtttacctttttgaagtgaaaatcgcatcatcattttcctctgtgaataagctcgctgtatgttaagatcatcaagagagtgaaagcaatattttcttgatatagtgaactgcttgttccagtatttttatcagtacaagacaataccaaaataaataaataaataaataattgcgatcttctttgatggtaaatattattaattataattaattattagtaagaaacgtaatccgaaggaatcttattttggnnnnnnnnnnnnnnnnnnnnnnnnnnnnnnnnncnccccc

SEQ ID NO: 7539 - DNA, 678 bp, Gossypium hirsutum
taaagatgggacgtccgacggtggcgataatggcactgaacgaacggactcagtgatttgatgatgggaaatgttggtggagaagatgatgctgtaacagcggttgacatgttcattattatattaaatggtgaaatgtatgatgcaaagcatgcaaagacgaaggtatatatattgagagttaaatcctatattttaaaatattttaatcacatcctccagttattgatgttgtatccataagacccctttgttattaaaaagatgtaaattttatgtgacaaaatttaaaataaaaattaaaaaatattaattttgaggctgcgaaaacattttactttacgttaccatgtgatttaaggatgtataaacaaatatataggaagtaaattctccaaatctcaatcaacactactattgggactgagtgagagttcagagtttggagtttttgcatcaatggcaattgttacatcatgtcaaaacctccattgctattatttgcaatgttggtgagattcattccattcggtcagtcattacaacaagagcaaatcatagacaaaacactgttcatttctttgtctgctgattgttgctgaggaggtcgacaaggtttttgagttccacgaatgcatgcattgtttcatcatcaaatcctcctgccaactgcatata

SEQ ID NO: 7540 - DNA, 853 bp, Gossypium hirsutum
  misc_feature (229)..(229): n is a, c, g, or t
  misc_feature (260)..(260): n is a, c, g, or t
  misc_feature (796)..(796): n is a, c, g, or t
acgtagtccagtcacgccgcttctgagattcgtatcggcttaaagatgggacgtccgacggtggcgataatggcactgaacgaacggactcagtgatttgatgatgggaaatgttggtggagaagatgatgctgtaacagcggttgacatgttcattattatattaaatggtgaaatgtatgatgcaaagcatgcaaagacgaaggtatatatattgagagttaaatcntatattttaaaatattttaatcacatcctcnagttattgatgttgtatccataagacccctttgttattaaaaagatgtaaattttatgtgacaaaatttaaaataaaaattaaaaaatattaattttgaggctgcgaaaacattttactttacgttaccatgtgatttaaggatgtataaacaaatatataggaagtaaattctccaaatctcaatcaacactactattgggactgagtgagagttcagagtttggagtttttgcatcaatggcaattgttacatcatgtcaaaacctccattgctattatttgcaatgttggtgagattcattccattcggtcagtcattacaacaagagcaaatcatagacaaaacactgttcatttctttgtctgctgattgttgctgaggaggtcgacaaggtttttgagttccacgaatgcatgcattgtttcatcatcaaatcctcctgccaactgcatatatatatatatgtttgagccaatatatataaaaaaaagtttataaattttagttaaataacaaacctgatgtattctganagcaaatttgacaccttgaagaagcatataatccatggaaggatcatccttttccat

SEQ ID NO: 7541 - DNA, 694 bp, Gossypium hirsutum
ttcatattccgtttgactttggtcaaatatttatttttgtgttgaagttgggttcaagatataattttattattcgagctccattaataaattttttctttaaagataaaattagagtttaaactctgttaaataatacaatttaagattaataatatatattaaagataattacataatttaataatataaaaaatataattttttataagattcgggagtcattcaaatcaagtattattaaatttaaatttaactctattaatagtttgaactcgattctataattgttgaatcaaattttttctatcaaactctaataatttatcaatacttatatcttatttattccttaaatatagagtctaagaaggcaaaaaaatatttttaatgaataattgtatatattattaataaataaaaatgtccgaatattataaaaatatattattttattttaataataaattgataatatataaaattatatactcaaaaattaaatattaaagtaaattacaaccaagatcactgaattattagtaaatttatatttcggccacctaaatttcaaaaaattacaaaatatttattaaactattcaaaagtttttttatttaagtcaatggcctataaaaatcattgttgcatgacattttctattcgcatcgtctgcactaatcgaaagctctca

SEQ ID NO: 7542 - DNA, 643 bp, Gossypium hirsutum
acgatttcctagctttgtgtttgggtcaacgccctctagtaataatgatcaaatggaagatagtatggcggaggacacagttggcttcaccggctgttgtgacatttagtcaacagccaatctcactacccgtttctggattcgtttttgttgcatcaaacccaccagcagcaggttctgtcccatttggaacccaaccaaacatagccgcaccaaagaatccatctccatttctggcttctggtagtctggaattttgtggtggagggagcttttctctgggcaccagtggtgttgacaagtctgccagaaaatatgtgaaggtccgcaggcagcggaagaagtaaaaagttttaattacttgaggcaactctatcatgcgagagacttaagtgattgattgaataattattgtggcaaatgagaggagctgctgattgtcgctgtatgttgtagccatcggaatgtcattgatgccggcacaaatgtgaggtgctgttaaaaatgttgctgttatttcatcatttctatgggctgctggcagaagttggtcgcaatttttatgttcttcctgataaaaaattgagacaacatttggaactgtactactaatattacttagctgatagatttgtctggtttc

SEQ ID NO: 7543 - DNA, 518 bp, Gossypium hirsutum
  misc_feature (14)..(14): n is a, c, g, or t
  misc_feature (427)..(430): n is a, c, g, or t
  misc_feature (432)..(489): n is a, c, g, or t
  misc_feature (491)..(504): n is a, c, g, or t
  misc_feature (506)..(509): n is a, c, g, or t
  misc_feature (513)..(513): n is a, c, g, or t
gaattgcagtacanagtaattcaaatagatctcaagcgattcataccccctttccctttcatatttttgcttcacggatctccactgaaccaagcaaataaatatcacagcttccaaggaaactccattctcctgattcaagcatcagctacctcccttcctctttttttttttttaatttttttaaaaaataaaaaaatttcaaaaccacccccaaaaaacgttttttttttcccccaaaccctcaacttttttttggggcaagttttaatttttaaaaaaaacatttccccaaagggcggattttttttccccaattttttcccccccccgtaaaatttttaaaccccttagggggggtttggttccgttttttggattaaaagggttttggattaaaaattttttggaataaaggggttttggnnnnannnnnnnnnnnnnnnnnnnnnnnnnnnnnnnnnnnnnnnnnnnnnnnnnnnnnnnnnnannnnnnnnnnnnnngnnnnaggnaaaaa

SEQ ID NO: 7544 - DNA, 674 bp, Gossypium hirsutum
catgtgacgtgtcctcgacgataacatattagtatctaacagcgaacgagaacgataaataaccaaaaacaacattccctagctctcgagttcagatatcttttaaatcaattacttgcagagaaccttaaggaggaagaaaatacggatcctctttgcttttgtagatctcaaacaattgcttagaatattttgttgccaaatttctacacaactcgactgcattccgatcatatgcttccaattccttcagggatttcattaaatcaccttgcggatcaccatcggtcagaaactccgccaacgtacagccccttaagacagtacaaattccagcatatagatatcagccgctgtgcaaaatatgacaatgatgttcatctaaatcataaacttacaagttcatatacctgtaggcgtcgattttattaaaacctctctgattttggcacaaggctgccttggaaagtttctcccctgatgtttgttgccggtagagagcacatacagctttcatgcaaagttcgggatccttaccaaaggctgcgagcatttccccctcgaatttccaatccgatttatgatcctttttccttttaagttgagaaataatcatgtcgaaatccacttcatcattcgagtcactagagacatcttcttgtccactacgaaca

SEQ ID NO: 7545 - DNA, 633 bp, Gossypium hirsutum
agatgacattaataaaaagcattttggcatgccatctttcaccattatattaggctaaattgagccagctaccatgaaaatataattacatgatcctaatgagtgatctgtaatagggatgacacagttttccaacatgaaatcctatctaaatttcaagattatgaagcctcctgagattttacttccagtgactgcaaagtattgtaggctataaatgcttcaacaaatttttaaatttgcttcattatgcgtatcgattacgcccttccaagttcagcagagaacttaaagactaaaattgcatataatccacagatcacaaacagaaaatcaccgtagaggaaaagcttaagagaccactttcaatgggttaaaataaaaaacacactccttaaaacattttgaaaagcccagattcttaaatacaacaaactaagatcatctcatcacctttccaaaaatagatacacaatcctcaaccaaaaactgggaatcactgagtaaaaacttctacatgttaaaactacattaaatgaaagtcactacgttactcggacactaagtctttctctatgtaccttgtccaccgctcatgtgggacatatggacaaatatatgatttccaatgat

SEQ ID NO: 7546 - DNA, 634 bp, Gossypium hirsutum
  misc_feature (12)..(12): n is a, c, g, or t
atgtcaggtccnggcttaaagaaataaagctaataacagaatgacgtacctcagaagtagactgtaggtgcacaggcatatattctttcaaatcatctagagcaaaagaacccaccatacgctcccctggtacctttatatgtcaaacaaagattcattagaaaggcaataccttacagttcatcacttcaaaaggaacaaaaagtaaagtgggcatacctcaatagaaacacggtggggatagcagggttcatcccacgcataagggcaggaagtgtatgggtgaacaatggtgtcaagtgattcacacctttgttggtaaatccttagtctctacaatgacaaaaatgatacagaactctcacaaaaaattataattaaagttttaaaatgggtgatgcagaatgcaaagaaggtaattgagggattaaaatacttaaagatttggagtttacacaaatattagctattccacatttgatggtttggatcttagcatttcatatttacgagtagaatgtcataaataaccccttacaaacagaaagaaaagtaataatagaaacggcagtacaaataagtaaaatataagataaaaaaaaaacctactaacaagtactataacagcacacag

SEQ ID NO: 7547 - DNA, 611 bp, Gossypium hirsutum
aaccaagggaagggactccccacaaggttgctcaattttaataaacttatccctcgccaaacgaaaattggtggtagtactatccacgatagcttttcctcctcttcaagtggtgaacatcacaaaccccctttgattactctcactcgcaggagacactatgtatattctcctaatcacatttacaaagggttcttctccatgcaattgataatctagggaaaaagccattaacgtccaccaacccattaattgatcaagaatcattccatatgaactcaaaatttcaaccaaaaaaatgggtgtaaaggcaaatggaatcttgtttctatcacatataaagacaaaagaaaccagttgttttcccttctttgattattcatctcactcaattggtgtttaccctttacagcctcgaatctatacctaaagttatcaaagcaggtgattcccctacattcgagcaatttccacatttcctccactgatgcaaaacattcaaattcctcactttcagtgggaacactaaacaatctagggtccatgtttcactgatatgacaagaaatgaaagaaattcaaacctaccaaagaaaattgcaccagaagcat

SEQ ID NO: 7548 - DNA, 621 bp, Gossypium hirsutum
  misc_feature (598)..(598): n is a, c, g, or t
gacgctgcaaatgttcattttttaattaaaaaagggaaagaagaagaagaataaaaaataaagaaaaaggggaaaagtggaagagaataaaattttatatttattttaacgtagtagatgtagtagctaagctgaactctcccttttcattttcagccatctccttgccgattcattcctaagaaaattttcaacgttatttcaaaaagcaggcacgttcgtcttatgtccttgatctgatttgttcttcatcctttaccgtttgtttcccactttcctgcctctttttatttttattttgttctgatctagatttctggattttgtttcttggtttgtataaatacgatcgtttattctttgttttgatgaatcgtttattagcaatgaggtctctgatttatatttttttagaatagaaaatcctcagctagtgagtaggaaaggcttttttacacaaatgagtgctcaaattaaacttttctgcttctttgagttttatgagaccgggatttgctttgcagttaatgtaatatgtcgttgttttattgatcagagaaaagaacgttaaggaggaaagatgttgggaatagtaagncaaaaagtgagttctgggaactg

SEQ ID NO: 7549 - DNA, 666 bp, Gossypium hirsutum
ttcataagccggatcaaacaattcaaacaaataagcttttaaatcaaacttcaggacgcaccagcattacctatcttttgaagcattgataaccacagggagaagttttgagcaagtaatatctgagcccataacgggggcaagtagagaaattgcatgtagaatggtcatccgatacagataatgaggattgttaatcatgtctaaaacctgtaaatggatttaccaaaaagagacatcatattcagaaccaaaatcttagtatgtctactttatcttcacttgtttagaataacaaaaacagggaaacaagttattgttaaggcaaccagactaacctgtggaactatatgctgcattgcccaatctggtccaaattcttcagccaggcgcttcacgttattagcagcagcatcacgaatggaataaacctacaacgaaaaccaatgaagttagcgaagtttactttgaaatatcacatatcatgtcctagtatcacctcttaaaggtagactggtaatatgtaagtagaccctcaagcagacaaaatagttttaaacattagttttctctcctattccaccagaaaccactgattttattataaaattagtaagaacaacatccaattgtgaattctcaaataagcagggagcaattacagat

SEQ ID NO: 7550 - DNA, 663 bp, Gossypium hirsutum
atgttgttttgttgtagcagatgattttgtatttctggataaataatttttacagatttatccaaaaaaaaaacaacagatctcgcaatttgaagaatcaaagcattgaaatctcttttactcagaaactcatgttgagagaaaacacaaaaataaaataatactaattgtgggtaggcctaaaactatgtatttataagttggaattgcccttaatgaataaaagcagttttttcaagttttgtcagatttctgtcatagacttcaaggctgtgtttttggcattttcttgatttcagtcttaatctatcaattcccctagaaaaagtaaattatatactcaaattggaattttatagcttaaaatatgatacaaacagcttgaattctctaaatgagtccgaatcataaaaccttattaaaattaactttcaaacttttctgtatccaattcttccacttaggcaagatttgaaattaacattaaaatataagttaaaataaaataattgagcacttaaatagtaaatttcaaaggaaaaaatatcacaatttatgcatgatattagataacatatgctatgataaatgtatgcaaagcataaacaaaattataataatttgtgtaattacccaattatataaaaatattacaaatagagg

SEQ ID NO: 7551 - DNA, 650 bp, Gossypium hirsutum
gtcttttttgtggtgttacatgaaaaattgaaatgaatagtgcaattgatgcatggccatgaaaacttgggcttgagcctcaacctttcaaaaagactagataggacaggacacgcagtggtcagggctacaagttctttgatggtcggcataatttgggcccttggtgaagggccattggcaataatgcaagttgggaatatgaactcatctaaatgtagaaataggaacatgttttaaggtaaaccgagcttgctatactatgtccattgtaggccttgaaaaggacttaattctatcaacagaagtgccttaaaatctgactgataaaatatctacatcttcctctacttcaccactgacaattgtgttacagctaaaatagaatctttgtggtgtatttggttaccaacatataagtcacacgtattaaacgagttcgaatccttttaggccatgtaacatggttggcagaagaagatggggtcaagcaaaagccttttttatgcggtgcaagttaaagatgagtgggaaaaggacacaaaaaaggtctttgagaagggagagattgatggattgccaaccaaaccaacacccttttttaataatgaatcttggtactattctttaagtgtgatgggtgctttacc

SEQ ID NO: 7552 - DNA, 468 bp, Gossypium hirsutum
tgatcttataagttttaaaaattatgaaaatatttaacttaaaatagattaaagattaatttatgggaataatctgatttttacgatagagttaaatgtcgatatgttttaggtaatatcactctaaatatctaaaaaaaattttaatactgcttaacaaattagtgacatcggattaaaatatatagggacaaaatgtttaggaacctgatgaagtaattaaccttttagatttgctgaaaaaaaagtgttgcatgagagtatagcaacacttaattaaatttttgatctatttgcatgttaagtttatctaattttaaaattaaatttaaatagctcttaaaagatataaaagttacaaaaataaaccgttctcatttttttattttgttaaaaacaaaaaacttggaaaactatataaaattcttatttaaattattcaatatgtctctcaaaaaatttcctcaa

SEQ ID NO: 7553 - DNA, 616 bp, Gossypium hirsutum
ctcccttcctagaatccacttttgagtcagtaaactagttaacgagcccacccagaacacacacacgagtatgtctaaccacatttgatatttcattcaatctcttattgtatttgcatctaagcatttatcatgtacattgagtaaatatacaaaaggaaaattcaagattaaaggggatggggaagaattagcatctaaaccatgaacacactgaagaaagtattcatacattttgcagtccttaaaagtttagttacaaaatgcaagcatacaaacatttgcaagcatctgtgtgaacatatgcatcactgccgacaaaccaatctgactatcatgaaagacttttctcaatgaaccccaaaacttacccctgcattaaaaagaagctggacaacacgaattggagcagcaatgatatctttcgatttataagtatcgtccataggaaggttttgttccaaaacctaaaatattaaatattttgttagaatcaagcaagcgaccagaagaaatgtctgagaacattggatatgaatgaattacctgcaagttatcactaaacaatttaagttgagcagttgctttttcatcccgaactccaataaatgcttcc

SEQ ID NO: 7554 - DNA, 565 bp, Gossypium hirsutum
attattagcatctggaattttttcggaagagttttttctggatttgtttccgaaattctgatggtaaagtacaagcttccacggccactcatgatgacgatggtgcttcttttttcatgcattggctatctcttgattgcctttccattcccaggtgcactgtatatggcatcagttataattggaatcacgttcggggcacaactaccattaatatttgccattatatctgagctgtttggcttgaagtactatgctacattgtttaactgtgcccaaattgcgagtcctcttgggtcatatatatttaaagtgaaggttacgggggccatctacgacacagaagcattgaaggatgttgcagccaaaggcttagcagcgaaacaattgacatgcattggcagtcattgttacagactgtcgtttataatactggcttctgttagctgctttggagccttgtgttctctaattctggtgatgagaacccgaaagttctaccaaagcgatatttaccagaagtttagagaaaatgctgataccttatgaaacaaatggttggagt

SEQ ID NO: 7555 - DNA, 678 bp, Gossypium hirsutum
gagacgtataggaaaagtaaaataatttgattcaaacatatacatgcaattacatgtccatataataactataaacatgcaaccaagcctttggagatagaatgtaattttcaggtatatgtataacggagaaaagcacaagaaattggtaccaaagccatttccaaaagccacatgatttttgattcttcctgcttgtatggacaaaatatataaaaaaagaagaagaagaagggtaagcttaaattatcttctaaaccttacataattaagaaatgacgatggttttagtagttacagctgtataagaggatccgagtttgccattacaaaatctgtaaccctgagaaaagaaaaaataaataaatataaaatacattatctggctaccacacaagactatcaataactaagcaaaatatccaaaatgcatagataaccattcaaggtaattgcaaactgtgcatactctttgcagtatcttgaagcaggttggaaaccttcaatagattttaactcctcctgttcaaaagtgaaaccctaattagcaacaatttaaagacattcataagaaaattttgctaatatacaaatatatatatggggtttatttacataccaagataaaaatttatttgacaaaatgtcacaggtctgctgcaacccactatgcttcta

SEQ ID NO: 7556 - DNA, 675 bp, Gossypium hirsutum
gctaagtggaagagttatcttttagctcctccaataaattaaaacattaaatttaaccgactttaattaagtgcaaaaattaaatttttagcttataaaatattaataatataatttaaattttttaacagacaccaaaatttctaattttcactccaataagtttttagataataaaccaattggaaaattaaggtagaaattcaaattttataaaaattactgccagtatccctacaacttcaatcaagaaaatgcataacaggcaagagtcacgtgggaagatggggcaccatcacccccatgttctacaagtctaaaaatatgagaagtccaaactccaaagcttaaaagagaatgttttgttgcgaagttgaagacagacaagtcagaaacccagaaaacttaactaaattaaaatatagtaaaaagctgaggcacacgactgccctcatttcatggattctgacctttctctgtgaacacattttcaagggaccgggaccatttttatatctgattgctttaaaatcaagcttatatcatcacaatcaaattgaatccaataatcataatcagacatgccactgctaatctatttcattagaaacccatgcttaacatttctacctctttaactacgtaccataaacactatttatggtatcttaaatc

SEQ ID NO: 7557 - DNA, 639 bp, Gossypium hirsutum
aatgtaattttgaaccaaaacacccaacgatagatgcatcaaatcttatatttatgttaaactgtgtataattcatgtacatgctcaagttttaagaaaaagcaacaacaaacatactgccacaaaatgcgaatcaaagatttgaaattgaagagaaaaattaaagcacaatgagtaaatagcatgtcttatatgaaacaaagcagaaaatttcaaagtcaagaccatataaagaataagcatgaagaatgaaaacaactctaaaatgaccttagtagctgcttccatatttatgcaaaagtgtaattacaaaatataaaaactaaagttattgcccataaaacatttattatgatggctacattgcactagttttgtttatttttcagtaaccgttgaagctttctcaaaaattttgttctcaatatatcacaactgagttagagattgctattaacagaataggttattcatcagcgttttgcttgtccctgtacaggataaaagtaaataattagtattattaatgtgtaattgttttatgtaaaaggatttaaatttatacttatctacgcatcggatttttttgcaagagattcatctaggaaagtttttttttttttttggtaaaaaacaaag

SEQ ID NO: 7558 - DNA, 633 bp, Gossypium hirsutum
attcaagacccatcaggggtttacttacagaacctgaaaaaccttatgtcaactttggtttcacagtcatcacagaaaacattctccaccacaagctctggtgaggatccatatgcaatcatgggcctttaccaatgcaggggagacctcacaccaagccagtgttacacctgtgtgagcaagatcccagaaatgagtcataaactttgtggttcagctgttgctgccagggttcagctgagtggatgttacctaaggtacgaggttgttgggttcaaacaggttccagggactgagtttttgtacaaggtttgtgggtcatctcgggcaggagggaccgattttgagaacagtagagacgccgctttcaacatggcggaaaatggtgtaaaaagtggcggcggtggtagtgggagcagcttgttttacaccggaaattatcagtctgtttatgttttggggcagtgtgaaggtgatttggctgcaagtgattgtggggactgtgtgaaaagcgctttcgagactgctaaagatgattgtggtgactcagtttcaggacaggtttacctgcacaagtgctatattagttatagctactattctaatggagttccaaccatatcctctccttca

SEQ ID NO: 7559 - DNA, 559 bp, Gossypium hirsutum
atcaccattaaagaaggaaagaagccatgattctgaaagcagagggtttacagccgaggaagtggtagataatgcaagaaacctaagcatatcggttatgttatcaaagcctatactagctttggagttcaatttcttggaaatgcaagttgaagctcccatcatactatccaacaatactacaagctctttaccagccgcttgaacccccccccccctcccctcaaaatcatgctcctttttgtttcttgtttttaacatcaacatcaactaataagattctagactccaggttccatttcaaacattactccccaacagaacaagagatgttaaaggctttttttctttttggaaatatatatttcctttccttgagattcaagagctttacaaaaatgtttctacatggaaagataatcaaaccaaggaacaaacaaacaaatgcaattttcaacttcagacttgagcatcaaacttacttacaagctccaactgtattctcgacacaacaacttaactgatgagcagggatcagaatgcttctggtaatggcctg

SEQ ID NO: 7560 - DNA, 599 bp, Gossypium hirsutum
  misc_feature (588)..(589): n is a, c, g, or t
cggagtgacaccattaattatgacacgaaaagggacatgatgtggtgacattgtatcatttctgactgcattttgatgtgttttttcctttaggtaatgctccaacttttcctcaaataagagtctgggatccgtataagcggctcggcattagtccttacgcttcagaggaagaaatttggtccgcgcgcaattttctcttagaacaatatgctggacatgagagaagtgaagaatcaattgaagcagcattcgagaaactacttatggccagcttccagcatagaaagaaaacaaagattaacttgaaaagtaggctaaagaagaaagtagaggagtctccaccttggataaaaaacttgctcaattttgtcgaacttcctcccatggaagttatcttccgaagattgttcctatttgccttcatgggtggctggagtataatgaattcttccgagggtggacctgcctttcaggttcgttcatttttttttttcattaccttcaacttaatgattaccaaatcgaaacctcgcaaaaaatcaattattatcgtgataaaaggataattttattcttcttaatgtnngaagggaaag

SEQ ID NO: 7561 - DNA, 457 bp, Gossypium hirsutum
cattttactcaattttttttaaaattaaaatatagtttaagatttaatttattaataattgttactattttgtttcatttcgagataatgaagtgaatcattatatatatatacaggggtagactctgttgcattggatggtaaggagaaagagaaagtggtggtgattggagattttgatgcagtcaagttgacaaataatttgaggaagaaagttggagctactgaaattctcactttgggaaagcaaaactaatttaaggaagaaagttggagctactgaaattctcaatttaggaaacaggactaaataaatctcagctttttattattaattttttaattatgtatatgttaagttatatttcatatcatatttagtcgtgttttatttagtgtaagtttagatgggcggtgcatttacttgaggttagtgtaaaaataatggcgacaatga

SEQ ID NO: 7562 - DNA, 706 bp, Gossypium hirsutum
  misc_feature (664)..(672): n is a, c, g, or t
  misc_feature (685)..(691): n is a, c, g, or t
actcaagagaatgggacctacaaaagctccaggacctaacggtttcccagctattttctttcaaaattatggcatatagtaggtaaggaaacatctaaattctgtttggatatcttaaataatggtactactttcggtaattttaatcatacggatattgtgttgatcccaaaaattccaaatccctcaagcattgttaactttaaacccattaatctgtgctcagtgatctacaaaatggtcgcaaaaacaattgccaaccgacttcaagtagttattggaagatgtattgatacgactcaaagagcgtttgttccaggaaggttaattactgataatgtgcttctagcttatgagatcttgcatatttttcgtcagaagcgaagagggaaaaagggatatatggcggttaaggttgatatgagccaagcttatgatagggttgagtgcggatatctgaagaaagtaatgttaagaatgggcttcgcatcaaaatgggttaggttggttatgaattgtgtttccacaacatcttatgcagtcaatatcaatggggaccctttgagcccttttctttttctgatttgcagtgaggggttatcatctttgatgagaatggcttcggtggccggaaaactaaaaggtgcaaaagccagtagaaaannnnnnnnnaaaaaatttaggnnnnnnnaaacccccttaaaaa

SEQ ID NO: 7563 - DNA, 640 bp, Gossypium hirsutum
atccttaaaactctgattctgtattgatatatgctttgtcatttttacatgttttagcctcctttctcactaaagcattaaccctttcatatttagattggctttcagtctgcatgtttggaaaacattaacacatggtggttaatgggttcatcccgtcatagatgttaaaatataactcaacatcttatgaatgaactatgatattcatggtgttatacccgtatacattatagcatgttgaagttgtatcatatctattaacaattacagatgttttcattgtcttacctgtactgccatcatttaatatgatactaaggtgattattaaatctgatccttgcaggggactaacatgctttcacgtcttcttcatgtacgtcaccctaaagcaaagcaggctgttattacagctatcgatttactaggttagtcaaaatactactttatttgcaagttagaaacctggataaaattagtgttcaaaaggctttaggttaagcagagttggatagtataaccagaatgcactttattaagggtagaaggaagttcataagacctaagagtgattgttcagcatgtagatttgatgattcataaggagaggttgacaaggatccattgactactgctgt

SEQ ID NO: 7564 - DNA, 620 bp, Gossypium hirsutum
  misc_feature (54)..(57): n is a, c, g, or t
gaagcagaggtgattcacgtgtgtgattgcaacttaaaaagaagtatttttatnnnnggttgattcactcaacttgtttttttaattttttgcagtgtactggttgtgttcctccaaattatatggaacagcaatatgatattaatcaaaggatgagaggtatcctcattgactggctgatagaggtaacatacagatgattagctaatttccttacatccttgttatagatgaataacccatcattaatgagaataatgggatgccaggttcactacaagtttgagctgatggaggagaccttgtatctcacgatcaatctaattgataggtttttagcagttaagcaaatagcaaggaagaaacttcagctggttggagtaacagccatgcttctagcctgcaaatatgaagaagtttctgttcctgttattgaggatctggttctcatttctgacaaggcttacagtaggcaagaagtgcttgatatggtttgtaatttaaaccctttttttgcctcatttaatgatttgatggctcaataggaaatagaaatgacataatgatttgtaggagaaactgatgatcaacaccttacaattcaatctatcggttcctac

SEQ ID NO: 7565 - DNA, 635 bp, Gossypium hirsutum
  misc_feature (630)..(630): n is a, c, g, or t
  misc_feature (632)..(632): n is a, c, g, or t
ttttgagcttagttgcagcagcatcgagctcacttaggggccttggagaaaacattatcactgttttagggagttttatagtgggttttactggtataacgattccattggctttatcatttgagggaactgaatttgcattcccttgatcaaatgctaaatgtttgaaggaatcggaagcttcaagctttggttctttaatgggaaactgagaatcatccttctctccagaccttacaataaccttttccatggcataactaaaaacttgaagtttcaggatttccttccaagctgataaaagcaaagaaagggaaacacccattgatcttaaaatctctttacagacttcaaacctgcaaaatcagaattatcttacatgttcgttagactaaaagaaagctatcatattaatacccttgagttcgtatgagaacgcagctgaaatagctgagctgggagggacataagtgaatatggtggggtttagtggccttcaaagcggctcataacaaggatttaagaagccacaattagaagaaacatgatctaaaccaaagcaaataaaaaaaaaaggaacaaggaagtgaaaaaataataataaaattacagtatgaagctctcggggtnangag

SEQ ID NO: 7566 - DNA, 640 bp, Gossypium hirsutum
ctcatggagtttgtgggacgggcaagtccagtgtgctgagagcattggtcaacaatcccaaaatcaaaggggagtttgatttcatcatttccgtaacagtctcaaagttctggaccccaaacaagatacaagatcaaatcaagcagcagcttcctgcctcttccgatgctataccattccaaattttggaaggcaaaaggcttttgcttttactggatgatgtttgggaaatgattgatctaccgaacttgggcattcctaatcttagcctggaaaatggtggcatgatggtacttgcaactagagaattgaaggtttgttatgatatggaggtgactaaagtggtcgaaattgaacctgtctccagagaagaggcctggaaactgttccatgatcaggtgggaggcatagatgagttgccaaatatccaccactttgctcgaggtatagtagaaggctgttgcggtctgcctttgttgattattgctactgggagagccctttctgatgaagaaaatgttgccatatgggaggatgcagtcaatgaattttcggtgcctggtagagatgtcacatcttgtatggaggacctaattcagctattaaaattcagtttcgaccgcctcaagtctcgtagcct

SEQ ID NO: 7567 - DNA, 615 bp, Gossypium hirsutum
tgatcggtcatgtcatatacattcggtccgagtcgtatatccaattgctttgaaaggagtgtttttattttattttttaaaacttttattcgtgtttattaaatatgtttgtgtagtatatattttatattaaacagtacatcttggggagacatacacaaattaagcaaacaaatcacatggtttgtgtggatggagaggcaaataaactctcgttccacttactgctttattgagaaattggcagttaaatccatagcacacaacatcacaagcaaagctttcgcggatttaatttattgccaaaatgcggagaattttgattttcgaatattcaaatataaagacataaaagaaagaattttataaactttggcataaaaaatgcgtggctttaactgtatctgtcttcaactcactattggtctactctacctattttactcaaaagtctatatataagagtaaattacattcaaagtcactaaattataagaaagtttacgttttagtcactcagctttcaaatagtcactggattatttgaaagttttcatttaagtcattgtcactggactataaaaattgctgctttatggccgtatttgttcgcat

SEQ ID NO: 7568 - DNA, 651 bp, Gossypium hirsutum
tgtggtcttgttcctttcttatcactgaaagaattttctgatttggtttattgatttaaaattttcatgatgatatgttattgtttaacctttatttttattgaatgggacctatttgtgcttcagttttagcgcagaatgtgttgacagctttgagggaatcaatgttgaggcgcatatcactgtataatatttatcaggtctaatttattgaactgaattataattgctgttattacatgttagggaaagatgcgatggtttaattcttcatttctttattataagttcaatttaagactaaacatttggtctattgcccagattgttgaatcttgaataggctttatcctagtggttagagctgtaattgtatttcagatttgttaaattgttttttgcataaatggatgtgtaggccctaaaagaaactgttcccgtggctgttctcttttctggtggattagattctatgattattgctgcattgttggatcaatgcttagatcctaattgtaagtattgctatctatctctttatgtgtttatttcttgtaatttaacttgctggaagtatataatttatttctcactctatcccatttgtattttgcatgttaaagttgtcttgttcaaagcttcactctggaa

SEQ ID NO: 7569 - DNA, 509 bp, Gossypium hirsutum
  misc_feature (497)..(499): n is a, c, g, or t
tctggggtatatatatgattctgaaggcaatgttgttacctcttccaaactcctcgtctactcacatggaagtaaacgagttttgacgtccattaccacaatttatgtatccttgttcgtgttgtgctttgtgtaatattttaattataatttccatgccacatgctcccagcctgtcaacataatatgatagaaaatgttcaaaatatcataatatcctgtaaaaacaaacctcctcctggtatatttataaccctatgcactactgaattctatgcgttgcattaacagagtcataatggaacaaaatcaatacccatacaggaagggggggggggaacccttgaatctctatccccaatacatgtatgaattttctgcacaacaggctaatataaactcccactaaaacatcctcagctaaccttgaagggggcaaaaagaaaaaacaaatatagatgtgttgcaatcaattctaagtgctaaaaaaaaaaaannntaaatttaac

SEQ ID NO: 7570 - DNA, 619 bp, Gossypium hirsutum
  misc_feature (563)..(564): n is a, c, g, or t
  misc_feature (604)..(604): n is a, c, g, or t
tcaaggaacgttggagctttacattacaaattagaatggcacattatactcgttttgtcatatttgagagaattttttcttctttttttcaacaaaattttgcttcaagtgttaagtgttgacgtctgaaattcccttcttctgtcaacctaaaaaaaggagcaagcaggcttactaatattgaaaaagaagtatgatgccaatggccatacctgtatggtgataacagaggagttcgtcttttattgcgtctgaactccaaaactttctccatttcatataaaccgaagatagctggaatctagaattctggtaatgtagaactaggaggcaatactcggtctaagaatctaaattacgtgctaacattgatggctttcttctgaatatcactacattagaaggcaccacatagcatatgatctcccgagtaaagcagcagccatttctttaggatcaaagatgatcaaacctgcaatctataaccaaaccgattcatcatgcatgtgatattagccagaacttgtaaggggaaatgttcctattatcattcacttgataannactgagagagacggtgtcctaacaagaaggttacagtggnacagtgctagaggct

SEQ ID NO: 7571 - DNA, 330 bp, Gossypium hirsutum
atggtgttgcaagtcctatttttgcataaagtaggaaagcaagttagtgtattgctcaaaattattgtattttttatggggactagatcaaataagtcgctctattattaaaaggatcaatttagtccttataatattaaaaaggatcaaataagtccaaattgtaacagagataagtttactatataaagaatatcttgaaatttattattaattgctgttcaattccaaacaaaagatttcatttacaaaaccataaaaagcagtaaatgacttgaccttatttgattcttttcagtagttcagagactatattgatctatttagtag

SEQ ID NO: 7572 - DNA, 543 bp, Gossypium hirsutum
  misc_feature (169)..(169): n is a, c, g, or t
  misc_feature (206)..(206): n is a, c, g, or t
  misc_feature (290)..(292): n is a, c, g, or t
  misc_feature (360)..(360): n is a, c, g, or t
  misc_feature (375)..(375): n is a, c, g, or t
  misc_feature (386)..(386): n is a, c, g, or t
  misc_feature (488)..(488): n is a, c, g, or t
tcagaatacaaagacaaaatcttgaacaatttgatttccattgacatagatttctataaaaaaaaagatcatatgcctttcattgtccaacaaaggatccagctttgtcacaatggtgttgcaagtcctatttttgcataaagtaggaaagcaagttagtgtattgctnaaaattattgtattttttatggggactagatcaaatnagtccctctattattaaaaggatcaatttagtccttataatattaaaaaggatcaaataagtccaaattgtaacagagataagnnnactatataaagaatatcttgaaatttattattaattgctgttcaattccaaacaaaagatttcatttncaaaaccataaaaancagtaaatganttgaccttatttgattcttttcagtagttcagagactatattgatctatttagtagtagagggactaatttgatcaggtccctataatagaaggcctatcangtccattcacctttttttatttatatatttcctcataaaaaatataactaagagc

SEQ ID NO: 7573 - DNA, 612 bp, Gossypium hirsutum
aagagtatattcatgactgaaggaagttgacggcgcctcccatgtttttcttagtgaaatgaagcaatcttcttccacaaaacttttttcttataaaaacctagcttttgatgtagagcggccatggtactctttttttgcttttggtctccatgatttctttagcctaccccaccttaaccgtatggtttagtcagggcggcgtcatggtatcttattttatcgtgataaatcgatttaaaaaatcactttggttgtttttattcagttttaattagagttgtttatcctaattaaatttatctatcgtataaatttattattaattttcattcttataatttatttattaatattttatatacaaattaattttttaaatattttatagtatcgtcaataatttaattttaatagaaatttagagatttaacatgattaaaaaacttaataatataaatagttcaaaatataaaatttaatttaataatatgaatagtaaacataaattcgaaaacaattttttttggaatttaagaggaaataaaagttttggagaaaacaaaagttaatagctattaatcaaattggctattaaccttttaaattaat

SEQ ID NO: 7574 - DNA, 585 bp, Gossypium hirsutum
gacaatttgctttttgattcatagtacaagatgtaatttgctcattttaaaatgcaatagaactcctaatacaagagcctctaagatacttttaccattcgaggtatgacaacaatattttaaaggataagccatactagtagtcacccaactattagtaaatttttttggtcaccacaactatgaaaggttataaaatagtcatcaaactattcgattttgtcttttcaggttatcaattggctcacggcagcaacttttaaaattggtattataacaaccctcaacatttgtacattatgttaatttagtcttgattctaaaaaatttaactctcaaaatctatataatgtctaatttgatctttttgcagttttacttttttttgtgaccctctcacctaaaaagcaaaaaaaaaaattatcaactaaatttgattgaaaatatacaaaaataaaaacactaagaaatcaaagataatcattatcaactaaattacacgtgtaaatgttgagggttaaatttttttagaatcaagactaaattgacataatttataaacgttgaggattaaaattattatta

SEQ ID NO: 7575 - DNA, 647 bp, Gossypium hirsutum
cataaatgatcctgtttatttatttacaactttcagatttcttttatttatttattttttctttttttgcgccaaaagagtccgtgacttcaatatagtaaaacggaatcatttagccctaaagaaaaaaagtaataaaatcaaatctgtactcagaaaagaaaaatctgtagaaaatgtaaagctgtttttttttaagaagaattattgggaaatttatatatataataatatatttatatttattataagatatggggcaaaatccattgccccgtccttcgggatcaaaactcaaaaccaatctatcactttttttaatggcatctctttaaattattatgagatttataaaataataatcaattaatagtttatattaccattacatttatggatttgtcggtccaatcacgaggcttccaactgtcgaaatctggttatggcctagccatttcgtgcccataattttattattaaaattatatctattatacatatactgcacatggatatattaaaaacaatttcaaaaaactagatagattttttttaatttttttcaaaaatttgaaattaatttttagtatattagcaaaaacacttatatattaagagacttgtatgacttttatactgaaggctga

SEQ ID NO: 7576 - DNA, 593 bp, Gossypium hirsutum
  misc_feature (554)..(557): n is a, c, g, or t
  misc_feature (586)..(587): n is a, c, g, or t
tcacctcaaaaggaggctccaggatttttggagaagattaagaaattgctttcagtcaaagaactaaattctataaaagaagacaaaatgacaaaagaaaaaaaaaaaaaaaaaagggggttttggaacatatattttgggcttttttggaattaagtaggttcaaatacagttgttaagggagacaaaagcttttagattgatttctacactgttgtaactttccagatgcattaaatttgcattgatgggaaagaaccttcatatagaaaggcaaagggtgagcttggaaactgaaattatcttgcacaaagcttcttttcttcaagttatttattaaatatgttaatggtaaagcacagtaattgaagtttctgaaggaatacatggagaactgaaaaaacaacatcctttcctttctgatggtaataaaagttctatctatctccagcttcgatctttctctttatccaatcaactcgttttctgatgtttctagtgcgggggatctatttatgcggaatgaatgaatataattattacattcctaattnnnntataatatcaattaatataaaaaatccannaaaaag

SEQ ID NO: 7577 - DNA, 593 bp, Gossypium hirsutum
atactgtgagaaatatgtcaagtctgaatatattgtaggaacagaagaagtgaagtgaagtgacaaaaaactgagtgaagataaatatgctgcctcggatgacgaggaaatcgccgaaaaagcagatctttaggcacatattatgccctgcatacttgctacgacagagccggggaacatgtggaaaaattcctacttacccctttttgtcattactttccatggatgtttgtgtaaattaatccactgttgttcaataattcaaatatttatccactgctgaaactttaaaaagcaattctcccatatcctcctattccttatgtggtatactaccttttattatgctttgttattgttcattgacacattggttgatctaactttggtgatgacttggttggctgccaatgtaatttatatctccaatgtctccaacactttatggtggaatccattttgcatggttagggtagtctcatagagaagttaaaacatgggtttgtttagtgtataaatgtttgatatttttcatatatataaaaatgagaataattattgcttttggatcaatatttgtaattttggcgact

SEQ ID NO: 7578 - DNA, 645 bp, Gossypium hirsutum
tagaacctcaatccactccacaaaaggagccggttttcatgttgataattgcacaaaaatgagtgcaaatggaacttaaagctttagaaagcgaaagcttaagtttgagagagaacttacgttcttcagttcctctatgtctttaccagacctccggatgattgaacagattcgagcgtgagcatatagcaaataaacagcagtgttgccctgccattaaaattttagaaggggaatgaattacaaatcaaaatgatgaaacgaggtgttgccctgccattaaaattttagaaggggaatgaattacaaatcaaaatgatgaaacgagtttagctcaaatttggcagtttagaagagaaaaaattatttgggaaccttatcattaagcatctggtcaaaattaaatgtgtaattggtcaaccggttgtttttcaagtcagcatacctgtaatcagaattcatgaatattaaaacaataacaacatgaacaagaactacagagaagataatagcaagaacagttgaattagacaaagaagtccgtatgtaacaaatagcttactttactgcaccataaccgactgcttcagcagtactctcgatctcctcctcagtccattcttcacccttaccggatcagcacac

SEQ ID NO: 7579 - DNA, 619 bp, Gossypium hirsutum
tctaagctgattaggtttactctttgccttttattggccagtatattatcactttttatcccgattattagatttgcatgtttctcttcacatgcaaagctatgtgcttttcagctaaaattatcaaatatctactttaccttgccgtatatttagcttgctaatttagccttatagcatgaataatgcagtggtttttacgggaaaatgccaatgcattagtaatctggtgttggcatttcttggtgaatttacagagcatatcccttttaatgagcgactattacatctcataccatgatattgaatgaattacgcaggcttgtcgtgggggtaattcatcaaaaagtgcagttcgcaaggtttcaaaacaagttgcattatcttttattaagcgaacgcttgatagatgtcggaaattcgaacagacgggcaacagttgctttagcgaacctgcattacaagatatcatgttttctgtacatccatgcagcaatgaagcaaaatctgttgaaggtattggctctggaactgctagtaatacttgcaacgaaacatcgaaccatcaagccgaagccaggggctcaggtacatttgtgttggcattacatgcctataa

SEQ ID NO: 7580 - DNA, 621 bp, Gossypium hirsutum
  misc_feature (34)..(36): n is a, c, g, or t
  misc_feature (516)..(521): n is a, c, g, or t
  misc_feature (523)..(525): n is a, c, g, or t
  misc_feature (533)..(533): n is a, c, g, or t
  misc_feature (539)..(545): n is a, c, g, or t
  misc_feature (547)..(550): n is a, c, g, or t
  misc_feature (552)..(556): n is a, c, g, or t
  misc_feature (563)..(568): n is a, c, g, or t
  misc_feature (589)..(594): n is a, c, g, or t
  misc_feature (607)..(611): n is a, c, g, or t
agtaattgaaccatagtttgttgagaaagatacnnnggatagataatacaccattgctactacttcgggtttattttctattctctatcctgcatcttgctggaatcataaccttttgtatattaaagatgattttagattttgtttttcaatgatatcttgcctttttgtcttctagagcatatattccattttctagaactgtgtgatgttgtgattatagctttctgtgcatgcatttaagttgatttagacagactttgtctgatgtagcttttattaggctcgatatgtggccttgttggccatctgccttttttattaaatactggtcctactctttctcttttttttttttttctttttttttggaattaattttgtatttttttttttttctttaaataaattaaaaatttttttattccatttttccgttccggggtttttttttggcttctttttttggcccccttttgggcggggggggcccctgggggggcccatttggggggnnnnnngnnntaaaaacngccctnnnnnnngnnnncnnnnngggggtnnnnnnggccttgggggcccggggggnnnnnnggggtttgttttnnnnnggggtttttt

SEQ ID NO: 7581 - DNA, 628 bp, Gossypium hirsutum
  misc_feature (581)..(590): n is a, c, g, or t
  misc_feature (592)..(592): n is a, c, g, or t
  misc_feature (611)..(618): n is a, c, g, or t
  misc_feature (621)..(625): n is a, c, g, or t
attttaattttatcttctatccttctcccttcttttctgtgctgacgttgtcaattatttacaggctcctgtttataaagaaccaatcttctccattcccggaactcctgcaatagttcagcatgagattttaaataacagaaggcatgtattgactaaggtaaatgcggtagtacttctatggattttggttcctacgattttattttgggagatctatttttgcataaatgatattaatgtgtctttaacaggatactgctggttcagtaaagctctgggagataaccaagggtgttgtgattgaagactatggacaggtacactagattcttttgctattttctttcttttctttcccctcaaggaaaagtgcttgcacttttcttttcacttacaggtttggtacacgtagagacactcttgcatatgcaaggttatgttttagttgtatgtatttattcatttctttaatttaatgtccaggtttcctttgatgagaaaaaggagcagttgtttgagatggtgcgataactatttatttgatcgtagtagttgaatatactgcatctttttttttnnnnnnnnnnanttaaattttaatttttggnnnnnnnnctnnnnngga

SEQ ID NO: 7582 - DNA, 607 bp, Gossypium hirsutum
attttagtccaaacgtgaatatgaacaatcaaccatcaaaatcattggcgtcctctgccgtgcactgatattttttattgtcaaaatatctctatacaagcttactaaaaaccttcagcaagcctaaacaggtcatataaatccacaaaagtagtggcaacattgacaaacatttgcgtcttcttcctcttgcagaaatgccatgaatgtcaacatatcaatgttaggagaaactctgaagacaaaatcgtgacttatttaatcaaagatatacactattttattaaaaatgatattttaatgcctatcattgatacgtagaataataaattataaaatttgttttttttttcctttaatgtttattttaaatatttaaattattttattaattttattcttttgtatgccgaagttttggaggattgattgccattgaaaggaacaaagaattcaacattataatagtagatcataactttctttgttatcacatgcgagaatgtctatgttttatacaaatttaattttatgttataattatatatacttaggaaaaaaatatttttggatatttaattttttatagagagaaaatgaagatgag

SEQ ID NO: 7583 - DNA, 664 bp, Gossypium hirsutum
tgatggaaggatgaaagttctgatgattcaatggagaatatgaaaagattggttgccaccttggagaaggaaaacactcatcttaaggttgatacttgcccggttaaatttgtttccattttagtgaagtgtatcattgttaacaaaaaatacattgaccttttatatcctgagcttgcttcacttacatcctcctatagatgatgaagaatgaattggaggctgctctggaaagtagcaagaaagcttcaactgacaagattgatcccattccttcagagaatctggtaaatatccactttgataagcatatactatatgcagtgtaggttcttttttgcggggagggggttgtttttggtctgcatgcacccatgcgttgcagttggagaacttgatctgtgtagaaattggttactgttgttattttgtgtgagtttgtcagattatgtattggagaaatattatttttcaagtaacttttaatgtgtaggtgttccattttatcaaaattttttaaagtgtataccagaaggtagattcatctggaagttctcccggaaagaaagaaacagaactatcattgcagaaattggaaaaagatctgaaagaaacatgctgtgaaagggacagagctttgcaagaactgactcgtcttaagcag

SEQ ID NO: 7584 - DNA, 625 bp, Gossypium hirsutum
cgagccctggcagccagacttgtttggactccagctcaaatggtgctcgccacttgcgtcgacggtcgacaaggcgatgatcagagccacaaagatcaatgaaacaggcaggagaaaacaagagggattagccatgttgttgacgttttgttttggctgtcgtttgtatttctattaagcaattgcttaagttgggacaagaagagagagggtgcggcaacttgtttttaaagctactaaataagagagttggaagatcgacattgagtcgttgactaatgacattggccccgtggttaggttctttttatatttacagacaaagaacaaaccagtacccccactaaaccaaaaaataaatataaaaacgaaaaaaagaaaaggccaaagagcaacatctgaagaaagcttcaaaatatggttacttaataactttgtaatactgaatatgataatgtaacaagctgaaaccgaagaatttatgtttgttgttttcattgttttaaaagattaaattgataggatagataataatatggttcaaagaattaattaaaagtaaaatatttagacagataactttacacatcattgtgaatctcctcgtgtatatatactggtggat

SEQ ID NO: 7585 - DNA, 624 bp, Gossypium hirsutum
aatttggactttttttttccttttctttatgtaatcttggaaatttctaccataagaaaataaatattatatgaatcataaaactcaaaatacttaaaaagttacaatatcaatatcagtcaatacccacggtgatactacagcaagagtacaccattacatatcttaaaaatcttttgactgtttgttttatctcaaccttttagagtgaaaaaatcaaactaaaccgactgaaataataccgtgcaatctggaaaacaacatattctcacaaacactagaggggaacacagagatagaagtgtcagacaagcatatgctctcatgcatcacttccatatgttttagaccatccaagcatatcaaaccagatccttttggtgaatctggaatttcatttgacaaaaaaaaattatggtttcattgcaatcaatctactataattctaacccagtcaagttcaattttttttgtaaaaggggcaaggtttatatgatgaaataagaaggcagggcaatcaagttaaggtatagagacgatgactctatcaatttattgatgttttgaaatatctaaagtttgactgatttcctgggggggggaggggaattataggtctgctca

SEQ ID NO: 7586 - DNA, 580 bp, Gossypium hirsutum
  misc_feature (565)..(570): n is a, c, g, or t
tggatttatcattttgcattaattctaatctcttatgtatgcttaagtgtttgagcttaattgtagtactcactatgctaaatggagctttttctatgagatgatcatgctgaaggagcatatattttagcatatatctcaaactccaaaatgaataaaactgattcactattattttattttaaattaaaattttaattatttactaaactaatttaattaatatatttaaaattttttatttttgtcgcatttgcactttgaacaattacaaagtcagttttactcaatcacacgcaccataatcgtttccttcaaccttgcactttaaaggtataatgcccttactactatgatcaccccaatcacaagtaagaccagaacaatatatttcactgcaaaaatgatagtcttacaacagtattctctcaagaaaaaattaaatgcctaatttttctgaatttgaaattgatttttgaaactcaaatcatattatttaaaaatccgtatcagatcgatagaattatcaatcaaattttttatttttgatatattttaataaatnnnnnnataaacccaa

SEQ ID NO: 7587 - DNA, 623 bp, Gossypium hirsutum
ttgaggcccatggccggcatccttggtgtctatacaatgaccaaactttccatttgggaaaaaaattatgaatacaatgagggcattttagtatttttggttttcatttgtttctgtctaaagtgacgagctttttgaaccatcgatgtagtttatcctcagaaacaatggttcagttccacgcattcagctcccaccacaactattacaacccaatttcaaagttttgctgccaaaagttctaatttttatgattatcagacacactacagaattgggattaattcatgaatacgcatggattgtttcgttctttaacaccagagactcttctttttttccctcacttttcttctagatcattcttcattcttcaaaagcaagcaaatttgtcaatacccagttttagatattgccaaggtggtggctttggctttagtctaagaccatttgcaccagttcttttcaggtattataaaaaaagaaacagtcgtacccttttgagagcgagctggagagagtctccttatgaagttttgggtgtctctccttctgcaactccggatgaaatcaaaagggcttataggaaacttgctttgaagtatcatcctgatgtcaacaaa

SEQ ID NO: 7588 - DNA, 656 bp, Gossypium hirsutum
caagcgtctacaatgtaatttcagccacttaattttgctgcttattttatattatgatgatgatgatgatgagtagtagtagttcataattcttcgaggccttaattcatgtcaggcaagcaaagcagcattgacagcctttttcgatacattaaggattgaacttggatccgaggttaagataacaattgtaacacctggttttatcgagtctgaaatcacccaaggcaaattccttcaaagagatggtaacatggaagttcagcaagacatgagagatgtaagtaaactagtgttactttgtgctgtaaattgtaataataaacctgaccatttcaaaaattgaataggtacaagtgagttctataccagtagggtcagccagtgggtgcgcccaggcaatagtgaacagtgcaagcagaggagatcggtacttgactcagccgtcatggttcagggtgacttacctatggaagctgtttttcccggaactggtggaatggagttacagattatcccatttctcgaggccaggagccccacaccagcaagcaccaagcaagaagatattggatttcactggtctcaagaatgttgtttatccatcatccatccaatcacctgagattaagactgactaattaatctgcacctac

SEQ ID NO: 7589 - DNA, 571 bp, Gossypium hirsutum
ctgggaatgactagagattttttaccagaaaataataaatttaataagaaaataatcatctagatgccaaatcataaaaaattaagaatataccttgttaaaacagctgcaattaattcaaaaccttaaaaaaaactccgaaaattaaaaagcaacctcccagttcacgatcgaatcaagcctccggttactcttttttaaaaagaacaaatttcctttaaataggtaaaaaaaaatagaaaagaaaatgggaaatagaaaaagaaagattgggataaaattattaactaaggttaccatgccgatcactctttgaaagatgtttcaaacaatgggagtaaaaaccagcatgggaaggagttaaaaaagggatcaaaggtaaacaaatcgaatcaaagggtaacgaaggcatattgtcagtttatgctcttcgaaaccccttaatgttttaaggaaaatccaatttttttctttttattttttaatcagtcgatcgagatttggggaagaactaaaaaccctaatcggaaagaaagggaaaaaaggcgatgatggccgacgatgagattac

SEQ ID NO: 7590 - DNA, 601 bp, Gossypium hirsutum
tgctcgtttatcctttggttcattttatttttcatttcacggggctcagatccttgaggcatcaaatattttgaaaacttagctgaatcacttatttcatgagtcttaccactctgatctgcaacataatgtttgcttacttccataaactttctcttctttcctggcttaggaacaccaaaaataactcttgatccttccttctttaaaccagtacgtaccattttgagtgaaccaggcttattctcatctctggtgcttctaccaatattaaatattttttcgttgtcagataaatccagcaatctcatgtcaccaggtttccaagactccttaaggtctaaactttttgtgagcttatcttcccctctgccttctacaacaggaccacctatcctaggtcgcttttcctgaggggtatcaccctgaaaaacagatcaattacttagtataaagaagcaattaaagtatcaccagagaaaacatcaatcataaatactagctaacatatcacctcgtgggaagagccattattatcctgaaaactggacccttcaacccaactaccattcttccaaatcagagaaggacgaagaagcca

SEQ ID NO: 7591 - DNA, 658 bp, Gossypium hirsutum
tagtgatttgcttttcccaattatgtataggtatcaaaataaataaataaataaatatttaagagttaattgcattaaacattcctaaattatgactcttattttaaattagtccttaaattttaaaatactctagttacatttttaaactatcgatgttttattaataatgtcttttcgttatgaaaattgttaatttaactgttaaaagagatgttaaatcttatatgtcataatttaaaatatatattttttaaaaatgactattgtaaggatgaatgttaaaaaaatcttgatttttaaattttcgaaatttttacagtaacaaaaacaacagttctttgtctttttgttttacttcattcttggtgttaaaacttatgtggcaatattttacttttctttaaaattttcattttaaaatatatcatataagattttacgtgtcattcaatggttaaattaataatttcaataactaaaagacctgattgatataatatcgatagtgtgaagatgtaatagaatgttgtgaggtttgagagctaattccgatagaacgggggccaaacccattcagccgttgcctacaaggaatcttcctctcttactcatatattacattttccccaatttgctcttattcatttaagatccc

SEQ ID NO: 7592 - DNA, 826 bp, Gossypium hirsutum
  misc_feature (239)..(239): n is a, c, g, or t
  misc_feature (254)..(254): n is a, c, g, or t
  misc_feature (310)..(310): n is a, c, g, or t
  misc_feature (329)..(329): n is a, c, g, or t
  misc_feature (349)..(349): n is a, c, g, or t
  misc_feature (497)..(497): n is a, c, g, or t
  misc_feature (512)..(512): n is a, c, g, or t
  misc_feature (528)..(528): n is a, c, g, or t
  misc_feature (592)..(592): n is a, c, g, or t
  misc_feature (618)..(618): n is a, c, g, or t
cgtccggtagtgatttgcttttcccaattatgtataggtatcaaaataaataaataaataaatatttaagagttaattgcattaaacattcctaaattatgactcttattttaaattagtccttaaattttaaaatactctagttacatttttaaactatcgatgttttattaataatgtcttttcgttatgaaaattgttaatttaactgttaaaagagatgttaaatcttatatgtnataatttaaaatatntttttttttaaaatgactattgtaaggatgaatgttaaaaaaatcttgatttttanattttcgaaatttttacantaacaaaaacaacagttctntgtctttttgttttacttcattcttggtgttaaaacttatgtggcaatattttacttttctttaaaattttcattttaaaatatatcatataagattttacgtgtcattcaatggttaaattaataatttcaataactaaaagacctnattgatataatatcnatagtgtgaagatgtnatagaatgttgtgaggtttgagagctaattccgatagaacgggggccaaacccattcagccgtngcctacaaggaatcttcctctcttantcatatattacattttccccaatttgctcttattcatttaagatcccagaaggtcatagagagctctgcattggatggagagtaaggtgtgcgtgactggtgctgccggttacctaggttcttcgcttgtcaagaggctcctggaaaagggacacattgttcacgcaactacgaggaatttgggttactttttcttctctctttgctg

SEQ ID NO: 7593 - DNA, 658 bp, Gossypium hirsutum
ctcacatggtgcatctggatttagacaattgtcagaggtgcataactctgcctccacttgggcaattgccatcactcaaagacttgtgtatcagaagcttgtatgctgtcaagagtctcgacctcgagtttttcaaggatgctgtcttagaaccttttccagcacttgagactttagaattttaagatatgcgagagttgaaggattgggagtttcctttggatgttaatgcaatgtttcatcgcctatgcaagcttaatataacatcctgccccgagttagctggaaaattacccagctacctaccatctttagacaaactggtactttatcgctgtcaacagttagtagtatcaatacttagcctgccaatgcttaatggttaatgatctgtggctgcaaagaattggtgcaaaccagtacaattgacttcagcaagctagaccgggtggaactttcaaacattttaagttgacatgtctaacggagggcttcatgcaagggttgacagaggtaagaaatttggagatccatgtttgtaaggatctgctgtcattagggagcctcagttttgttcgttatttagaaattacaaatggtttgccactcatttccttgggggaagaggtggaagcaaaggagacggcacaacttgata

SEQ ID NO: 7594 - DNA, 551 bp, Gossypium hirsutum
  misc_feature (517)..(519): n is a, c, g, or t
  misc_feature (528)..(530): n is a, c, g, or t
  misc_feature (532)..(532): n is a, c, g, or t
cctaaatctctaaattttatagtggtccaagtttcactctataatttgtgtaaattattcctaaatttattctaattaatcatttgggattaaattaattatttaagaatcgatactagctaattaaaataattgatatagttgtaatatttaaaaaaaaatctatttgcttcttattaactgaattaaagaaatatatattttataaaaaaatcggatgtggatgaccatttaaaaaaaaaactcttttatttttatataaataattcattaattgaaacaaaaaatcataaacttatgcaagtctttaccactagttttcttttattaataaaatattacattgaccgaaaaaaatacaagtgacctgtggaaatcattagttgttcaagtttcttcattatactaaaccaaataaatgttagctgatatatattttaaggtttgtttaaattttgcaaaacaatttactgagtgaattccaattctgtttattgaggaattattttgtgagagnnntataaactnnntntgtaagcattgttaagtgt

SEQ ID NO: 7595 - DNA, 564 bp, Gossypium hirsutum
  misc_feature (4)..(8): n is a, c, g, or t
ttgnnnnntgagaatggctatgttagcgggtcgtttaaaattacgaaccctagtctgtgttcactaaattacgtttttaccctttaaatattatcaatgtttcggatgcttaaaatctatattagtccctgtactcttcataaattcagaatttagtccctatacttttatttctagcaattcagtccctctacttctcagatttcaaaatttaagtccaattcttaaccctgttaaattattttgttacagtcaagttcatttcaatattattttttagttgcatggctatcaagggagcatttttttatttcaaaatgtcacatcaacaaatttaaagaaaaaatttaacattgttaacggctcgacatgaattttaaaatctaaaaagtaaagagactaaattcttgaaagaaaaagtacagggactaaattttaaatttgagaaaagtacatggattgatggcatattataaccttttcaaatatatgatctatttctgaatttcatccctttagtttataatatttgagaagctagtcctttaatttgttgggatttgg

SEQ ID NO: 7596 - DNA, 590 bp, Gossypium hirsutum
tttgaacttcagcacacatcaataacgaaagatacccaattcaacagaagtatctaagaaggggaaaaaaccctaattcaccaatttgagaaaatattaacgatttaacaaaggaagaagaaaggggaaacatactcgaaaccttaaccagggaaccttgaaggcgtggctcagccaaaagagaaagcgaagccagatttgaagccgatgcccacctctcaacagcctcttccccaaacccacaatcaaccaacttctgcgccaaccaaagaagctcagcagccagcttctcagccgaatttcctgaccggatcacatcctccctcacacctccacttccttccctagcccaaaccccatccccaacagaccgaaccacccgtaaagcccttttcacccaatactgaaccggagcaggtccagcaccatcatgaccgatcctatcttgccccaactcaaccatagcagcctcaagataagaaagagtcctcgaaaaagccgaagacaaaaccgcccggttcacttcacgtaaaccctcagcatcttccctacggtctcttctataagtccttcagctaaagaccgaacga

SEQ ID NO: 7597 - DNA, 509 bp, Gossypium hirsutum
ttatttaatttaactccaaaaatgtctaatgttgttccgaaattcaatggcctctttagcccaaaaggtaaacaaatgaaataattgttctggaatagaaatagtagccagcttcatttggccaaattgacaacgaaaaagaagctcatattgaaactttttaggccacaataaattctgttttccttttgctcaggcaattgaaaacataaagaaagacattggaacttccaattctttcaagaacagcaagaaaacaacaatgaatacatttagcaaattcatcaccaggttaaaaaaaaaaatctcgatacacttactttgccaaagcatctattgtaccattacttggtcgatgaataattgcaatctgaaattgagccaactggttagtgccatagtcaatgcccccaaacaattcccataatgaccactgatgcagttgtaaaccaattaaaaatttgactaagacaagtgcacctatcaattaatagtatagctatagcgag

SEQ ID NO: 7598 - DNA, 556 bp, Gossypium hirsutum
tgccggcgctgcgggtattctccgttttccctttttttattgttacaatttacaagtctttgttgactcaaatatatgtaaagtttgtctgaacattttcgaatctcgtttaccttagatcatagttgaagctaaaggatcttagaagtgaagatcctattttcacccaacatttcttcaactcttttgcgctttgcagatcaccatggacccccgaaggttaattgttggcaagacccaatgaacccatctaaatggaaagaagagcacgttagtttgtttctttttcatgcttatatttcagttctgcctttttatttcttaccctagttccaattctttccatgttgtttttaccgtgcaaatttttgaaaactgttttcttttaattgattttgtacacctaatttaagccctgtccagtctcaatgatcggtgcttcatttccttcacttgaagttaaaaaattttgttgagtttgagcagattttacatcacagcatacaagttgattcttttgctttttactcgactatgtacaaattaattgatacta

SEQ ID NO: 7599 - DNA, 597 bp, Gossypium hirsutum
gagatgaagtaacgcagggattagtttgaacaatagaggacttgtcacctggggatatgaaagttgaaaccccatcactattttactacaaaaataaccatagctgcatttgcatacatttttcatttttctaagctgaaacgctatcactattttaccacaaaaaaaaccacagttgaaagattatgatcgagccaagaatcaatcataccagactaagtgctgttgtccctagcagtagcaggtacagtttcccctggaaagctcgaggtttcagttatgaaggagattgtaaagccaaaaactattcttaactagggatgtattggtacacccatcttgccaaagtacaataaactccgtagtagcactgacctcaacaagatggatattagaagcacggcttagaaggacaaaagcaaattctccaatctgtgcaagagacatcccgacctgcacaagcaaaagaacttgagttacttcaaaattcaaatgcaatacataatcaagtatacataaaataaagcttacaagcagtgaagtcttgttgttgtagccaataacccttgacaaccaaggcaattattattgttttta

SEQ ID NO: 7600 - DNA, 670 bp, Gossypium hirsutum
atgattctgatcaccaaaaacaacatgtctctgcttcagcttcttctccaatgaaacccttcttttggaaggatcaatagagtctagaccctgacatatttttcacaaatccaactagcggttccttgaatggcattatttcttaattcttatcatttaggctttgaaacatccattcccagagatttgttattcacttccatcacacctgcaaaaaggttgcgtatttttcatgccttttagcagcttgttgttgttgcactaagctttctggtcctagttgtatccagtatatcaacccagatagtgtgattagcaaccctttttagccgattatgtttgatgtaatgttgcagatgtagctatagtccaatttgattgcaggaaagagtggttatctctttctctattcatctatattttggagttggttaaattcataatcaattaaaataaagataaataaaaaagaagagcctatcataacaaatgcaatgatgcattcagcaaatttgcagcattagcattggtcataaatcatggtacttttaaccaatcccaatgaagatttggattgcttgccctacttcatacattttccaacatcatgttttaattatattttccttaagaaaaaaaagtatgtaatgtttattacaccctactttct

SEQ ID NO: 7601 - DNA, 653 bp, Gossypium hirsutum
aggagttggtggtgatatagagatcgattggtttagtttttattaatttccttatcattaagaaagagagagaaaaaaacatatctttattcatctctctgaaacccttaatcaagttgtggggttttctctctgataacccttcaaaacttaacagatgaccccaagcagtgggtcttcatggcatttaagaatgtcagctcagttgtttcttttctttaagtggcgaaggtctgcacatttctttctcttcattatcttcttagattttcaatggcagaattaatgctggatgctgcaatggcggtctactttttttctaaatcggggaaccttttcttttgtgcagcatttctatgaagatttccatgcaaacttcttcattctctctaatcattatattaatatatatatatataaaatagtattaaacgttttttctttgtgtatccttgtttgttatcatggataattgctttgttttgcagcattattaacaaattattcgagttcttgacttaattttaattaaaactttacaatttttgaaatcttatatttgagtctataaaattgtggttttcgggtttatataaattaatttaattattttataataagaaaaaatattgattttttgaaaggagttgatg

SEQ ID NO: 7602 - DNA, 351 bp, Gossypium hirsutum
agtgcataacttcaaccatgatcactaaagattcaatgattcatcactatggttaagcatccagcctataatcaattggcaataggaggaagattcaacgatccattactacttcaagcatccaaccccaaaacaattggtcatcgtgggttcaactagaatataagaccacaagatatccaagacttaatagatgtagggtaacatcacttaacagttaacactcccctcacatgtagctgaacaagggtctacacatggacagcctaacatggggttagacctgaagaactaacatgaaaaaaaaaatgcaatatttgtctctttttctttttctgttttttctttttt

SEQ ID NO: 7603 - DNA, 666 bp, Gossypium hirsutum
agcctctagttgggatcatgcatgtcccactaagagataaatggggtgttactagtaaccgctttgtttctatctacttcttagtccttaaggcttagcccttctacttatttaccatataaaaatatcacaaattaatgggataatatttcaatccaactagctagaaaagtaataaatattagggtaaattacaccaacaattactctattttgatgcaactaacaaaagagtcattttgatttcaattcaatcactcaattttcgaaaaataacaaaacaattattttaactattttccgttatagacgtagcggcaaagtgacatgacatttaatggattctttactgtcattaactggccagttggagggttagctgtcatttaaatagccctatagccctagttgggcagtagaaaagaagagaaaaaggagaagaagaaaagaaataatgaagataccttagctatggtcgttttgttcctccaaggtggagccaccactcagttcgttgctatccattgaatctctatcccttttttttccttctcttcttctcttttctttttcttctcttttttccttaactctaatcgtcgtcgttcatggccttctctggccaaccgtcatcaccaaatgactcctctttgcctcttctcaaat

SEQ ID NO: 7604 - DNA, 650 bp, Gossypium hirsutum
tgttggatgggatcttgaaattacagtttccagtagggattgattctgaacgattcattaaagctcttgaactccctgaagtacaagatcacatgaaagtactgaaacagaggtttgcaggtcgaaaggtaggaattggtcaattggattctttgcttttctcccttaattatcagttatgtttgcgtaacattcattaggcattttaaaatctcatcttttgtttcaaggaagcaacattcaatctgttttctgagttacttacagttaatgtttaataattgaaaggtaatgttaggcgttgatcggcttgatatgatcaagggaataccacagaagattttggcatttgaaaaattcctcgaggaaaatcccaattggcgtaataaggtggttctccttcaaattgctgtccctaccaggaccgatgttcctgagtgtatgttcctctgtatatatgtttcttcttcccgtttggttacctgaaatatttcctttttcaatgagaaccaccacagaaaattgattaactagcatctcaagatactctcatgttgatttgccctcttattgtgccatgctgtcttttataacaatagactgttgcatgtattatgtaaacagaagatgcagtgccaatcttcatattc

SEQ ID NO: 7605 - DNA, 634 bp, Gossypium hirsutum
agccttaactatatatgagggaacaagggaaaatcctcacatatgtgagcatatatttcctcatcaatccaaatgaaaaataaatgaaataaacagaagaatggaagattgaaaacctctccttgatatattaataagtaaaattaaaatgtaaaagaaaataaggccactgataaggtgacttacagcaatcagataacatatagagagagatgtattaagaatagttaagagaaagaatgatcataaatcaatggttagaaaatgaagcttaagaccttagaaaatatagctcacaaaaatataagcaagaaaaaagttaccatggggtcaagcctccaacaaagacaactgtacttagtgacatgcgcttctgccctgccccaccaaagccagctgtaactagagcatttagggtagtatccatgcttgcgtcaggcattacaactgcatgattttttgctccaatattgcactaaaaccaacaatcgacaagcaaaattaacaacctttcagaaaaagataaaacagaaaaattaacatcaaactcagataatttgccagggcaagacagctactataatgtttgtagaaaaataacagattagtttcccaaaaagtacctgaacacgct

SEQ ID NO: 7606 - DNA, 605 bp, Gossypium hirsutum
tgtttttgattatttgttatctcttgtcaatttccaatttgatgtacattttggttatgtctatgttcacaggcgtgcaggaggtgagaaaatatatggcgtatttgataatcaactccctgcggctttgaagaggttgcaatttgataaacatctttcaatcgaaaatgtacggaagttaattactgaagctgatggataccaaccacatcttatagcccctgagcaaggatatcgccgacttattgagtcttgcttagtaactataagagggcctgctgaagcagctgttgatggggtatttaattcattttgctatatcaagctctcctctctcaatttttgtggcatgtcctttgattgagatatctttcacgattcaatttcaggtccatgctatactaaagggaattgttcagaaggctatagctgagacaacggtaagttcctggccatgctaactttatgattttaaccatgctctgtaatatcttgttagttactggttatcttttgttttgtatatataggaactaaagcaatacccaactttgagagtggaagtagggaatgctgcatttgaatcgttggagagaatgaggaga

SEQ ID NO: 7607 - DNA, 613 bp, Gossypium hirsutum
tgtgggagctcatattatatatttatttatccatgcatgacattgtaaaccttgttatctctatttgttagttaacagtgtatccatcttgatttgggctgttttctgaacttaattatttctctttgtatcttggtcttcacaatgagaggtagctcttgtgcactcttaaagaaaattgtattgtacaaattgcagtgtttctgtggcttaattatcctatcaataaaattgtattctacatttgaataaattttggagattgtgttagttgtacttcgttgccttatatgcttcccaaagcaaatatgctgggaagatagtttgtggaggttcccccctcccccttcctaagtatctgccatgttcttgatttgctgattccttatcataacacctctttcctgagaatgataaggatatttgagtttacaacttctattgttgtatgaagccttcttgatggaatcagtttcatgggatgctttatgcccatcatgcaaaagttttttgcgaaaactcattcccaattgctagatagagaagattgccccttttccccgttggagtttccccctcatttcagtctctttgactgttgaggcttagaggc

SEQ ID NO: 7608 - DNA, 655 bp, Gossypium hirsutum
gaattatcatggacgagttgaaaaattcaaaaaaatgatcgaaccgaaccaaacttacccttagatgtcgcagacttcgaaccagcaaacagttgcttgcatagtttttaaaataggattttgttcgaagaacgtggttaccgattcccaattgtaatatctattttgggtggtatccctatttgtggaggatgtctcattggacataggtaaccaagttccctacgaggatattatggggatttgctttatagtagcattcaaatttatatctctcgatatcgaatcggttgattttatgttgagttgggttaatttgggtaaatcaatttgatttttaagatttttggattaatttcaaatttagatcattttatgttgaggtcattttagatataagatatttgggttttaggttaaggcactatttgggatttgaaattgacaagtgttttcatgttagggtttgaatttttttgatcttggtttttgaatttgacaattattctcacactgagtcttaaatttcttttgtccaagttaatccttgtcaattgttctcacattgatttgacttcttctttgtttaaattagttcccgatatttctttgaaaaaaaattggataaaaaaagtcatatctcaatgtggaagca

SEQ ID NO: 7609 - DNA, 788 bp, Gossypium hirsutum
  misc_feature (183)..(185): n is a, c, g, or t
  misc_feature (479)..(479): n is a, c, g, or t
  misc_feature (494)..(494): n is a, c, g, or t
gaattggactgaaccgaattatcatggacgagttgaaaaattcaaaaaaatgatcgaaccgaaccaaacttacccttagatgtcgcagacttcgaaccagcaaacagttgcttgcatagtttttaaaataggattttgttcgaagaacgtggttaccgattcccaattgtaatatctattttnnntggtatccctatttgtggaggatgtctcattggacataggtaaccaagttccctacgaggatattatggggatttgctttatagtagcattcaaatttatatctctcgatatcgaatcggttgattttatgttgagttgggttaatttgggtaaatcaatttgatttttaagatttttggattaatttcaaatttagatcattttatgttgaggtcattttagatataagatatttgggttttaggttaaggcactatttgggatttgaaattgacaagtgttttcacgttagngtttgaatttttttnatcttggtttttgaatttgacaattattctcacactgagtcttaaatttcttttgtccaagttaatccttgtcaattgttctcacattgatttgacttcttctttgtttaaattagttcccgatatttctttgaaaaaaaattggataaaaaaagtcatatctcaatgtggaagcaattgtaaatttagtgaataatttggactgaaaatttgagaataattatcaaatgtaaatcttaagaataaatgctgaacttaacagaaattaatttagctcaacaaacagatcacatg

SEQ ID NO: 7610 - DNA, 570 bp, Gossypium hirsutum
tatatatatatgtatatagatatacatgtatagaagcagacaggggaaaagccatggatgcaattttttgtatatatataaaatatatgataatatacacaattttcaactcttcatatgttgcaccttggttcatctttagcatttcacagatcccaaaccttaactaactaatgtactgaaataataaataaaattaaaaaaaaaagcttcatattgatgaaatgaaatcttatctatcgacccttttttctaaatcgattgcctgtcgtgattttaaggacaagacaggaaaaataaaggtgggggggggggaatggaaccgtactgtgattttatcttcattcatcagagccccaaaacaatggacaaggatgattttcccttgtttgaatattcagcttgtgtattggacagcgggatagatgaggaagattcatcttgtgtcggatttggacagtccatgttcacaccaaacaaccttagccttttagctgatgctttgttattgttagcttcgataacaggtactgaatcaatcaccattggctctccctgtaatgccccaat

SEQ ID NO: 7611 - DNA, 691 bp, Gossypium hirsutum
ctaaccagattggccgaggttaatcttttgatttagcaaacgatcttccaattggcctgacaccagattgggttgaatatttaaaattgggcttgaaaacactcttgggacttcatattttaaaataaaaactaattgggttttaaatggaaattggatctgaattaaattttataattgatttggatttttaagtaaaaaaagggcttccaacgggcctcaaaaacaaataaacattcgagcttaaaaagtcttgaaaaggactttcaatgaccctaactgggttccataaaaatattaagcaagctggattttaaattcaaaacctaatttgaaaacagttcaaattcattcttaaaaccaaccatgaatggcccagtttcaattaccaaaatccaatttactcactcaatttcgaaagaatttaaccttagcctatgatttaaaaaattgagcatcttaattctaaaactaagcttggttctaaaattagcttaaaaggtctattttaaaaagagaaactcgtaactctctaattcaatacaatcaaagctcaaagccatgattttgggttgcttcaacggatttagatgtctacatctacccctctttttatgcccctttttatgcattgtttgtgtagcaaggaacatacaaagaagtagacaccttaagccctcagtacacaatc

SEQ ID NO: 7612 - DNA, 644 bp, Gossypium hirsutum
actcttgttagtgctttgacacctattgatcatgcaaaagggcctacaaatgaggttcggccagctttaatgaatactgatttgctttcccgagaatcagagagcatttctcttctactaagtttgctggtgagagttctttgtatggatcgggaacttattttatctgttattatggatctttcatgtgatatcatcattttcttctctgttggtgattttgtagtctgaggaggatttctatgtgcgatattacactcttcaaattttaacagcccttctcactaattctccaaataggtatgagttttacaaaaattccttctatcctaactggatgtttatttttgttggtttctgctcgaaaacctcttgctgaattcatattcaggttacaggaagccattctgtctattcctcgtggtattactcgacttatggatatgctgatggaccgtgaggtaaacagttattagccaattgtttttcatgcaaattttgttaacttccatgttctgctttattgtaggtctgcttttttaatatgtctcttcatgaaccttctgcttatcttacctaaattttctgtttgtctcagtttttttgggataggatattgatgatattatgtaggtcctttcttt

SEQ ID NO: 7613 - DNA, 660 bp, Gossypium hirsutum
gacaagtgttgagtgtagtaataaaggatattgtgttctttaaaaaaaacacaatgttgttgaaagaaacaataataaaccttaaaaggattaatttccatgtatcagaagatatccttctagttcaagaatttcaatacacccctaagatcttaaattgtaggtttatgatgtccacaaaaccaaccaaaaatttgacaaacgcaagtgtacctattaattaatagtatagctacggtaagcacaaatattgttcccacgaagactaaaagtactaataattatcgtctttctattatttaatcaacaaattggagtgaatgattaaaactaaaattgaccaaactaattaactaaagaacgcgactaagaacaaatcaggaaaataatcaattaacaaccaaaaagcgaaacaataccaaggaaagaatccacctagactacatctgtcattattaatccgaattaaacaatttattcacttaatatcttaattcgtagaaattattaaattatgttaatatttctcttcaaaactaagggcaactgactataagttgattaattaaaatttatttctaattaaaacccttattatcgcattaacttgatctattagatttgactctaatccggtagatttatatcgttctatttcta

SEQ ID NO: 7614 - DNA, 647 bp, Gossypium hirsutum
ctgtaatccaggtgaaaacaacttcatctaatttatatatgcatttctgtgctatcttgtggttttcaatatgtatatgattatgttcatcatggttttatgaagttgcactctgggcacgtgagtgataaacaattaatgtgtttccccgtcctcaaattcatggcatgcttagcattcaattgcttattttgaagctgtttcaccttttctgctttttttgagagttctgtaaaattctttgcaggctccaatgtgacttttaatatattctgtttcttgtattgagcaggctcattggagattgtgcagattccgctctgctttccataattataaaaaatctatcatagcattacaatgtcgttggaggcaaaaacttgcaaaaagagagctccgaaggcttaagcaagtatgtggaactgctttttcttgtgttttctttcactgtaaatggcatattaaatgtgttttgtggaatctgcctagtgctacctctagggcccaagaaaaagtacttgaagagaaaagaatccttgttcgttgaaaactgttctttgaataccttaaacttcattttagtttcattaaatgtaaaggtagttctacgcacttatttagtaagtcaaatgtttggtcaacaatct

SEQ ID NO: 7615 - DNA, 597 bp, Gossypium hirsutum
acttttctcatgaatgttggcacactaaatacttaaattttagaacaagtatgacttagaatgatttctccatccaggtatctctgtcagggaacttccttgcagctgacatttgaactcccaaatgatggatttttggcccaaattttagtttttggacacctcaaaacattagatactgatttggtttagtggtttaatgtggaagtttaaaaaaatacatgcagttcttatgttagtgttcaagtggatattttatttttaatgactaatataattatttttatcggttgaatttcaagttctttttattgttcttttctatttaacagtctcaaaatacaatctttgcattattgcaagaaatcgtaacagcaaggtttttaattgtctttcattatacacaaaacttctgacagtatatccttctagtcctaaatagcgttatatcataggaaattattggtggctatacgggttatatattctatggaatgatttatgattttacaatgattaaaatgaaatattaaatattataataatcataaataacaaagaagacatttttgcgcgacataaaagcaggggagattg

SEQ ID NO: 7616 - DNA, 567 bp, Gossypium hirsutum
gtttattcaatttcttcaaacatgtcattattctaaatttgattttctggacggttaatctatgggttcaaattattgcaagtactaacaaatccgctctttatctttcaaaaatggttcagaaaggtttatgatctataaaacacataatctgtcgaacttttgcaactgctcacactcaaaagtcaaaacagacagatctcaggttgacaaaggaaacatgagaagcaaaactgcttccattgaagatgaaaatttatatccataaaggctctcgtaaaatttaagtaatcgtaagacacctacgtcgtagaaccatttcaaccaaatctagtttattcacaagctattccatcattctgacatctatgggttaattaaaagcataaatccactgctaaaaagtagcttttgcaatatcagctactaggcactacatacaaaatttcaggggaaatattagattaggtctaaatgaaccatcaattcaaaggaatgttctaagcagtatatttcacatcaaatccagaaaatcactgtcactgaaaaagcaccttactactgacg

SEQ ID NO: 7617 - DNA, 506 bp, Gossypium hirsutum
ataaatagttacaatacaatatatttgggattatcttcctttctatcaacaacattataaatgtaaatacttgcagaattcaactaaaatttatgatcttcctttctatcagcaacactataaatgtaaatactggcagaattcaactaaaatttatgatcttcctttctatcagcaacactataaatgtaaatactggcagaattcaactaaaatttatgatcttcctttctatcaagatcattataaatgtaaatacttgcagaattcaaataaaatttatgatcttcctttcaaactacaattaacagtaacaaatttcttcagttctacattaactataaaccggaaaattctgattttttttaaacgaacaattaccaaaagaatcagttcaaaaaaaaactaaaacaaagaaaaagaattaaacagataaaaaaagaagaagtaccctcatctgtgtgttaccgaaaaaggtatcaaaaagcttgcgaaaagcttgaccc

SEQ ID NO: 7618 - DNA, 622 bp, Gossypium hirsutum
  misc_feature (574)..(575): n is a, c, g, or t
  misc_feature (614)..(617): n is a, c, g, or t
gagggtaaagaattcagaagtttcccttgtgaatctgagagaaaaagtgttgttgtgcattactgaactgctcttttttttctttttttttaggaaattgttcttgttgaaggtctaaaccttgatgacataaagccagggaagtatactgtccattgcttacctttgaggatggtaggtgcagatggttgcccaacaaaatgcattctcattgcataaaacatttctcctactaaggttctttctccattaaaaccaacaatgttatattcactctaaaaacaactagtagggatgggttttacatgattgaaacttttcttttatagtggtttgactacttcaagcatatgctcattaatccttaaatttgttgcaggagagaaagatattgataggaatgatttgaagaatcaataaaagttctctttatggaccttgtgtaaccaaccttgaattgaaaagtaataaaaagctgacattgaagtctcatgagtcatgacagataaatttgcttacctatgtttattattttagaaaaaacaaaactaaagaaatgtatatatgtataagnnagtttaaccaaagtctctctaaaatcttcctctcccacnnnntcatc

SEQ ID NO: 7619 - DNA, 646 bp, Gossypium hirsutum
tcttcatcttctaactgtaacaatttgaactatgtccaatcgaacaaatttcattcttcattttctatcttcctgtcatttggaaggaaagttagataatgcaagtgaagaaagcagaagatatgccatgactcatgacctcagagaaatgaatattaggtgtcaaaattgtacaagtagatagaaaaattataaactcattaccctctttcatttcttaaaatgaaaaaagaattgcagtaagctggatagggaattttgtttcacttttagcctccaaacacttattgattctggcctgtttcttaagaatttgtcttagaaattatggttggatgaaagtctttgagtatgcttttctagctagtgtctgaatttaatgtatatgtaaatttgtgagtaaattatttgaacatctttcatataaaaaaaaccagtaccatgaataaatcatagcttttacattgtttttgcttattgaacttttcatgttaaatcaccggttcatcttgatattgaaattagcagttcaagtgaaagttttcttaatagcaaatatttatatctgtattatctctgttcttttttacagtaccaataatatatcaagttaatcgtctacgtgatggtagaaactttgctaccc

SEQ ID NO: 7620 - DNA, 576 bp, Gossypium hirsutum
tgaggccttttccccttttattatgttgttgtactgcccctaatgtgatttgatctagaatttggtttaaccttctattctcctctccttcaaatttaatggaactggaaaattgaaaatggttatatggtacaaattttggtatttggatgatagtgtcggagaattgctgtaagttgattccttatcacttatcagctatgggaacatcttatcagttatgagtctaatgaccattatgaattaaacttgtgatgtgagaatctttagtttatttatgttaatgtggaagaggcaactgttttatccccgctgaatgccttgtatcagctgcatgctagcatggtattagttatcacctggtcttctgtattttccattattttggatttgaagcagactctttttgtttagttcgttgttgattttttttccctcttaatctgttttgtatccggtcatagttcttcctcctactttttggttgttgaggtgggagattaaaagaagcttctgaagcataatggatattgaattttccataaatgagaaaaagataagataattagaataact

SEQ ID NO: 7621 - DNA, 634 bp, Gossypium hirsutum
actatatgttagtatttacaaaaaaaagaggacaaccttgtaggatttattgtttttcaaatgtgaaggggagctatttgaaacctttttcaggtcatatgcatgaatgcaacagcttaaggcatggaatgttccttacctttgcctgaaccaatgctcattgcctgactaagcactgcactgactgatatattttgtcagctgaactgttgatcaaacatgaatcacctatgcttccattaatcatttcctcaattgttgttgaaaaattcgttctgtactctgctgtatgtgctaaatatatggatattgcctttactcaggtacattgagctaatttctatcatatttgtggtttattgtctacagaggatatcaattggatatctgctggcttcaataacggaaatctggcttgttagaaatgtcatggttgactctccaactgcatttgttcagaagtactacattcagtggttaggaaatactatgcttgctgaaatgtttgtagagatttgcacctttggcttttatttctatttaaaagttattagctggcaaaacttttacctttacttttattgcaggattattgctaccctactattatcactttacatgtgcgtgctctatg

SEQ ID NO: 7622 - DNA, 618 bp, Gossypium hirsutum
ctaagaggagagtcaaagctccacaaaaggcaacaacaacaaccaacagacgtcagatctggtgcgatgacaattggaactgtcgaagatgaaacaggcgaaaccccggggaggctttaacgtaaaaacaacaaaatcagaggagtttcacgaaaaacaaaagaaaatcagggagatccgacaccgccagtgttcaaatacaaaattctggcgaccaaatagccaaaacccatgagaaacaaagagccaacgtcttagacctggagggggcagcgaggcgtgaaactcagttattatgcccaaaggaaatagagaaagctaaagaagacttctgaagaaagttggaaaacaaagaaaaaaaaattgtctggcgtaacaagttttcaaacttcaaaaaaaaaaaaaagggggttttttttttttttttatttaaaaatttaatttttaaaaaatttttttgaatttttaaaattttccaaaaaaaaaattaattttttttttaacgccaaaatttttaaaaagggtttttaattttaaattttaaattttttttggaaaaattaatttcccccatttttttttcaaaaaaaattcccggggccaaacccccacggggaa

SEQ ID NO: 7623 - DNA, 605 bp, Gossypium hirsutum
cagttttgattaaaaaaaaaattaaaacaacatttaatttttaaatttaacaactttttaaatttagtctttacacttttttagttcacattagttccggaacttgataattttttttaatttgatttttgaattcgaatttcgttcaaaagtgatgatgtgatatttcgttaatgtgcctcattatcgcctaaaaataaaagtaaaaacttgggttttagaattgagttgcaaaataaaaacttgggtttcatcttcatagttggataactcaatttccggtaaaaatctaatttttttggaaaaaatgaaaaaaaataaaattaatctttaaaaagtaaattagtggctaaaatgaaaattgggtgactaaaataagtgtacaataatatttaattaacagggtgaccaaaaaaaaacttattaagttaggtgactaaaatgaaaacagttgttaacaacaatgcccaatttgtaaattttttttcggtaagaatgaaaatttatgatagttgggtgaccaactgcgcaatttaccaaaaaaccctagaaaaagaagaacgaggaaatcgaaataatcgatgaaaatgcaattctgttgggat

SEQ ID NO: 7624 - DNA, 600 bp, Gossypium hirsutum
cgagggagctatgttttgccttgactactttgcattgagggcaggggagtatgcatggttagaacagttctctgaagactatagaactgatacctctttatggctgttgccaaatttttcatactccctcgctgtttgccggttttacctcaagcaagaagaatcctccgatgcagacaccgcaaaggcttcttcagctgatcttatgaatcaagctttgatgcttcatcctcctgtccttacgaaactagtagcgaaggtccctttaaaagatcaagcatggacaaatattctcaaaaattcctatttccattcagatcaaatcgggattccatccgtggatcatctgattaatatctacgtagaacaaaattatctcatatggagacttcccgatctacaaaagttacttcgagatggtgcttcccacgttattcaaactctggagcataataaaaacgatgctaaagattggacgtgtgtgagaaaagaagcattcccatccaacaaaaacgagtaagtgtcgagattaactcatgttgttgctctatttatattatatatttccttgtcttattgaataagtcgggaattgttgac

SEQ ID NO: 7625 - DNA, 655 bp, Gossypium hirsutum
gtgtccactcatatctcggcataagtatccggatgtgatcctacaaggatccttgatccttgatatacatgaaactttgtccaatagtcatgcttcaatccgagttacatgatacaacaagggagtccggattgaaaatgattgaatgtgacttaccaggaataggggcaacatcatccccttgatgaagaacccaggcaagtgcaagtttgctgctgtacatatatgcttttcagccaacttctctactttcaaatataagatcctggttttgtccaagttttctccttgaaaccttgggaacattgccttaaaaagtagatatttgtaatcagtcaatgaatctatctattaagacttaaagggttattactgtacaagattaaattcatatgtactcttcattttccaagtatctacgtctgacatgtgtgtttaatatgtatttggatatagatacaagtatgatcctttgtatatatagaaaaacttaccaaaagctgagaatcctcgtgtcagatacacaatagcatctgacagtgacttctgagtccatgtgatgggtttaaaagccaaaataaggagagtttcataccagataactattttcagagaaacccttgaccaaggggactgtatggaacaatcccaattc

SEQ ID NO: 7626 - DNA, 644 bp, Gossypium hirsutum
  misc_feature (641)..(641): n is a, c, g, or t
gcagacatccaaaggcttcaacaacaactacattttcagttcgattggagctatcatcacacgaaggtgtagcaacaagtttctcgaataacaaggctgctgcgcataggctaccgtatagttggccatagtttattttcttttttctctttttattttatattaaaaaaaagcaatgaccattgatcaactaatataaattttataataagatttagaaatttgtattagaaaattgaaattaaatatgggtctagtaccatcatgaatatatgaaaattgtcgtattaaagttgaagttttaaaaaggaactatgaataaaactgataactaaaattttatcttagaaaaaaaattttagttagagtttgatcattttatttcaagcaataaattttagtttgggtttaaattgagctcaagttcagggttttttttttaagatttaaggttgtttttttcatttaagattaaatcttttcaagcaaactttcaagttcaaatttattttgccacctctacttaaaacgaataatttttataaaattaatttattttaataaattgaaaaaaattaaatcatttaaactttttcaatgtataatcaatcatattagatagaaaaaaccggacaaccaanact

SEQ ID NO: 7627 - DNA, 655 bp, Gossypium hirsutum
gagaaagaaactcaaaaagatcagatcaaaacagtaacacttccaagaaacaaacagatagttgaggaagtgaatagatattacatatgcctatatacatgtatatagctttgattcgacctctaagtctcagtatcaaatttcatcttcgaatattttggttcctacagcagtattcttacgttcaaaatgaaagaggaatctaacagccgaagaactgaaagcaactcaatagagttccagatcaaaacagtagcaaagttgctttttaacatttccgagaagcaaacagaaagttaaggaaatcgatatacatatatacataccggacatcatggcctcggtataggcgttctcttgttgaagataagagatgactttagggtcgctgcgagagtcatcgcgaagccagtagtaattgtcaactctaacgtccccgaacaactccatctcgtgcttcactttctcggccaacggcggagatggaggctgagattgagagcccatggtggcagttgataggcggcgtgaggcggagatctttggatggccggcgaggatgcgatgagaagtagagaagagtagtagccggagatgtagaactccgcctatgcaatcagaattcatataatagtgtcgcttttcttaattcctc

SEQ ID NO: 7628 - DNA, 559 bp, Gossypium hirsutum
gcttggatatcccactcattttggccaatggagtgcttgaagttgattgcatctgctggatttccagagaagaggataggatatcttggtcttatgttgcttcttgatgaaagacaagaagttctcatgttggtcacaaactcattaaagcagtatcttttgcgtggattcttctcaagcttattttgttcccatttccttttcccttttatcagttctgttctgggttaatattgttgtgcctgatagggttgtattacaagtgtaaaaataagaaaatggagagatttgctttacttgcaggaaccttaatttatatgcagagatctgaaccattcaaaccagtacattgtaggacttgctctttgtgcactgggtaatatttgttcagcagaaatggcccgtgatctttcacctgaagtagaaagattgctgcagtttcgagatccaaatatcaggaagaaagtaagtgtgtcctattcttaactcaaagatatgttcatcacatatagatgtgaagtaaagaaggaaaatggagccccctggcttccagcctttt

SEQ ID NO: 7629 - DNA, 635 bp, Gossypium hirsutum
ccctttctttttatctttaagaggttcagatatgctataggataggaggcataaaaatccttctgctgaatcagccgctataggaataaaatccttatttataattatatcctaatatgaaatctgaatttcatttgcagtccagattccagggaataatccaaccctacctggagtgtttccaaacatgtttcctctggcaactggtcaggtatgtatttctctcgtgcgtatgtgatagttgtgaggtcctgtgttctcgaacttggtataagttccagctttttgcagcagtttggtggtctccctcttatgccagttcaggcaatgactcagcaggtttggtggattatgcatacatttttagtttagaacctatttacttgaaaataattttcataaattacaggcacttatatgatttatcttttcattttcaggctacgaggcatgctcggcgcgtctatgttggagggctttctcccactgcaaatgaacaggtgttactctgcactatagttaaacatttcattttattggttgcatttattgctagaactgacctaaatattatattgcagtcagtcgcgactttcttcagccaggttatggctgcaattggtggaaatactgct

SEQ ID NO: 7630 - DNA, 567 bp, Gossypium hirsutum
agtgcaggcttctgatttttcgagggaatatgacggtgaatgccttcaaatgagaatgccatacagtccgactgcacacctcttcctattcttggtgcagtggactgactttcaccttgcaggtgcactcgggctgttaagaatcttaatttacaaggttatattttgttacttcatgtttatctcttgatgtaatagtgaaaattagctgtttcttcatcgttatcatatcatgcaggtttatgtcgatggtactaccaccatgtctacacatgaaaggaaagcaagcataagagagttctatggtatcttttctcaatttgtatgttttgttacatttaaaaactatagttcttatttcgagctattcttccagtttagtttgatgaaccaaagctatacaaataatagaaaaataataataacgtgattttgattgcatttggatggtttaataatactaccaccactgatttcgccgtcagatctggttttaaggttgcctgtttcttcttcctcttattttatttataattcatcaccaatttgctttaaaatttgatctgt

SEQ ID NO: 7631 - DNA, 661 bp, Gossypium hirsutum
gagtaagtagggctagattaaatgagaggggtagatacgtatctatctctcgtgcccactctcctcaacctcctgttaggtaaaacattaaagagtccaaatctattctatcaaaatttcttaactcgagcagttcaacctcgtcattttcatataaatgagccttataatacttagaaattattgaaggagagacttcaacctctttgcccttgacataaactttatcatcattagcaaactttaggttagcatagaattctagaaccacatgagtcactgcaagcctttgaggccaaatgcaaaattctcgccactcatggaactgcacaaggtcccaaaactcatcttcttggagggtggatatcgtgatactcaaagtggatattgcaataccactgaagagtggtctctaatctttgagtttattggaggtattgtgattccaggttcaaatatcgcggtatcctctcctttggtgctgttttcgctcgttttcaacctccaacatgtctctacatcactcaaccatatgttagagcccccaatgacactattgaccaaattgggtctcaaaatgagtaaaaacaagacatttacacttatcaacttaaaatctaaaaattacgaaaaactatagaaaaagacgctactctgcttg

SEQ ID NO: 7632 - DNA, 650 bp, Gossypium hirsutum
cttatgttatgtcctgtaacaatggtaatccttttgttagtggtgctggctctttttgttcaggttctactcaagctagttcagaaggtaatcgaatctctcagtgtttgcaagctacaccagcagtggttgtagatccggcttggtacccagatactggtgcaactgggcatctcacacatgattccacatgcttacagcactctaatcctgctacaagtatagttcaagtcggtaatggttcttgtatccctattataaatactggtactgcaactttttccactgataaaaaagaactgcacttaaacaaattgttttatgctcctgatattaccaaaaatttaatttcagtatcccaattcaccaaagacaataatgtatcatttgaattttttcccaaatattgtgttgttaaagatctcactacgcaggctgttctggcacaaggagttgaagttgatggtctctacaaattggatgtgaatcagaaatttagtgctctttcgtatctctcgtctgatctttcatgctttaccactagtgttagttcaaataataatgattgtgtgaaatgtaaaagtttaacttctcatgagttgtggcatcgtaggttaggacacacttcgacacacaatcttgcacatcta

SEQ ID NO: 7633 - DNA, 636 bp, Gossypium hirsutum
tgtttcttcaggttgtgatgaatattgtttttgggaaatggtgtgtatttaaaggggatgtagatgtggaagttgaatctagctttttgctgcatgagtcaccaatagctcatcacttccaaaagttagaatttaaaagaaaaaagattataagaagatttggtttcttttaagaataggattttgtgtaaggttcaaaatccttcttgatgaagttctccaagtccaacatggtcaatagtccaatccctaatatgaatgtcgaatacaagcatattcagcatacattcgaatacgggtaaatagaaaacacctagaggaaagacataactataaagggagtcaaactatttagaaactgtcaaaagccacctgaaagcaaactaatttaatttgagtatatataaccatcttacaccacttcgtttgagtatataaccaataaaattatttaaaatgataaaattagtaatataatgtattttattgctcttacttatgacttaaaatcttagattaagtggctcaaactttaaagagaagtttaaaacaaaccaatatttgaaagatcattttgatgccaacttaccatatataccaaaaatgaaaactcattggtaaaagtgaaatcagcta

SEQ ID NO: 7634 - DNA, 635 bp, Gossypium hirsutum
attcttgaagctgcgcaagattcacggaatcagaacatttcgttggatcgatctatgtaccaccaaagaaaatggttaccatttgtcgggtaaaactaccatagagaagtttatattaagggttagattgcatttttccttccatactaaaaaaaaataaagaaattagtctttatatattcgatcaaagagtaaattggtctttctgataaaaaatttaacagaaaagattaatttattctttgatataatgtatggggactaatttacccttttttgaatagaatgggcaaaaatgtaatttaattcctagtaaaggatctctataatccttttactccatttgtggttactaaggtttgaactcactcctaaaggatgtatagataaagtggcagcatatatgtctattggtgctatttagggcttgagttcaaactttactattggccaataactatattttctcgataagcgcacaacttaatctaacgaaatgttctcattttatgaacctcgtgcatctcttaaaggagttaagagccaaaactatggtcttaacatattgaaggatttctttaaaaaattgaaattttttgataactttgaaatgtgtagtctgctttagaattgga

SEQ ID NO: 7635 - DNA, 647 bp, Gossypium hirsutum
aagttgagagagaagcaaacattggtgatgaaattggctggtcgaagaatcaggaagctgcaaaaactaatccaaagcttgcagccatgaacaagaaatttggaatgattcatgggttatcttcacttgctaatattatgtcctttggcagcctggccatgcattcgtggttcttagctggtaagctcaatctgtagtttgcagttaatttagacatagaaagtccaagttctaaatttgccttccggctatgtagattgaagtgatcacctgtattttatgtttccccttggatgaactgttccaactattcctgccataattatgtagaactcaaccatatggtaataaacagaatctagtcttattagtgcacttaacaaagatcgcattgtttgaagttaaaaacttttttttcaattatattgcgtttaattccgtgtttgcagtttgcatgtagtagtattgattgcgttgtatttaaggtgtttctttggttttgtttatcttcggtggtatctgttatctacctaataagtagcacagctacttcattgaacaagaactggtaggcttcttcagaacaatggaaataagctttgatcactctgatttaattttattggattcccctgcgtccttctgca

SEQ ID NO: 7636 - DNA, 668 bp, Gossypium hirsutum
ctttaccaggccactcttgcagatcagtcatgtgtccaactgaatcacggttcgtagcaataaaaagacaacctgggttctcacggatgcaaagggtcgcatacctgccagttgcaaatattttaaagaaagatcaaagactccaaaaagcgctgccatatcttacaagttcagatctgataatagtttgtttaaactaggctttatacgcttaatagaaggcaattattagcattttctactcatctagccaaacattgtaacctaaaatttccttggtgcccctaagttaactagtatttaactaaaaatgacccctcagatatattttaggagcaaagaaatcatattttaagtctaacaatgtgctgagatcaataacgtagatgcatatacagtcaaaatactttttagagttaaatataacacgaaacttgggaacatgtgctactgatcaaggtagtgaaatatctaataagactgttattagtgtatgtgattcagaacttttccatgttttcatgaccaaaaacaaaatataaattgctcagcaacgaaatctatggggaatagaaactggttctaagttattttaggggacaaatttcagagacaaccataagtttagaagacgtgctatttttttccctcagaactcaagaccaagc

SEQ ID NO: 7637 - DNA, 674 bp, Gossypium hirsutum
ggctctggcttttttggttgatgcttttgctacttgatatttacttcttaaaaagttgctagaaggcaaaagcagaaggtaaagaacaattcatgatcaattttgaaatggacaagaaagtaatatgttactgtaattgtgaaataatcggtttatatagtagaactatacattttgctatctagaaagtaataaatataatccttcaaaagtattttttgcatttcttccaaacatgcaattttattgttttgcttctgaaagaaaaaagcaagcagaaaaagtacctactgaccaaatctcaaggaatttaataagtttataggtagatgtatggtctcaaggaatgtgtgcaaagacgatggaattagattaattggaagtataacttgtattgctaaaggtgtctatcccagagaattgggtacacaacttgttttactgaatgatatattatttcaaccaaccaaaagtgttcccatagatgtatgactttgggcaatttttaataacagcatgctaatgagcagacttcttaaggatgacttgtgctatttgtaatttcacatgtatctatgcttctaggttattagttctcctagaggccctttgtgatagtaaaatatttgtttattgaagtagatgtaattttttttaggtgcaaccacttgcta

SEQ ID NO: 7638 - DNA, 649 bp, Gossypium hirsutum
gtaatggattggctcctgaagggatctgcataaagcagatcatcatataatattaagaacagtacactgacatctatttgagaagagttgagttctcaatttgcataccagaagaaacagggacccaaccacgggctttaaagaagtagatttgctcatagtgatgaagcagggaaagatagtatttccgaagcacaaaagatgcatttgtagcagttgacgggaagttgaaaatcgcagtcacttccttccatcttcgctcttttataatctgcaagctcaggatttgacacatgattaatggcattacattttatagatcttggagtcttgagttagcaaatgatttcaaaatataactgccaccaatatttttcaaagaagatggcaccagtcagactagtcaaaagcagtgttgtcaaagcgtgcacctagttgtgcctgtgccttagtgttacaataagagtgcttcagacccattcaagtgaggctcattagatcaggtgcatggctgatgtgcctagactcagtttttccaaaggcaataggcataaaaaaagcccgcctgattgaagttctcgttaactttttttcaccttttttcattttttatgcctttactagtaagaaagggataataacaaactct

SEQ ID NO: 7639 - DNA, 561 bp, Gossypium hirsutum
ctaagtaatttcaaaacctaatatttagaataatatgattttagggacatagagaattatgtagtccgccattgaatttaaagaaaagaagaatgtaaggatgaatttttaatcatacttccatcaagtaatgagggttgaaatattaaattcttacgtctaaccatggttttacaaacgttaattagtttttgatttatgtaattgagttatcttaactaaatataaaaatgtttagaggtatagccttagcttttcttttcttaagtaatgaatcaactttaacaacccataccagtttaaagtgaaataagaaaatatttttaagttcaaaattaaattaattttcttttttaagcaattttataattaaaaattggatttcagatttgaggtggtatataacaaagatggcatggtgtgggtactgggtactgcacgtgcaagcaatatgaaggcattcgcttagttgtaaatacttttgtgaaaatggaattttctttttataattttaaccccttatttcgctgctgtgctgtccaacgagaatgacttctgaaa

SEQ ID NO: 7640 - DNA, 650 bp, Gossypium hirsutum
tttacccatagtggatggtgaagagaggtctgatcatgtgtctaatcaattagctgttgattgcatgcagctccctggtcctttttctaagcaccctccagctatgggtagcgacactaatagccaattcagtgatacctggctggatagaacacactcaaacccatattatactttgcccgtaatatcaaataaaagcattgagtgtgattccattgcgttggaagacgatagggtagaatccacttactcatcactgatgccagctactgatacaacttcaagacatattaccattgtatcttcacatgagaaaataacacatcctccagaccagtttgtaccggatataggtttggaaggtggggcatatcagcaccctgaacaaaattccaggagagaggagaggaatcttcctaatatatctgtgccccttccagttaagagagaggagcatataccaagcaaggtagtggaggatctttcaatggaagtagaacaacagtttccaaccaaggtagaggagcagcctcaacatggtttggcagtttcagagggagaatcttcgcagatatcaaatgccattgttaagcatggtttggcatctccagaggtagatattgcacagacatcatataccactgcgcacc

SEQ ID NO: 7641 - DNA, 635 bp, Gossypium hirsutum
ggtgtgctggtgggtaccatgggttcaaccattaaaatcaactttgatggcgcttttgacggataaatattacgatcggcttcaggtattatggcaaggaatgtttaaggggaagtggtactttcacgagcggagacccataaaggggttttgtcatcgagcagtgcaaactggtataaaatgaggttggttgcgagtaataatcgagggcgattcattgtcaacagttaagaaaagtcggtcaatacatctggatacatcagtaatcgatgcttatataaaaaaatatatcagttgagagacaaatttcaatagatctttttcaaccatataccaagatcgtccaatgagttagcccacgtgattgagaaagaaaaactgagagggggtgagtccttttacctggaggagggagtcccttcgtatgcggagcattagatgacagtggagagagcaagggaaccagactaaagaaggtgaagcggtggtaaggaacagagcaagagagagttactgtgaaagatgaaaggaaacgctattcacttctctctacactttggaaccgtcggaaattgaaattaattgcaggtgttgggacggttgccaaggattgagctaattgggcaatggaacgg

SEQ ID NO: 7642 - DNA, 607 bp, Gossypium hirsutum
  misc_feature (591)..(592): n is a, c, g, or t
gatgccataaatctagaatctccaatgcttcacttacaacttgagcaataaaacttactcctttgctttgcctttcaaatctacagtagctggatgaatagcaggttttccaattgacgcggcattgggattttgagaccagcgcttcacagtcatcattgcctaagttttaccaaatgcaatccaagtcaagccttgcacagaaaatatgctatgaaagaaaatggcagggagcataaaagaaagcaagagaaggaggggaggggaggagatcatataaaagattgtactgttctgctgtcatatcattgattgaactaaagaaaaaaaaaaaaaaaaatacggaaaggggggaggcgcaccaccccaccgccacttggtcacaggattctttaggttggttacagttgccatataaccatttagaccaaatgaaaaaatatgaaatcggacaagacccggaacctgtgaaaatgcttcattatggggaaagggaaatttaaaaattagagggaaaaaggtaaaatataaaacggggcaaaggcgacgttttaatatagcttacataggcataatcccaatcaaattttnnatggcaaggctccaa

SEQ ID NO: 7643 - DNA, 631 bp, Gossypium hirsutum
ttgcatctcctagtgtaattaggtaagtaaagcaaaagaaatttcttcccacaagacaggggtacttgattcttatcctcctgacctggaaatcaatctcccaaggatttatatgaacaatataagattttaatgatatatatagcaggtacatgaccatatatatgtgtataaatataaatgcctgggtgacttatggatctgtaatggatttacagcggttgttgagagatctaaaacttgaaaagaattcgacttaatataaaaatggggtaatagagtttcaaagaggacactggacttgagatctcatcaaacagagtccacaaaaaccaatcgacataagcatacggataaatttgtatgtatatgattttactaaaatattagccaataaactccagtttcagcatgaattatgctaaacaatttctagggaagccttccataacccatccttttttgttaactaaaattacaaggggaaaaggagaactgaaatgtgatggtagtaaaaccatggccaggaagtttcaattgaccaatgtactgcatgtagacaacttgatacaacaaattaaaagtaaaaattttgggcaaatctgccatttaaggttactggtatggtatt

SEQ ID NO: 7644 - DNA, 584 bp, Gossypium hirsutum
tattcccatgttccctaggtgaagcactctcattcctataagttgaattcctgaattccatccctcgattttcagtttctgcaaagaaaagtactcaaatatgtaattataagtcaaaaagaaaaaaggattgaaagaagcaagttttaatttaatcaacattggttgaggttttgatcttggaggataagctctagaggagattgaattattggcactagtatttgagaattcaaattccatcccttgattttcaggttctgctaaggaaagcacccaaataatgatgatgatgatgataaataaataaataataaaaaaagaccaaaagaattgaatcatatgcaagttctattctaattaacatacgttgaggttttgatcttggatggtaagctacagaggagattgaattattggcactagtatttgaataatcaaagtttttaggatgaagagataatcttgatttgtgctgatagaagcttgagggcacatcacttttagcaatgtgttttggatcttgaacactaggaggtctctgtacataataacttgttgaagcttgggtattatgaggacct

SEQ ID NO: 7645 - DNA, 583 bp, Gossypium hirsutum
  misc_feature (533)..(533): n is a, c, g, or t
  misc_feature (535)..(536): n is a, c, g, or t
gatcagaatccactctgaaaacactcctccaccagatcccaacattattcaaataaataattctgctcagttttcccccaaatctccactctccaaatcgcttacttctgactccttcgtgaacccatctgacgctcatccccaaattccgctttctatggactcttccgtcaaggtatagttaaacaacatcagtatttccttcttcttcttcttctttaaaaaaaaatgatataggttgaaccattgtttggaatttaagcagaaagatatggttgaatccaaaaaacaaaaggaaaaattgacaaatttaaatccatccgtcaaggtaagctcaatttcagggcaccacagttctcataattttaaagcttttagcatatttctaaacttgattttgaactttttcggggttttttcaatctttagcaaagtgaaaaaccgaactggctttttaagtttgactcaatttccattttttttgaacaaataggtggtagtgagaattagacccataaatggtcaagaaaaananntggatcgaacagtgaggaaggtttcttcgagattctttatcagtcgg

SEQ ID NO: 7646 - DNA, 640 bp, Gossypium hirsutum
accttggcaagtttatccatgctgttgagattaacactcgtgattctgtggtctcggtaattttaagatcttttttatttacaccttaggagtgcttatatatctagtgtttaagatgcaagttttacttacaaatacttttgcaggtgcgaataccagcctcttgggctttggcaaacatatgtgattctatccgtcactttgttgatgatgttcctttaaaacagtcaacaggtagctttctggcgtgatggaattagtttttgtattttctatatataatagacttaatactattatttcctgtatctaattactcttttcttgacacttttatagattcagaaacaaacttccatttggtggacttgttaattgagtgtgctctgcgtctaaccaaggatggggacaaggtataatatgttataaggcatcttataacctttcatggactaatgagattggtgtgacggtagcttttaattgttaaatagtaatttgatgcacactttgcctttttgttgtgtatgcttcggatacagtcacagcttttttgtgtttgttctagcaaaacttttgagtttatttcttctttcatgagtttcttgatatggttttctatccgctagaagtttgttat

SEQ ID NO: 7647 - DNA, 508 bp, Gossypium hirsutum
aaagagagaaatgaaagggtaccaggagtgcagaaccaggcatcatcgtcgatggaaggttggtgagggtcaggggccaagaaatcaacccatttaggggcgttgatgtgttcgtaaacgcagtcctcaacgaagcgggagtctattctggtccagtcgatttttgctggttccattatgcgaaagccaaaaaagtaggggattagcaggagggcagagagagatggaaaaatgcgtcaataggctgagtttctattcttaagtgcgagtgaaagtgaacgttattacgttacgttagtggggtcctttttcttcatttttaattagaatttattgtttcttctgaccgttggggatttttttttttttaaaaaatcggggggaatttaattgggttttgagggccggggagggaaaaccctttccgggggggtttggggaaaaaaaaaagggggggaagggaaaaaggatttttttggggaaccaggggccccccttttttcctttc

SEQ ID NO: 7648 - DNA, 649 bp, Gossypium hirsutum
agttccttacacaatttattattattttttattttaaatacaaatgactgtttgagaaaaacaaaaacaaattttgttctaataattattattattcaatacattggataatgggcgaaattaaaaaaaatcatttttaaattttttattgatgtattaaataattatcattcatatatattacatattatcccttaaatgttttgtttgaattagttggttcctaaactctatatggatcaatatacaaatcaccaaatgaacatggttgtgaagttcagttatatatgttttgataagaccaataagtgtacacattacattcttaaagggaaaacacatgttcgaacctcagagggatattgttaaaagagacaatttcaaatctcgaacatgcatcataaaacaaatatggaagatataggtaacttctcaacaaaaccaactttgtatcatgggcagatcatatgtgatcctcttaaatcaagattcctttgttcagaaaaccagggcaatctttaataaattacatgtttaattcagaaaaccaggttagcaagcaggctctttttcatttttcttttctagaagtaaaaaccaacaaacaaacagcaatcttagtaaaatactgaataagaagaaaagtttt

SEQ ID NO: 7649 - DNA, 654 bp, Gossypium hirsutum
  misc_feature (23)..(23): n is a, c, g, or t
gagaagaaaggaagagtaagggncatgcttgtttgcaaaggattttagacagtagcttgctactaggggccgatggcaagaacattgtaatgacgagtaaagccgggagagatatggcactatctttgatagcaaaagagtttccgtgttttgtgaaagctggtatgaaattgaaggagctaccaaatgaactagaagaggctctagatataaagaaggtttccttgatggagaatttcatatctaaaatacctccagaaatttctccaaagagtaaaaagctcacgaccttgttattgtcaggtaatgccttggaagaaatccctgaatctttcttcacccatatgcaagcactcaagtatcttgacctttcgagaaatccattcaaaattttgccaaattccatctcaaatttggagaatctgactgcattacttctttcggaatgcaaaaatttagaggaggttccatctttatcaaaacttctagctttaaagaagttgaaccttgaaaaaacaagaatcaaagaggttcctcaaggtatgggattcttggtagatctaaggtatctcaatcttagattcatctcgtgtttagaagagatcccgcaaggtcttttgccgaaactccaacgtcttcaacacttggcaatac

SEQ ID NO: 7650 - DNA, 634 bp, Gossypium hirsutum
  misc_feature (582)..(582): n is a, c, g, or t
ctagatccagcttcagcatgcccttttgcagtgccacatagctcgttgacatgatcaactctagataattgaggaaacattctctggcacagatgcttgagtagaccattttcaatcactacaaaccattgaaaactcataaagtcagcaatgactgtaaactggtcatgcaaaacagccaaagaccagagtgacaagattgatatcatcatgaacacataaattttgacactgccataaagatcaaatggcatgattgtctcctttatttccaaaggtagattactctcttttctttagtgaagttagcagattatgaagtaagttcttaggagttcagcaaactttcacgtaaaagagaattgcacaccaaaccacaccagaagaattgaagactagattgcaaataaagcagcttattaagatcagtagtggtgaaaataaaaatgcacaaatgaggaaagaggaagacttagcaaaaaacaatcagctagttaatcaatcaaaactttctggaacgaaaggaaaatttgcatcaaaggcagcatctgaaaagaagaatttgagcatttcaaatataancattgaattgagaggattatagcctattgtttttatgaaaactatttgctca

SEQ ID NO: 7651 - DNA, 638 bp, Gossypium hirsutum
cgcttcatttgtccgtaaaaaatttagttacagaaactatttctggcacagctgttttttactttcttgtagaatatgctttactcacatagagctttttgttaaaggcatccaattaataaccaaactgcagtgaggtgacagattgtaaggcaacacaaggccactatatatctcaaataactgatctgggataccagcatttactacactttggtcacatataggtctagtggaacaacttgaagccaataggcctgtgtgtgaattttgcaagcagggaagtaataaaccaaggtttggattggatactgtagcaagaaatactaccagaaagctggttgataatgggtggatttacccaaccaagaatatatagctacttgctgcgaactccaaagttaatgatatgagatataaaagaaattttgactgtctcgtttgaactagtatcttactttcaagagaaatatagatgatagatatttttggagtgatgaccctgccatatttgccatctgtggaaaaatagcttgtttctgtgttttcataatctgctgtacccattctgtttcattttctacctgattaaaagtttttgtgaaaacagagaatggctgtgcaaacacacaccagaa

SEQ ID NO: 7652 - DNA, 607 bp, Gossypium hirsutum
cattttattttatacgcttttgtgatggtaaccagctccttaaatccaaatttggtggtgtttcaagccctaatcacaaaaacaagacatggttgaggcctgtgggttacgcacaccactacatttttaattccttgcttctgaatttttcatgtgtgtgagtgtttgttggatacggatacatgagccatgtatatattggattttttttctggatagttctggcaataaaaaaaacaaaaaaaaatcttttaggacagtgtccgggttacttagcttatgacaaatagcgaaaaattgtaggaaagtatatttatttgttagcaaccctggtgcctggtttaaaggtggctttatttccttactagaagtctgttgccaagagatgaatagtatcctgtctttcaggttttgctgtaaaaagttgttttaacagtttcctattctactgtggggacattgatggagaagttaagttcatctcaataaacgggtgaaacagacttggtaaaacctgcacaaaaataaatggattttctcacaatagaaggaaatataaataaataaaaaaacgtgcgttgcaaaagactgtatgtagtaaacttct

SEQ ID NO: 7653 - DNA, 674 bp, Gossypium hirsutum
tgagacttggacatattgtgcaaaaactgttgagaaagtacaaacagttgaccacaagtgctgccagtcacgatttcttgggattcttttgtaaaagaggcagcgtgagagaggacggatgatttatcagatgatgcactaagaacgcatgatatgaatgcaatgatgagagaaaaaagaagcccatgtatggtctgatgttttaaggtgtcattgcccctccgacaccatttaaattaaccttcaatgtccagatgccttgctttcaacacatgtcgcacatgatctctcggacattccatgtctatgagttacgttcaacactagttacacttgatctctcgaagtatgatccattactttcggctagatcattagcttggctcaatatttttacattgaagaaatctccagactcatcaaaacaaattccatcagaatgttgattctgtattactaacagctgtgcatcggatgcatttttactaatagctacatactccttgtaaagggcatttccttgacatggttggaatcaattgattgaaacgccttctttagctgattaggttgtgtaatcggtgtaacagaaacagaagccaaaaaagagaatgaaaatagcgcttcagcagctgtagcaactttagcaatagcatctggctgctatcatttct

SEQ ID NO: 7654 - DNA, 594 bp, Gossypium hirsutum
  misc_feature (525)..(527): n is a, c, g, or t
  misc_feature (535)..(536): n is a, c, g, or t
tgctttcttccataagcaaagcctccatcttctctagcatcagatccatcaagctttgtacctcatcgggtcgcctcttaaaattctcaatgctgaaagcgtatatagtaacatacttgattcctagttcatagcagtaacgaagcagagacatttaagccagatagccagctttgtggccttctccttctttcagattctgcttctttgcataccctcggtttccatccatgatgaaagcaaggtgagtggggataggaccaacggacaggacacgaaataaacatctcctcagaaaattagttatgtcgtcaaaaaacagcttatgcacaccattgccagtgctactatagtttcccactttatttggaacagatgtcaccattattgacctgcttcaatagagaaaattatattattgttactctataaataagcaaatttcagttgaaattcagcaaaaaaaaaaggggccgttttcgttttttttccaaccccctttaaaccaaaaaaaaaaatccccannnttggaaannggatcccatttttttttttttatttaaaacccaaagggaacaaaattttcccccccca

SEQ ID NO: 7655 - DNA, 602 bp, Gossypium hirsutum
taatgttgagaatattttgtgttatggatttaaaccatttggttggttgttaagtaggttttgtaatataatcaaaactggtaatgatctaaattggtgtcatgaaattgtaaatgtccaaaaaaattttgggtggaaatgcaactcataagcttttgcagtttgtgctttgtagtatataattttagcccattggatttggtcccagatgttgtgatgatgttcaaaagaggttcaaggataaatgggattctgtagtattactatagtgttattaaactcgaaccggttctactgaactcacacaggttcgagttaaagatttataaattatatatttgtaatttttttatttttttttccttccatttgatggagaatacttttgatgcagagctttaagaattttcacctgatgagattatcccttgaaatgatatcagaaggctatttctatcaatttaggggtgttcacgtgatgtgatcgcattttcatatttagatgaggatattactcttttctttggtgaaagatattcatttaatcggtaatatgaccttacccatagtataatttgaatcgtgtttcatttgtaggtaat

SEQ ID NO: 7656 - DNA, 619 bp, Gossypium hirsutum
tatatataaactgttttatatgtatagacaccagcttctttaatacattttaaatttttttaaaataaataagcttgtttgattatttcatataatttcatgttgaatatttatatttatttttacttttttaaaaaaatatttatttattttttatcttcgtttcttagcatgacgaaaacacttgaaaaataccagaagtgcagttacagtacacttgacaacagccgatcaatcagtgaaactcaggtacagttaaattctgtttccatgttgaaatcggaccgaaccaaatagcattttaaatcaagtcacactcccaactataaatttgattttatattatatatatatattgtgtgacaagcagaacagttatcaagaatatttgaagctgaaagcaagagttgaggtgctacaaagatctcaaaggtaatattgatcaatgtttaattttatattatattttttcctcaaattcttagctatttttgatacaatgcatataactatccacaatccctccttaactttaaggaggatgttgcatttcagcgcaatcaaacccatgtcctcctacactgataacaatatcaatgttaatcaagctatgactcat

SEQ ID NO: 7657 - DNA, 601 bp, Gossypium hirsutum
acttcgacaaaatgcatttgttcgtgatgtatctcatctatcatctcatactggcagtagatgcatttacattcccagataccctcttgcacaagcagtcgggtaacggatttacataaaatgcttcttctgaacgaaacctgtccatgcccttagttcctgatacaggacctcttctcctcctcggtgatccttgcctgtagcacacaatccatgaaacaaacgataacttgaaagggaactattttctgttgtacatgcaggaatgataaaaacgaagtcactctctaagcaacatctaattaattttcagacaagcaacatacagttttttgtgtatttcactgattcgattggaaacttttctgccttccatcaataaccccttttcaattttgtcaaataggcggactagtgctttcctggagagagtaaaggaacttcagtaaaccacaaaaaattaggatataaatcatacatatatatgagttaaaataagacgagttccagaaaataatttgactcacctgtcaggagaaatagttttcctatgtcccagaaatcgacggtgcccttcaactgctcttgccatgtttccaga

SEQ ID NO: 7658 - DNA, 651 bp, Gossypium hirsutum
aattgcccagttggtgttgccagtcaggtactagaataccctttcccttatatgatgctatgattgcttgtgctcgtatgtaatgtactatcccctactttttgttattaatatgtattttttatttcaacattagcgagaagaacttcgtgcaagatttcctggcgtgcccggtgaccttgtcaatttctttttatatgttgcagaggaggtaacccataatccttattcttgatggggttttggattccttttcctcaatttagaattcattttatattatctttcttttctgtattctttcccctctaatagaattatatttctttcaggtgcgtggcatgttagcacaactgggttatgaaaagttggatgatataattggacgaacagatttgctaaaaccacgagatatctcactagtgaaaacccagcatcttgatctgaattatatattgtcggtatgtttttgagtcattgccttctctcatcacatgaaggtttctttttccttctggtgaacatgcttattttttatctgcattcaacatgaaaattgtctctggttcctagaatgttggattaccaaaatggagcagtactgccatcaggtctcaagaagttcactcaaatggtcctgttctggatgat

SEQ ID NO: 7659 - DNA, 622 bp, Gossypium hirsutum
  misc_feature (27)..(29): n is a, c, g, or t
aatggatgtttaagggagcagcatacnnnggctatcccatcaaaggagggtggggtgggaactacttatggctgtgcagcctacggccccattgtgcatgcaaattgcatgtcagaaagttcagttcaggatttgggactgtctggtgatattaaagtggtaaagtactttgattcgaatatgatataccattcttatgaattagttctgctttattcaggttcattctcccaataattgtcacctgatcatcactcttgacttcttgttaggaaatggaagaataacggtgtaatgtgaatgaatggagatatcagttgcagtgccattagtagagccctgaccaaagaatccaggtttactttttccatagcataaatgttaacaaacggcccttgtatgctaaattttgtggtgcttcagagaggtgctgagagtgtctactagtgttgcttttattttgataaattaatgtttttatatttttctaatatgtattatattggatctcaattaattttcattcttacatcaaaaattttaaattcaatttccaatagagcataacaaaatgtaagaacaaacaaaatttatcttctgtttatcataccaagttcgagag

SEQ ID NO: 7660 - DNA, 674 bp, Gossypium hirsutum
gaagtggacgccatctctatcattagctgtattaagaatataaatttgatgtttgatcctattagtattgattataggattttgctgaatgattacgcataaataattatataaaaaccacgaatcatgcaaaaatataaaaaaaaattaattatatcatataatgatccaatatgcatgcaagaacataaattagtaaaagcattatatgaagagcaaatgaaatttaataataaattaaattaaattaaagaaagggactaaattgaatgacttaaaaccaaattaaggatcaagatataaacgttaaggtagggaaggacatgattgtaaacatataaaattgaaggttttaaaaaacaattattcccaatattattcaaatcctacaagtttaaattaattttaagtctacctaataattattaaaagtatcattttatcattaaaccacaaactttttatttgatctttgagagttacacttaaataccaacctttaaaatttttgtttcaagtttaggtggacgttaacaagaaaaaagagtttgattttcttttaggggaatgacaagtataaatgttacgagtcgcagatcaaatctcatgataaatgcatacaaactattctagggaggtcaattgatcaaatgaggctcatttgacccacttga

SEQ ID NO: 7661 - DNA, 684 bp, Gossypium hirsutum
  misc_feature (603)..(619): n is a, c, g, or t
  misc_feature (621)..(622): n is a, c, g, or t
  misc_feature (624)..(644): n is a, c, g, or t
  misc_feature (647)..(653): n is a, c, g, or t
  misc_feature (665)..(665): n is a, c, g, or t
  misc_feature (667)..(668): n is a, c, g, or t
  misc_feature (670)..(670): n is a, c, g, or t
  misc_feature (673)..(679): n is a, c, g, or t
tctatgatggaatctcaggtctggcaggtctcgtatgtacggttaagattaaacgatttgatgatcctactgtagtcctcatcaccctcgattactctgccaatgaataatgacaattgcccgcgcaatttcaaattcattttctccctcctcccacccaccaaaaaagtagaaataaaaaaatactgtgaaaaatgcattttatataatatcccgcacgagcgtgccaaggagagaaagagagattggttgatgaagaggagaggagcgaagcggccaagtaataagatgaaagggacattggggaagcactttcaagttcagttccaccaccaccaatcatcttccgcgacctcatcctccatcttcacccggaaccttctagatttcggatctcaggatgacccttccacttccgttcccgacctcgacgccgccgatgacaaagatttcattctcagtcaagacttcttctggtaaatcttcttacactttgaataggtattattctaaatttcttattttgcttcttcaatttttttttgatgatggatgcagcactcctgattatatcacccctgataatcaaaacctgatgaacgnnnnnnnnnnnnnnnnngnngnnnnnnnnnnnnnnnnnnnnncannnnnnnaaaaaaaaaatngnngnagnnnnnnnagaaa

SEQ ID NO: 7662 - DNA, 635 bp, Gossypium hirsutum
cttgagccatatgctgctaaattagtttattcttgtattagttgaccaatactcaatttttaactttcttttgcagaaatgtagactacttccaattgcagtcgagggaactgaaaagaagactacagtagagagctgaagaaaaccgtgttaaaatctaatgatttttctgcgtattcttgcatctaccagacccaagaaaaggaagaagccaaataacatagatacacgaactacgaataaccaaatatataatccggtaatgaccaggacgcttagccgctttaactatgaacaaatgttttccagatagtagaagtggaacataatcacattagaacgtatttcaatataattcaaaacaatatatccaaacagtttattgtgaagttaaattctaaactaacactaccagtatcttttttgccccttccaattaagcaggcgatttgaagtgtcagaaatacaccttcaatgccaacgggcaagctagcgatgactttcaattcaactgccaagtagtcctttcaatgaaaacggaaaggtaaaatgagcatatatccaaaaaaggctatttggttaaacgactgaaattggatcgcccaatgactcaggcgtaccgctgctaccattga

SEQ ID NO: 7663 - DNA, 612 bp, Gossypium hirsutum
tcttcgaccttacagacgatatgtgacacacaagcaatggtgagttttatcaacatcattagaaaaagagagcaagccaaatataagtacattaaaatcaatattaacaaatggtatttgaacaaacaagtcaagtttccttcagaatatatcaaactttatatgcaggcttactgctgtctagaattgtagcagtggtaatgcagtggcccttcgatacaacagattgagagtaagctcatttttgtaacagtggcactatatgaactccgagggtttaatagctcttattttaattggttattaaataggtgatgatgcataaagaatttgtacctcttaaattccgctaattatttcaaatccaagacagttatatattttgagctgataaattgttagtttgagatttagaagacaagttcagccacaacatttcctcctatggggttttcaatagtgtagttcaactgattgagggacattatgcatcagactttaagcatgaaaaacatcacaatatggcataaaatttaaatgatgatatcttaccacaccgtgatagcattgcataaagcaatatgcctcccatgaggaccaatgcaagcagtt

SEQ ID NO: 7664 - DNA, 591 bp, Gossypium hirsutum
  misc_feature (585)..(586): n is a, c, g, or t
tccttatttgtattttcctttccccgtcttttccttttaaattgaatcaaaaccaaactcagttaagaattataatactatatatcacttcaaaataatttcatttgtgattaatagcttaatatatatctatattattttgatggtaatagagaaaatattttttgatcgacggatcttggaaaagattatagttaataaacttgaatttagattaaaaaaaatgttgacttaatattgaaaaaatatatcaaaattcaaaattttaaaaataatataaggaataaattgcttatatattttataaatgactatttttaatattaatatgtactgaattttataactataagagcagttgcatgtattttttgtataagaatgagctcctaaacttagaaatagcagatggtttaacctcatttagttggatagctagtagtaataatacgtaggaactacaaaagggtatggtgagggaaggtggtgaatgaatcggcgatagtttctacgccgagagcaccaaaatagataggttaattaggaagggacaaatgtagttaatgggcgggagcagaggggttnncattg

SEQ ID NO: 7665 - DNA, 637 bp, Gossypium hirsutum
attataaaaataaaagcgtaacaaaatagcattcatccaacctatccaaataaaaatatattcttcttttttcaaataaccaaaccatgattttgctatggcgaaataagaaatagtttcctaaacctttttttttgaaatttaaaaatggatagaattctaatgtcatcttgttgatggtgaacataagattaggtatatatattagttgattaataaaatcttttatgatcctaattgtcattaaaatattcaaccactctattgccttttgcaaactaatgtgtgaaacaagccccttatacaactttgcactatcattgccttatctttaggaaaataaaaccaaactcttcacatatctcaagacaatagacatttacttttttttttaaaaataaaaaaataaaaaaaatagatttcgaatttcattgactatcatacaaaatttaacatcatcaattttatttttactttttgaaaaatttccttcaaatcatttaatcttattaccatatgcaattacattaaaaattaaattagatacaataaatatgaaaaaaatgagtcctagaactcaccaaatagtttgacccacaattaaacaaaaataaaaaaaaaacaggaagtgttgaat

SEQ ID NO: 7666 - DNA, 743 bp, Gossypium hirsutum
  misc_feature (642)..(736): n is a, c, g, or t
ttcaggcgtggcttaagaatggtcttgaactcatcaagatcctatggaagaagaatgcgaataaaagaataagaaaatatagaagatggaaaataaatatggacaagcatattaaggcaaagactaataaaagaaagaagaaaagaactagaagcatcagagaaaagtctaagtatatcatcacggaaagacaaggtttgcccagacagacaccgttattttacaggctcagttgaagaattatgatctgagttatacagaaagctctaaggatttatctttttctcacgtgtgatcatggatctaaaatttagttcacctccaataaagatcataaactggaatcaatgtacctcacatgtaacaagaaccaaagttgcatatggctctcggaaccaaaataaatattgctcctgaggaaatctgctacgtagtcttgcatcagttgttaatatgtattcagctggcaaattctctacaaacacaggattccgggtcttgttatttaagcaagaccttttgaatggaagccgctcttcaaaactattcttgacagtaggccacaagtcactgacatcttcaactgtaatgcagttgacgacgaaatagttagttagaaatctgaagctagcagaagatcgnnnnnnnnnnnnnnnnnnnnnnnnnnnnnnnnnnnnnnnnnnnnnnnnnnnnnnnnnnnnnnnnnnnnnnnnnnnnnnnnnnnnnnnnnnnnnnnggggggg

SEQ ID NO: 7667 - DNA, 630 bp, Gossypium hirsutum
tctgtctctacttaaaggtgtttatggactggtatacacaaaagtctgataattttcgaaccttcatgaatgtttggaaacaacagaatatatattttcataactttggagaatgttctatctttttacgtattttgaaaagggaaagtattaaggtgggatggatttatacattcatggaggaggtgactggttttcaaaaatactacacctttataatggaataggtaagtagtagagggaagcatgccaactatagagtgatggtgaattggtaacatttctgctactttcccattcctatctttagtcgtaggaagattcctaaaccatcctttttttttcttttttttttactttcttctaaatgatgttttggattttgtttaggattcgaatgatcttcgcaaggatggtggtggggaaatagtagaaagaattaccaaacttgtgaatgaatctctgactagtgacggatcatacggtgttagtttatcctcagaagatattcttaaagccattgacagtggcaaatctgaaggtggctcccaaggtcgacactgggttttggatcctatagatggcactaaagggtgagctccaaaacttaatgtcaatctttttagtatg

SEQ ID NO: 7668 - DNA, 643 bp, Gossypium hirsutum
gttcatattatctgaaaagtttctaccgtatctacctacttaaatttacgtgctattattgccttcccctcctcccccttgtttgtacttttttagttggatattttctaatttctatatatattagtattctgaaacagctgtccgacctcgggattctattttggcaacagaagtagagtggctctactccatcaaagctgacttagtggtttgtattctggttttccttcaagtgtttgaatcaaattgggacactgagtctttgatttaaccttttaataaaaataaaaggaaaagaggcatagaattgtatcatatttaacatgtcttccaaattaaaacgaagtttgctgtgaatgaaaacaggtttcagatgttgttccagttgcatgccgagccgctgctgaagctggaattcgctcagtctgtgttaccaacttcaggtaatttattatcatgactgtttcaaggaagaagtgcacctttataagaatttaatctgttctcaaacccttcataccatactgttttcagtacctttatgaaccctgtgaaattgccagaagccaaaagtttatttgtaattatttgatctatatccatctatgattgcagctgggacttcatttatgctgagtat

SEQ ID NO: 7669 - DNA, 654 bp, Gossypium hirsutum
ctgcaatatatggacagaagactacttgtgcggatattgggttacagggttttcaattttagcctgaataagatatgcatatttgcaagcacaaggtgtgtctgttatttgtttaatctctaaataagccatagcaggagaattttacatgtatctatgtaggcaactatggaataggctaatgttaaatgtgacagatttatgggtaggacagcattttgaaaactttctttttcttcccttcccctttttagcattagaactagtcaatgcttagaaattgtatggcaaaagctgtaaaataaccttttacatattttgctattaagagcagcttataatatatatactcctatatctaatgatttaagaacatgtctggtcaatgggctttttctgttacgagttgtttggcaggtggtctattatatgatttgaagactaattcaaggtaaaataaactgccatttgttctcaataatggttggtttccattaggtatatgtggtgcttgttgtcacaggcacacatttcaaaggacagatcgggttttgctatccataattcattttcacacgataggtatattcttcctaaacttatttaaacaacttctgctaatgatttttgcgtaaattatgttctcaggctgaa

SEQ ID NO: 7670 - DNA, 602 bp, Gossypium hirsutum
  misc_feature (573)..(576): n is a, c, g, or t
  misc_feature (578)..(580): n is a, c, g, or t
ctatgatatcttttccttgcttgcctgaaagcacgaatattgaaccatttagttaaacagcaaaaatatctattatacaagtgctttgccagacctagacataagacatggcataaacaagtctcatccaccaaattatgaagttgagttacctgcttctcaagttgatgcttagtgtacagggttttaaccagctcatttttctcttccaattctttcttaagctgttcagttaaagcttcaatgttagtgtacttctcgtgcagctcttcacgatgccttgataagaaaccaactttttcggcaagcacccggatgcatttgcggaactcagcagagccatcatcttcactatcactaatggaactgaaaatttcatagcacagatatttggacaatggtcattaaactttcaatcatggaagtaggggaaaaaagagcagttcaaaacttcagataatataatgttatgcctatatatcaccctttagacttctatgggaatagatagtagaagtttctcttcttccccaaaaagaggttgaaagggaaaagcaaaacccatttcaaccnnnntnnnttataatgaaaaccacttccta

SEQ ID NO: 7671 - DNA, 637 bp, Gossypium hirsutum
tctctccggcttccactccttcaagctctccgccttcattgactccaactagttcgcctccttcaatgactccggccggggctccacctgtttcggctgatattccttcgagttcaacgacgccggccgaaagtcccggggttttcccgtcgagcagtagtccaccgagtcctactccgatcggttcgtcccctgagagtgcagcgggcccggctgttaatgatgattcgggttcaagatccggatacgaagtcgggttcgttctaagctttggtttggttattggggccgcattggctatttagattttgatacttttttggatagtaatttttttgaaatttttattttctaagcagcacttcattttattattttggatttttaatttcatgtataaagtaaaagtaaataaagtaaggtaggatcttcattatttttataataatctctcatttttaatttatgtttatttattcactttaaatatttattatttttcggttgatatttgcttaagctcaaggatgtaacgacccaaattcgcatttgtgatgtgtgaacatttatccactttgtgcgttgttatgtgtgggcttttttcgatttttgttcttagtctcttgtgctttgtact

SEQ ID NO: 7672 - DNA, 567 bp, Gossypium hirsutum
aggtgcctgaaccatatcagcagaccattgatcacctatttgtgcgggccattggtcagctgctaaagcacccattccataatcagcagcagggagtccataatcaggagcagcgattgcttcctcctcttcttgctgtttagcttcctcaggctccctgtagaagaatagatcaacctgcatacatgcaaatcacgcataagaatgtgcaaatctcagaaacatcaaaatcacaacataatggtggtgctcttttaccatgacatcccatttctgtccaggagcaatcgttccacgcatctgaagaaccattctagctaacagccagaaaaggcaaccaatgctgtgctttcccttgttattggcagggataccaatgtcaacatatcgcattggtgagtcagtatcacaaaaagcaatggttggaatgtttccaagagctgcttccttgatgggctacaagataaatacactcaagtgttagctaaatccaaaaccattttcattaacttattgtttattggaacaccataaaattcagcacagttcaaccatatagtaaaatta

SEQ ID NO: 7673 - DNA, 603 bp, Gossypium hirsutum
atcacatcccatactggcaaggaaaagagcagcgaagaaattgcgaatgggctcaacctgtgtgtaagagggagaaaaccaaggagaatttcattggttaacaaggcaagaacatggcaagaacaccattgtactaaccaaactaatattgacaataatgctctcaaacatgcatcataaaccaatttaaactcaaggaaaacaagatgcttaaaatagtgcctgacggacacaagacttggctaaccgcaaaactagcacaggcaggacttttaattgccttcctaacggaaacactcaacttacaccatcaataattgccttaaactgattcgataacattaagactaactcagtctggaaaaatattacaatatttactgtgtagagatggttaatgagttcacatacagttgacttttgagtaggaagttaaactattgaaagttctttcagaaaggctaaaaaaatctagatatcttacttgttcaagtgtatgttgaccgagatcagtggttgatatcatcactcccgcagcaaaggagcccagctcaaggcttagacccagcttatcactacactggagtatcacaacaacctcag

SEQ ID NO: 7674 - DNA, 697 bp, Gossypium hirsutum
cagacaatttattcttccaacagctacaatatataagatgaatgggatgtgtatcagattcttgtacaaggagaaagtgtcttctacaacagaagctaaaatataagttggaatcggatatgttctttgaaataagaggaaagatctctatagtttgaacaaggtttgcattcttgcattgatcagaaatattcttgctggtgaaggctctttatgggttgtttggataagagcttacctcattaaaggtgcatatttttggcaacttgaatgcggacgtaatatgagttggtgtttgaggaagcttttcaacataagagatgaggcaactcaatttcagagcatgttttctgatccaaataaggcttcagtaagtaaattgggaatgaggttagagagaaaaggtgcaaagcacagtggcataaactgatttggttcccattacatatcccaaaacatgcaatcgttacctggatggtcattttgggaagaattcagaaaaaagacaagcttattcagttgggtattatgaatgatgggtagtgcaagttagaggccaagaatcatcgtttctttgaatgctgatattcaaaaggcatataaaaatatattcttggactatgcaggactgacagagagatcgtgattggcaaagggatttacaatggaggcaaggctctcattgcaataatattga

SEQ ID NO: 7675 - DNA, 599 bp, Gossypium hirsutum
ataaatataatatttctaggaatatatatacatgatgataggttaccaatggtttaccactttaccttgatattgaaaccagccttggcactagcttcaataaacataacattgatgtcacgagccttggcttctccttcctccaccgagacttgcctgttgaaccagccaccgaatacacaacagtgaagtaatgatcacaaactaatgcctgaggcaattggaaactagaaaggaaggcaaccaatcttattttcttcaacaataaagatgaaataacattgccttttgtccacaagatctgttttgttccccacaagcataatgataacgtcacttccccgttcagcccgcacctcttcaatccaatttgaagtatttaagaaggactgcctgcctacatcatcaaaattaaaagttggtaaaacttcaccccacttttacgaacaattaactaaacaggaataaatcaacgagattgcattttagaaataggcaatgtcctacagaaacatgcataaaacacaatagcttgaacaagcaaacatacaatgagatagtgaaagaagaaaacagagtgaaatgataccatactgcta

SEQ ID NO: 7676 - DNA, 595 bp, Gossypium hirsutum
  misc_feature (570)..(570): n is a, c, g, or t
tgctctcgattttgcatgtgttcgttctattctattctattgtgttctctgtcgagttttgttccttggtgctgaaatttactccctatttatactattgagttctttacatcttttctatttttaagcttagtggttccttgattttttttgtcattatagtggtttcgtgattttcgcttcccataaactaacagtagactaagtcctttgtgtacatgttggagattgactaatcatgccacaacttgcacatctgtgaattggcaaagtgcgagatggggcctttgatgtgctagctctatgcatgtgaactgtgaactacgagctctatgtaggtaagcagtgcatcgtgagttgtatactacaagctccccgccagcgagatgtgtaatgtagttgtattgtatgcgagcagtgcatgcgagctccccgccagcgaacgttgcttgcgagctgtgtaatgtgagttgtactgtatgtgaggaatgcatgcgagctgacaatgcaagatgtgtatcgtgagctccccgccaacaaacagtgcttgtgggctaagaacgctaatgnctagcatacaggcgtagtgtgaact

SEQ ID NO: 7677 - DNA, 672 bp, Gossypium hirsutum
aagtccatgacctttgtcatccagaataagtggacctttgccatcttcatggactttctctatcagccactgagaaagtttttgttttagcaaattcagaatcaaaccctctttagattgtatacaatcatttgcacttgcttctcccatcgaacatatgctacttttcagcttacatttatcacactcctcaacagaacaatccaaccactttctccctgggccagtatgtaacaattttgccaaacaaacttgcaagtgcatttcctcttgtgctgtacatttaacagctgtaaaaaatgaaaatccaggtggcttttcacgatattcaaactctcttacctcactgcacgccaatctgttgctgcaggtgatataaaatggaacacgtccaggcacatgagaaggaacttgacaacggataacatttttagtcaaaacctcagcagaaacttcaatttcaccaaacatacagccccatttggcagcactaggaagctccttgtttttcaagaaattcccgacaagtaaaacctaaaacataagaagcattcacggataaatatgatttcctgaaaacaaatgatgctttcacaaaacatgcatatcatatttctgtacctttgttccaacacctgaatatgcccagtcaggtgagaagtcaacaatgca

SEQ ID NO: 7678 - DNA, 616 bp, Gossypium hirsutum
ttcgagtctaatgcagccattgatgatggtaaagaatatgttttatccgggaaaacagttcaagaagccagaagtgtgtttatgcatgtacataccctaccgagtatggccaagtacatggccaggttagtgatgatacagatatccatgtttagattctacagtttttttgtttgttttttgttttgttttttaagtggcttctttttcttggtctgtagattttcactaatcttatctaagaccatgaagttggaagatgacttgtccaacttaaattttatggtggaaggagatataccttgcaaagtatggtatatggatttaagttttcatattcttcattagttcttttatcttatcttgtttccgagttcaatttgatattttagttgtataaattttgcaggataaagataaaaagcccgtttataaagatggaaaactttgtattcactctgatgggactggttatatttcagaggatttggcattgaaatgcccaaaagatgtcttcaaaggaagcattatgaatggtgccagtgttgagattggaccaattggtgcattgctggtatttaacttgtgaaagcattgcataatggttaccccagta

SEQ ID NO: 7679 - DNA, 594 bp, Gossypium hirsutum
gatcctcaatctccaagggaagaaagatagaggcattaaagaggtaagactcatactttgcaacgcatagagagagtccagtgactcgtctagtagtggcgttgcactcaacccatccccatttccattcacaacaatctgaacccacttccctcatattgaatttgaagaaagatttaagttgcaagagtgcggtacgttcttcatcccgacatccattactccactttgcttcttctaaaattaacacgcttatcattattacaactaccacccctgtccattttgattccattttctcaactcaacacacttattgctttaactcacttgatatatatacacgtgccagactatttggtgggaaaaaaattatataaaaattaatgtaaaaaataaacaagattttagttgaaattgttaagctgatatattaaaataaatgacaatatttagtaattttcccaattttgattcatgtaatgaagtgacactctatgattatgtcacatcatcacttaaattttgtaaaagaatttataatttttttaggtaatagcatggcaatttataattttataaaagtatcacatc

SEQ ID NO: 7680 - DNA, 670 bp, Gossypium hirsutum
ttacggcttcgttacagtgtcactatcacctcgaactcgaaggatctaatatctataaaataatgcgtgctttattttcatgcttcaaaagtaaatataatatcatatcaaatgattttctttaatataatggggaaaaaagaaatgaaagaaaaaaggagagctgacgtctccactgctttttagacactcaaggtcattgattccttgcttgttgaaacgcccttcttggggtttgttcaaagaaaggtttctcaattatgcaatgcttgatgcttttctattggttaagaatttgcatagtttagtgtttttctctaataataaatgaaatgatcgaggagcacccaaagtttaaaaagagagtgtgcaggttttgaatgcattttataagccaaagtgtgaggcaatttctagcctagccaatataccctcaattatgacctcaaatctgaaaatatgattcaataaataaaaactcaggtacaatttgatttgcttattaaaaacccaaatgattgtaatttaaaatgacccaaacttgaaattaaccaaaattcaaaataatttgaataaaaatgatctaaaaaattttaaaactctaattaactcatctaaattgatctaaccaaaaattaactcaacctatcggattgatggacatacctaa

SEQ ID NO: 7681 - DNA, 633 bp, Gossypium hirsutum
  misc_feature (480)..(481): n is a, c, g, or t
  misc_feature (491)..(492): n is a, c, g, or t
  misc_feature (495)..(501): n is a, c, g, or t
  misc_feature (505)..(506): n is a, c, g, or t
  misc_feature (536)..(537): n is a, c, g, or t
  misc_feature (579)..(580): n is a, c, g, or t
ttgacagggaaccagtcaataaggagaagagaaaaattaatttgagcagcattccgttttcgttgacatgtgtacttcataagaactacattttggcagatcctactgccgaggaagaatctattatggacacgattttaaccgtggttttagattcatctagtcaactcgtctcacttcataaaccaggtggaacagttctagcgtatacatcagctatccaggtcagttgaatcttgatttccctttttaggttttaatgatgctttagtagcataatacattttagtgctcttatcatggtgtctttttcaccgttaacttttgaagccaccttgactccaagattaggcctgaaggtcattttcttgtccaaaaggaaatagtttacagaaatataggttgtcatgttcaatgttcaaactttttggtgctttgaagtctttttttttatgatgtgtttgccatacaaattgttgnntggctcgttnnatnnnnnnntatnntgaacccaaaaataaggctgaaggtatttnnttggtccaaaggaaaaaagttaaaaaaataataggtgttctnntcctaatttcaaacttttgggggtttggaagccttttttttttataatgggtt

SEQ ID NO: 7682 - DNA, 619 bp, Gossypium hirsutum
gatcttttgctcgaaataggaaataaaatttgcatataagtggcagtaatgaggtcctattattcagaagggttaggctgaggcagaagttctgctgcaagcacgcccttattgatatcagatatatgatacaattggtttcttaagttttattaatttgttatattttgtcctagaagatgggttttcctctttgaaatctttattcatgactcgaattccctcattactttacatcattagtttataaataaactggaacaaattaaaattagttttgtttaagaagtaatataatttttctctactaagggtgagtttggataagcggtgcgtttacctgcggttagtgtaaaaacagcggtggcggtgagattagacactgtagcgatactgtagcgtgagacaaaaagtaagctaaacgcaccgcaccgcacccaatcgcccatccaaacccaccctaagtcattgaccaattaagctaagaaaacatatgattcttgaagactgcttgaggttattctttgttgtatactcagactcggtgtgactattggatacgtgtatgtatatgacatgggtattgtcagacttttctatggttttccatgtatttgga

SEQ ID NO: 7683 - DNA, 675 bp, Gossypium hirsutum
tacgacgaatcttcttgtgcggtgcaacctgcaagaagaaaaacagattcagcatcagaaatttaatttgcagtgccaattgcatatcgctaagaaacatgtaagttacaattagaaggatacctgttttgcaataaaatccatggtttgagccgcagtgaggctacttccagggtttctcactacataagccattggaatctgccctgcttcttcgtcaggatacctgataacaaattttcacgagaataatataggaaaccgtctttctttccaatatatgttcccctgtgagatgtcctctcttatgttttcactcagaaaaatgtcaaagcaaaaagtacaatattcagcacatataccatttaacagagaaaaaaaaacaaaggagaaacaaaagacatacggaaccacagctgcatcagcaatttgaggatgggaatgaagtaaatgctccaattcagctggaggtacctgtcatttggtttgtatacaatgagattatttctgtccccaaaatatatatttatattaagtcaacactgccaacaactcaatatcacctgatatgccttgtatttgatcaattccttcaatctatctacaatgtaaaggaacccctctgtgtcaaaataacaaatatcaccagtttttaaccacccttctgaatccaag

SEQ ID NO: 7684 - DNA, 650 bp, Gossypium hirsutum
tgtttaagttcattggcttcctttatttgtagcagaaagaagaaaagcatgtatccaaacgcatcattggagaggtttttaagactcaccatgctatacagtaagtattggttttccataatagggttgatttgattttagagtggctgaccgatgaacttattgtgttgtttccgatgtagaacactggataagactattttgaacttagagatggaattaactgctgcaagggcagcacaagaatctttactcgttggttcaccattatccacagatgcgaatagagcaaatcatctaggaagagaaagtatctgatggttataggaattaataccgcttttagcagccgaaaaagaagagactcagctcgtgctacatggatgccacaaggttgatattttctttatacccttcatttcgttatttcattccgttaacacacattaatcactttcccaagttatgccattaggattgctgaattaaatctgctcttgtttttcttcctaaaactaatggaacataggtgaaaaacggaataagttggaggatgaaaagagcattatcgttctctttgttattattggtcatgggtgaaggcttaattcactttcctttgtattttttggtggctgaactttgacatg

SEQ ID NO: 7685 - DNA, 610 bp, Gossypium hirsutum
ctgcatctcacatggagatcccgccacctctgtcgagaccaaagcacgtaatcctcaaccatctgtacattcaaaaggggaaaaatggccaacccgtggtggcactcggttcgactcatcggtttcgagccaagtatgtgactgtggtgctgtacaaacccgtgcagcggtagtattagactgtcccgatacgggatctttgtagtctcgggtggatcacgtgaatgtggttgatatatagttatcagtatagatgttgtgccgtcaactttaactatatatagcctaggaagggagtcgccatatgaaaacttctaaagattctgatctttgtttttctccacgctttatgtatataagtatttggttcccatgaaatttatactaataattctcctcttaggtcaatttgtaatgaaagtttaaaaagttgggtcaaattatggttttgatccctctattagctcaaacttgggatttagtcattattttttaatctgggtaaattacattactagtcacttaactacggttttttttacgcaattatgaaaagttacaaaaggttcacttaattattcaattcttttttttctcacccatccatctt

SEQ ID NO: 7686 - DNA, 631 bp, Gossypium hirsutum
cctgcaattgctatcgagttttgttgtgaatatgcagcatcaaaattggcattgatctgtcctcctatggggggtatccaaaacatctctcttggaatgattctagtttctgttaatgactgaacttgctctaattccttaaaataagctaaaataaaaccggcaacctcttgtaccctttccttcttaccttcgtgataaattatatttctgttgtaccatattgcccaaatagttattgccatgactgtgcatgttttagtgttattcatttggaagaaacttgctaaccattatttccatacttgtcttgtgtttgattgcaaggaatccatcccaacttcctatagaatctattttatgaatccacaatctcgaaaaatgtgctccactgtttcttctccaaataaacaaactagacattcagcattgttcctgagtcttcgaaatttgagaatactgagtgttggaataaaattattgaccaccctccacagatgtattcttattttacttaagatcgggagattccagatctttgaataaaattctttagtgatagtttggtctgtaatataattatgtaggtgtggattcttagatattagccatttgtaagcactttgttctg

SEQ ID NO: 7687 - DNA, 612 bp, Gossypium hirsutum
atttggtgtgacaactcgagtgctgtagcagtggctgctatccagttttgcattctaaatttaagcatgttgaactcaatttattctttgttcgggaaaaagtaactaatggttctcttcttgtcggtgaagttccagcatgcaatcaaattgcagatattctcacaaagcctttgtcgacatcacattttgctcgttttcgacaacttctttgggtcttgctagttgagaaaacaggtgaatgttagagtacatcacctatgtgtgaaatcagttagtaagatcaagctgttagtaagctgttaaacattcagttagtagcagtttattttctatagctgagtataaatacatgtattaaacaataataaaggttaaggaatacttagccattctcggttaaacaataatatgtttctcataccattttttatatttaattattttttaatattatttttataaaaaaaaacccgaatatgagaaaatgttaagagtgttatgtaactcaagatgctaagttataaacaaggggggtgtctccttatttataagccaagcccttcgatcccatggttataatgaatgtaagtggacagtcaatattggtct

SEQ ID NO: 7688 - DNA, 648 bp, Gossypium hirsutum
tctcgcattaagctccgattgttcagctctcagcacaatgttttcggtcctaatgtcccaggattgctcggtggttacttgtatcgctgtcactatctgacacacgcgcacacacaaaaaggaacaagattaggcaaatgaaattagtgatattttgatatcaatgtaaaggctacatctaacctaacaaaaaacactttttccattacgtgctgtacaaaacttacgggaagacaacagcaactaactccataggtaagttcatcaatcatacagacagaacaagaaggcaggcagatagtgaaactcctcggacagcctcgtaaatcctttcgattcattattatcagcatttttgctataccattctttctacctttaacatgcctatccccaagtacaaactccaatgccccataatctgtgtatcccgaagtacaagttcaattcaccagcatcttcataaaaaaaatgatgtcatttgtgataatccattctccatcatggaatgccaaccctctcaagaaaaacgcaatccgcactattgtctacggcgctagtgttgatgggaaaaacaatataatccacacctttgtcagggttaagggggaaattgatctgatattgattagtcaaggattggattgt

SEQ ID NO: 7689 - DNA, 660 bp, Gossypium hirsutum
tgtacttgtcaaagcatgcgctttgatggttgttgtgttgttacaacagtaataggaaaggggaaaagacagaatgtagttaatccttgaaatttttgtatgttctcctaacatgaacaacttttgcttggtagtatatcttaaatcgtatgtggtacatggactgagtttaagattgctcgatgtgagtcattgctcttggggtggggggtgtaaatgcatgtaaaaaacacatggacttctgtggcaattgagtatttaaatgtatggttttctcaacagactcaacatttcgcttcctgtttgagcaatggaaggatcattttcctcctggttatctgcttaaagaagcctctattgacaaaccttttgaagaggatgcttgtcgctgtcacatagtttttgttcaggagagcacgttgagcattgactcagatataatcttaaagcataaatggtttctgggtgagagaacactttcgaatttcactgctattcctgatgtcaatggtgaggtaattgattaacgctagattgttacttctgctttaaatttattttggtcgattaatacttatattttatgccttgtaatgacatcttttcgttattgttcttttgttcaatatggtattatgtgattgtctaggtttactggcc

SEQ ID NO: 7690 - DNA, 489 bp, Gossypium hirsutum
tgtcgtcgtgtctgttgctacttgacttgtgcaattgttctctaacctgctctcacttgccattccatttgtataatctttctcattcatttttcgtgctttttagttatctattccactcggtttcttattcctcaggcatgtaagactggcccttctagttttttaacctttttataaatctaacgagcccaaattcccatgcacagttctgtactcaggtcgagaacttcacctttgtgatgttagtctcatgtaaaatttgtccaatctgttgttatggggttatatgttgccaatgtgtttaaatacttggctgagatctcttccctttccttctgttcctcttgaactcaaagtaaattcttgctcagattctacattttccctcgaaccactgtgttcttgggcaaagcatctccttgctacctaacttttttaagttaatttgaaatgtggcatatcttactcctctttattttaaaagag

SEQ ID NO: 7691 - DNA, 588 bp, Gossypium hirsutum
  misc_feature (38)..(39): n is a, c, g, or t
  misc_feature (559)..(560): n is a, c, g, or t
gtagggttgaaaacctctaatttcttaagtctattacnnacaagaaaaaataaggtggctgtaaatctaatttacagccaatttatactaggattccagacttcaatcctagccctgtattaaaactctaaggaaaacttataatcctagccatccatccatatctaaaaattattaataaagctgaaatattaaaatagtgtatagtaatagctcctgcaatagcatgtaagccatgaacagcaattctaagttcaaacaagaatattccactgcaactatcaaatgaggacaaaacaattccacaatgaattacagaagacattatatcatattaccgcaagctgcaaaatctcattgcgcttcctttcacctccactgaatccttcattgacatttcggttaaggaaatcagtcttcatgttcacaaaatcgagtttaggatatatgtaattacaaaaaaaacacagcaaataaaggacaattcaagcaacattctcaaagttccaatcttttttgtttttcacttcaccccactatataattccattaaatcatnnaaaaaaaagaaacttaaaagcaatcata

SEQ ID NO: 7692 - DNA, 623 bp, Gossypium hirsutum
cttagtactatcccatatgaagtatgaaccaacaaaacaaaatgtattttctttttatggattacatacaactttaactcttatttaatgtcaacttacgaaaattcttaccattaaattttattggagttaattcaatccgtttatgggttggactatcaagcttaaatgtctgtccaaaatttagaaaagtttagacaaaaatattatactcaataaatggattttgacaaaaattagacctatttaaaatgtgggttgagctcgagcttgaacattcaaggcccaaccccgactcggctcaactcgtttcaagtttataatactttatattaaattatatttatatattatgtaatttagaacatattaaaaaataaacttatactaaatatatagtactactctaatgtaaatattaaaataatattaagatgaatatataaaaattttcaataaataaaaattatataaaattattaaatattaaaatatataaaaaattaaaaaaataatatggacgggccgaaaatagacttgggttaaccttttgcaaatatggataggtttggacaaaattctaaacctaaattttgagtcgaatcgaactaaacaaacataaa

SEQ ID NO: 7693 - DNA, 679 bp, Gossypium hirsutum
acactgcaaacttaccaacataacaggaaataaggtatggaatttctaataaaagacaaattagtgttcaattataacccaaatttaggacaatggtgtgcttagccttagccaggttgtctttaggaattagattgtagtaactaccctacagtcacaacaaaaccaccaaatcacaaaattaaaaagaaaaaagaagaaggattcctcccttccttagtgccccattcatgcgaattaaacaaatttcggccaatgataatattgatattaatgctaccatattcttgatttatttctttaattaaaaaaatattatccaaagataaggatctagcccttcaatctttgagtagtacctaatctaaaatggggtcatcccttttttgtctttgcttatggaactttgtcgccttctctaccaaattctcaatgattttcacttttaattttatctcttacattgaaatactcattaataaattcatttaaggaaaattatagcaataaagtatatgaatttatacttgttgagtgcttttctctatttttttgagacggtgatgtttgtatatttatatgatatagatgttgtttattgatgtgacatattaggtaagttttatgcatgtagatacatatcttactctagatctaacacgtgtttatacggttctat

SEQ ID NO: 7694 - DNA, 664 bp, Gossypium hirsutum
agtggtacacttagtagttgcaaaacatcttggtctatgccatgtatcacatccatcaaggatgatacatgaaaaggtaattggaaattttttgaagtagatgaaattgatgctaattcaagaaccctagtgccaaatatttatttcatccaatgtgtttcattgttggaaaacttttttctttgttacatattgtgaatgaaatttcaagtaacattgattttaggtgatttctgctaatgtagttaaaataaaaatagaaaatttatttaaaataaaaattcaaacgattaatttaaaaataagataaatgaataattcaaaacaagtcaaaacaaagacaacgataataaaaaatctatttaaatcttttaaatgctatgacgacattattttactcggcaagattgatggtcggtatagcaataatctttgattgatgacaaaattgatggtcgatagagcagccatattggactgataaagacaaaaaattgtggacagttgatggtaaaaaaggtacattttgcaattgaaagcgttgtaatggtgagctcttattatgagttacaacagtgaataactaaattaggaatattgatatttgtggagattgtttgacttctgatgtatttttgttagttatggaggttgtgggtgatat

SEQ ID NO: 7695 - DNA, 595 bp, Gossypium hirsutum
  misc_feature (5)..(6): n is a, c, g, or t
  misc_feature (550)..(550): n is a, c, g, or t
ttttnncgaggtatgaaaaaccagaaacagtgaagataggaatcatgttaatgctgatatattgtttggttttgattttgttgaagcttgattcttgttgcagttggatcagacttactatgtgattgatatggtttgctggaatggatactctctctatgattgtactgctgagtttagattctattggttgaactcgaagctcgaagagagcggtgcttgcaatgcgccttcacattatcataaatttaggttcagtgctgttccagtgtataattgtgatcagagtggcctacatgcagcatacactggagttgtgccgtatgctaaggatggattactgttttataacaagtgagttattttcctcaaaatttgtactcagttttccattatcttttcccattgtcctaagtaatagaatttactctgtaatgggttccatgtcttttgctttttttgtgtatggatgattggcatggctttcattttatttctcttgtgatctaaggaacatgtatgcttccatagtctgaactaaggtgtaaanaagggtactttgttggttcttattcttccaagactaaggggaaca

SEQ ID NO: 7696 - DNA, 649 bp, Gossypium hirsutum
ctcaaatggttgtcacctaaaaaatagcattaaatttgaagactgagcaattacttaacattgtcagttaggcattgtgaaaaataatttagtaggcttaaccttgtatacattaagcagagactttctgatgctcatccagttaatcctatgatgctataaaccatattctgcggttctaggtttcattggaagtgtggcaaaattaatttcctattctcggcatgagtaaatgacttataaagctaagcccaacattgtctgaaatcatcaaatatgttagagccttaaaggctgcaagtgccatcagaggtcttatctgcaacgctagcaaagaaacaaattgctagtttacactatacctagactactgtctacagattttctttagcctgtcattcatttccatccccctttttagcttgcaactattatcgattatttttaccggatcttactctcagttgtcatctgttacagattcaagggttacgtgcctgcgagatatcgttctttgtatgagcagtacctcgaaacaagtaaaagaaatgcctgaaaatcagaggaactaaacttatctggtcaaaacagtaagtatacgctgccgtttgccaatgtgaggttagaagtgaaagattgagactttggc

SEQ ID NO: 7697 - DNA, 656 bp, Gossypium hirsutum
gccaaggaactagacgaggtttgccgcttgcttgttgccattttcattttcttatttatttttttggatcgtaagtgatttagggtttagcattgcttctcttggatccttttttaatagaattgcttttcttggtttttagtcaatttggaagatcgaaaatttatttctatttcatagttttttatgggaaaaatttaggatcgatagaaaactactggaatagattttcaataagacaatgtagttgatcttgtaaactagatggcttaaaaagcccaaatttagagctaattaagtagtgcaatttaaattcatatacgaaactgcagggatttatcttgccttcatgggttcagattcctccttaaaaagctgaaattctgagcttattactttcagtcatgagtcagtgactaatatatgagactggagaatcccttatctgcctagtatttataaggatttttcaagcaaattcttaatgacattctgcagaattctattttattaaaaagctataatttggagtttgtttcctacacgattcctgcctttaatagaaattttgtgtaataatcattcatactggtactatttacttgttacgaataatttcagacttgttcctggaataatttgcctgacctggtata

SEQ ID NO: 7698 - DNA, 763 bp, Gossypium hirsutum
  misc_feature (625)..(625): n is a, c, g, or t
  misc_feature (627)..(629): n is a, c, g, or t
  misc_feature (634)..(636): n is a, c, g, or t
  misc_feature (638)..(643): n is a, c, g, or t
  misc_feature (652)..(655): n is a, c, g, or t
  misc_feature (658)..(660): n is a, c, g, or t
  misc_feature (663)..(667): n is a, c, g, or t
  misc_feature (670)..(672): n is a, c, g, or t
  misc_feature (674)..(676): n is a, c, g, or t
  misc_feature (682)..(704): n is a, c, g, or t
  misc_feature (706)..(706): n is a, c, g, or t
  misc_feature (708)..(711): n is a, c, g, or t
  misc_feature (714)..(720): n is a, c, g, or t
  misc_feature (725)..(726): n is a, c, g, or t
  misc_feature (729)..(730): n is a, c, g, or t
  misc_feature (736)..(754): n is a, c, g, or t
  misc_feature (756)..(758): n is a, c, g, or t
  misc_feature (760)..(760): n is a, c, g, or t
aatatcaactcgataacagcagatcagaaattggtatgtcatcatacttgggaaagctttgatggcgtttcctctgtcattgacctgtgacatacatagggatttattccatgtcaatggacagtgtcatcatatttgctcgatctatacttcctgtatgatcttttttgcttttatttgcaccataattgttgcctgcttcgtgggatgttcatctgcagggttatatcaaagatgaggagaataaacctgttgatgacactgttgattcttttctgtcccatgatcatgataatgttgataacacaagcactcctttcatgaatttaaggagtcgttctaacagatctattaaaagtgaacataaaggtaatctgtaattctgttaggactaacagagaaattatttccagctctccttatgtaccaatgcaatggaaatagaagactttataatggttaatcttttccagcctctgcagtttgctctcctttaactttgttatattgctgaaaaattgttaaatagcatgggatgactatatttggttgtagcctttaatcaggttggacaatgaaagctttctctgatttccgccaccaaacttggtgtagattgtgtggntnnntgagnnnannnnnnaaaaaatcnnnnccnnnttnnnnnaannntnnnatcatnnnnnnnnnnnnnnnnnnnnnnntnannnntannnnnnncttcnnaannaatatnnnnnnnnnnnnnnnnnnntnnnanaaa

SEQ ID NO: 7699 - DNA, 672 bp, Gossypium hirsutum
gccttcagttgtttttatcacaaatttttaccaaaacagttaaaaggatgcctgtctcagtatccaaaatttatctttgaacaactgtatacaaaatatgaactgatatcttcccttctacttctttctgaatatagggggattttatacctttaccgacagcaatcaggaaatggtatgcctgtatcctttttgccttcacaattcttgtttttatttatccctccaattgcacttatgatgtgaccgagatctgaagcagattggcatgattcaaatttattgactatgcaactattgagggaaacatgtcctgcttgtgaacttggtgtgctgaatatctgattttgtgtcaaaaattttgtgtcaaaagagacaaatgcacttggttgtgccaacaaagcgtgtatatgcatactttcagtctgcatttaccatgtgaagggaaaatggaatctcttatatggccttgattggcagaagagtttgcattttgcagtaattattgatgttgtggttagcattttacgaagtactttcttcgtttaattttgtcttgtagaggatgctcaactcacgccacttctacgccttggagctggtgcatgtgctggaatcattgccatgtcagccacttatccaatggatatggtacgaggtcgcctaactgtc

SEQ ID NO: 7700 - DNA, 634 bp, Gossypium hirsutum
gagtcttcagaggtccacccctagagtttcctagtgctcggcaatttcttgaagatggcacggaatccattgtagctaatgcctcgaaagggccaacgatagaagctacttcactatttagaaccgtttggtcacttgttgaagtagaatgaaaacttccagcggtcacgaaactagcttgcatagccaacgaaagttgactatcagatgaatcgggatgagagacatgtcctcttactggatggtcctgcccacaactccgccggtaccggaaacttatcggtatctggatataatgaaaataaaaattactagcaatctacatctccttataatatacagtggaagattacaagtgaccaagcaatgaattgtctaaaacaagcataccaaaataaatatgtaataaaataagggacattgaagaaacatgattgttttcaatgatccgaacaaacctgcaatgcagcatgacgcttggaacgagacatgcgcccaccgtgttcgagagtattgtgcctctacagaattttgtttttcttaaaaaaaaggaaaaaagaaaaaaaaaagattgtacttaaaataaaaggaaaatgtacataaatataacacctatgccacaaaccttcaattc

SEQ ID NO: 7701 - DNA, 658 bp, Gossypium hirsutum
taatccatcaggacatcatcacatatgtgcttgggtaaaagtggaacagatgaacctcctggtattactgcaagtaaattgtcccatccacctctgatgcctccgcagtgcctctctatcaactccttaagtggtatactcatctcctcctcaactgtgcaaggcttgttgacgtgacctgagacacaaaacaattttgtcccagaattgttcttcctcccaaaactggcaaaccactcaggaccacgtctcaatattgtgggagaaacagccaccgtctccacatttgtgacagtggtgggacagccatataacccagcattagcagggaaaggaggcttcaatctaggttttccttgttttccttcaaggctctctagaagtgctgtttcttcaccacaaatataagcaccagcaccaaaatggatgtgaacgtcaaaatcataaccagaaccacatgcatttttgcccaacagtccagcttcgtatgcttcttttctagctatttcaaggtttttacgttcattcacatattcacccctgatgtagatataagcagctgtagctctcatcccaaccccagcaatcaagcaaccctccaatagtttgtgtggatcgtgccgcatgatttccctgtctttacaggttccaggttcac

SEQ ID NO: 7702 - DNA, 649 bp, Gossypium hirsutum
actgatctacagctgaagtataaggctccaacatcttccattctagggcaattgtatcatagtaccaaccagggtactggggatcaaataccatgtgtgcagggtactctgcattgccttgtgaaatctgattccagttagaggtatttgaattcccaaagtcctctgctaaagttcccacagaagactgagttgttttctgcaaagaaggcatgtccatctttctatctgaaaaatgatcgccattatctgaatgtgtcacaccaaagctctcctgtgaattcataaatgtattcacgtatccctccacctgataccattgcccagtatttggatcatatttccatcctggataaagattttcccagtactgataattgctaaattcctgcccatctacattttgttctaaccccatgccatagtattgaacatcattattttctggatgactagacgaagccaaatcagaaaatgaattccctggtacactaattgtactaccattaaattccttcagcagatcatctttattccccacttcagcaaaagggtcctcagaattatcccccaaatcattaaatatttccgaaaatgtcctagatccaccagcattgataacatttgaatcagagttaagcgagctcaa

SEQ ID NO: 7703 - DNA, 255 bp, Gossypium hirsutum
caaaggtaagcaattcatctttggttgtgctgttttgtggttagtgttaagtagtcttatctcatatctctggtagatcaatcacaagaggtgttctacttatgggcttcaattttttcaccttatagaagacactttagaagttcttgattatcagtctccactctccaccactttcaaatattattttgttggggtgtaggtgcacataagccattaaatgcttgcttaattagttatttcacccattatatt

SEQ ID NO: 7704 - DNA, 628 bp, Gossypium hirsutum
atccagtaggcttacagtcatggatatgaagaccatgaataatcacattggtaacaaattggattgttatacaccctccattagcaatatgaacattagctccacgaccatcaatggtcttaaagctgttcattatcagctcctgcttcaacttaatgaccatgtccctcttaaacacgatccagacagggcggtcctggatcacagcatgacgcaatgtcccaggtttggggttaacagggtcatcatcagtgtggtcagtgacgacatagaagcgcccatcacgcccaccaactgcattccttccaaaaccaatgccacactcagctagtctctttcggcgcttatgccagttagggtcacaacgccagcaatcatcaatggggttaccggttccacatgaaaagaaccccaacttcctcctttcggtcaaattgcgaatattcctaccatcacattcatgcatagaacaaaattattcttaaacaatacacgggaaaaaaatcccacttcgaaatatttgaaataatatcatatgtttcatttttttttaaatacttgattttttttatattattacactttaaagaagaatgtattagggtgtaatcgagtcgagccgagcttg

SEQ ID NO: 7705 - DNA, 663 bp, Gossypium hirsutum
aattttagagcctgctgtttggtggccaaaaacccagtctcagaaaacaaacaaacaaaagcactctaacggaaaggtagagagcaatggatggacggaggagctggaactggaaatgagacaagtcgtagaggtgattaagagaaaagacagtgaagattacgagaggctaggaaacaaggcactgaagatgaacaaagttttagctgcatcagggccattactaactgggattgcagctctaggatctgcctttatgggtccgtccaatggtccttgggcagcaataatggcaactgttgcaggtgctttagcttcggctgtcaacacattcgagcacggtgtccaagttggtatggtgttcgagatgtataggaacaacgccggtttcttcaaactcgtgcaagaatcaattgaatggactctgagtgaaagcgatttggagaaaagagaaaacggggagctgtttgaaatgaaggtggcattccaattcggaagaagcgtgtcacagctgagagatctagcgaaaaaatccaattattctcgtctagaaggaagccccattgatgaattcgcaagcaagttgttttaacgtatggagattcatcgtcacaacatgtgcatatatacaaggattgttcattgggtctttgattcactcat

SEQ ID NO: 7706 - DNA, 640 bp, Gossypium hirsutum
ggtgttgaagggtgatgatttgaagcaacctaaggtagtaagcacccgaggtgaaggccgaacttcaataagctaagaaaagaggcagctttgttattattatgctttgttaactactttgtttatgttcatcaattgccaagcttccagaaaaccagactgtagatagacttttaagactctatgaatttgatataatttatggatacaaattagtgctacgagttcacagtttggcaaaatcttaattttaattttggttcaaattccgactctcaaagtccaacaacgatgaccaagccacgactcaattatgaaataatgacgactcaaatgagaacttatttagacagaataagttaatgattgagacaggattaagactaaccattatataatactccaagaaattgacagaaaaagaaaagaaaagaaagaatactgtatgttttatttgtcaattatttccaacatgttagttggtattctatataaaatacataccaagtcgacatcatccatgtgagttaatccccatcaaatagtgttgatttgaatgtcttttcaacatacattttgacaagaaatccaacagctcacatgggttgtatcataactcaaacattgtcctcttctttct

SEQ ID NO: 7707 - DNA, 658 bp, Gossypium hirsutum
cagaaccattcgagcttgctctcccagacaggacctcaaaggccgaactgttgcagtaagcactcccccctccccccttctttgtattacattgttcattttatctccaaatactctcttctttcactaagctcttaatcacactacaagatttcagtggttgaaggcaaaaacccaaagttcatgatgagctaaaatgagtaatcctgatggtgcactttactttaaatatgaattgatgaaggaagaaaaagggaaatggaataataactttagtccctctcaactaacagtagtttaatttattgttggtcaagttgtttcagtcattttattgtgtctttgtcatattggtagacaatgagttcttgaaggaatttgttaaatccaacaatggttcatataacagttgaattacaggtaattggcttgggaatatctggaaaagctgctgcaaggcttgctcttgcgagaggtgcttcggttgtaggtattgatcaggatgagagtttgagttcgctagaggtatattattgtttatcccttcatgttcttaaatttgttgaggtcacttaaactggttccttgtaccccattttaatgcttaacttgctcttggttacagcataatccttcttttatggcattgaactctact

SEQ ID NO: 7708 - DNA, 650 bp, Gossypium hirsutum
tcggaagggacagcgtaagtgttgtgaagatggttcgagaacaagcagagaagatgatacaaacctggtaagcaggatcaaggatctactgatgagacaatgggaagttacggtgcagtacataccaaagctggttaacatggctgctgactgcatggcaaacgtgagagcagatgaagctttgaatctggttatatattttcaatacaccgcctgtagcagtgaagacaattatactccgatatttaatggatgcttcgattaatgcttttggctaatttcttaaattagcttcttcttcttcttcttcttttttctatcaaaataaaataaaataaaaacgcatagggagaactagggaaaaaaagagcaaaaaaggtattaaaaggaactcaacccatctaacatttctcacttactggttgaaattaatgcattatctgtgtttgaagctgatgcttaatgaaaatgagaaaaaatggtttggatctcattattgacaattgcaagactatactgaggagattttgttgtggctagatatgtcacattttgggggaaggtaacaatttggtcgacgcacttgggtagtaatattagtaacaattatattttgtaattttgttggttgttcttttcgaaggtttgaa

SEQ ID NO: 7709 - DNA, 635 bp, Gossypium hirsutum
ctccttttgtttaacctttttgtgtctaatcttccgtttatatgtatatatggtatcctgaattgaagcttaggtatgccaccattttttcaggggaaatcagcattccacaaaaaaattggtttcttgaaatctgggaaaacaagttcaaaagattcaggtgaatccttactctctcactttctcgcgaaattttggcatttagaacataatgcaatccacggtgtaaaacaaggaggaaatttgatgttatatatgcctaagttgtgttgtattaatctcttggaaacaggtggtttccaggaaggaaactgggaatgacaaaaagggtaaactgtaacagcttttgtctctactactgcatgcagctgctctggagagaaaagactgggaggaatttgttaaaacaaaaaaagaaaaagaaaaaaagcattagatctcaaagggatcctgtaccttccttttattattgtttttcttttcatctttaattctactctctttttttttttatttgtcccggccaaggcaggggaaaacttcctgaaaaaaataaaaaaaaataaaaatcccccagccttgggggaatatatttattttatttttcagggaggtttttccccattttttttccc

SEQ ID NO: 7710 - DNA, 635 bp, Gossypium hirsutum
agatctctgaaattggcaatgtagcatgcacacagtctgattcagcaatcagggaaaaaattgcaatacggaagcaatacataagatttaaggagagagttttgacaattaagtttaaagcatttcaaaatgcttggaaggaagatttgcgttcacctttgatgagaaaatatcgtgcaaagtcccagaagaagtatgaattcagtttacgatctacacacggtggctaccaaaagcatcggtcctccattcattcacggttcacttttcctggtaattgtttgagcctcctgcttaagaatggtttatatttgttgcaagttttattgtgattttgcatgtggctgagtggcattactttaatttaagtttgtaatacttcattttgtttcctcttatctcttgccttttaccttttatctatttcaatttttattggaaatgaaattattatgtaattgtagctgaaaaatcaatatcggaaatagaggaaaatcttgaatgcaaaatgaggactaagctaggtttcttctatcatagagtcaagtggataaatttaagttcggttctcccatgccaagaaaatagatgttgaaatttatggtacatcaaggcaattcaaggaaagatttgag

SEQ ID NO: 7711 - DNA, 642 bp, Gossypium hirsutum
tctcattgatgtatactctgacttattattctgaatttctgacagatcaaaggatatattaatgcgggtaatagcacaaaatctgcctccagagaccacttcagtggaacaggtttttgcctcttggattctccccccccccctttttatgtcagcaaagttttgttcttaaggcttaaccttatataccagtagcagtttatcatatttgacctctatgataagcacattcttgagttctagtcattttgctgttgatttgatgtataggttatgactcctaacccagaatgtgcaacactcgacacaccaattgtttctgctttgcataccatgcatgatggcaactttttacacctacctgtgctagatagaggtgatatgagttgctaccttgcaaagaatatagttttctatgtgcatcataccggtcctcaataagtttctgtggttagatgcagatggagaactagtttctattgttgatgtgatcgaagttactcatgccgctgttgctacagtaagtcaagtgagtatcagtctaaggttaaggtgttcttaaagtaaataaatcttgtagtgtacaaacaatctatctctttatactatatctaaaaggatgaattccaaaactgcaaatag

SEQ ID NO: 7712 - DNA, 688 bp, Gossypium hirsutum
ttcatgttgaggctgttgcagtagatcccattgaaatgcagcttggtcatgcttctaatgaactttgcctttcagatcaactctgtactccgacatttattgatggggcagagtcagacatgatgccaggacaaactagcgatggtttgaagaatacttgttccgatgtaaacatagaaaaaaatggcctaatggaaaaaacatctgggtctgatgttgtagagttgatatctcctagtgaggaaggatcctttggggcttcattggtgaatgaatgtattgattgtaaagataaaaatacatgtgcggttgtgggtgaagtttttcatactatttcagtgcatgatacagagtttctaacccctgaaaaagagggaacagttaatggtagcatcgcagtcgatgtggtccaaaaacagctttgttgtgcttttggtgagctttgccttgtagaccaaccaggtaattctaattctgtggattccgttttggggaaagaacacggaacttcaaaacaagtcgatgttttgaaagatacaaaacctgaagtgaatatggaaactgccacaatggaaaagtcttcagcatctgaggtgtcggagttgatctctcctgttgacaaggaattctgtggtgcttcattgttgagtgaattcattgattgtaatgataaagaaccattggcagg

SEQ ID NO: 7713 - DNA, 557 bp, Gossypium hirsutum
  misc_feature (552)..(554): n is a, c, g, or t
aggacgctaactgaactaatatccggactgattttcaggttgttggagaggcaaaagcaggtgatctctgtggtgagatcggagtactttgttataggccacagctctttacagtacgtacaaaacgattgtgccaactacttcggctaaaccggaccgcattccttaatatcattcaggccaatgttggagatgggaccataatcatgaataatctccttcaggtatacatgctgcacttaaccatacaacataccgactaatataatcccttgaaacccttttaaccttgttaccacgcgatatacacagtaatatgatgaaatatgcagaaagaaaatcaactgaaaatgtgagaataggcttatagcctttatacatatttagtcttggagttctttgtttggggcagcatttgaaagacatgaatgacccaattatggaaggagttttaattgagaccgagaacatgctagctcgagggagaatggacctacctctcaacctttgcttcgccgcactcaggggagatgacttgttgctgaatcagcnnngca

SEQ ID NO: 7714 - DNA, 616 bp, Gossypium hirsutum
agtggatgtttgggtaccattgtagttagttttcatcttttcttcaccataagttataaaaataccttggtgatgcattctcttgtagaaggggtgtgtggcaatttatagacttggattttgaagttgtttgtggtaacttctgtgggtataactcattgtgatagttaacatggcaatctgctgtaaaattttcttcttctgccattttagggttatattataggactatctgtacaaggtacatttacatttatttaaatctagaatataacctccaataatgccaggtcatcagtggttttatttatatttctatcccatagattaaacatgtaactatcctaaattgattgctaggcttgtagcaggagggaaataataaaattgaaggatgcacgtgcttttctgtgggcaaacttgattgcttatattataacctaatgtgtcagattgcttgcatttttagtagtctgacttgtctattatttagcatttgcggtttcttagtttttatcatattttgtatatttatatacatattagaatttctttttctcttggtttccttctttttgaaatttctgtttgtatgatgatcttaacctttgcttgt

SEQ ID NO: 7715 - DNA, 611 bp, Gossypium hirsutum
tttattctataacatttaaaagttttatagtcctattcggtaattggttgattgttgattgccaactgattttattaactgtttattttaaaaccgtttgataaaacctgattgatagttgaagattgatatgtgtagacatgtaagggcatggtattatttttaagtctttatttatttataatactttagtctttattatttggtgttgaaataaaacactattgtcaaggaataaaaatatctattatgaaaattattagtgaatatttttaaaattttaaataaacatgtaacgacctgataatcacggctatcgaaaaatatattttcgaaactccattctcgtaaatcaaattagtaaatatttattaaaaatatttactaaactaattgtgtggttaaataaattttgattagatgaatttgcatgaattaagaataattagttgaataaataaattgaagaataattaaagggattaaacaaacaaaagttgaagttcaacttttgtttgtactggttgattaggtagacgacttcgtacattgttatatacaaattataaagtcgttgggtaaaatgtgtgtcaagtctttggtacaagtta

SEQ ID NO: 7716 - DNA, 636 bp, Gossypium hirsutum
tttcatgctgatggtaaccatctaattgagttcagactccagccatttattagaattgctttagtactctcatatgctttgtttatgcttatgatcacttgttctgctagcttataaaggcctttgatggggcttcctttctcacaagcaattagggaaagttgttgccaccttgaaaaactagtaaaatttacgttttttttattgttgaacatttatttaacgataaggttaatgcattatttggggctgaactttggcaaatgttctcacataaggacctaaactttctctgaacttggcaattattctcgcataggggactaacttagacaaaaataaagtttaggtttcaatgtgagaacaattacttaattcaggccccaaaaaatggattaacctagaacgaaaaatagtaacggatgttggcttttctgtttcttgttagtggaaattatttgatgtgatgagcaggtgttaattaattagttgtctgttgtgttggctttatattcagccgcatggattctttaactgctctcctgctgtggatgtccctccaaatgcgtgcgaattggatacgaaagacaatgatatcaaggaaaatgtggtacccaagtctatgcagaatggtct

SEQ ID NO: 7717 - DNA, 694 bp, Gossypium hirsutum
  misc_feature (602)..(602): n is a, c, g, or t
  misc_feature (622)..(637): n is a, c, g, or t
  misc_feature (641)..(646): n is a, c, g, or t
  misc_feature (649)..(653): n is a, c, g, or t
  misc_feature (658)..(661): n is a, c, g, or t
  misc_feature (663)..(668): n is a, c, g, or t
  misc_feature (670)..(674): n is a, c, g, or t
  misc_feature (677)..(686): n is a, c, g, or t
  misc_feature (691)..(691): n is a, c, g, or t
gaaaggtcaagggccatgactgaaatgaatggtgtgtattgctcaagtagacctatgagaattggtgttgctactcccaagaaagcatccggatatcagcaacagtattcttcacaaggtaccttaatattttatccatgacaaattagtccagttgagtaaaactgtgagggataaacatgcaggggccatttctgggttctctatgatttctgccataatggtgatggtgaggtgattgatacttctacgttagtggagcatatcgtgatctattcttcatttcaggctcgttttaatatggtgaactatgctatttcaaattgttcatcatatggacattctattttgttcagtatcagggtcacaggattttccttattccatctgtcatcatgttcttttgtcggttgaatgaatgactgctgagctagtgttttctttttttaaatgtaaaattttccaatcattgcattttgtattgtaaaactcactgtgaattttagttgaatgattatatttttgttctcctttttgttatctgtggtattggctggtggacatgcatcaaatggtgctgtacccaacgttcttcaatgcantacccaaggttcttcaatgnnnnnnnnnnnnnnnntttnnnnnnctnnnnnttctnnnntnnnnnncnnnnntcnnnnnnnnnnttccncat

SEQ ID NO: 7718 - DNA, 591 bp, Gossypium hirsutum
ctcacacttccacagctcttcgtttttgaaatttctgcgtttagggtttggggccattgctcagcccggtttattgaaatctgcaaatggctttgatccgttccccaatgctccatttttcgggccaacacggtttatgataaggtactaggaaaataaaacttaaaaagacggtaaaacttaaaaattactgtgaagactttgtattaagagtaaatttgtattatcttttttattcaaaaaataataaattaggctttgtagattaggttattaaaatatttatctatttttactgttaaaatttagtcattatacgttagcataatgtactattaaaatatttatctatttatactgttaaaattaagctttgatttaaggtatagagattaatttatcattttttttaatagaaagaaaaaatataatttaacttataatataaaggcctccaatacttttattgaataaaagtatttgatagtggggtatggcattttaattgtctcgacaccaatattgattccacatcttcctacattaacaacaatactcataccaatcgaattaaaactcaatcggctaacc

SEQ ID NO: 7719 - DNA, 644 bp, Gossypium hirsutum
taggaagcgtattatcctcctattaattttaggtattgtatcaaaaaaatagatacgacatagaaaaatcgaactatgtaaacaaacttgcattttacattatttttatttacacagttttcacaattttaagcaatagtgatcctcatgcacttttattataagttgactgtacaaacaattaacaacttaaaatttcaacactgtgtgaatcatggttgttccactcaacataaatatataaaaactaggcatatgataataaaaattagcttaaaatatgtcgttagtccttatatatgtgtagaatttgaggtttgatttaaaaaattaactttaatatgtttattttctatcaatcatatatattacgtcatatgatgataatttaactaaaattttaaattgaaaaattttaacagaaaatacttacgatcttagtgattggattatgatttttaaatagaaaaatagtaagcttaattataaggactaaatctaaaattttctcaaagtatagggactaacggcacattttaacctaaaaaactaatatcatcatatgcaaaccggagacagaaatccaaagctaattttcttgcagaaacagtgtagcaaagcatagctgtattctttactctgtc

SEQ ID NO: 7720 - DNA, 549 bp, Gossypium hirsutum
tgaccttctgcttcccccttacccgctacctactattcgctttgaaagccagccgttatcacacatctgcctctgtcttcgactcgcctttcaatctcctccatttccttgatctctcctctacccatcaatgtctccaattcaccaagcaagcccacgctcgagtcttcttacttgggttcactcagaacccgtttttagcctcaaagctcctctctttatacgccctttttgggcacctaactcagtcaaaagccgtttttgattcggttcaagacaagaatgtttatctttggaactcaatgatcaatgggtatctaaaaagttactcgtatgctgaagcttttgatttgttctgtaaaatggattgtcttaatgtaaagcctgatgattttacgttggcaacgatttcgaaagttgctggcgaaatcagggacttggtagtggggaaattggttcattgtcaaagtgtaaaaactggatttgtggtggatatcgttgtttccaattctttgatttcaatgtacgggaaatgtggagagtttgagg

SEQ ID NO: 7721 - DNA, 635 bp, Gossypium hirsutum
gttggaggtcgatccgttcggtcgcctttctcatctgcagaaaatttaaactgttacttcacaagaagaaaaggcaggctggaacaatgttgaaaagcaaggccataatcaccttgcttttgtcatgagcagcaacagcatcaatgagaggattgcgaggtcgaggaagtttaacaggtggattcccatttgagttgccttcttcagaaacttgcattaaaccaagcgtatttgatggacatgctgcctctccctccgaagttggcaaatcatgctctagagttgtatttgttaactgtgaagtttttccatctgtggcagccaagccatgttgaacgatggcatttgatatctgcaccttttctccctcagaagcttccaaaccatgctgaggatgctcatctaccttggttggaaactgctcctctactttggtaggaagatcctctgctaccttggttggaacctgctcctctttcttagttggtatgggcacagatacatcaggaggattcccatgttcttgatcaaaattttgtttaggatcctgaaatgtcctaccttctgaacttgtatccagtacaaactggctaggacagtttgcttctttctcaggcaaagatacagggatatgt

SEQ ID NO: 7722 - DNA, 635 bp, Gossypium hirsutum
  misc_feature (56)..(56): n is a, c, g, or t
gaatccactgattaccaaaagatgtaaaacagaataaagtgaaaatcatcttttantttttgggaattttgtctcttaggcaatttggtatattctttttaaatattatatatttgattcttgaagtattgaaccaaggattgatgcttgctagaaatatgctactaccttttgatctctatcccgcatcaataattctttccctgttgtgcaatatactgatctgttttcattttatttaggcaacaatttatcagcagaaagcattggatatcaatgaaagagagcttggtcttgaccatcctgacacgatgaagagttatggagacctagctgtcttctattaccgccttcaacatacagagttagcattaaagtatgcttttacatctttctagttaaaggaattatttgctttagctcccactgtttttaactttatttgctttagctcccattgtttttaactttgagattaaaaattagtcctaagccttaacggaaagaggaagtcaaccttcttttttctgtcaaaagaatgcatgctactgatcaagaggggaagacattgagttatgcttatgcacatatgatatagaaagtacatgtttatttggtattcctgtgctgcggaa

SEQ ID NO: 7723 - DNA, 644 bp, Gossypium hirsutum
agttcaatggaaggatttatcccgaagtggctccggttatggaaaggggcattcctctaggggaaaagcaactggtgtatgtgtagctgggaatgaaactgacagacacgagccaactcgtaagagcaaacgggttcctaagaggcgtgtattggatgttggtataaatagtgatgatgatgatgaagatgaggaaatccgttatctagggagactaaatgcttcaaatggtcacttgaaccttaaagatgaagaggatgagagaaatgggggagaaggtgctgcttttgaggatagagattatgtggaagaagacgagtgtatatccgatgatgagcctggatctaaaaggaagaagctgggaaggggatcagttgatttgtttgtcgaaggaagaaccgaatcaactcccactacacgaaatcgagctcttcagtctgggaaagatctcttatctggtccgggtgcgactcttgttgagttccctgacggtttacctcctgcgccatctaaaagtaaggaattaccccacttgttctttccctttcttgagcatctttgagctttccatgctaaatgttgtaaattaattgttttaataatgatctgtggtcatagaacaaaaggagaaactttccgaagtg

SEQ ID NO: 7724 - DNA, 682 bp, Gossypium hirsutum
aaagggttaatatatgtttttttttgtgtgtatattgtgcatactacttatcgcatactttacaatgagtttatcaacttacatgtgctctagtttatattcttgaattaatttttttcttctatttcaatgcaaaggtttatagtttcaattgtatccagtttatcgacttaaatgtgttctatttcaatgcaaggagggttggtaatatatactatattttttgacgttatcgtttatgatttcaataaattagaacgagtttattgacttagagatgttctattatatattattgtagtttcttttatttaaatatttatgattccaattttatacatttttaaatcaatccatttcttcttttatttaacaaaattacattttctagtgactgacttttccaagacaatgagctatatatcaataagttgttttaaaattttattaaaaaaaaggaaaaattgaataccctcattttctaacaaagagaactcatataatctaattttaaagaaaagaggagatagatcatcaagactatattgaagatggacaacaattctttgactcatttcatttgataatgatagactaaacaacaaaaaacaataacacaacaagacttaaacgcctagacttttataaaattatatgacttcagcactaaaaactgacatcg

SEQ ID NO: 7725 - DNA, 648 bp, Gossypium hirsutum
ttgatggtacataactgattctaggagcagcgggatgagcatgagcatcggtggtcgcagcctggctagtgaagactcagagggtttgacacctagtgctgttttctcacagatcatgaaccctaaagggcgttgagatgagaagtgcacaagtgattgttgcatgacttgagcatggcatggaatggaatataggaatattgagttttgttgtggcattcatttcacttataattagtataatctgctttacatattcactctgataatatgtgttataatccaagtggggttgttgtaacttgcatgtaaaagaaatataagaaaaagggtggtcctattatgtaaacctctaatggtcaatagttcatgacatgagaatcacttttattcttccattagaattgaaatacatttgaattgtgctgaaaagaaagaatgagctggcattggcatcgcaagaaattagaggggaaggccctctgccaaagtgttttcaattaaaataaagtgatgtgataggaaagtaaggatattaaggtattttaattcaaacaaggttgactcattgtgttataaaattgaattcaaacaaggttgactcattgtgttataaaattgaggctgtagaatcttgtttaagggtcc

SEQ ID NO: 7726 - DNA, 572 bp, Gossypium hirsutum
acattagtgcatcttttctttttctctgttcttttaggttgttaagctaatcttgtttgggtattaagtgtgatcgtgtctgctatagcttgctgtttttctctaatctaagttagatttgggtgttagtgtcggagatggatatatgtctcgtacgggtatgttcaactttttttgtctagtttctggtaaatttggaggaacatatctggatggcttaaagaaaaatgataagtcggaacaagatatgctctgggttcattgttgtttggtctcaaagtcgtgattgtttttgattgttgaaattactctccttcatagagttgtgctttataatttagattgggctgagaaatagtagaacctttaaaatgattagggacccatttgcctaatacgagtgtagttgaaattactcggtcatacattcgtgctagctaattcttgaaaatttacgaagtcctcattttatgtgcctttgtcctacaagtggcacatacacggttctgctctcctctcttttttttctttttggtaaatttcctcatttttctgctagggacctttctttc

SEQ ID NO: 7727 - DNA, 646 bp, Gossypium hirsutum
ggttggaatgatgttgtggggatggagtgggaggtgttgtagggggctcctgcccaaatctttctgatcctgtagcagtacttaggatgcagtatgccaaaacggagcagtatggtggacagagtgggagcataatgagggaataagagtcgtggagaggtaagggggacatgcgcattcgcaggtagtataaaaccaaattcctcagcagcaaatatttctttgctgcacactgtataatagttttttgtctttgttttcaatgaaaatgatgataggggcaagcagtgtcttttttggtaaaaaaatatttaggtccctttgtaatatttgcagcagcagtctttgtatttgttgtatttgatggaaaatacacaaaaataatctgtctaaagtttaggagggccaatccagcaatttcactgtttctagtagggtgtaaacgagatactttgttgcaagctattcaaattcagcttgaaaaaggtttcgaattcagttagatgtcaagctgtgttgaattgtgtattttgcttctgctcgagcttagcttatctttattggtatcgcattataattgagatttgcaagggttgatcagttcagaggaaatttgtatgttccgcaagagcgagtttctttatat

SEQ ID NO: 7728 - DNA, 580 bp, Gossypium hirsutum
  misc_feature (536)..(536): n is a, c, g, or t
agttgttcttttctttttcttaaacagtctttgaatcttgaatggatctattgtttaactaattctcttattgggtttgtttttaggaatattgcaagagaagcgggcagataccagcatttggagactgggacaatgcaaatgagctgcctataactcagtacttcgaatgcgctagacaagcgggtttgattcgtttcagctcttcatctggagaatctaacccttatgttgctgctcatgacttgtatgaaacagctaattcaaggaaacattctcgtaatcttgctcctcctagaaaggtcagttaattaaattttaataaagttgtagaatttgtcatgtttgttgatgtagaaaaccccaagtttgaacaaaagaaaaaaaaaagaatcatttctgaaatttccaccgaaactttgtacagtggggacttggagaagtaataaagcactaatctgtcttcaagcctttttctgggaacttttcttatctaggcaacagtgttagtacacaacactgcaaccttttcccanaaatctaccttgcatcttgcagaatttattattattattaatag

SEQ ID NO: 7729 - DNA, 665 bp, Gossypium hirsutum
caactacaagcctcaaattctcgtaagttcacgtaatatgctgtttctcatatgcaatatcagtatttcattggtcgagagcggaaaagccagaaaattttgttaggacagaaattaaattataatttttatgatagttacaatgtaatttttaaagaattaaattaaaattgttttatttttagagaagtttaaaataaaattttacctttactaatttaaaattttaaaaaatttaaatggtggagcctaccagctccctcctagattcgcggatgacatctgaattttgagtttttcactttaggatcacattaagaaggctgagaaacaaccaaacctcaccatgggagtcctagtctctactgtcgccattatcctcacgattttcttgaagctcatttttggtggcaagaatcaggttggtctatgtttctctattctgccgctgtttgtatatatgttattcaagttcggatttgacatttgtccggaaatgtgcccgacatggatgtgtttaatacccttttcaagaatgcaaggtcctttgaaaatccttggaagattatatccgtaatggatactttaagaactagggttgttcttattcccttggttaatgcttgtgcagcaatgcccaagaatagaaacgaaaccagtacccg

SEQ ID NO: 7730 - DNA, 616 bp, Gossypium hirsutum
atttcatgaatagcactgtactgtatcgggatatcatctacatgatcttttaaaatctgtgaaacagtctcattaaatagttttctaaattggttatttataacttcatcttttgtaggtattggctctggaaaacagattgccataggtactggacaatttgaaaatctttcttgtgggtaatttctttctttttcattttttcccctccctggatgtcaagctttaactttcaaaatatgcaatttccatctacaacattgatgttttccccaacacttgcttatagatatttttattattaattctgtcctaatgtgttttgttctatattacgacgtaaaggtgcattactgatttcttatttaaaaggcaaatgatttgacctataacgagtaacattcccccccccccttatagttgcaacatcccgaaagatgttcatcttgtttcgggaacctcatgttaactatgttatggaactgtacggtaacatgtacttcttgtaggattgtgctaaagagtattggctataaatcagtgccagtcgatgatttgccatttgataatcagaaaggtaaagcaaaaaaatagctttaactagtattgtttcctg

SEQ ID NO: 7731 - DNA, 520 bp, Gossypium hirsutum
  misc_feature (499)..(500): n is a, c, g, or t
  misc_feature (502)..(507): n is a, c, g, or t
  misc_feature (510)..(511): n is a, c, g, or t
atcaaacttatacatcatgcagcagtttaaaaacttgataataagagcccaagcctttcattaatagcagaaacataatgcatcaaactcaaacaaagcaaatgccatttttttatttttataattaattttaattgtttatgatgtaaaattaaagattttatatttaaaatagagaaaataacttaaaagttctatataatttttttttaaatatcatacaaaagttatcgattatttgttatttacttgaaaaaaaattagaaatattaataataataataattgaaactttaccacataatatctacaaggcagaaaacaaagctcattttgtcgaaataaatcaaaaataaaaaattaatatggaaaaaccaccaaccgaagtgaattatgatggacggctcaaaaaatccaaaaaacctgatcgacccactctccccatcttaaaatgttgaactctacacaaccttgcatgaggagaacaagctttgccgtnntnnnnnngtnnttttttttt

SEQ ID NO: 7732 - DNA, 635 bp, Gossypium hirsutum
caaattcctctactcatggtaccatcttttcacaattatattggccatgatttcacatagatcaatagggctaatcaaaaaataatgacaaggattacccacactttctacaatagcctgaatgctaggaaagtgtatgaaagtatcaaacttcatcttagagaaaagcttctcaaggtcatccctagtcctctcatcaaccaaatcgttgccaagtttttgagaaagcttggcacccaactcaacccaaagaacaacacaagtaacagaattatgaagattgtttataattgatacttgaaaaccttcattgagaagcttcaacattgtgtggttgccaatgaacccaacttgaccaataactagaatattttttccccacatttctcctcactttatggtcttcaaagctttagcaaaactgctttgcttattgccgaaactgaaggctgaaatgttctaatggagcaataaaaaaatgtttgtaacgtattttggtagatccacatagtagaatcacttccttgattccttgccttggtgaacaatattattgataaaacaagtctattgaaggacatcaacccattgtcctgcttatatgctgtcaaatacactagcaacaaggtagtgca

SEQ ID NO: 7733 - DNA, 901 bp, Gossypium hirsutum
  misc_feature (146)..(146): n is a, c, g, or t
  misc_feature (212)..(212): n is a, c, g, or t
  misc_feature (763)..(763): n is a, c, g, or t
ccttctgaagatcttgtgtaaattcttcaagaaaacactccttccttccataagatttatggccttcaggtcaaattcctctactcatggtaccatcttttcacaattatattggccatgatttcacatagatcaatagggctaancaaaaaataatgacaaggattacccacactttctacaatagcctgaatgctaggaaagggtatganagtatcaaacttcatcttagagaaaagcttctcaaggtcatccctagtcctctcatcaaccaaatcgttgccaagtttttgagaaagcttggcacccaactcaacccaaagaacaacacaagtaacagaattatgaagattgtttataattgatacttgaaaaccttcattgagaagcttcaacattgtgtggttgccaatgaacccaacttgaccaataactagaatattttttccccacatttctcctcactttatggtcttcaaagctttagcaaaactgctttgcttattgccgaaactgaaggctgaaatgttctaatggagcaataaaaaaatgtttgtaacgtattttggtagatccacatagtagaatcacttccttgattccttgccttggtgaacaatattattgataaaacaagtctattgaaggacatcaacccattgtcctgcttatatgctgtcaaatacactagcaacaaggtagtgcagcaatcattagtaatgaaaacaagatttccatcttcataacaaagaatccatataanacatgccccggaaccttaataactaccttgtaaggcaatattgtgcattttgaaatatccagctggggtcatatgaatcattttctatatggctgtacatagtactcttttgaactcatgtatcttgagaatcaaaaa

SEQ ID NO: 7734 - DNA, 260 bp, Gossypium hirsutum
  misc_feature (189)..(190): n is a, c, g, or t
  misc_feature (225)..(227): n is a, c, g, or t
  misc_feature (240)..(242): n is a, c, g, or t
atcttttggtacttgctatttccgttggctccctaactgccctttctagttctgattttgttgtgtttattgaggaacttaaggttgcttggaacagaaccggagtaaacaacaacaagatttaactaaggatgaaagtcagtttaagtcagaatacaaggagcgaaaaggaaaaagattggaatacanngttcatcatgaattttacttattatatcttccctnnntattgctatttannnttttttatactgctatct

SEQ ID NO: 7735 - DNA, 639 bp, Gossypium hirsutum
ctgttacggtaatttctttgatcctagaaggaaaagaggatggcttgttcagcatcaatttacaaatggaatctcatcctgacttgtgttttgcatcttgtactatagatagtatcttgtagatctgttaactatgataatgcttttcaatgatctccaaaattggctccaagcctttttgcttaggaggacaacaactagtataaggtaggaataatcccatagatttatagaatctctcattttgcatcgaggaaagacaaaatgttgcaatgaaaagggtagtgcctgactgatatgaaaggtctagctgaatgcaggctgagtgacatggtttgtgttcaaatcccattgggggtaatggagcaaacttggtaaccccactagattttgcgaggccttctctggaggcccttaaccttccaagctatgaaaatgtcattctaattctggttgaaagtatcaagttcctggtctttgttgtcaactatttttctcccccggatgttttatactgtagtattttgacttgttcaaatccatcatttgcacttcatctgttaacattcggcaagtgatcctttatttactttctctgctctcatttaattagttttatcacctcttagaagatgatgt

SEQ ID NO: 7736 - DNA, 611 bp, Gossypium hirsutum
catcgtgctattacatccacccaaaccctaattcaacccccaatcctaaccctaaccctaattctactcctaattctcattcacagcaacagccctcacccccacaatcacagcaacagcaacagcagcgacaacaacagcagcagcagaagcagatgcggccgttgaatcaagctgaacttcagatggcttatcaggatgccttgcgtgtttgtcaccctgattttaaacgacctttttcttcccttgaagatgcctgtgaaaggtttgtctgctaattctctaactttttaggaaatggaattctgggttttgttggttcttgaaattttccttttttatgtattggttggtgtggaaatggccaaaaaaatgataattgttggacaccatataatagaaatttcttcctttctgttttgttgttaagtaaaggtgaaaaggtgggagttcaaactttagaaaaaaaaaaggataaaaatatgagggtttgaaataatggattctttttattattttattgaattttgactagcatgtgcagtttttggaaattaactacttacttcttgttggttttttttttttaaaggaaggtttcctgctggttg

SEQ ID NO: 7737 - DNA, 625 bp, Gossypium hirsutum
cagaaggcaaacttaacttgaaagatgcaaacgatactgtggtttggtccccgagcaccccaggcaagtccatttccaggttaaacttaacttcagagggaaacctcatgctgtttaacgaaaccaactacatcgtttggcagtcgtttgaccacccaaccgacactttagttcgtggtcaaaggttagtgccaggacagaaattgaaagccagcgtatccccagacgacccaattgaaggtttgtatgcatttgctgtcagtcgtggtgtattcactgctaacatggatttaaatcctccccaaatctattacgaaagacctgtggaagataataactcagacaatccttatgttgaattcaaaaataaacggtttgggtctttctatgtgggagattcgggtagttttatacagttgggaagtgatgggcacttgaaggcatatgagttgacagaatctgggtgggaggggattgatttactggaccttgatcaatgtagttatccattgcaatgtgggaaatatagcctttgctcaaaagagggatgcagttgacactgtaagtgaaagcgaaaccactttttttaacccgaataaattctataagcctagatcatgggtgt

SEQ ID NO: 7738 - DNA, 669 bp, Gossypium hirsutum
cagtgtcatttctgtccagtttacttatgtgatgttggtacttttttattattatcaaatttaaatagatgaattttaatttatgcatgtatgagttttccttttagatttgaatttcataatatgtgggatatatttcgattattagactgcttgattcttctgattgttgttacgtggatgtattgcatgtagtcatagcaggtttaaagaaaagcgtagggactaagtttcaaaatttaaaagagtaaaaggtgtgagagaagaaatagacctttctgtccctcattgcccttaatcatctaaaaccatggccaaatccaactaaccgttatatttccattattaaagtacaagaagaagatatgattgtttcaaaagcccacaggcgcctatttccccccactttttctccatttctcattaaattccctttgccaaaagctttaactttttttataacttagcatcatcaaattcacaattacattccactttgggagtctgggtatttgtatttcttccaaaccaagaatctgtgatatcaaaacaatgccaccaagaaaccttcttgttttcttgctgtttctctttcccctcctcttcaccttcgattccccatttataatcttagctgaaagtaccagctttaatttcccattcttcact

SEQ ID NO: 7739 - DNA, 636 bp, Gossypium hirsutum
  misc_feature (536)..(536): n is a, c, g, or t
ctgacactggggttgtttattactataacgcattaacaggagagtcgacttatgaaaaacctgctggatttaaaggggaggtacatgtggatgtgcattcatatgttttatattagtaactttgttgaggtgaaccattttttttattgcaagcacttaaattggctgatactgtttaatactaatttcccaaaaattggctgattaaccttctttgatagatgctctaggaactttcatttacattaaagtatccagaaaaaattagagtatcaaacgctaattgtatgatgcgttgttagttaaaaccaagattccacattgttcaattgcagggaacttatggaaacgttgtataaaactacatagccatgcatatttgcatttgtttgtacttgtggagaatatttgatattttttcttgctctccaccagttttcataaccgaagttgaaaatcagcttccgtggttcttgtgtatagaaaattttctataaccattttgtcttggcatctggattttggtggcttcttanatgctattgaacttttttatttcgtttatgtgtgcagcctgatcaagttaccgtgcagccaactccagtttcagtgtaagttctttactttctcctccac

SEQ ID NO: 7740 - DNA, 615 bp, Gossypium hirsutum
tgaggtcgatggaggagagacttgaatttaagtttgcatgttttcaaccatgagatacgtactcggcaatcaattaatggcaattgtttcttgaaaagcaaaaagctgaacaatttccagttgggattaaacatgttttaagttaaaaaacatgttcaagaaaaccaattgttgaaggtacgagggtgaaatttaaaatctactatgacattgattcattgatttcatggggttcttgctctttaaccatacttgtggagagaaaatcttctttaggaagctttgtgagaggaaagttgacacagttccagattttggtctctaaaattatgggtgtgaattcaaaatatgctagttttttggatacatgattcaaaattgtcaatgactagagcaacgaagggagaatgtcctcaccattatttggttctatgcttggtcatattttcgatttgctgaggtattgtgctctatggtttgtagattggtgcatggttttagagatatgattggggatttgattatgtgtcatggtgaagagtctttagggctgattgctttgaagaattgtttaggctttttgctttgtttcgtgggtgtgtgtgtttgtaataa

SEQ ID NO: 7741 - DNA, 643 bp, Gossypium hirsutum
tgaagaaggaatggaattcgacattctgaaacgacccctaccggtgaagtgccaaactacaacctcttcttctttttcacccggtaaacaacaaaaagaagaaggagaaatcaacgttaaagcagctggtgaggggaaggaagagaagaaagaaaagaattccaaggaaatagatgatgatgatgatgatgggtttaaaactccaacatctacggattccaaaatcccagctgagccgaaacaatgcccgcctgcacctagaaaacccaagccaaataaaagaaaagcatcatcgcctaccaatggttcaaccgcagtcaggaatccgctactgctggatctttcggaagagctcgagtccttgagtcacaaggtcaagaaaaaaactcgaacacaagagcagcaataatttttattcattgttagcggtattaagtacacacccatcaaacattaataacttaattctttatttgtatttatgggagttcattgtttttgctgacggtgaagatcatgatgatattgaagcttatgatataatgttggtgtaaagttaaaaaatatggaaaaagatgaaattgtaagaaagtagagatactaagaaaaagagatggatatatatagagagagagcgaggagt

SEQ ID NO: 7742 - DNA, 633 bp, Gossypium hirsutum
acgatttcttgaatcgggtaggtttcgtgtcgatgatcggagcaacggttgttgattttccggtttcgtctcagccatcttttcccctgcaataagttgaatcaattctattatatcaagccgcaacatgcagagtcattcaaagcaacaataatagcacaaatctattgataaaaattttaaagcttaaaaagggtaaaattacctctccaatccctctcaatatcagtaaagagcaaattggtccgtttcaaaagaatcaaacaatttaatctttgtcaattttaaaaaagagtagccaaaaacaaaatttcaacaaatttaacctcaacatttacacatttctgagctaaatttattaatcaaggctaaattaataagatgtttgaggactaaattaattattataccatggaaaacattctacattctatatcgatattgagatgaaacctaacttcaaattgataaattacatgcatagccaaaggaaaattatgaaatttaatcctttttcttcatctttgtcctcaaaaaatccctttcacttcaagaaatttaacaagaattttgcaaacccaaatcataatttcacatcaaattaataaattctacatagtttttatcaaattt

SEQ ID NO: 7743 - DNA, 687 bp, Gossypium hirsutum
aatgttggtgtcaaagactctgggaaaacagtgaagcaggttgttgtccatccacaaatttcacaggcatgtacagtgctatatcatgcaaatgaactgatagttgtattgccttttctagttgagataaaaatattattattcaacaatatattgttctaagtaagtcttaaacttccaaatctaaatatttaagttaaattaactggctgcttgtgttatactacaggttcatagaaaactatgctataagcttgtaaaagttcacttattgtaactgctagacatgcagccatataactgctatttcctatcactgaagactgatttttttttaataaactctaaactgtacggtccgttgctagagccggagaatcaacttcatctcttcataaaccaccaaaaaaattaagtggtgttggtcatacaccaaccaaaagggcttccttgggtgctaagaatgtcaaaatggataaggatgcaaaaactgttactggtaattcgaagtacaaattttacagattaacttctttgaaaatcgaggatgtttcttgctctctgcttaatccattcttcaattaattttaatggttgcaggaagagggactacagtattaaaaactcctgccttgggtggttctaaaaacattgtgcctaggcctaaattatcctccaaatcttctt

SEQ ID NO: 7744 - DNA, 619 bp, Gossypium hirsutum
tgaaaaggtgaatactatttcttatgtacttgcttttctggggaattcattgatgataaaatattgagactgacagttccattctgtatcgttaatttcacatgttggtgtgcttatattccgtgtctatactgattaaccacttgggtttcttcttttgcctttttcttttgtgcttggtatttgtgaggctggagatagttttaaaccaagattaatctgcatattgcaatgtcttttaattatggtgaaactagtaaaccaccgctttgccttatcctggatttttcattctgtaatcctggtaggttaaatactgaggcagacagcctcatccacatttttttttgaccaccttatctgaccttgttattttgttgagtaagttggtcagggtttgcatgttttgagataatgggatgttttgcaaggtatgtgttgctgtcagaagtttttgtggactccaatgaaagctttttggtatatcggctagtactggcctagcttcatggtcttcaatagaatgaatggctttgttcccattttgtgtgtagcgttaggagagtgttggtgtagtgtgcttatataatggagttcaaaatttttgtatattctgtta

SEQ ID NO: 7745 - DNA, 609 bp, Gossypium hirsutum
caataatgagatgctaattaacagtgtcaaccttttagaaatctataaataccaagcattgtcttcaccattggtgtgcataaaaactgagaaggagagaggtgttacatgatgaaaagagtcgtgtttggtagccaaggatgacttgcctgcatctatcaaagaggtttaaaatctctgtatcaactatcaaccatgaatctttttcatggtgccaggcagtcaccttggctaacctgacggcttcttttccctcatgttagactttctcttctttgtcaatcgtctatctcaaattatcatttgtttgggtataaatgaaatatgagaagagacatctaatccataacttacattttcttcagcaatccaaattctgagaggataaatagtaagtgaatgtcttgtatgtgctattctcttttttaggtaaattattcagtgaaattggcatttgaaaatgtttcaaatttacaatttgaatccgatataccgaatttatgcatttaattactttatccataaaatttatggtaattgctcattcaaccgttggatattagagagtgaatcgcatgtttaaatatggcagctggggttgatttgcca

SEQ ID NO: 7746 - DNA, 601 bp, Gossypium hirsutum
  misc_feature (582)..(582): n is a, c, g, or t
tcttgtgtggatgactgtgattcgcgccacctactcttatggcttcatcctccaacaaagattttacaccacaagtgggtttccaatggaatttcacatagtgtgacttcccagctttgttgattagtgtgtaggtatgaacaccagagccatccatgtgcctataatcctgtggaacaccgatgtcatcaaacaggaaggtgaacatgtgcaagctttcgggatggtgcgaaaagaagtccagaatcctccagttttcctgaatgtgggacttcgggtttggtttaagagcatggaccatatcagggaacttcattccgtcacggatgaaaaacacagggaaattgttccccactagatcaaaatttccctggttcaataacaaggaatccaaaaaagcaaacaattaacttcacttctgatatatggtatgtctaactcaaatacgtaaacatatgtgaacatatatatactttctctgtatatgcagttagcatgtatatagacacatacctctcgcgtgtaaaatttcacagcgaaacctcgggggtctctcaaagttcaggactaccgcgttcatgnataaccgtggagaatctat

SEQ ID NO: 7747 - DNA, 557 bp, Gossypium hirsutum
cagcaaaggatgccattgtaaaagatctgggtgtcttagaaagtactgtgagtgtttccaagccaacattctttgctccgaaagctgcaaatgcatgggctgcaaaaaatttaaggggagcgaagagagacaggctctatttcatggtgactatgccaacaatatggcatacatccagcaggcagcaaatgctaccacaactggagcaattgggtcatctggttatgcatctgccccagtgtctaagaagagaaaaagtcaggaattccttttggggtcaactgccaaggatccatctgttcacagtcttggacatttgcaacaggtaataggtgtatgcataattatgggcatttggctttggataaactttccaaatcttatttgaataatcttacaatagtacttctgttttgatagaaaagaatgtgtgctcagctagtgaatttagtttttccgttctcattctcctgccactgtcagtgtaaaagctttctcatctttgcttttagtttatgcttctaaaacttatggatggtgcttactttatatgtaat

SEQ ID NO: 7748 - DNA, 633 bp, Gossypium hirsutum
aaagaattggcttgattgaagtatttgggaagtcgattaaatcgaattaatttttttattattaaatgggttaatttatttcatatattattaaaaatataaatttaaattgtaatagagttaacatttattgtataaaaatattttgaaacttattttttttaattgcggtttaattccaaataaaagctttcatttatagaatcatacaaactttaaaaatattaactccgtttaacagtaaatgatatatatatatttttaaagagtaaatataaactatattctgatttgaccttatttgattctttttaatagtatatggactaaattaattagatccttataataaagggacctctcaagtagattcattgcaacaaatttactctttttgaatcgattagactaagaatcagtcgagatacccattcaaagtaaagagttgaactggtcgattagactgattgaatcgatttttaaaaaatattttttattaatttattcaattgaactagtttgagagattgatttaatcatcttaaaaactttgacaaatttaaaagagtgtttagggaaaaaaatggaaatagcatattgccaattgggcaagttcagtaagcaagattgagg

SEQ ID NO: 7749 - DNA, 645 bp, Gossypium hirsutum
cagtagaggaagagggttgagcattatgcatcagcaacgttgtaccgggctgcaaataataacaagaagcaacagagttagcaagtgaaatgaagttcacaccatattttattaaagtacggttatgtttttcaggtttatttagtttccaacaacttctaatcaattccaatgataacctggctattcgatgcttcagttgtttgattactttgttcagtaaaaaagctattatcagaagcagggaaaagggaagactgatgtttttgcatgctgggaaagacatgcccgtgaggggattgtacttgtgggacattgactgtcggtggaactggtgaagagctgctggaacttgtcaaagtgaaaagctgtccttcaggtgctgctggagaaatactgtttaatgaagtgttctgtccagatgcagttgatggagcacctgaggtgcccagtactgctgagacattatcaacaggtaccgcagagggagctgcaagatcaaatagtaaaaaatccaaaggatttgcattggaggccggaggtgcttttccctttgaagagagttcatctgatgactggttaccacctttgcttgatggcggcacttgctgcatatttggtgttgccgcagcattagacggctca

SEQ ID NO: 7750 - DNA, 618 bp, Gossypium hirsutum
cgagaacttcggtactgcacagttgtgattggaaatttctgtttactgctacttctataacgatgagaacgggacaacgcacctgtgcgggagtccatagttacagagtatatacatccctacaaatgttatctcgttagaaacttcctgtaaagactattaacaaatttctttgattctccaattacgacatggacacatggagagatacctgtgcatcaccacagaaaatgagatgaccagtatgatcatggtccattgaggtaacctcactatcgaagatggatttggcaataactctccccgtgctgaaattgaacacctggtgtacagaaaaaaaaggaagctatcaattaaatgatgggattgattgaagtagataagaatatgcagttttagttgctgtggacaactgacagaagtttagattcctaatttttgaaagcctaaatacgagagcttagaaaattcaaacacatacagatgtacacctaagtacgaaatgaatgaagattaaaatatatggaagcagccaactggctatttcatcatggatttttaaacaggcagaggcctgtctcgtaccacaagctaaacatcaaaattcacaaacaaatc

SEQ ID NO: 7751 - DNA, 644 bp, Gossypium hirsutum
gatttggacatctgaatttgcactaaatttgtagatttagatttagatatatgatagattttgaaaagattgattttacattttaacagagtcggatatgaaatttggtggatttagatatcaaacgaataataatgtctaattcgaatttgaatagtaacacttaaagaatttactaataagaattctaatttttaatagatttgaaaatttaaatttggataattagaaaatgcagatattcctatcttatacaaactggagatgagtaataatgaagttctaggaaaaattttagttgatatttaagtaaatcttaattttctttcaattttaggatttagtcactataatataaataagattgaattattgttttggtctttatattacatttaatttgaattatttgagtttaattttaatatttaatttggtatttaaatttttgtttttttcttaaactaaatcttatttattttggtagagcacacatatcaaatatttattgagccacataatgcaatttaattttaatatcaaattaaatatttaaactggtaaatagtacattaaccaaaaagaagaaagcaaaaggggccagcattaacaaattgtgaagaaaacgacgtcgttaactggat

SEQ ID NO: 7752 - DNA, 540 bp, Gossypium hirsutum
  misc_feature (527)..(528): n is a, c, g, or t
cagtgatttctctttcgatatcgagtcaagctctagagcaccgtagcctttttatcgttgaaaaataaatcttatgtcaaaaaggaattcaattcattacagcaagtaattaaccgtaacacgatattcttttccttttagttattctcttttggttgtgcagagtgaacttcatggagtagctgctttgcagtggtctatatgtcaagattcacttagtaggtaaccatttaatctgtcaggaaccttaacggcgtgcatgcatccttagattttggtattacattaccttttattgcatacaagatggactataagcaactgcaattgttcgcaggtcgaacgaggctcgaattatgtatgagaagctgcagtctcatccaaaccccgaagtaagcaagaaagcaagccagtttatgtacagtttcaaggtaattattgataatcaacttatcggttttgctcctccatatcacctgtatactttaaccaatgtaaacaacaaattttcatgtattggtaggccnntggaaatgatga

SEQ ID NO: 7753 - DNA, 649 bp, Gossypium hirsutum
agtagcctatccagcctattcctggatgttggtttcgtgcgacagatttaggtctacaaggtagttgcaaaggtttaaccatgcaggttaaagggtttaactctgttgtaatcattccttatagaaagaaaactgtatatattgtacaaatatcattggttggaagacttctcatctaagtttacttgtactgttgtacctgaacaatgttaaaataggtttaaatctctcttttaactgtaattttttggttcaagatattcttcctccatgtctaaatatctccccctttcatcaagccacttgatttcatgcttaatagaggtggtgagagaagtggaagagttgtgatgtgaatggtcttattcagatggtgtgaaaggtattggtacaggataaatggaaaagcaaagagaataaacatatattcatttcccaagttgctgtactagaatttatacaatcaactttaaaatcagaatgaacaaatgagtaaaaggaaaggaaacaaaagcaagcaaagaatggagaagcagcagcaaatcaaggctcacatcatatatttttctctaagaattatatacaaagattcatttctctttccaatattttgattaaagaaaacagaatctactcagaactccgctac

SEQ ID NO: 7754 - DNA, 658 bp, Gossypium hirsutum
aagcttatacgaacttaatatcgcgttcgatattcctctctgcctctttttaacacatcttgcttcacttgttttgcaaagcttcctctcgaccaaacagccctttatcatatgcaagatactattctaaggaaatatatatatacgagatactgattcttagataactagtaatcatatttcaagatatcttaaaaccaatagactcaaagatctagaacagttgccataccctgactgaagcttcaggtctagatccatggtgatcctacaaattacaggaaacaacacagatgacattagcatttagaaacaagaaattaaagacatggcattaacctttgattcaaaaaattatcatatctgcatcgatcttcatagatatgtcatcatatctgaatattgatggagcatgaaaagagggaaacctcaaaataaccaaacacttgggtacctgggctgaaaaacattgatgctcaagttgccgataggggagcagtattttctgttttaaccttctattctcagcatttaactgttcattttcctctttcaagtgtttaatctgggcagcctgttcatctgctgttatctgcactgcaaaatgttaacctcaaaactacagaaatcatggcaatcataaagttctaccatttag

SEQ ID NO: 7755 - DNA, 622 bp, Gossypium hirsutum
ctttctattttgcttttgctgatgagggatgactaaaattatcattatgcagcattagaagaaaattttgcagcgatgatgcagatcgattatagttgtctctgcattacaataaggtaacatcattctctttgaagggtcttggacatataagatcaagtggaaatggagaattatagcaagagagatcaggagtcgggtatttaattaacagatttcttggttttcccaagaacttacggaagtaagtttgtggggacacatcttggattcatccacccgcagagccctatcctcgtatttctgagccgcagaaagctgctactgtataagaaattgacatggatttaacagggtctgatcctcctttaagatagcatctaaatcgtggattaagattcgggcctggatacaaaaagaacagagaagtaaatcgccatgcaatccacagactgcggcaaagcacagtgaaaccggaagtaactgttagatggcgtactattcaaaggactttttttgcaggcattaatcagttctaaatcaaatctaaatgttcattttttttggggataaaaataaaaatttaaaacgaatccgacaattgaaatacaaacaagacaca

SEQ ID NO: 7756 - DNA, 576 bp, Gossypium hirsutum
  misc_feature (51)..(54): n is a, c, g, or t
aaggacgagggtatagtttagagagagacagctgatgacaattgaaaactnnnnttgaataaaacaaatgtgaatagagatgaaggactaagaaaaatcacatggaggagacgaacaacctgaatcggcgtttgctttggtacaatctccccataaacaatttggtttttggtacatcggcaataacaaattgatgattattattttgagatttcaacttcaagctgtcagccacaagttctcgtccttggaaaacaatacttgttcctttttatttaataatcaacttccatttcaatggcgtccactcttacattatttatatatgtttagattgtttattcggctaattatagttgaattttttttttacttattttaatgcttataataattaattatattaaaattgttgacccaaaatgtctaaccatgaaacgggtgacccataagaaaattgcaccaaaaatattatttacaaggtaaacccaaaagaatttgggtggaattaaattatatatttttatgactattttagtagcttatatttttataattttaaaagattaaataaaa

SEQ ID NO: 7757 - DNA, 587 bp, Gossypium hirsutum
  misc_feature (501)..(501): n is a, c, g, or t
ttatcattggggttctcttcatttaagatggcattgagattaatggtcctactatcatctccaaacccatcactgcaatcagagctttgaccttccacaacctcagagctatggttttcctcaaagctccttgttttgcagttccccatgaaatgaaaaccccaagaagctctttcattttccatctctgggaccttacaaccataactgtcctgcgtggaagaaacacttgagcctagaatactgtagttttgaccgagagaaagggaacccatgtctgggtaaaccatccccattgaagaaccaagagaagatgaagaagaagagggaatagtggttgagtagcagcctggtctattcatgttgaatggtgctggtgctggtgcatatatataacacacttgttaaccatgcttcatttcctcttctgacaaatgctgttatacaattgttacaaagtcatgttcatgcacagatgattttcaaaaacaagttttgacnacagtgaggactggaaagtgaagttatgcagcagctgggagaaaaagaaaaggattaaaacttgaaacagcaaaaacagctaggga

SEQ ID NO: 7758 - DNA, 586 bp, Gossypium hirsutum
  misc_feature (506)..(508): n is a, c, g, or t
  misc_feature (510)..(510): n is a, c, g, or t
  misc_feature (527)..(529): n is a, c, g, or t
  misc_feature (570)..(572): n is a, c, g, or t
  misc_feature (574)..(575): n is a, c, g, or t
agctaaaagcttcattgtcttgtaatgtgtcttgtatgctcattatcctaattggttatggtatgatttgtctttaattgttttttttccctaatgatttcttggctgaatctacagcaagacataaagaatctatatgtttccgggcacattgtgttttatctaccacttcaccatcagcatcaacgaggacaacttcagtgcttgatgtagagaagctaaggttgccattttttgaagctcagccaaattcaattgtggcagacagagaacggacctatattgggggaactggtccaccctcagaggtcagttgtgttatcttggaggatatgcagttgagaatttcagtgaatgaaatctgtattttcggtgcacttcttgaaataaacgtgtttcttccttcatctaattcattgcctccccaaaaacttatgaatcatttattgcatatgaagttcatgctcagcaacgagtcgtaacttccaatgaactgcatttggttnnnantgcataggtttttcttnnntccatttgagtgcgtgttttaattccagcaattatgttttnnnanngattttttaaa

SEQ ID NO: 7759 - DNA, 557 bp, Gossypium hirsutum
  misc_feature (107)..(107): n is a, c, g, or t
aaatactgcaacctgattaagtaatagaaaaagaattagaaaaacaactacagataatggcggaaaaataagcaacagtcccaatcagcattaacaagcaaaacaanaaaataacgttatgcatgagaagactgtcaccagataaactaaagaagattttgttggataaaataaagagggttagaattccactcccaacccaaatacaagccaaaaaattactgaaaataaagggaagctggaactcctgaaataaatgtggaacatttgtatcttaaatggataaaataaatgtgtaacaccaaacaccaaaaataaatgtccaattacagatgactgctatctcaaaggaagccatctgtagcatgcactagtagataataattgtttgaactaccagcgactcacaagttatatcttaaattgatccttcagtaaaaaaccaagaagtagtaaaaaccattaaacaaatatatatccgaaatatataccaatatggtgacagcctccttcactactccagctattgtcactgtaactgcgctggttacagaaac

SEQ ID NO: 7760 - DNA, 500 bp, Gossypium hirsutum
  misc_feature (295)..(296): n is a, c, g, or t
  misc_feature (447)..(451): n is a, c, g, or t
  misc_feature (471)..(482): n is a, c, g, or t
  misc_feature (484)..(485): n is a, c, g, or t
  misc_feature (487)..(488): n is a, c, g, or t
  misc_feature (490)..(494): n is a, c, g, or t
cacatgattggcaacttgtgagagatagtgaactatggaagttgaaacaggaggaaaatgacatcttgcctgctctaaaactaagttatgatcatttgccctggtatttaaagcaatgttttgctttttgttcagtttttccaaaagattttgaattcaatgctctctttttgatcccattgtggatggcaaatggctttttgcaatcaccatacgaaaatgaagagccagaagatattgggaatcggtatatacaagagttactatcaagatctttcttccaacaagttgaagnngacatttttttttccaccttcaaaatgcatgatttagtacatgatcttgcattatcagtggcgcatgaatgaggtgaattcatgtaaccattattcgactgggaatgttcgacatttatggtttgatctatcaaagcaagatgcttcccannnnncaaataacttgggttgtggnnnnnnnnnnnngnnanngnnnnngaaggc

SEQ ID NO: 7761 - DNA, 582 bp, Gossypium hirsutum
tgatctgtgctaatcgttttactactttgtcttttctgtggaatgttggaaactaccttatcttatttgatggcaatccaatggtttttcctcgttgatttcggtgcaaaaatgtttgagcatttaggtgttcttatcagagcatttggcttcggcttccgctcaagtaccgagaagataataataatctataaaaggaaagctctaagtaccgagaagataaaaaataagggttaaatctgagatttattttttatattttaatttacataaattgatatctcaatttgtataacttcgttaggtagttttaaattttttttattaaaatatttatttgaatttttataaattattaacacaattttctattaaatttgatttcttttgttaaatgatgtcgagtaaagtttttttttttaattttaaaatgttacactaacaaatttaatagatatacgaatagtacaaaaaatgtaaatatattgtagctttttactttataatttaataaaaaaatcaataattaacccaatacaaatagtgggtaataataataataataacaataaaggatttggt

SEQ ID NO: 7762 - DNA, 627 bp, Gossypium hirsutum
tttttgcagcggcgggtgatgggatatgggacaatggagcatcatgcggaaggaaatacctggtgagatgcataagctaaaaagggaagagaaatgaacgttttaccatcaaacttattcattaatctcgggaagttctacatcaacttcggcctccccagagatagtagcaagacgatttgtagtaacagtggcacggtttcttcgtctgatgcaaacaagcacgaggttgagaagaaaaataacagcgatgccggttagctggatcaatgccatgatttttgtgtccccctccatgttaatgtcccctgagaaacccaacgaaaatcttgatgatgaagatttcatagaaaatcccattgttttttaggttaagaagaaatatgtgaagcacacaagacgacaaggatggcttttttatgtgatcgaccaaggcgtggatggtagtaaactaacaaagctggttttatataggcaaggtaatgcacagaaaaagacaacatggatgtagattttacgtggtaattgggatataattatgtctcgaggcctatttttttggtcttctaaaaaataatttttcttgaactatttgactaactaaaatagtcgagcctttatagtaca

SEQ ID NO: 7763 - DNA, 295 bp, Gossypium hirsutum
ataattcaccaaataacttcacatggaatatgtgtacatcaaaagggcgataagtgactagtatataatcttcgtacacatccatcaccattggttttgcaagcaatggtttacgacatagtagcgagctctgatcaaggtgatatcgaggatagaaaagcaactcatacctgtatacaatcatttacatcaaccacaataaataacagtagatcatgaaatttaaatgatgaaatcataacacatatgtattccttaaaaacaaatggcagaaagaaagaattgaaacttgctg

SEQ ID NO: 7764 - DNA, 557 bp, Gossypium hirsutum
tgggctcaacgtaggttaaatgttactattagtccctctactttttgaaaattgtggatttagtccctaacctttaatttgatcaattttaatccctatatttttcaaaatttaaaattttagtcctgctccaactagtagcgtattcttcaattgggtaattttaagtctttatacttttcaagttttaaaattttagtacgtaaataatagttagcctattaactgattttttagtgagtgatatgtaaaataacaagttgacatgacattatatgtatgataaaatgtttgtcacatcaaattttaaaaatatcgaaacttaatgaatttaatcttatcacttgctaaagactaaaatttaaaaatttaaaaaatataacgaaattaaagtgtagagcatattttgataacaaatgacaaataaggtcgaaatttgaattagaagagtgtgaccgaaagtgtttaaaattaagaattgcatattgagtgtgggataaaaaaacaagtgtataaggggtagacctgtccatgcccgctcgaaaagtgggacggtt

SEQ ID NO: 7765 - DNA, 649 bp, Gossypium hirsutum
ctttaagaaatccatgcttggcacatcttgaaattgagaggaggaaatgcctgtttagaaagaacaatgatgataatcttgtagaagctcttttgcaatattattcaaggtatgccttggccttcaattattactcactgaacttcttccctaattattgtgtacttgctggtcttttatgtcttttacgtacctggtgaattctttacctgaactttggctttatcctattgtggtctgttaatgtgacatttttccagctgatggtttttttttaattggtttttaatgtttatcaattttgatagagttgcagatttgctcacctgataatgctcctcttttggtgctttctcttcctgatgtttatttggtgaatttggatgttgcaaaaattatctgcaataatgatgctgtgaattcaatgttatttgcaccttcggttcttagtaacgtaaatacacatgataactttttattaatattatacagagcctttgtttgctggatacaggtttggtcaccttgcttgcttcacttctgatgttgaggcctttcttcaagtgttaccacctgaaaagaagatggagtttctggataagttaatgaaaaactctaattccctttcagttatgccaactagagccct

SEQ ID NO: 7766 - DNA, 623 bp, Gossypium hirsutum
tcttcctctgatgcaccgcgatgatgctgcaaatgctcttcaaccagtaccctggtttgaaggacgttcgaatggtggaagcaaaaccaggtattgcctttgtggagtatgaaaacgagatgcaatcaacggttgcaatgcaggcactacaaggtttcaagatacagcaaaaccagatgctgattacttatgcaaagaagtagattgaaagaccaaaagagttctttcccgttcctacccacacggcaactagaccttgtgtatgggtggtagattagctgaaatcaaatctaatagctgttttgtgatatattcttttttaactagatcttcagagctgtgttgtagattatagttcaaatgtttattgatgcttatctatttatgatctgttagttcatcttcaaagatatggtaggtttttgggttgcttcactctgggatccagtggttaaccagatatccccccttagtgaaatttggacccaaatgcgaacccacggtgcaattgggccaacaaggtgcccaaccaaccggagttccagtaaaatctaaatggggtttctttatcataaggttttgtgggggctgaagctggtgaggtgatgtctactttatataat

SEQ ID NO: 7767 - DNA, 585 bp, Gossypium hirsutum
  misc_feature (573)..(573): n is a, c, g, or t
  misc_feature (575)..(575): n is a, c, g, or t
tctttgatgttaatcattcttagttcgtttttctgtctcattctatacttgatggaacagtttcagtttctataataagatttctccatttttatatagttgcaaatgcttcaagcttggtggcttgagcaagtaatgttgcaatttatcaggaaaaagaaaagattaaagaaaccaagaaccttccaattgacagccaaaattccttgtggtttatatatgacgtgttgatcatactgggattttgaatattcttgtaataatgtcgaaacgggaaatgccatgatctcctttttaaataacattcttcatatacatgggtgatgaaaatatgtgtaatataaaaattggataatatagatgatgagaagataaatgttgatacagaaggcccaattgtatataatttggagatggaattcggggtcaaatctccaggcttgaaaaacttcacctgattgaactcttctttaagataagagcgttgcaatttattatcatgatttctagcaccggatttgcttagattagtatatctgattagtttaattgttcaacaaatgtagcttatantnctccctacta

SEQ ID NO: 7768 - DNA, 504 bp, Gossypium hirsutum
  misc_feature (406)..(409): n is a, c, g, or t
  misc_feature (411)..(411): n is a, c, g, or t
  misc_feature (420)..(420): n is a, c, g, or t
  misc_feature (422)..(425): n is a, c, g, or t
  misc_feature (429)..(434): n is a, c, g, or t
  misc_feature (444)..(444): n is a, c, g, or t
  misc_feature (446)..(447): n is a, c, g, or t
  misc_feature (449)..(449): n is a, c, g, or t
  misc_feature (451)..(451): n is a, c, g, or t
  misc_feature (453)..(455): n is a, c, g, or t
  misc_feature (457)..(457): n is a, c, g, or t
  misc_feature (479)..(479): n is a, c, g, or t
  misc_feature (482)..(482): n is a, c, g, or t
  misc_feature (491)..(491): n is a, c, g, or t
  misc_feature (497)..(497): n is a, c, g, or t
  misc_feature (501)..(501): n is a, c, g, or t
tattaaataagataaaaataaaatttgctataattattttttatatttcattacttacaaattaatattattatatgaatctttaaatatatatttaaatcttatttttaattataaaaaaataaaatatattttttatttgactagacatggattttaaatcaacatacaccaactcctttaaaattatcattttaaaaaattaataatatagtcaattaaatcttaacttgattggcatgagcattgttattaatgtaagaggatataaatttaaatgtgttgaatcatattatcctcctatttatgagttggagagagattataataattttctatattgtgttaaaaaaacaatatataaatttattatttaactatgaattatagaataatatataagttnnnntnatgtaagancnnnntgcnnnnnngttcgggagntnnantnannnantgagcttgtacctggaactacnccnatttcgatngctccntatngta

SEQ ID NO: 7769 - DNA, 717 bp, Gossypium hirsutum
  misc_feature (223)..(223): n is a, c, g, or t
  misc_feature (506)..(506): n is a, c, g, or t
gaaatctaatgtaagacccaatgccaccttcctctcaatttcgtaaagaagagctggccaaacaaattgtataaaaaagtatcatcattatgtaaactaaaattacttttttaaatttttttagttaattaacaataaataatttagtttttattaaataagataaaaataaaatttgctataactattttttatatttcattacttacaaattaatattatnatatgaatctttaaatatatatttaaatcttatttttaattataaaaaaataaaatatattttttatttgactagacatggattttaaatcaacatacaccaactcctttaaaattatcattttaaaaaattaataatatagtcaattaaatcttaacttgattggcatgagcattgttattaatgtaagaggatataaatttaaatgtgttgaatcatattatcctcctatttatgagttggagagagattataataattttctatattgtgttaaaaaaanaatatataaatttattatttaactatgaattatagaataatatataagttaacctgcagatccacccattccatcaatatgaatatagattcactcctaaagtacatcatttaagaataagtaacacaattctgttagatacaatactaacgatgaatatgtatatacttgtgaaagctcgtatgatgtctgtgctttgatggctatcgat

SEQ ID NO: 7770 - DNA, 685 bp, Gossypium hirsutum
ccgttagagctttgtttgcatgttctatgcagaagtacatgacaagaaattaatgaaaaataccttcaaaaagcagactctaacaaaagcaaaggataaaagagagcatagttacattaacggcatttcagcaccacttactataaaagattgcacaatatcaactgtagcctgagagcttgtcaatgtatccacatgccgcacaaatactttcttactcttcaactcctctaatgcaaaacaacatcattgcgtcaattttagaaatttctaaattatggagcatgcaaattaagaatgacccttgaatttaatcaggaaaagaaaaacctctttgggacgattcagatatcgatagtttctcaaaatcagaaaaagggcgtttcaaaggtctctcgttgatttccagccctgcaacagacaacacgagtattccttaaagtttcaaaattgcattttaatttataatggaagcaaaaggaaacataaaaaagggtaaagaaatgaaagaatgcaaagaaatgacatacagaaagcatcaagacgaaactgagaggctttgcgcttaaccctaacaatcacaggcttatcggtcgtcgattgaggcggagttgaagagctttcgccgttacttgccatgggttttggttggttgcaaagaggtaagggttaagcttcgttgagg

SEQ ID NO: 7771 - DNA, 649 bp, Gossypium hirsutum
ttcaggtgatctttcagcttgcttaagttggtacattaatgctacgttagtttggagcatcattttttacgcatgttttagtgtatgagttagcaataaactaattcaattgataagtttaaccactcccatgccttatttttagctaaggaaaatgaaaattttttgtttattttgaagagatcttaatttttacaagagcttctactcatctttctaatttcaagtttaaaattgtactaattattctttattttatgtctaactattgtaatacaatgtaataaataagctttttcctcacattattacatgagcaaccaaacgattcttaagtgtgataacttgtgcgattattttccttgacaaagttaacaaattggtagagaagaatggcctctaataccacccttaaatgtggctttagttagtagtaagcttgactatcaatgttgcagctgggtctcatgaaagtcttatgtatgcctgctttttgctggccacagcagtgcaagagaatatataaaaataaaagaaaagactcaattgtaagagtatccagcagctaaaagttattttagctgtgaaagctgtgtatgagaactttcctgtatgacaaagtatttcatactcggttacgacaggagct

SEQ ID NO: 7772 - DNA, 641 bp, Gossypium hirsutum
gttagctctctaagcatgtaatactaatcagcatgaatgtaagtaagaacatatttaaccttatccatcaaccagaatgctattgttttgtcgccaactagagcttggtcatggctttcagcataagcaacacacttttccatccacctcctgttggttagcgtgtgaacaatatcacccattttccagtcttcatctctctttctatatgacataacacggcaaaacatacatatagttatcaaatatttcacaagacagtgaattaaaggtcattgcaaggtaaaaagttataaattggatagatgcgcacttaagaatctcaatccatttatcagcaatggccatgtgaagacggtaatcaaatcccacaccaccatcttggacaggaatgcagaatgtaggcattccactcacctgtagcattcgcaatagcatgaataaaacaatgaagataaaggacattgatattctcttgaaagaattgctcatcttgataacaatttataagtcataggatgctcaagatgattcttagaggagttatagaacatacatcttcaccaatggtgacagcctcaggatagagcccgtgaatcatatcattaaccagcatcagataaacaacagcatctacatca

SEQ ID NO: 7773 - DNA, 651 bp, Gossypium hirsutum
ttcatacaccaggttctttcttggtgcatccttttatttgtacttccagaagtgttgtagaaataatatacttcatttggttttgcgtggacaagcatcatgtctattagtattaggagatttcaagttggtttctaccacataagtcaagttgggaggttatattcatttcgtcattcttatttggtttgattgaacaaaggagaccagagcatggacaaagtcaaagtcaaagtcaagaaaattagattgtgaggttaaattataaaaaattaagacgaaaactaatgcataatattaatctttgataaatcattgtataaatgtaaatattcttacaaaattgttgaagttacttataaagtttagattgtgaggttgatactattctttcttttacttcattagttaactttctttcaaattatttctccattaatgttaaatatttagaataaataaatttaagccttaaacgcaaaagttcaattttttttaaatttgcagaacatagatcagtgagtaatgtcaccatttttaatccacaatacaacaagtgattttcactctatcatctcaccttcatgcctaaagactaaaacactcaccaacaaacactcaataatgtttacaactcagtttgcgctatct

SEQ ID NO: 7774 - DNA, 646 bp, Gossypium hirsutum
tattatatcagtttcagacagttataacaaatcaatttgccttcatccataaacagtaataatgcttccggaagaaataagtaacaatcacaaaaatggaggctaacattgtcaagaacaagctaaacatctagtaacattcatcccttcaaacttgaggctcctaaacagttgtttcaagaaaaataaaattacttcaaatttagcagcaaaatattcaaaggaccaaaaagaaaagcaaataaaggtcgacttacggcaagtacacgtcatgtgattcagtaacccgcaaggctctccatcaggagtgtgcactgggcaaagaaatccccaagatctataaatcaaaagaatgaggtgttacaaaaataataaataaataaatacaagagcctcatgaatacaaaagcctaaagtgaacaaaaacaaatagctgactatgttggcaaacagatgcgtactcaggtagcaacttccgaacactggttgttcgaagtccagcgaatgaagccccacgatgaacagaccgaaaaaacgaaataaatcgtaggtagttaagcctctctgcctgaaccgtgaaaccagccctctagtgaaacaaaagaaaactattaatgattttccaacctttacaagtgcaccatat

SEQ ID NO: 7775 - DNA, 608 bp, Gossypium hirsutum
tttctgtacctaatgggaaaatgtttccttcgactggaaggtaaaagctattccattcaataagtttgtttctcatgttgttgataatgattttcaatttgctggtaatgttatcccaaattttcttgaagtacttgtatttgaccccctttgtccgacatatcttcggatacagatatagagatatgatctttcaaggacttttcaaatataaggaataactaagaaaaaattgaatatacctgtgtcgggcacactcctatttccaacattcatacttgaatccgaataacatagagcccattacttgtaggatttccactgtcagtgaagacatgcatttcatttcttggtttgtcggtcttactcaaactaaacaggttaaatgattgttgggactctttattttacttaaagtattgacatttgatacttgtgttctacacatattaggacatacgtgtgagtatatgacatttcaaggattgtcctactacatagaaaaactgaaaaaattgaatgtatccatgttggacagacatgttcaaagattgggctacctgacttgggttggacttagacaaggtgaatttaatttggactggtcc

SEQ ID NO: 7776 - DNA, 652 bp, Gossypium hirsutum
ggtaaatcacacatttgtattaaaagcagacccttgttccattcaggccaaaactgaagggttattctcgcatggacggcttggttcgtccttgttgtcgggggaacttgagttgagattaaacttttggtttttgtgacatgacgcgacccttggggcgcatgtttagccttcttcttagtttttgtgtggagtgagtgactctcaaacataacaaaccaacattttgatgtgttcagtcttggagatgatgttttgatcatccatgttttcttggatttgttgcttgacctccttccttgtatcccctttttcaatgaaaagggctgtgtagcattgtaccctctaaaagcattcggtcatggtcaaaccagaaattcttttaataataaaaaagaaaaagtagtactaaattgttaatttgtttacttttgcttagctaattagtttctttctggtcagttgcaaattacgtggtttaacgtaagatttgctgtcgctgttacatagaaaattgaaaaaaaccaagtcatatgatctaacttccaatatctccaaagcaaaagcaaaagcaaaagcaaacacacacatgtatatatatatatatattagtagccccaaagaacaatgtttgccctactttctccattga

SEQ ID NO: 7777 - DNA, 511 bp, Gossypium hirsutum
attgtcgttaagtattgaaaatcaacttatgttgacaaatactaaattttaattatttttatattgaatcaacctttataagttacacatacacaatacaaaagagaaatgcaaactcaaatgttagttgtccatatttagatacaatttccaacatcaatttttttttgacaccatatcctagcaatccaattcaaacacatcatttcaactaaagttaatattcattatttaaatacaaatatcaaacattttaatccccagatcaagcaaagctttttgaaccattggtatggatatacttttgtttgctcctacaaaaaatttcaactttttgtcgcttctgttgcatagataataacaagttaatatgttatataatattaattataatagaatcatgaagtttaattttaatattgtttatttatttacctcagctttactctgaaaaccaaaattcaactaaaagctctcacggtcattctatcacgcctcggggtacgttcaa

SEQ ID NO: 7778 - DNA, 660 bp, Gossypium hirsutum
ttttttcattttatgagaaatggttaatttccaattttggtcctaatacatttaaatttgagttttaatcctcatactttaatttctaacataaattatctctatatttttataattttatgaattagctcaaatggttaatatccttagctcttcaattaaaatgttatgtggttacatataattcgaaagcagatttttaaatccataaaatcgagagattaaattcttcaaaataaaagtaagaggattaaattccaaatgaatgaagagtagagacttaaagtcgtggttgtttaaaccaatcaaacagctggggtaccagtcccgagagaggcatcaaaccagttgacccgcgaaccaatacaggtcagtagaattaggctaaaaagccgattgagccagtcttttattttttagaatatttttatttttatgttttttaatgatttatttaatcgaaccatatgaaacattggtctgaccagttcgaccaccactttggttctaaaaaccttgcttagagtatatttattcttcaaatttttactttataatttgatacaaacaaataatcaacccaacacggagcatgggtgaaccatactagttcactagatataccagaagcccgaaaaagtcatttacctgcttcccaag

SEQ ID NO: 7779 - DNA, 652 bp, Gossypium hirsutum
agacattagcagccacaagttgcaatggagcagtatattcagagtcagaatgcggaaaatgttgcttatgttctttccctaaatgacaagcagtacaataagtagcatgtttatttgtgacaaaaggaatattacattgagtcaaggctttcttaagcgtagcattacaaggatgccctaatctataatgccaaacatcaaggggtatcatagtactagcagtcaaacattgagcagagagcatctttgagccaaaaccactagaatgtaatttttataatccatcacgtacaaaaccagcaagaagaacctacttagtctttagatcacaaacttgacactgtgtaggataaaactcaaacatcacgttattatccttcgtaaattttgatacagaaagaaggttcttagttattccaggaacatgcagcaaggacttcataagtaaaggtcgtgactgagtgatcaaagaagactgacccatggacatgacaggaagagctgagccattgcccacataaactttacctggaccattataaggtaaggtaggttttcacttaacgctaaccctgaatatgtcaggtggtgagtagctccggagtcaggataccaggcattatctgccaccgttgctggaattgtaacaaag

SEQ ID NO: 7780 - DNA, 640 bp, Gossypium hirsutum
agctgattatgctcaatatcccagaagtagaagtgtaaaacaaaagcaccctacttcaccattgccagaaaattgtggataaataacaggtaacgattcattcaatgttaagaaatatgaaaataacagttattcttgaactgaactacaatgtttcatatgagcaaacttcaacgagaatttactctaggtttttctgattgggaaaagcacaaaacctttgcaacctgtggtcgtaagagactagatgtaatttaagtaagcaagaaggccctattttcaatagccatttccaggagtgatttgatgctggattacttctcaagtgaattacgtgtggaaaatattatgatatacactatatacctcaagcattatttttgctgctattgctttagcagtacaatgcagcattgttttatattccactgcttgagaattctaaacaaattgtgaacagtatgtgcatgtaaaaattgatatcttaaagcataatcaaatacctggacttcaaaaggatcgctagataccatcaggcgctcaaaaatcaacatactggcaccataagcaattagacaatcacgttccatttcacctactcgtaaccctgtggagaaaacatacatgagcccacacttat

SEQ ID NO: 7781 - DNA, 574 bp, Gossypium hirsutum
  misc_feature (568)..(568): n is a, c, g, or t
atctggtatactcccctatttagttgttccctgacatactcctcctggctgttccctgcattaattctgaaaattccttctgcctaaagaaaatataagaaattaattactaaactggatacttaagcaattatatagccataaatcacagatagtaatatacctggaggcctccccaggcgtataaatgactttgcatcaggagtagtattgttggaacactgttccctctagagtccagtgagagctgcatagattctgtcgaaaccccaaatacactcgcactgcacaagaatgatatcttagccaatgaaataaaattagcagaaagacttggacaacagttatcacagagcaaggtatcttatcatcatctctttttccatacattcacttacatcaatggtatgtattcaactacaaaattgaaaatagtgaatcatagaacagatataatttcagtaagatttacccatcaaaacaaaattagcaaagagtagaaaccaacagcaaggcaaaaggagtgcaatgaagagaaagtcccccactttcggggaacaaattgcanccacaa

SEQ ID NO: 7782 - DNA, 543 bp, Gossypium hirsutum
  misc_feature (509)..(510): n is a, c, g, or t
  misc_feature (517)..(520): n is a, c, g, or t
  misc_feature (522)..(524): n is a, c, g, or t
  misc_feature (528)..(530): n is a, c, g, or t
  misc_feature (538)..(539): n is a, c, g, or t
ttgagcagaactcttcttcttgttggcattgggttgctggttaatctggatctagttgtattttattagagactaagaactagaaggaaaagaatatcatcttttttggagaaaatttatgattaaaatgattcttatctgagaccctgtgttatagaatatttaattcttttatctattcattcatgatctttgtttttctaggtgattggaattgattacttttgcattttcctatgttttttttttgccaattattaatttttattgatctgtatttcctttaccaatctctttttgttttgggatttttattttgactttaccactgtcttatttggtttgaaacaacatgataatttggtttaaacataacattttccgcagctctatgtcaagtgaacaagctattgttggacgtctttctagacacaaaggacctgtgagttcccttattcctttttttttggggggggccatttggttaaaaaaacccccacctttttgannttattgnnnntnnncccnnnacctttgnnaaag

SEQ ID NO: 7783 - DNA, 495 bp, Gossypium hirsutum
taccgattcggatgttcctgaagatactgctccaggaacttgataaagtttcttccatggatgacattttaaacgcaattcccaagtaatgattttgatgtgctgattttgtctatcgaattgagcagttttgttctagttatcgtaatatacaccatacataccaatcggggaatgattttagaagacaaagaggttggattttaatggttctaatacttaatttttaattattttaagtatgattttcattattagctgagaaattttgtattttgatattgtctttattttttttatttttttatttacattttcatagttaacttctactttgagtatggtttatataattaaagataaattaataaaatctcccattccaataaaatgaaccagtccagtaacatgctttcaattttacattcggtccaatttattttattttttcttttctgatattgtttttcacggtagttcccattgcagcttaag

SEQ ID NO: 7784 - DNA, 671 bp, Gossypium hirsutum
tgatttcgttagaagaagcattcggaaaggaacaagcattgtctactgaaaacatgaacaagtgcaaagaattggagaacgaactttctaaaatgaaatgtgaaaccaagctccgacgggaggctgagctccaacatgcagcaaaatataatgaagagttgaaggtgcagcaggttagttatttagtatgcttattttaactgtaggtattgctcgcatcaaaagagaaatctattcttttaagaagcaaagcttatatgcaaatgttagctcaaatagaaactgcatcacttcagtctattctgtaagttcgcattttctattgcattgcttcatgtaggttcatctagaagaagtaggaagtaattaaaaccgactttggtttttggttaagtcggcttaaataattttattagtgagttattggtttcagttttccaaaccaaataccaaataaactgaataaaccaacatatataaccgtttccatctcctcaccttaaacccaatacccatacccatacccatacccatacccatactaaaatagtttggtttggttaggttaagtcggttgaggatgctatggtcggtcatttcagtcggttctggtgcttcaaccagtttaattgatattttctacataaaaactgaactggtcaaaccgatgt

SEQ ID NO: 7785 - DNA, 583 bp, Gossypium hirsutum
  misc_feature (54)..(56): n is a, c, g, or t
  misc_feature (528)..(531): n is a, c, g, or t
ggagaatgatttataatacaccagatttctgtctaggaattcagaacagtggtnnntagcaacatctggaaatgtaaaatatcaaaacttttcctttttttttttcttaaaaagaaaataactacaactattattttggcgcagtaataataaatttatttgggaattttgttagtacttgtgtgattgatccgtctttttatttaaactttgttttttaatatgtatatatatatactacaattaatagatttatgatataaaaataaatgtattctctttttgcagtcttatgtaatttaatcatagttaaacattttgttttagttaactgcatatagtattataaattacatgatctgaatctggaattgatgaagttggtgttattcaaaaaccctagaggggtgtaagaacaacatttccatgtgagtgaaatattattgtataaaaccaatgctgcctcaatgcaaataataatttgttaagagaaatgacctcaatggaagccattaagctgccgattannnnttgtgcaacaaatcacaatgtggtgtctcacgaataaaccccatgtgccgct

SEQ ID NO: 7786 - DNA, 596 bp, Gossypium hirsutum
gctccttcaaagaattcatgcaaggtgagtatgcccaagcattacaggagaatgctatgtgtgctttggccaacatttctggtggtttatcatatgtcatctctagcctcggtcaaagccttgagtcatgttcttcacctgctcagactgctgacacacttggggctttagcttcagctttaatgatttatgacaggaaagcagaatccactagagcatcagatcctctgggtattgagcagactttagttaatcagttccaacctggcttaccataccttgtgccagaacgtacaatagaagccctagccagtttgtatgggaatactatcctctcaattaaacttgtgaattctgatgcaaaaaggttacttgttggattgatcaccatggcaaccaacgaagtccaggaagagcttataagagctctccttgctctttgcaacaatgaagtcagtctatggcgtgcacttcaagggcgtgaaggtgttcagctgttgatatcacttcttggcctttcatcagaacaacagcaagaatgttcagttgcactgctttgccttctatctgatgaaaatgatgaaagtaagtgggcc

SEQ ID NO: 7787 - DNA, 681 bp, Gossypium hirsutum
tttcagtgtgcagtatatgtttggctcagttattctaagtttgcctaaaaaagatagtaaaccatatacttgtcaaatatgtatcctacatgtgttctttagaaaaactgataattggagtaattttgacataatatacccagtaatttatatgaggtagtaattagtatgctttaatataattgtattattacttggtatgttttgacaaacataatctataaagtaatagtcctaatttatatttctatgtttttatctgagtagggaatcactgtttataacgcacttttagtggtctttgcctcagttttactagtcatactaccgacaatctttatgattatttctagattcagtgccgacatgtcccagtatataagctgtaaagatttctaggaatagctatattgaatcgaattgtctttttagttgttgtattaagttttgaaatgataaaagtttttgcttatatcttgtaggtgaagaaggagagagcagagcgagaagcattgggagctttgcctctgtatcagcgaaccattccttaagggttttcatgccgtatctcatagtcattgctgttgaaatttgcgttcgattatctgtatgtgcgtatggtatttcgatagcggcagtggactgaatttttacaattcctggtttggttggttaacacag

SEQ ID NO: 7788 - DNA, 564 bp, Gossypium hirsutum
  misc_feature (515)..(519): n is a, c, g, or t
taggagccacctgaagtatacattttatttctggataattcaatcactgttggcagatctgagctttatagaatggagagtgttaatttggtaaagagaaactgttaaattatgggatttttgatagaatagaaagtaatgcttagaagaaacttttgaagaaataaattataaaaagagaagatttcttgcattgaagcccaagatagactttggagcatatataggatagagtaatatacatggtaatatatgatttgacactaatatgacatataaaattccccactttgcaccaaaaaagacttttaccttcaaaaagtgtttgtttaggaggagatcggttttcttttttattgtggtatgaacaacaataagacgaagttggattgagttgggtgctgttataggcattttcgtgcgactgtggaactctttctcatgcggttgacgcgtttattattgggccagatgtctctcactcataatatttggctgaaaggaaagcaataatnnnnnggggtcctgctgcggcatgccacaaaaacagtttgtgaggaaatg

SEQ ID NO: 7789 - DNA, 670 bp, Gossypium hirsutum
tgtgcttaggtttctgtctcagggtcgcgattgcacattaatgatcgatatgggtatgctcaattttttattttttgatgttacatctgagttctggatgacatacatgtaaaaaccatggtaaattactgaaatttaaatcaagtagttcacacaatttacatctgaaacacattttgcaacaaagttttgcatgaattccgacaagcaagcacgtctgcatgcaaaatgcctagagaatacagcatcgattcgaccttgattgaactgctggggggaaataaatttaaagatgattttctgtgtaacaggttaattgtcaatgaacagagagattataaagcgagtccatgttatgttctattttgaattgcataaatggtttcatgtcataaaatctgtttcatctttgcagaatatgaaattacaatttataaataaactagaattttttataatattaaaataaaaaagtgaaatgaggcaacatgaagtaatatagcagagttattgatatagtcagcattggcatgatggaggagattcgcctgttccattggcattgctagttggttcaaagataaacacaatatataaatcacattgaatcatgaggacaatgatatcattgaaaatcaattttcattaccaggagaactctgatgccttc

SEQ ID NO: 7790 - DNA, 632 bp, Gossypium hirsutum
ttttggtgcttgtatgttcttaggagtcccacttgagtcagggaagatcctatctgcactcgcaatattcaggattcttcaggagccaatctacaaccttcctggcacaatctcaatgatagctcaaacaaaggtgtcacttgatcgaatcgctgccttcctccggctcgatgacttgcagcttgatgctatagaaaaactaccgagtggtagttccgaaacagcgattgagattgctgatgggaacttctcttgggatatgtcatcccctactgcaacactaaaagatataaacttgaaagtttcccatggcatgagtgttgctgtttgtggtatggtcggctctggcaagtcaagttttctttcctgtcttttgggagagttaccaaagatatcaggaactcttaagttgtttggtacaacagcctatgttgctcagtcaccttggatacaaactggcaagattgtagacaacatattgttcggtaaggaaatggacagagacaagtatgacaaagtgcttgaagcttgtgccctcaagaaggatctcgaaattctatctttcggtgatcagacagttataggcgagtggggaatcaatctgagtggtggacaaaagcacagaatacaga

SEQ ID NO: 7791 - DNA, 465 bp, Gossypium hirsutum
aatcatcatctttgctgaggtgttgacagggaagcccctgtttcctggaaaaagcgttgttcatcaattagaattgatcaccgatcttttggggacaccttcagcagaaaccatatctggagtacggcttcttgctctctctttttttggtgtgggtgtgtgtgtgcatctgtcttgttaccttgggggctattttccttttcctttctagagagtgaattagaaaaatttgtgtctcatcaattgcaggttcgaaatgacaaagcaagaaaatacttgtcagaaatgccgaaaaaacatcctgttcaattttcaaagaaattcccaaatgcagacccattagcagtgcagctattgcagaggctgttagcatttgatcccaaggaccggccaactgctgcggaggtgtgttttccttatcttttgtgccataaatatggcatccttcagattcaatcaatcatc

SEQ ID NO: 7792 - DNA, 649 bp, Gossypium hirsutum
gattgaaggtaatctatgagctccctagaatgaaattcgatttcttttatataacattttgaattgaaagaaaataggagagtttatcttcttttagagtccaattcgatttaccatattcaatcaaaatttagtaggagattttgttgggacaatgcatgatttgtataaacaaatctaatttaatttaataattttgtgaatataacaagtttatgcagaagtttctttaactgcggtaagcaaaaaaggaaaatcttttaaatcaaatcatttatctatttatcaaaaaataaacctaacctccaaccatttttgaactttacctttgaaagttttacctatttacttaacctttaaatatcactttttaacatttttttaattataaaataatatatttaaaattatttcttaaaatttataaaatttattaaaaaaaattataaactcgtacttgtgatgtttgataaagtgttaaaaaaaactcaaggcactattgaaaaaactcaatcaactaaaaattagttttttaagcaacttaattttttaaacaggtttgataacacatgaaaactattatatagaatttttctaaaaaaaaagaagtatagaagataataaaaagataggcatcacttaatagcca

SEQ ID NO: 7793 - DNA, 557 bp, Gossypium hirsutum
tcagagctgctacgttttcattgaatagtgataagagccccggcactaatggatatatatgactacttcttcaaaattggttcaatgttgcctgcttttaatgtcactttggtgcttaaatgccttaacccaatctctataaaagagtttcgaccaatatcataccattttgtattttatgtgtataaccatgattcatgctaatagaattcaagctcatcttccagaggttgttaacaagaaccaaagtggtttttcatccctaacatacacgtgaacagccatatggaggtaggatcttccaaatatataggaaaaacttaggaaaaaatttagcatgcctgtgctggaaatacaagtgatgacagaaattaagggtaagttttgatactatcactgaagatcatgtctgagcatcatggaattccccatgcccaacctcttcatcaatccaaataacttgtacacacaaataaacaagtcacatataaatgctttattatatgtgattcagctcaaatcaccaactaattgcaggtaaatgattcccatggatg

SEQ ID NO: 7794 - DNA, 612 bp, Gossypium hirsutum
  misc_feature (573)..(575): n is a, c, g, or t
  misc_feature (592)..(592): n is a, c, g, or t
  misc_feature (608)..(609): n is a, c, g, or t
tgaaaatcaccatatgcaatagaaataatccagcctaatgagttgtaaaactggtggcaaacttgaacactctaaattatgcagcacattacccttcaacgagtagatgctacactgatacaagttcaattaagaattggaaaggctttccttcaaagattgattctgttgactaatcctaggcagattcctaggccctaatttatgtcgactaatcttaggcagattcttagtagatggttgattctattgcgtttattgtatctttcctagttaggcttcaagattgtgtagaaataccactgtaaattattgtaaaaaacacataagaggatcgccaaaatcctttttctcaaaaatcttcatggtaccagtgccttaaatactaatttagggttccaattgatttttttcccctaattctcttaaaacctagaaagccaaatttgctactcctccctcttgactttttttctgttttcacccccagctttagaggagtcatagcatcatcaatcaacccaccaactctaatgactatcctcttagtgcgtgcatctcacgtgcctcccnnntgcattctgattagtgntcacatgccggcacanntag

SEQ ID NO: 7795 - DNA, 567 bp, Gossypium hirsutum
tagacttgtacttccattttgtcttggcatgtattaaaatttttgtgcatgtgctttggtattcttgtcaactccagttgtttctggtattgcattttcatttagtacgtttgatcatctgagcacatctatctaaatgttttgaataatgttgccgcagacaaggaacagtacctgatgaggcatatatgatatcagcatttggaggacctggttaggtttcttatctctaaatatgttatctttgggacttttatacagatatgttcactattttgggctgtctgcagatggtggaagaaccatttgggagaatgcttggcgagcaggtactgagagggtacatggtaaaaaatcacttcttgttagccctgaaactccgttgcagtctcatataggtatctttgctcgtcttaagttgttgaaatagtttcttctgattctgttatctattaattttgtgccttggttgagatgctcaggtgctaaaacttctgatcaatcgatcaaacaaaatacacttcagagtaaggctacatcctcacctgctagtcgtctaccagcaag

SEQ ID NO: 7796 - DNA, 566 bp, Gossypium hirsutum
ttattgattacactcgacgcattggtgtttctttaaacacttagggtacgtttggttcactgtaatggaatatgattgtaattgaatagagctataatggaatagaactgtaatcagtaattccattgtttgattgaatggaatggaatagagttgtaatagtatttttgtatttagttgaatggaatagatgttgtaataatataagaaaaaatgtttaaatgaccaaagtacccttagtaaagtttgtttaggtagatgattattgttattgttattaagttttaataaaattattgttaaatatattttaataaaaataaaaataataatttaatcatattttaatataattattattaaatacaatttaataaaataatatacaatttaataacattcttaatataattattattatatgaattaaaaattcataatatataatattataaaaataatatataacctactttattatttttaaactgcaatacatatttaatgtgctaaaatatcattagtgaaacaaataatttaattattctacaataaaaaaacaaagt

SEQ ID NO: 7797 - DNA, 559 bp, Gossypium hirsutum
tctctgtaggattttatttagaaaaaatattttggtaggactatatttagtttgatacgactttccttaatgagtgtacaaaccctacaagagatatgggactctctctaacgaatcctaaggtttcatgcttcctttgatgagtatgaattattaaccaaaataggttgttacagaaatcgaaaaataaagggaagaaattgatcatgaattccctttaatgagtctataacgtgactctatttgtgtattaacatctgtgtatagtaactgaacattttagcataaagtgcaaaccctcaagattgaaattgcttttcacagcccaagggccaagacacttgtaattgcaaccaaaacatggcctcattgtaacctctaaataaattgtctaccaaattgaaagatgcaatcatatggcaacacagatccagttaatagaagaaaaatcttactcgttaaaatcattgtgaacacggaagatgtgaccagcaatgtcatcatcatctccaatggcagcctccatggcttccaatatatcaagtcgctgtatcagaaa

SEQ ID NO: 7798 - DNA, 621 bp, Gossypium hirsutum
ggaactgcatttaatttaccgttctaaaagctacttttctcccttctccagtccaaaaagaaagcgaattaaatctaagcgaaccataaaatacttcaaaaacatgtttgatttcctaagaaaaattaacaactttcaaacaaaaataattaaaaacctgactatcttgtggctttctcttgtagtaagctagaagccgattttcgagcacgaaatatcgcatgtgtatgaaggatcgtccgatcttccttcgaccatatctcaccatccatccttcgtacaccaccttcgacattcctgccctctcaaaatcgaccaccaccaatagaatttccaactcctaagtcctctgatatctcgtcgtccctcactttatcgtcaaaatcgcgaaaacggtaattcctaattctcaaatttggaattggaagagtctcaggattcaatttcgacagtgcagtgaacccgagaaccgcaaaaagagaaatttaattttgtatactacgatgaagcaataacaaaaaaaaagcggcaataaaaaacagttaaatggaaagaaggaacagcagtaagtaggatcaagtaaagtcttcagaggtgaattgaactctatgaaaaaaaaaa

SEQ ID NO: 7799 - DNA, 553 bp, Gossypium hirsutum
gcatttttgttcagagatttcgaaacaaatgaagcagatgaaacaaagttctttatctgaatagtcgtgggtgaagaaaacaaagcatggtattgaggtttatataggcattggagcagtgaataaaaatcccctgcccctaaacaatgctccatgcatgcccccaaaccaaaatagctccacatgttttttatttttttcattttaatttttttaaataaaaactctgtaatgatttgaattaatttttaacttattatcaacgtttttatttttgttttatttttattttacattaattttacctattctttaattaacaaatttataatgacttagagttaatttgagagagttttttttttataattggtcttataataaaattttacaaagcagaaacaagttccactgtgaaaacatgatccttaaatttttggagataaccatgttaattttttaatcccaaccaaaattttaaataattcttttatgtcatattaaatacacgtaacgtcttataaaaattgtcaataaattatgcatagggaca

SEQ ID NO: 7800 - DNA, 595 bp, Gossypium hirsutum
ggttctctttcttaccaatatagatctctcgccatttaccatccaacaatcaccttccttttccagatggtctcctgaagtatcacaatgaatagacagctttttaatgtcattcaatagcaatttctgctcccgctctttctgttcaagggtaattttggcaagttccacctcttcaacaccatcaggaaccacttcatctgcctcctctcctacatcttcatcatcttcaccaggacaagagagactgctttttcgaggcctgaattaaacatgttaccagcattaaataccaaaaaagtctttggtggagtgcaaagatcacgcaactgatttcattaataaactaagtgaccattgcatccatacaatatatgttgaagaataggttacatttaaaaaagatcaatataagactgttaggtaataggtgtaaagcagcttacatattaataaaaaataataaaacaataagtacaactatagcttttaatatagtttgaaaaagaggcccagtaaggttcataaaaccctactgcagatggaaaataaaacgaaaatttcactatcatctaagcacatgaaaacaaacacc

SEQ ID NO: 7801 - DNA, 390 bp, Gossypium hirsutum
gataataattatcgtagataattagctcagataccaaaattgcttactagctttaccttttttttagttttttattttggcttgctaaatttaaataatttttaaattaaatttagatactaataattgaaatttaatgcgatcgcaaactgatacggatataataatatagaacaagggcatatccgtcattagcaagtccaccatccagcgctgtaatcaaaacgacacgtcggcgattctacttggcacgtgcagtaagtaaaaacaaaggccggcatgatcaacctgccagccactgctgttaaaagaaaagatcctttagtttttcttgtgcttcagactcttctgagagtttcagactattgaaagaacaaagcacaaaaaaaa

SEQ ID NO: 7802 - DNA, 587 bp, Gossypium hirsutum
  misc_feature (575)..(580): n is a, c, g, or t
tcgcaaggagttcaagctcaactcagataggttgagctagtcaagatcaagttttccaacattaaacttcagcaacggaagatcagatacaattatttaaggtttaatgtttctacatattatataaatattatattacttgctcttttaccctaataaatggaatcagaatgatctcaaatggtctacgtatctcctatgttttaagtgattgaatgaataattaagcagcaagtttttgaaatagtcaaagctcaaaaagttcacatgacaaccacttttgctctgtgcaccaattaagagaacctttactggtttacagcaaggtttaagagctctggaaccttgagggaaataaatgagccaaaattttcacctagaatattataaaactattttactgtatccattgaaaaatagccactctgacatcacagtctggatacaggatgcagataatctaaaatacatttataatcatagagtaatttctagaaaagatattataactgagtgctgatcaacaattacataacaccttgccggtgcttaatctttgaaacaaaagtcacgtnnnnnngtggaaa

SEQ ID NO: 7803 - DNA, 626 bp, Gossypium hirsutum
aaaaatatcacaggtttgagtattaagtttgagacattgtgagactgctttcgttgcttccatatagtgattacatttctgagttatatgtttatataatgctctgtatcagtacctatccagactgtttatgggtgtgaagttgcaagtctggaatttgagtattaaaattaaatctgataatgccaaagctgtatttaaagcccggaagttttacttttcatattaggcaataaatttttttttctgttgcacttgctatgatattccctattggttatttagactttgataatggtatatggttttagttttgggtcattcatttattggagaggatgacaataatagaacaattggatcattgcttgaaactccaaaatctatatttcttcttatgtagaagtctgatattagcctgatatgttacttctggataacaatatttaaaatgcgcatacgagctttgtgctaattgtcaattttttaaagtgcattttaagtggttgatgctccatcaaagatatcatgacagtggtggtttcctgttctaaattttcttactcgatctgttattgttccaggctctaaaggaattatacctgcatcttacccctatacaacgt

SEQ ID NO: 7804 - DNA, 673 bp, Gossypium hirsutum
gagaagtaaggaaaatcaaacaaattctggaggtgaaagtttgaatggaatttctgcctaaaaatgaaactcaatagtttttgtactttatcaccatattttcccattccctttcactgtttccaacatatgctaaaatgccaacccactctcttaacgcgcccgagcatggcagactccacttagtcaaaacttgggagtttttaccccttattttctttttaataaaaaatgcaaataattaagtaaaatgaatctaccgtgcaagaacactgttcatattgattttcccttccttctaattttcaaaacccccttttgttcaagcaagaaagtttaaggaaggcttaacgggataggtttagcacaacactgccattaacatcttttgtatgtattaacctaaattagaatcgagtaaaagcttaccgggataggtttttttatacagttgtttaaaattacttataattttttttacctttaaatgatgttcaaatctacatccttttattttagtaataatgtcgataccaaataaattattatagtatcgatacatcgtgaatatataaatcttaaatttatttcgagctaaatgataataaattattataaaactaagttatataaatatatttttagaggtgaattattaatccttcccgttgtg

SEQ ID NO: 7805 - DNA, 643 bp, Gossypium hirsutum
ctccaaatgaaccagcagtaaaatggtggctgtgaaagtcatcatggtgctggtgacggagaagaataggaaggtgaaaccgagggagaggttccgaggtagccggtgatgaaaatcctcgaactcgagtgaagaagtgaggatagagaggaagataaccaccgaggtcaaggaactcgcgagaccggcaacgtccatcaccgtgaaaaacgagtaaagaggctcgtcgaggagaatgggacgaccgtctgcatgtattgacccatgattcaatatcatcataacctttatatcatatagttggtttactaatgaataaataaaaaaagagaaattaatgtattaccataaattaaattgtaaattgattttttctatcaaaaagttcatcccttttactactgataaaaattgacgtggttaatagaataacccgacaataacacgtggtacaatgactaatttttaataataaaagtagatgaaatttttaacaaaaagatcagtttactttttgatctaatgaacaaggctaatttatccagttttcatatgagcccaaatgcaattcagacttctaattcagagctgccatgataactttaactcagtttctaatagatcaattgcgtactctgcaaga

SEQ ID NO: 7806 - DNA, 551 bp, Gossypium hirsutum
ctcaatgagcttgcgttaaaacgaaattaaattggtaacaagctgaattgagctggacggagctcggggagctggaaatgagctattagcttgccaacagtgcaatgctcggcttggtaagcttgaccaaagtagttcgcggggcggttcgtatcattaaatgtatcatccaaaatcatatcggtttaatggtgtaaaagttcctcaatttaaaaaaaaaaaatcaaagtctctctcaatttttttatccaattcaactgatgttatttagattggaacggtgattgaaccattcaagtcaccgttagttcatcagtttgatcggttcaatcagtttaattaaaaaattataaaaattcaaaaactaaattcaatcggttcataccaattcctgatccaactggttcaaagcacccttcacatcaatattcgaccattcttgatcgaaccgattcaatctaattcaaacaatattgcctttgataattttgactagagtaacactttgatcaaagttgaccattaaaaactaacaacaataccgataggac

SEQ ID NO: 7807 - DNA, 631 bp, Gossypium hirsutum
agtcatatatataaataaaaggctcttaactccaggctttaccttctagcattagttcgttcagcgccttcgattccaatagagatagagagagagaggaggagatcttcgcttctctccgtcgttctgctccatttgataaccgcttgcagttctctcaggcaactttatctctcttcttataagtcaattttgattttgattttactctagtttagcttatctctctctctctctctctctctctctctctctctcttcagatctgccttttacattttgacttcagttctgtttcaacattgtgttatcccttgaaattctcaattccatccgtaatttcatctcatctaagtctctgaagcgtcgtatgtttattaaattgctctgatctgcattttccgaattgaattcttctcgaaacattttggatttggatgtttactggttgatatggatcaattcatctctgcttggtttccgatgtttcttgaacgatcttatgtttgtttcgatttaagaccgttggatttttttgaaaaaaaaatcaaattctattgatggttatgggaattgatatgtggattttggtgcttgacagacgtgaaaaatggggttgtctttcacaaag

SEQ ID NO: 7808 - DNA, 655 bp, Gossypium hirsutum
ttctttttgacctgcttccttttcagcccaaatctagcagttaccctgtttcggcctattccattatgagacaggctgaccccagcagtaggatgctgatgcaggcccatttgtgacatagctccttctttacctgcgcccaagagcgaagggcctgggcgtctttggcccacatcagccttgaagtcaaccctttgttctggagtgtttctttcttcacctagggtttccaaggcctgatatcatgaactgctcaccgtcccaccctgaactttaccgtcgttatcctttctagtctttgtcgcgcgtcttcctttcctttcaactaacatccaaggacccaaatttccatatttttttaatgaatcatatgtattcgaagccgcaccttgcatctattctccttccctcaaagggcttccctctgattctttctgccaattgcaccttagggcaaatttctttcatatgcccataatggcagcacgaaaagcaaacggtgggcaggtactcgtattctatcttctgaagtactccattaactaacacctaagaaatcagtgccctatcaaggttcacatacaccaccattctggcgaatcttcccctgaccccagtgtcggtgttaaaatctagtttcgcgactttccctatc

SEQ ID NO: 7809 - DNA, 590 bp, Gossypium hirsutum
agtggcaaatagatcccaatgaatgaatgatggcatctttccttatatgaggatcaaagaaattcaaattttaaatgtagccatcatggttatccctttttaaacatacttttttttatataatttagtatttaattcaaatttaatcatccttcctaagtttgatttacataattcacgagtgacaataatatatcgatggtccaacaataatgaaataaacaattaaaaattcattatagtaataaaaattattaaaaacattataaacttgtttaatggttagtttttttgttttcgattttaataacattgatctatccacttagttcaattctaccttactaaggcaatgaaaactaaatcaaatatagtgcttggttcaattttattaagttattattcgacttcaatttgattttcgagtcacaaagataaaaacaccattattatcatcctacctgaattgtttttatttaatttgtaattagtttaaattttaaataaattggtgaaaataacttcgaaaaatatcataaaaatagtttttaaaaaaatttaaaatcgatgaagcgagccaagccatttca

SEQ ID NO: 7810 - DNA, 626 bp, Gossypium hirsutum
gaagagcagctcggttgactgaagagctcgagtcagcgcaagcagctaacacagaaatggaagccgagttgaagagacttaaagtacaagcaaatcaatggagaaaagcagctgaagcagctactgctatgttgtctaacaatgggaaatattcagacaagacaatacctttcgatatagctatcggatcaccgaagtgggaaaacatcgatgacgacgatgatgacgatccattgaaaaagaagaacaatatgttgagaaagattggtgtgttatggaagaaaggtcaaaaataaagattaattgtatttgcattgcaggtttgcatataattctgatataaacatttttatgttttttattattatcttttttatggttattttaaggaaattttgtcttttaattttgcttttaaagttgtctgtttttaagggtgatttcaattgagtttaatggaaatttttttacatggaaaccgcactgatcgattagtatatctactcaatttgtattaacaataatatatggcgaattgagtattagttcgattggtatcggtattgttaccagtgtaagagtatatagcttcgagtaagctttaagggttggggaaaggttatgaa

SEQ ID NO: 7811 - DNA, 655 bp, Gossypium hirsutum
ccgccatccttgcgaaccgtcccctaaccccattatccatattaaaatcaagttttgctactttccctactaatcttcctatttcccacaggattctccgtttgtacatatgcatggcaatctaggaagccgaatccatgccatgaccatatgggggtaaggttgtgctatgttaaaatccatggaccaaggttgtaaggttaggtacttcccataaacaatccaaggtccttgacataggaccttcttaaagtcctccgggctttgaaatttagctaagaaataaccattttcaacatccattaagcaaaacggttgagacgatttccacaaagaacgagctttattatgaagcacaatatacccatgcttcttcccagaagcttaattaccaatgtatgagccatgtcgttaattaggatctagtttacccattcagagaaattgatcgatggaatgccattaactaaagaacacacgacatctgttttcgacaactcgaattccccttcatcagaaaaaaacattcgaagttgttgtctgtccttcagcctgaaggccagtccctattaaacgatgcttccatgacaaaggtttctttgtaatcgaagctaaatccattgccacatccggatctcactctgtctccctgata

SEQ ID NO: 7812 - DNA, 653 bp, Gossypium hirsutum
agccggcgttgttccctctgggcaccccatagatccttcaaggctttgttaccattgttacaaagtgaaatcctatatgggcagggcttgagtttgagaacttagagaggcacaccttcgggtgacaaaactttttaggacaagtgggtgcccaaatgagacaatatcggcttatgggcagaatacacggttacatgacccaagaagatcagagtacctaatcagttggcgggtcctgacaagttctactattggctttgccctataaacgaaagatcaagtaacccatgaatccaacaatttggtttataataattcatgaagtaaattatcatattttttcccaatccaaataagaagaagaaaaagaaaaaacagaaaaaactaaaatgtgaaaatatccaaatacactaatgcctgatgccaccaatatcggttgcagcttgacctgtattcaacatggatttctatcggaaaactactattgttttgaaacttatcaagtttttttacactagagggttatatgtttgaactttgaggcttacatgatatgaaccaacttgtgaccaggcaataagcaaatatcttcaaaaatttcacgtgccaactagatcaatcacgcaatcacaagttaggaaaatccaagaagt

SEQ ID NO: 7813 - DNA, 474 bp, Gossypium hirsutum
  misc_feature (465)..(466): n is a, c, g, or t
agggaaattttgaaaacttttcttttatttggttattaatccaataatattcattgttttctcttagaactaaaaagaaaacctttctttctttagatatcgctaattggttctgtttttcaagaaacaaattccattttttattgtttgatatatttttagttatttacttttatgatttatcgttgacataaaaaaaagggcaactttgtatctctttttcgtttggagctgggtttttgaagggttttttcttttttctcatttggacaaatgcttcaatgtagtatttcattatttggttaatttttatttttgcatttagacggtctctatggctatatatttgagtaaagttcgttttccttcaattttggagctggtaataagaaattttcttcttgtcccacgaaatccaaaatctaccgcaatttgaaaatgagagtgaaaaagaaagggagaagnnaaaaaaaa

SEQ ID NO: 7814 - DNA, 580 bp, Gossypium hirsutum
  misc_feature (526)..(526): n is a, c, g, or t
ttattagaacttcttaccttatactttatattataacaaacaactccagcaaacaaataaacagacttttcaaggaaaaagaagctaatcttttacattatagcctctgttaggttagttatcactcaataaaaaacaaacatgcaatggtttgtcagacctatgtatatcatgtatgaaataactatcgttcaaaaattggagaaagaagaaaattagaagacaatagacgaataaattaaatccactagatagatgtctacataccttttcaaggaagacaagaaagggatgttgaaaggatttcaagctactgttgatagaagaagggtgtatatgaacctctcgtcttccatcaaaccagaatggatgaccctttgttgcaggattgagtttaagcctgctgagagctactccagtaatgcccagctcagtggcagccacattaggatataaaccagcacatagtattgccttcaaagatgataatacaattatatccagaataagatgcagttttaatttnaatcatccgttgctgcaacgaacttataaataaacaacacttaacagcacatca

SEQ ID NO: 7815 - DNA, 496 bp, Gossypium hirsutum
accactcctcccccacaaaattcccaccacacactcgccacttgatccttttctttccatccaagcgattcaacacacagggcctaccagtcctttatttagaattcaaactacaagtgtcttaattttaatctaattggttgattagagctaagcagctctcctttccaccacaatttctatttgaggatcacgattttttgactatattttatgttggggtcgatgattatgattatgattatgattatgaattattttaattagtaagtttgaagcctcgataaagttgcatcccaggtgatgtgatgggcggccgtaatctctctactgttcaccaaacacaagatacaaatccttttgtttattgcattaaattcttagtggtgctggaccatatatcatcacctcccagatattttgcctccatttcatttaactaaaacatcaaatatctttttttctttgaataaagtaatttaaacacacgttacaa

SEQ ID NO: 7816 - DNA, 652 bp, Gossypium hirsutum
tgcttcctaggatttggtgccttgaagaatagacatctggtgaacgatatgttgaaagttcttgagcaaacattttcagatcacaacccacaagtccagattgcgtctctggtattactgataaaagtttactttaaaatgttttctttgaaaggctaataatattttatcagtaaactggggagtaaagaagcaggacaagaaacactattcagctacgtgacttatgacatatttaaactatcctgtctatttgacaatctttttcagaaagccatataactcaaataaaaacgtgttccttctcttgatttgttggttcacagttcacttgtgattgcatgtgatatagacagattcccccccccccttttgactctttgttcttaagaatactggttttaagaatgagtgattgcccttcttttattctttgtggatgcttaatatgagaaatcttggactgaattcttctagagatcaggaaggtctaactctagggttgaacaactaaacaatacatgtgcagataattgttcagcccaattcctatatgctggctcttttgtgactgggccaatttcaagttttgagatgttcaaagtttgaaggggattgaattgtataatattaatgtgctatgtgtccttaa

SEQ ID NO: 7817 - DNA, 770 bp, Gossypium hirsutum
  misc_feature (682)..(688): n is a, c, g, or t
  misc_feature (694)..(698): n is a, c, g, or t
  misc_feature (701)..(711): n is a, c, g, or t
  misc_feature (715)..(719): n is a, c, g, or t
  misc_feature (725)..(726): n is a, c, g, or t
  misc_feature (733)..(737): n is a, c, g, or t
  misc_feature (753)..(754): n is a, c, g, or t
tccagacatgagctgttactttgacatagtgagatctaattatggtttataaattgatttatatatcgaaaattattcagtaatttcctcccacagtacatgtattcttatattctaaaagtattaatgatatgtctatcaggtctgggctagaatatggactgtccttgcagatcatttcatttctgctggcagccatgcagatgagaaaattgctatgtatgctatagattctttgaggcagcttggtatgaagtatttggagcgtgctgaattgaccaattttacttttcaaaatgatattcttaaaccttttgtcatcctcatgcggaatagtcgaagtggaaccataaggagccttattgttgactgcattgtgcaggtatgtctgcttgctcagatttcttgaacatctaactctcctgctggttgttgtttttccctctatcatatattttgtagttaatacatttttaattttaagcctttgctgtcagttttttcttattcccgtgggcatcctgtgtgacactcagacttaccatgatgttattgcagatgataaaatcaaaggttggaagcataaaatctggatggagaagtgttttcatgattttcactgctgccgctgatgatgatatggaatcaattgttgaaagtgcatttgagaatgtggaacagnnnnnnnaaaaannnnnaannnnnnnnnnncagnnnnntaaatnnaaaattnnnnntactacaaaaattttnnaggggggggaaaaaca

SEQ ID NO: 7818 - DNA, 649 bp, Gossypium hirsutum
agatgtgaggaagaaacgagaaactaatatgctatttatatactcacactcctattttactttcttcattggataagattccatcacagagaaatcgtaaaaaatagtgtccctggcttagaattaagccgtatttatattagtttgcatgagattcaagttaataggtacatttaataaagcttgacaattggaagatggtaataataatttttaatagccacatttaatacggtttggcaattggaagatggtaataaaaattgttgccacaaaaaaaattggtggatttattattcacatcatgggttaggtcggtttatgtatagtatctagaccaaattttcaagttcgagtccagttcgacttaaaaatgtgcttattttttgtccaagctaaactcaatttaaaaaaggtaaacttggtcttgatctagctcactcatatttgattttttttagattaatttttattttaaaataacttttttaaaaattataatacactatgtattataatacactatggattgagttatcgattacttttgttattaaattgaattgactgtaactatctttgtgatcttcttttatcatcatccctattaaagagttaaaaacaaaatatttgactgtgaaagatctac

SEQ ID NO: 7819 - DNA, 617 bp, Gossypium hirsutum
  misc_feature (609)..(609): n is a, c, g, or t
ctttttctttctgcaattactaattaatagaaaacatgatattatacacaaaatacaataaaataaataaatatcaaaatacaataccaataaaattcaaatcataatatatagacagtacttatttgaagaagaaacaaaaggaatacatgggtaaaccagaaaccaaatgtacaggtgaataatatccaattcgatttgaaaagtttgataaatgatttaaattttgaattaaatagttcgattttattcagataaagtcaaataaaaaattaaaatttttgggttaacttgaatataaattatacaatttaaattattcgaaacgaacaagaaaatataaaattacatcgtcttgataaatgtttactcatcaagcttacttatgtagttaaataatcttgtaattcatctattaattaaataatcagttcttgtaaacacaacattgagtataaataatagaatttattaactttacttgaaactttttgactcaattcaaaaaaattttaaattaaattcaattactaaaataaaatttatcaacttaactaattcgaaattttttaacttaattcgactccatcaaatgtttactgtagcaangggggggg

SEQ ID NO: 7820 - DNA, 648 bp, Gossypium hirsutum
ccaatttgttgtaagaatggttgtttctcatcatagcataggcatatggagactgcccatttgcatccagaagggaactccagcaggttaacccaatctacaaaaaaaattgaaaacttcaaaaacttgcttgcaaataaatgaatttgagacaatcgaccaagatatatagaaataaagtacccaccaccttcccatctcctttcacaaattgagagaaaggtctaaacatggttttctcatttagggccaggataagatcagcagtgtctcagtaaagaacttataatctaggttgcaagaaatggactgtatatttaactagagtcttataaggattttcacggagaaatttcaattccttacattaaacctaaaaaaccagctcataaataataatatgacactgtaacactcatacctcctgaggatcattcgtcagcacatctaccatatcatccgaaccagatgtacatgcagccaaatgtaaaggtgtgattccaccagcaccctcaagattcggtggaaagatatactttttcgagtttccatcgttactactgatagaataatgtatgagcaagtcagccatcttcctacaccttcttttcactgctcgggttaacagctgaatctcagaaaagcatg

SEQ ID NO: 7821 - DNA, 661 bp, Gossypium hirsutum
gaaggaaaaaaaatactgaaaagtaatgcataaaatgatgcttttgtgggggataaggataaaatggaaagaaattataatgaaaatatgttttagggattgggatgatgtaaagtaaaaaataaaaaagaaaaataagatgtgttaaaagaattaaattaatttaaaagatatcaataaggaagttataggtataaaattagggaaactaacgtaaaatactgctcaaggggaaaggaatacaaggaaataactctgttacaaaaatggtatgaaattcttattttaaatgctaaaaattaagtatattgaatttggatctatttatgaatttttttgccaatttatatagttatatctattgaaaagtaaattgtagtttgttaacattttgtaaaattaatatttatctagtttactggaaatattgcttttagaaattctaatttctaagattaggtaaaatgtaaagttaatgaatggtttagtaatattatttctaaagtttcaatagtatgcaattttctctattggtaaccagtaagacttaagagctagtgcttagagagctaggggtgaatcctcccttcctaggtcaaaaataaaagaaaaaaaaactaactaaaaaaaatgtcttgatgaaaattgctactatcagtat

SEQ ID NO: 7822 - DNA, 645 bp, Gossypium hirsutum
ggcttctttgtctgaatttccgagttaggctctattataatgaagaagcgaggaatgattgagccgccgactgtgggagtcatgaaggctggtgctgctgccggcctggcaatgaagacggctggtggcggggcggcagctgcggcaaaggaagagaaaaagccagataagactgtttttgaattgaagttggagtcatatgaagctgcttcgaagattaaagtaataaaggaggttaggagttttactgatttgggtctcaaggaagctaaggacttggttgagaagacgccgtctgtcttgaagaagggtgtctccaaggaagaaggtgaacaaataattgagaagatgaaggctcttggtgccaaagttgttttggaatgaacatttgacaggtatttttggtttataccagaccatgtattcttgctgatacttaacctttgcttaattgcttgttcatctttacattaccagcttaagttttaacttggaattaattattgcccaaattttactctcttatcaaagttggaacggaaaattactccatcctgttaccatgtttttctattaagaataatagtccaaaattattattattattatcattattatgatgcctaattgctttgagatgccact

SEQ ID NO: 7823 - DNA, 619 bp, Gossypium hirsutum
tttgattgatttaatataagattatttaaaaatatattttattaaatactttttatcacacattatgcagtagtttaattttataatattttattatattaataaattaatttatttttttagtaaattaattttatttttagaacaacaacaagtacttacgacttttcttttcatcaaagtgagaaaaatatattttttttattaaaacatactgattattataatttaagggtaaatttgattaaaagatatataaataaaaaaataaaggttttatatttttttttacttagattcgagttccattatatacaattgtgatttatggatttttgtctcaccatgtgtgagttttgactcatttttcatctgtttgtactgatttgattctatattgtattggtctaaaaaaatatatattaaatttgaaatataatttattaacatataaagttttgatttaaatttttaagattaattgataacctatattcataattaataaaaaaatcaattagattttaattttttatttagataaataaaaaaattaaaagtatatttccagggcattttttttttgaaggactaagggtagaaatagaccttaaaagag

SEQ ID NO: 7824 - DNA, 347 bp, Gossypium hirsutum
  misc_feature (325)..(325): n is a, c, g, or t
  misc_feature (332)..(332): n is a, c, g, or t
  misc_feature (334)..(334): n is a, c, g, or t
tcagtatttttgttagttttagctttgctgctatgtatggcattgctgttgctgcccttggaatgctgagcaccatagctactggactggctattgatgcttatggtcctatcagtgacaatgctggaggtattgctgagatggctggcatgagccacagaatacgagagagaacggatgctctggatgctgctggaaacaccactgctgctattggaaaggtctgttatttgtttttctttttcttacttgagcacttggattgtgttctcattttatttgatttgtgggatatctggggtgtgtctctacatcacgtgctctntcgcgtntntatttgttttgtg

SEQ ID NO: 7825 - DNA, 631 bp, Gossypium hirsutum
  misc_feature (565)..(565): n is a, c, g, or t
  misc_feature (617)..(621): n is a, c, g, or t
actcctaatttgactgcacgcctcactgattacagtctccatcggatactgacatcagctggcacagctgaacaagttctgaatgcaggtgcccttggctatcggccccctgagtttgctagctcaagtaaaccatgtccatccttgaaaagtgatgtgtatgcctttggggtcatattgatggagcttctaactggaaaaagttcaggagagatagtttcagggagcacaggtatggttgatctaaccgattgggtgagactgttagcatcggaaaaccgtgccgatgactgctttgatcctatgatattggaaaaggataacatggaacaaacacatagaacactcgacgccatgctacaagtggcactgagatgcatcctacctgctcaagagagacccgatatgaaatcagtttacgaagatctctcggtaattgtgttacagaaaagtaaacaaaaggggttctaactatgtagtttaactactaaccccacattgattggttaattactatcataagttgaaattcttgtctcgaatggttttccctggttcaaaatcntaaccgaaaatatctttttgaatagggtaagaagaaaaaaataaagttccannnnnaatggggggt

SEQ ID NO: 7826 - DNA, 541 bp, Gossypium hirsutum
aataggagggtttgggtaaaaatataggcccgaaaaatgggtttggacaaaaaattaggcccgtttagaaaacagaagggctaaaagtaattagacgaatttagaaaaaaacaaagaaattgaaatgaaatggacaaaattcccatgtaattgaaagagaaaagaaaacaattcaattctaatgaaagtaggaaaaaacagaataatccaattccaaattgaagtaggaatccaaaagtaattgtctttcaaagaataaaatacctctatttatatacatggggtttactaaaaacaaaaataaaaataatatcttcctatttctagccttttaccaagtcaacaaaatttgataactcattggctttctccagcttttttattttgccacaatttaatgattgtctttcaatttggccctttttgacttgttttcaaccgattgcattctttggctttatttattaggttattatttttggggatccagaccaaaattagtctattacatcaattataaaactttattatttatttaccc

SEQ ID NO: 7827 - DNA, 638 bp, Gossypium hirsutum
  misc_feature (54)..(55): n is a, c, g, or t
  misc_feature (587)..(588): n is a, c, g, or t
ttccacattttcttccccatgtgttcgcctaaaatggacatatcaagttgattnncgacttagaaacatttgtaaaagctttaacggaaaaggtagagcaaggacatggcaatgcaagcctaagagtataaagaaaaaaacctaagtacaatagtgactatcgaaccgcaaaaagatcaaattaagaccagaaatcaagcaatggaaacaaagaagtaattgggttcaacagttggattatactgctaatcttcacaaaatatgcacacgctataaacaacgtatgtctttgcacacatatcaatgaaaaatgtggatataaataaagatttggaccatagttattaaaattgcatgtagttgtaatggcattgccagtataagaaagagtatgttgacaattgaaagttactttttataagttagtcatgttattagttaagatggcaatttagacccagaaaagctaaagaaaaagaatggagacctatgacgaccgccaacattgtctcggaatctatcatcgtgcatataaaacgccccagcagtcggcacagcaaatggctcattttccttcttttcttctnnttcttcctctcctagatgattattattgacgactcctccgtcctcctcct

SEQ ID NO: 7828 - DNA, 628 bp, Gossypium hirsutum
tctcttgatattaggcttatactgttgcaatatgtttctagcattacaataagaatgtagtaaaaaaaacataaattactaatacaattccacaatcatttaaaaacaaaaaattcagagaattagccttgaacttgttgatgtgcatacagaaaccaattgcagacataaaaagctgcaccaatgtactaaaattatgttggtaattaaatttaattcatatcacatcgttacaacctgttcttgctataacctcaatattaatttatcgtaaaaaaaaaagagtaggaaaagaagaaacaggagagaaagactaactgttagggccaccgagtttagttacggcgtcaacgaatcggtcgtgaagatcagccgtccatctcagcctgggtttggggtctctggtcatcaccaccccattttcgtaaccatagttcccattccctccatagcttaatctctccatcttaacacacttcaattctatctttaaactgaataatatccagttcctccttaaatccaaaaaaatgtcaaacagaattggatagaattataagaacatgaacaccaaaaaatgtcaacctctttttgttgttttaacttcatatataaaatatttattaag

SEQ ID NO: 7829 - DNA, 649 bp, Gossypium hirsutum
ctttcgagaatggcatcattatatgtaggacttttaggaatctttgcatttgcaaccatttcattgatttcacctactgattgttgtttcccaagggaagcttctctttgcttacaaaacgtgttccttccgattggtgacggtgtcctctcccctctttgtcttggtggtgcagtcactgatcgacgatagtttgattttgcactccctctaccaccctcgataagctggctgattgtttttatttcatctcttgtaggagatctacaactttgcttcatgtttaagccagcaatctcaccatttcccgtgccatcattcaatgtatgctccactcctccctgtttataaggagagacatgccgccgatgctcgggtttcggcaaggggcttatgttccgaccatcatcccttcgtgtcttgtaaggagacttgctgcttccatgtctccttagaagtggattagttctaggaggagaccctttatcataatcaaccttcggaatctgtcttcggctcagtttcaaagggctaaggtttctcggcaaattggacttaatgttatccgcttcgacaagatccgatgtcccgttgtttcggttattatgatcatgccagggactttcttgccactcagtctctgtatctg

SEQ ID NO: 7830 - DNA, 603 bp, Gossypium hirsutum
ttcaaaaactgactcaaaagctgagatcaattttttttaagaaaataacctgttttacaattttcgccggtgtcaccaatctcattatgacactccaaaagagttaattttttgtgctgccattatctctaacgacactaggcaccagtatgtatttttctttgtgctgccaagatcaatatattgatataccttctataagatatcgatacttgatccaataatattttgttttttactaaaaaaataaaacctcaaatttaagaaaatgtaaaacaaaaagaacaaatttttcagtttttaaaaaacccatcttcttcagtgccctttaaccctcctcatcaaagcttccaccacctccctccctgaaccccaattccaccatcttctgcacctcaatctccatcatcaataacccaacaccactatcaattatctatacccataaccaataaaaccccaccgaactaggaaaccatagcccaaaaatagcaaatatatatatagcaataaataaagagaagaagaaactaaatctgagttttgagatgaaattattttggcgtggatgatggttatcttttgagtatgatgatgatgatg

SEQ ID NO: 7831 - DNA, 636 bp, Gossypium hirsutum
ttatagtttgttagttatctagctgttatctagctgtaattttctgttagcttagttagatgtttacttcatgtatataaacatttttcctattctgtaaataataagggaaaatcattttcatattttccacgttttctacattttccctttaaatttatgtgtataaatagatatgtagattttaaaattcttaggtttaatgatgaaccttgttccatatttatttgaaaaccctatgtttagggtttagcataccaatgaaaaccaccgtagttatatgtacaattgtcattacgtttggtaagtgaatttatttctcaaataaagcttagttgagttcatatttggatggagttgaatgaatttatggtatttttttcttttacaattaccacgcaattccaacagttcaatcttatgatataaaaactagatgagtcaaatgttaagagttcaaaacaacttgattctattgactattgaaggatcaaatttgctaatactattcattaatggttaatgatctgataatgcaaaaatacttatgaccattcattcataactcaattttaagcatgcatatattagactagtgtgtgtgatctgaataaaatacattggattctttgacca

SEQ ID NO: 7832 - DNA, 659 bp, Gossypium hirsutum
cactcatcgtaggggattcctatttatttagcagcagctttgtgaaggtaggacctttgagttgatttgtgtaagtatttcaaattagttaaagaaattaatctttacaagcacgcctaatataaaaaagtatctatatctgtctaccacgtaagtctaccattatttattcccaacaagtagtttctgagtgggactggcatatttggtcagattgatgcaatttgccacctatgatttcaattgaaaagcaatgtaatgaggagtcgcagatgttagttttggtcattaatagttttagctgtggtgtcttgcatgacagctgaatcttaatagcagtccagctgatttgttgcaaatttgtgttggaagaagaaaatagttttatcatttgaatcagacgatagaaaaatgtctttttccaagggttcataagtaataggatcctgacttgttcactttgtcttcaagcttaacttcttaaaatctttaccctctgcaattttgggggtttaaatttttatttgccccctttttctggctaacttttcttacccagatttaacactcaacatcgtatgcctaacatttttacttccttatgcatgtatttgcagtaaccttacaggtttggatactagaatactaattgaagccag

SEQ ID NO: 7833 - DNA, 660 bp, Gossypium hirsutum
  misc_feature (590)..(598): n is a, c, g, or t
  misc_feature (600)..(605): n is a, c, g, or t
  misc_feature (607)..(613): n is a, c, g, or t
  misc_feature (646)..(652): n is a, c, g, or t
tccgacgtcgagggcaagctaatagcctttgctgtcccgccacgtggaggtaacccgttggtgctctaaagtaaggtgtgaattgcgttggctggtggaagtagaggtccgtcgaggggaaggtgttcggagaactcggttccgtttccttacgatggaaattacggtggcagttacaagctgcgcatttgagagcgtcgagtgtaccttcagttccagccggcatgaactcaccgcatccgtcgacggcgtgaccgccaatacccaccgcgtggttcttcaaacactctctataccttcgcttcctctgttgctgctgttgctgaccggttggagttattgaacccggttcagcagctgacattttgactgcggttgagtttactagcgagttataacttggtgccaaaccgatctcttcttcttgttcctcgaactccatttcttcccaccaaaacaaattaccctaaaagaaaatgattttatatacaaaaagtataatgctttgtttttttattttccttctctcttttctctctttctatctgcaaaagaagctttttttttttcccccgaggggcccttttggnnnnnnnnncnnnnnnannnnnnnttttttttttttgggccctggattttaccggtnnnnnnngggggggg

SEQ ID NO: 7834 - DNA, 685 bp, Gossypium hirsutum
  misc_feature (653)..(653): n is a, c, g, or t
taaggtacaaaaagatgctcacttagtgaagtgcagtacataaagtgttttttgtatgtgtgtctatgcaaatatatggaataatcttaagatggataatcatgataatgaactataatagtgatccaattcaatcccacaaaaacatgctaaatcttctttttcttttgttggccaatacgcatgattctattatgatccaaagctttttctttttctttttcaatcagttaatgtctacaagtagaaactattatcataatcacaaattccccaataaacacagcaaattattccatctagtgaccaatggagaaacccaatcaaccactaaatagattgaagcaatgtaaaccagtataggatcctaaagactccaaggtcttcttcaaacatctaagtatattaccaaatctcgccatcttcatatcatatatcagtaacaaagcattcttttttctttccgaataccagacaatcgcaactgttcaaacccagataattaattaattcaatgatgaatacgactttaacatagtcaaaacaagaaacccagatcatcatgtttatcgaaaaccatgaaaaattcatcaataccattagaattaaaagcgaaagagatatttaccagtttcaatgcgttattcagagangattgattaattcaatgatgattacgactttt

SEQ ID NO: 7835 - DNA, 851 bp, Gossypium hirsutum
  misc_feature (206)..(220): n is a, c, g, or t
  misc_feature (687)..(687): n is a, c, g, or t
gttcggcctgcatatcacttgagtcaatattaaactaataaactggatgatggtcacaaaaaagaaccgtaactggaacagccaagggcactagaactcctatattccatgagacacaataaggtacaaaaagatgctcacttagtgaagtgcagtacataaagtgttttttgtatgtgtgtctatgcaaatatatggaataatcnnnnnnnnnnnnnnnatgataatgaactataatagtgatccaattcaatcccacaaaaacatgctaaatcttctttttcttttgttggccaatacgcatgattctattatgatccaaagctttttctttttctttttcaatcagttaatgtctacaagtagaaactattatcataatcacaaattccccaataaacacagcaaattattccatctagtgaccaatggagaaacccaatcaaccactaaatagattgaagcaatgtaaaccagtataggatcctaaagactccaaggtcttcttcaaacatctaagtatattaccaaatctcgccatcttcatatcatatatcagtaacaaagcattcttttttctttccgaataccagacaatcgcaactgttcaaacccagataattaattaattcaatgatgaatacgactttaacatagtcaaaacaagaaacccagatcatcatgttnatcgaaaaccatgaaaaattcatcaataccattagaattaaaagcgaaagagatatttaccagtttcaatgcgttattcagagtaactattttaggaggcccagatttctttggcgttcccgtggccattggtctattttacatggactcggcggcacttcaat

SEQ ID NO: 7836 - DNA, 633 bp, Gossypium hirsutum
  misc_feature (62)..(62): n is a, c, g, or t
  misc_feature (64)..(65): n is a, c, g, or t
agttcctcatgtttacagaccaaatataataacttagtcctgactagtttattcataaacantnnaatgcatgtgctaggctaattaaccatcatagtatagcatacgacaagaaaacatgaagcaaatgaaactgatcaaagtcagtcctcagggttaaacaaaatatatgatgggggcaaaagttgatatgtttaatctagggtcctgatgttgagaaggtgggaacagcatgcatactccaaagaactaaaatcagcctaaccctagacaggttcagctaccattcaatatatatgaaggaaattgaactgatgatgaactttgcaatatataaaagatgaagtttcttctgtctcctgaaaaagggtatttttttttgtcactaatattggccttgggttgggtctaagataggtaacaaactagggaaactgtggtgaagacgtcattaatagtttcaatcaattattacgactaatgtgacaagttgcagtctaatctgatatatttcttttacaatcatataaaatgagattgtggtaatgttcggtggccattacttttttttttttgggggggggggggattttttttaaaccaaaaaaaaaaaaaaaaaaaaaggggcccccc

SEQ ID NO: 7837 - DNA, 606 bp, Gossypium hirsutum
ctatattttgagtaatgttggaaaaattttgctactaatttataaaatatttttaattaataagattaaacatacaaatttatggtggttcgatatatatatatatatatattataatagccttaagctgataaagaacaaataattatatttgatcctagtcaaaagtccgagatagatatatccttttaccaacaattgtttagaaagtacaaattatgataaagagtttaaattataaatttagggtgggtttggataagcgattggtacggtgctgtgcgtttaacttactttttgtctcacgctacagtatctaatctcaccgccactattatttttaaactaacctcaaggaaatgcaccgttcatccaaactcacccgtgaaatggtgaacttcatgagttatggctttaaatatatcggctcacatgccctcgcccaacctttatgcgtcggtgcttttgaattcacacccttgcctgacttgaaaattgagcatgcccctattcctccacaaaggaggctatcaacttcacctcttctcttggagctttcttcaatccctccgaagatacagcctgaaaagcaaaacccttaaatcc

SEQ ID NO: 7838 - DNA, 631 bp, Gossypium hirsutum
tcatttaggaagctggaatctgccagtccccctatacgctactgcatatatatatctatgggtgtaacgttcccatacggatggttgaattccaatatcattgccaaaaggtttcctcctgcatctgcattctctgatgggtagaaaatctttccatttctccttgaaaatcgaaactgaatctccttttgctttgggtcattaatggtaggacaatttagtccacaagttctctctttgaacttccactattgaaacctcctagtaattacgtagggctatgttgtgtggaaaaatgagcatcttacctagttatatttgaatcgtttctcttctcttaatcacgtcaaaaaagaatgttgaatttagacatcacatggaaccaccatgatgaaatatctcaaactaaaaaggattgattttgaagtttttctaacttcaattatcaaataaattatgattcaatttttaattgatgattggtgtttatagtcttaactagaggtgatcatgagtcgggccggatttgagccgggccaaacaaaaatttaagtctgttttctaggcccgggcccggcccggcccaaaatatgggcctaaaaatttgtctaagcccggtccatattgaata

SEQ ID NO: 7839 - DNA, 934 bp, Gossypium hirsutum
  misc_feature (239)..(240): n is a, c, g, or t
  misc_feature (714)..(714): n is a, c, g, or t
  misc_feature (742)..(742): n is a, c, g, or t
  misc_feature (756)..(756): n is a, c, g, or t
  misc_feature (766)..(770): n is a, c, g, or t
  misc_feature (782)..(782): n is a, c, g, or t
  misc_feature (792)..(792): n is a, c, g, or t
acatcaattctaacataactaaacttcaatacatgaccaagctaaaaaatatttttagggggtcaaaattaaattttaatagtttattatttttataatttttaaatgattaaattaaatttttatcatttttatagggttaaaatataattttatatttactaatttaaaattttaaaattttctcatttaggaagctggaatctgccagtccccctatacgctactgcatatatatnnctatgggtgtaacgttcccatacggatggttgaattccaatatcattgccaaaaggtttcctcctgcatctgcattctctgatgggtagaaaatctttccatttctccttgaaaatcgaaactgaatctccttttgctttgggtcattaatggtaggacaatttagtccacaagttctctctttgaacttccactattgaaacctcctagtaattacgtagggctatgttgtgtggaaaaatgagcatcttacctagttatatttgaatcgtttctcttctcttaatcacgtcaaaaaagaatgttgaatttagacatcacatggaaccaccatgatgaaatatctcaaactaaaaaggattgattttgaagtttttctaacttcaattatcaaataaattatgattcaatttttaattgatgattggtgtttatagtcttaactagaggtgatcatgagtcgggccggatttnagccgggccaaacaaaaatttaagtctnttttctaggcccgngcccggcccnnnnnaaaatatgggcntaaaaatttntctaagcccggtccatattgaatatatatttaatatatataaaatatatatttgattaaaaataaaaataatattaaaaaaaaaaattgaggccgggccaaaaaagttttacccgaggcccggcctgttttctaaacggtct

SEQ ID NO: 7840 - DNA, 585 bp, Gossypium hirsutum
cagcattttgtctcctcaaggtagagatctgattttagagggcctttactggcaggtcggtaatgttaaagaaccttttcattttgaatggtaatacctttttcaaggatgtaagtcctgcgaatggaatgtctgaagctaggtcttcaagtttttttcttaaatgcatacaagttttttatcccatgacagtatagatgtactttgatctagatgacttgcttttagcacttcttaagataagttgatatggaaatttagtaaatctgacgattatacagctaaaatgggatacaaatttgcaagagcagttttaattcctccctcccgcatttttgaagggaagttttttttttttggtttttcttatggtcaagaaaggttccttataagatttttcttttcatttggaagcttcgtcacaatgggctgccttgcaaaactgaaattgctaaaagagttggaacagaagatacctcatatcctttttttcaataatatggatggaactttggaacatctgttcatttcttgctctttttcaagggcaatgtggtttaggagcagtttcggatttatgcctga

SEQ ID NO: 7841 - DNA, 636 bp, Gossypium hirsutum
actgcttccatattgtgtaaactctggacaactttttggcaactgttagctttgtggttattgcattgcagacattggtcaatggtgatacatgggctcctgctgttgaacgagctattgggaagatgctaaatgcattcattgttacaaattctgaggatgcttgtgctcttagaaaatgtgcaagggaggcaagatataacttctttccaattgtcatacagaggttttcaaggccaaggtgaaaggatgagaattctaattttcttaaaaagcctcctatagcactggtgttttactacagtttccgtcttgatatttggttctgctttcattgtaggttgataataccaaatcattcactcccccagacgagccacccaactactctatctgttttacattcagataatcctaccatctacaatgtcttggtagatgtggtaattttatgtctctcataagtttctgtttttaagaaccttctctacctatttcatttcttttaggacttctattaccttattcacaatgcagaggtttgttagtttggcaggaatcaatgagcttggtccttgaatctttctcatacttgttcttaaagagctattactgctgggttatgtgttgcacttc

SEQ ID NO: 7842 - DNA, 420 bp, Gossypium hirsutum
aaattttcaaataagatttcaaatcggatattccattaaacattcttttccctttctattgattaccttaattcacttttttgtagcttatattatgatcgaaaactccgtcatatcatataaaatttgtgtcttctaatttatgaacactattcaatatatcatctatcatatcattttgagaaaatttactccaaaaacttgcaccatcatcacttttaaatccatgaacaatgtgtcctctaagagtatatagcctttataagaaggattttatgaagtgtataaagattttataacttttatggtagaattttcatatacgtcttcatacaaaaataatatagatgttataatatagtcttcataaacttaatttgctattagatcaaaatttgattgaaatatttggcttgacgt

SEQ ID NO: 7843 - DNA, 877 bp, Gossypium hirsutum
  misc_feature (173)..(189): n is a, c, g, or t
  misc_feature (200)..(200): n is a, c, g, or t
  misc_feature (203)..(203): n is a, c, g, or t
  misc_feature (345)..(345): n is a, c, g, or t
  misc_feature (843)..(843): n is a, c, g, or t
  misc_feature (872)..(873): n is a, c, g, or t
tctttgttcctcaaacaattgttgtctatctatcaacgaatttagccaggttgcttccaatagaaatcctatttcttttcaaataagatttcaaatcggatattccattaaacattcttttccctttctattgattaccttaattcacttttttgtagcttatattatgatcnnnnnnnnnnnnnnnnnatataaaattngtntcttctaatttatgaacactattcaatatatcatctatcatatcattttgagaaaatttactccaaaaacttgcaccatcatcacttttaaatccatgaacaatgtgtcctctaagagtatatagcctttataagaaggatnttatgaagtgtataaagattttataacttttatggtagaattttcatatacgtcttcatacaaaaataatatagatgttataatatagtcttcataaacttaatttgctattagatcaaaatttgattgaaatatttggcttgacgtgtttcatggaaaaactttttttatccaataatagatatataattatattttaatataaaatatatgttctaaaattaaaatatattattatagtataaaatgttttttttacaaaaatttaaataaaaataatttcttaaatttaaattatgcatgtgtatttgaaaaattataaagtaatgatatttgcttataatttacctacctaattaccccaattctcaacaattctctaagaattgaagagtgtaattaaagtgttccaattacaaccaattcaataaaacctactaattataatataattataagtaattactaccaaatctaattattaggtgactttctaangactatctaatcattgaggatgaaccttnncatg

SEQ ID NO: 7844 - DNA, 665 bp, Gossypium hirsutum
agaaagatgggtaaatgaacacgaagaattgaccacctgtaaatcacctttatattctttttaggccattacaatgttcaaacaaggtgaaccaccccccttcacttttctttttttgcataaactgcaaactaataggtacaaagaaggtgataatgttaaaaagttctgttcttgaatcacatgccattgctcaaaggatatatgcatttacatacatatacatatacatatacatattaaattatctgttaattcacttattttagttgttcttctagtgtaacattaaacttggaaaactcggatttctgtcaaaacttaatcgaatatagtcgtgggataatcacaccgaaccgagtgagttgaaatgagtccatgcgtcctgaaaattacaagcagacattaaggaattaaagattgacaaatttaaatgctattgtcctaataagaagaaaagttggccgactaaacaaactgtggccaaacaaccggtcatcccatgtgtaagaattttcaaacttgtggaagtccataagggatctgcccagaaatgttcgcccatttgtcttaacttggagacaattttaagtacaataattgatcatatgaaacagatttggcaagccagcatggattgacaaatggctaaattgaattaacaa

SEQ ID NO: 7845 - DNA, 570 bp, Gossypium hirsutum
  misc_feature (59)..(60): n is a, c, g, or t
  misc_feature (564)..(565): n is a, c, g, or t
tttatcaactaaaagatttggggtcttcaaatcacggtgtactatcatcggagtgcaanngttgcaggtaattcattccccgagcctgaaagttcaagcatccaaaagagaaagatacccagaaaaaccatcaaatgaactttaagcaaaccagataaataaaatataagacaaaaataacataatcattctgtgtgtgcatgtatgagtgtctatacatataagcacggttgtttgtaaaacattaaacttcatattaatcagatatattttgaaaacatgacgaccttacatattaaataactttaaattatatgcctttaattagtttcagttatttgtgtatatgcaattcaaagtgcaacaaataattattattcaaatatagataaaaagaagaatgcaattatatgtttaatatataagtatcgtttaaaaataaaatggaaaaacaaaattcaccacacattgcatatgacataagatattagtaataataaaataacagaaccatacagcatcaagtgccattctcaaacgcctccgctcatctaattgatgttnnccggt

SEQ ID NO: 7846 - DNA, 368 bp, Gossypium hirsutum
actcggtaggacccgcgagtgtactcagcaaagccaaaaaatacattaaagacgatagcatggaaaaagcaaaaggcagccacaagttatggcaatgacctgatgaagaataataagcttgtttggtaatagagatgaaagctatggcttggaaaacaaggtaagcaatggttaattgcagtgctttcttctgatagacctgcatattcctcttctgtttctcggctaaaaggcttaattctttgaagattttggtaagctgttcaaggtgttcagccatggtgaatatagtagctgtactgcttgctgtcaatgtaaatacagtgtaaaacacttatatatatatatatatagagagagagagagag

SEQ ID NO: 7847 - DNA, 568 bp, Gossypium hirsutum
tgggaagttgatattccatatccatttggaatagaagatgggtgttacatgcatgaatggtttagagtaacttgcaatgaaactattgacgggtcaaagctttatataagtagcatcaacctgcaattgcttaatgtttcagttttgcaaggcacagctaccatcaacaattcgataacttattccaattgcctaaaggaagatggagacactgatggggttagtatcaatttaaaaggaaccccgtttttattctcaactgagtacaatatattcatgtccgtaggttgcggtagtttgactactttttcttatagtctaaaggatgaatatcctgttcgtgcctgcatgcaacccatttgtgccaattttctagcctccgatattagctgctctacggatcttccttccgatctaagttcctttgctgcaaacatgaaagagatttatcctagtaatgacaccaagagttgtggatctgcttttatggttgaccaccggtatctcgattcacttgagccaataaattcgaagaaaacaacgttgacgcacgtcccacaacatgcaa

SEQ ID NO: 7848 - DNA, 632 bp, Gossypium hirsutum
cggtaagctaagatcatttagtatttccccatgcttattccattgaacatgtcttgaaagtttgtaccaactgtcctctgttattttcagatgggacagtggcaccctgctgatgaatatgacggcctagtgagagagataacattcagaactatttgtaacagtcccatgtgtcctccagacactgccatgacagagtaccagcattccattttatcacccgataagaaaaagcttgtatgattcgttcttattcattccgtcaattcttatttaatgatctgtgtctctcagttaaaaaattcatttcctgtgatgctttggcctattctttttgttggttttatgtttgtttcatttgattgaattcagtcaattttgtctattcagttaaaaaattcatttcctgtgatgctttggcctattctttttgttggttttatgtttgtttcatttgattgaattcagtcaattttgtctcttcttgtaggtttttgaaactgtacaacaggcacacgatgttccatttggcagctatttcgaggtaagtattagctggatatttatgttttcagttccggtggcagttctaagttcaaacttctaggaagaaaaatttgcttgtgatattt

SEQ ID NO: 7849 - DNA, 573 bp, Gossypium hirsutum
aagagaacacgaagttatgtcgaaatcactgagtcattgggagttgataagccatccgatatactatttgtgaccgatgtctatcaagaagccacggctgcaaaagctgcaggtagtgtactgatctttttttctttgccggtgtcagtattctaatcctgttgattctggctcgtgttttagacttttttgctttcagaatcagaacctgacaccttaaaccgttacgaattagtttaagaacaattttaaattttactctgcacatccttgcataccctttgtttatcaattactgtttttcatgtttatccatttggtaggtttggaggttgtactctccatcaggccgggaaacagtcctcttccggagaaccatgggttcaagactatcaactctttcctggagatctgatagaagtttggcatttctgtaataatatcggtcttccatgcacttgtaataagtaacttttggatgcaataaatcatgatcttgtagcaaccctttattgatcgtcacctgtgaatgttggatacaaagtctttttttacatgtttggatcggttaaa

SEQ ID NO: 7850 - DNA, 538 bp, Gossypium hirsutum
  misc_feature (506)..(510): n is a, c, g, or t
gtattgacaatttgtctaaatggatacaatgattgagtatattgtatgaaaatcataaacagctaaaattccagaaaaaagacaattaggagtattttatgcctgaaaacaaaattaaaccaatacggttggtttgaaaaaaaattatgctcaaaaggattgaagatgtccggctcaaaagcctctatacattgaggtaccatcaaacatcacactaactaaacatagttatagtcctttaatctaaaatctaatttgctcaatattcaactaaggagcaacagcataattaacaaataaaaagaagcatgaaaaagacacccatcctgttaagagctgtagaatgtggaatcatgataactacatatatgttgttagtagcataccatctttttgactgattagcatgataaatcaaaaaagatgatgatatactgtgactcaggcaggatgaaattgttaaaattgcttgtatatacagtaatgctattacaatagctcccccnnnnnttaccattcatcttttccattatcataa

SEQ ID NO: 7851 - DNA, 650 bp, Gossypium hirsutum
acatgtctgcctatgtgtatgtatgtactaattgcaaatttctctatctgtactaaagctaaaagagcattaaaccgatactcacttccccagagatacgccttcgggggaatgcacgtattcagctgagccatcagtttctgttcccatagaaagagcagcatcagttatttcggatttttcatcgtccgttgaaccggtttcagactgcttatcactgtgaaaccagttgtaatgatcagaaactgttttctcagtatgtcctaaaagcctattcggagtttttggcctatagatgggggaagaatcatacctcaaagagcctgttccgggctgctcaccatcgatcccggggtatccgttttttagatcttttagtaaatgcaaccgttcaatctcctcgtcctttttagctatcgtgtccttgagagatgccatctgcagagccggttaaacttagagaacaataacgtgaatggagattctatgttgtgtatatatgtatgaatgtatgtatgtatccgtatccataattcaagtgaagaacatagggaaagttgtagctaaaacataatcaaagtaacatctattccatctactaaagctaaatgaagtacatttggtacgtattcatccattgccaaaccaat

SEQ ID NO: 7852 - DNA, 613 bp, Gossypium hirsutum
catttctatggccttctctagaattttaatttttaggtttgtctgggattgtcttgtagtccaaccggaaataaaacaaacagaaaatgaagtaaaataaataaataaacactggcggtgtgtctttagtaagttatctcatatatacaagattcctattgaaccataagaaacattggcaagtttgctttgtttcatcatcaagtaaatcaaggagttctgctttttgcagttatcttgtttctgggggcatgcacaaagccaccacagttgtcgatgattactgaatacatggagataggatcgttgtactttttgatccatctgagtggtcagaaaaaacgattgagctggcggaggagactgaaaatgttgcgtgatatctgcaggtttgttaggcctgtgcatcaattacaaagtgcatatctttctttgccttcatatttgaaaggaatatagtgcaattaagaagattttttctgaagttttatatttacacctagagtctgaacattcttgtactcaagcttgttgagtttgtagaaaaacaatttattttcaaatatatttggacctgtataattaggttaattggtcatgttgggatgaatga

SEQ ID NO: 7853 - DNA, 613 bp, Gossypium hirsutum
agttggtagttgaatctccactacgaatatggaaaattgtgagattgaagtggtttgcacttctacttaggtttgttaagcctggattgcttttttaatttaagcatgttgtacatgtaataaataatttaaaatttataacaatattaattttttttcaaaattaagagaaattataaaaattcaaaaaattagtatatggattaccatacaaattatcatgtttaaaattttaatgttttagtcagatttttattaaaaaaattaattagactatttttaaaaagttatggtcaaaatcgactctttttaaaaatttaaagattaaatttagattttaaaaaaataaggatcaaataaccaaacttgtttggctaaaaaaaaaaaaaaaagggggaaaattttttttccgaaagaaaaaaaaacccccaattaaaaaaaggcgaagggtttttatcaaggcccgccaaagaactcaattttccttttaaaaaaaaaaaaaaatttttttttccacttttttatttttttttaaaatttaaaaattgggccccggaaaaaaaaaaaaaaattggtggccaatttaaaaaaaacttagggcttttttcggccc

SEQ ID NO: 7854 - DNA, 661 bp, Gossypium hirsutum
acgggatgataatatacgttttaacctccagctttggtgctcggcgagtaggagctttcggtgcaaatctaacctgcaaaatagaataatatccaaaaaaaaaatttacaaaatttatcgactgttgaagttcaaccatagatgataatgatggaacaaaccttcctggagggagcattggttttgttagtttgttgttccattgaagatgatcaaattcaaaaggtcttcaaacaaagaaaaaatatataaaaacgattactttgtgtgatgttttatgaattgaattgatatgaatatgaagatgcgatttggtagggaagaaaaacgggccaactataatagttgtaacgtggagcaagtatactacatatataactgaaatcttaagaaccaaaaagttaggtcatcgtgtactcctaccgttctgttccatgtgtaagccagtataaaaccctaaaaaccctcaatatcaacccccgccatctatctaacagttattatccttttttaaaatatttttttagataaaattttgcaaatttagcttaatttgcttcaaaatttttaaagaaaatatcaattactcccttgcttttttttcatatttaattaatagatttttaattgatatcttatcttaattcaagatttgagatga

SEQ ID NO: 7855 - DNA, 852 bp, Gossypium hirsutum
  misc_feature (226)..(226): n is a, c, g, or t
  misc_feature (387)..(387): n is a, c, g, or t
  misc_feature (834)..(834): n is a, c, g, or t
gagtcttcgacgacttcactgaaacccacgcaaaaaacaaccaaaaataaagtggacataagcagattaaaaaaagtaaatttgaaaatgaagaaaaaggcgtcttgcattgcaatccatgtacgggatgataatatacgttttaacctccagctttggtgctcggcgagtaggagctttcggtgcaaatctaacctgcaaaatagaataatatccaaaaaaaaantttacaaaatttatcgactgttgaagttcaaccatagatgataatgatggaacaaaccttcctggagggagcattggttttgttagtttgttgttccattgaagatgatcaaattcaaaaggtcttcaaacaaagaaaaaatatataaaaacgattacttngtgtgatgttttatgaattgaattgatatgaatatgaagatgcgatttggtagggaagaaaaacgggccaactataatagttgtaacgtggagcaagtatactacatatataactgaaatcttaagaaccaaaaagttaggtcatcgtgtactcctaccgttctgttccatgtgtaagccagtataaaaccctaaaaaccctcaatatcaacccccgccatctatctaacagttattatccttttttaaaatatttttttagataaaattttgcaaatttagcttaatttgcttcaaaatttttaaagaaaatatcaattactcccttgcttttttttcatatttaattaatagatttttaattgatatcttatcttaattcaagatttgagatgaagcattatggtatggaattaattcacatttaattaaaattttttatttctncatatattaatcaataat

SEQ ID NO: 7856 - DNA, 611 bp, Gossypium hirsutum
  misc_feature (530)..(530): n is a, c, g, or t
  misc_feature (533)..(533): n is a, c, g, or t
  misc_feature (535)..(535): n is a, c, g, or t
  misc_feature (537)..(537): n is a, c, g, or t
  misc_feature (554)..(555): n is a, c, g, or t
  misc_feature (558)..(558): n is a, c, g, or t
  misc_feature (573)..(575): n is a, c, g, or t
  misc_feature (582)..(582): n is a, c, g, or t
  misc_feature (584)..(584): n is a, c, g, or t
cggtctgcgaggtcatacacctagcttcatctgccaatgaagccgcagctaccaaatcaccagcatgtttcaatatccggctctgtcaccaacaatgaagcaactaatatacacctaatccagcctcaagaaaattccaagaatttttccaaaagacatttaaaggtacaatgttcacaaaagaagcaatagccatgcatcaacacactgaaacctttgaaaggaggtcatatacttgtccaattaccatcaaaacttatgttccgcaaagaaaaacttgtatccattttatatgaatattaagtttgcacaatttattgaacaaaacacaatattcaatcaaagccagtatcatagcaagggattttacaagtaataaatccaaggatatatatatatcttgaaaagctttcacgcgttgctaagtcttgtgatatgtgagacaaaacacattgaaagatataaggatcattttttttttttaaaaaaaaaaacccccctgacaaaaatataaaaccccccaaaaaaanccnangnaaaaatttcaaaattgnngancaaaaaaaaccttgnnnaaaaacnanccaattccggggggggggggctgaaaa

SEQ ID NO: 7857 - DNA, 629 bp, Gossypium hirsutum
attcttgtaagtaccagcagggcattcctagacaacataaatagttaacaaactcaacaactgaaagtattaacccaatttgtatcagttaaaatgaagaaaaaagattttacatactaatacaaagagatgaaagataagacttgctccaacgaatttggaggacagcattatgttagttacatactatcagaacaaaatatactcggtaaagaagtttcattcgtaataaattgcccgttaattcagaaagaagaagtggactggatagaactgccctccttaaaaagtggaaacaattcaatatagaattcatgtgaatttgtttgttgaaatattttaatgatctgggatcttcaattaaaaggttagccccaactatcgtatgcaatgttaaacaaaaagaatctgaaaattttcaaatgctacagaattgcctacttacgacacaaaatgtcccataaagcccctttggacaagctttaccagtcacagttccattttctccaacaccactcttgtctctacctagtcctcccctgtaaaaataatcaacatatcaccaggttatcaagatgactaacttgtacgcaagcatctaataaaagtaaacttgtcaattctgaccc

SEQ ID NO: 7858 - DNA, 653 bp, Gossypium hirsutum
ccgtcttggtttagcttccgaccaaacgaaggcttcaagttcatcatctccattgcaaacttaatttggccttcatttgctgctatgtgaagtggagtatcgatgaaaggaatctgatcaatatgctccaacatgtacggatcctttcgaattagagcgtacaaggcatcagtatctcctgttccagctgcttctctcaagcttggatccatgcttttgtttctttctttaaatgatgaagaaattaggagagttgcaaaatgactatccttatttgaaacctcaactgatttaaaacaagcttatccgtcaagggtagatttatattgaatataaatatcgaatatttaaaaaaaatgattaatatatctatatttgacgagggatataaattgatggccgcctataacagacgtcaaaatcttgaatcccaatcactatttttaaggcaagttgaccagcttcgctttcaaaaattttactctaaaatttatatttttagtattacttttagaacataaaatatttattttaaacattatgttataaaatagataatatattttgtgtattggtatgtgttttttttatatatttattttttattattttattatactttataggatatttgtgaatcctttggctctctc

SEQ ID NO: 7859 - DNA, 641 bp, Gossypium hirsutum
gtgagtaatgtataaatgtgttttcggtagtctatcatgtagttgcccatatattttcacattgatgcttcagtacatattgaaataagttccatttatatgaattggacttgtattagttttgcctaaagttgcaattttgttgcatattaatttctgtaatttctattcagttctataacgttgttctttatttattgcagttgggctgggaaactggcaaactgttacttggtgtcaagttcctagttttcagtttcattgaatatcttggctagttcagcagctttataaccttgtatttatcttatttttcagacacataccaagcgcaaagagtacctttgcaagtaaacaatcatattgtctcaccaaatggtgtctccaatgaagctttgaatgaaactgttgtgtttggtactggcctccagaatgaagttggtgaatataattgttttctgaatgttataatacaggttggttttttctcatatgagtgaaatggtcttttttgccatactgttctgaacttcactttatatataatcttctcttgttaaattgctttctgccttttgcataacatcagtctttatggcacttgagacggtttcgtgatgaattcttgcggagatcgacac

SEQ ID NO: 7860 - DNA, 605 bp, Gossypium hirsutum
tcatgtcatttggatttatgaatgctcttcaacctttatttgacaacagtctaatatatagagagtcttgggaggaacaccttcatcacttcagtaaagtcttggaactcttatgtgctcatcagtttttctttaaaaagatgaagtgcacatttggtgctaaatagatggtatacttggggcactatttagctagtggagttatagcgatcctagcaaaatcaaggtagtaatatattggtccccagcacattcaaccaaagctcttagagatttctcggattggtcggatattacgaaaaattcatccaagattatggatagttagttgcacccttgactaatttaccaaagaagaattctttccattggagtttcaaagctgttggatcattcaatcaactcaaggctactctcttcattgcccctatccttaggttgctggattttatacacacctttatggtagaatgtgatgctttagggagaggaattaaagctttcctatgacaccccattgctctttttagttgaaaattgttagattgccatttcaagtaacatgcttatgagaattaataggatcgccaagtcaatccagaact

SEQ ID NO: 7861 - DNA, 266 bp, Gossypium hirsutum
gatgtgtgtgtgtgtgtgtgttttttttcctttcttcttttttgcacttaccctagaaaattttttgtttctctttgctctaatctgattgtgttaattgattttgttttatgttaagaaagatagtagaggatgaatcactgcgttcccgatttcgaaatggaagacgattattcaatcccttcatcttctatattaaatcgcgctagaaaaccttccatgtaagctgctgcttgctcttcttcttttttctttttctttttttt

SEQ ID NO: 7862 - DNA, 562 bp, Gossypium hirsutum
  misc_feature (515)..(522): n is a, c, g, or t
  misc_feature (540)..(547): n is a, c, g, or t
  misc_feature (550)..(553): n is a, c, g, or t
  misc_feature (557)..(559): n is a, c, g, or t
ttttgataccttagactgagtctaaccattattagttttctgtactttggttggatcagctcatatttgttttttgttctgaacaactttgttattatacaatttctaaaatcatctttctagtaccttgataaattgtgtattcttgtgtatatgtttcttgattaattttgccttgcacaagtttttgttagagccaataggttgcttactttttcatggaagttagtaataacttggaggtcatcggtacatgtctgtttacttgatgatgcttgtagaagtctagatttatctaattgcttaactactgaagctcttttggtgttaatatgaatcatgagattcacctgatctcctccagtctgactctctctctctctctctctatatatatatatatataggagatattgctaaaaggtgggcaagtgctatatgctctatcttcctgtcacactgttgcattagataaaactgggacattgacaactggagggcttatgttaaaagcnnnnnnnncattttatggtcacatannnnnnnncannnngacnnnttt

SEQ ID NO: 7863 - DNA, 523 bp, Gossypium hirsutum
  misc_feature (63)..(63): n is a, c, g, or t
  misc_feature (468)..(468): n is a, c, g, or t
  misc_feature (507)..(508): n is a, c, g, or t
  misc_feature (517)..(517): n is a, c, g, or t
cctacttatcttgcttggcaatttatgttaacttgtgatttatccatccttttagcatggtcnaaagacttttgcttgtaaccatttttgacaatctagatgataaattggcatttagcacaggatgatagaaactggcgtgttagatgttatttaggcattttcttttactttttctatggtggatcactataagaactttggcaaagtgagagtaaggtgcattctggcagaaaagagaataaggtagtgcttatctttgtctttgaatttgtcagaatcaaagcaaaacatggatgatccaaacaaaagattccttgtttagtttatcggtagacagtatgttcagtgttcctaaggaacttaaggtacagtagctgctgacacctgtgtctgtagacaatatgttcagtgttcgtattcaagtagcttaacaaacattgtgtcatctctagagttatctatggnagtgttgctctgtgttgctctttataattggtatggaanncctggaatnttttct

SEQ ID NO: 7864 - DNA, 658 bp, Gossypium hirsutum
gataatgataggatgcgctggtcaacacaaactttttccaaggatattcagcagatgaaatctaacttcaactgaatcgggatgaatggatggcattgaggcagatggtggataagggtggcagctttaaagtaacttaatagaaatagcctgtacacaataacttaatattcaaccaaactatagacacaaatgggctcacttatcaaatacagttaatgacccatgaggatcattcaagctgaaatgggctcattgtggcattggatccgcatagatactccaaactcaaaatccggcagtcactgaaaacaacaatgtgaataaagagatttaacacaaaaatcagaaccattatccctgtccccatggctgcgcaatatgtgcccactattttcagaatgcttcagaatcatcaaaatatgtaaaagaacgacaaatacaaggaccataatgcaaatgaaagtctcaacattaacctactttgacattaccattgtcctaaacagcttaattaccagcaagataagttaccattcaacagcagtttcattacccagataaaaatattgaaacctcattgaaacaaagaacaatttcaatggcaatatcaattaaaccaagtaagattaaccatgtaacttcttgaattctctgc

SEQ ID NO: 7865 - DNA, 658 bp, Gossypium hirsutum
gggtttcagggtgttttatggatttatatttattagcctttttttttaccctcaatctttaatctaatataacatacaaaagcatttcatgtgtacttctagttacatttacctgttttgttttttaaatttactaaataattatttgttaattaaataataattagtctaaattataatgaaatttcattaattaatgtagtaatataagaaaaaaaaaacttatttattagctatctattataatagttagtataaatttaaatttaaaatttaaaagataaggaagcgaaattttaaataaataaaacttaaaatgttaaagtaaattttgaaagggttagataaattttgaattttttacttaaattttttatgtaaaaaaataaaatatataattatcataaactagcattaacattattataaatataaatatcatttaattgtcattaagatgaaaagtatattcataaaaaaataaaataatatgtttgagaatgaaaccttaaaaactttatttttcaagtcgtttgttttatctcttttgttttgcttaatgatagtgccaacctctgagtgggttatcttttgccttttacaaaccctctatttctttttttttctcatacattttgtgtcttctcgcaatctggat

SEQ ID NO: 7866 - DNA, 633 bp, Gossypium hirsutum
ttccttaattcatatctttccaacagggctttatctggtgtgtttgaacttctatcagtacaaaggggttgaggatagttctagttctagtgactaggatagggcaatttgaaaacctccttcaggatttttctctctacaactcgtatggttcaagatgcaattaataagagactgaaaagtaacttgttgcatgaagggaataacaatctaggagccaatgagcgatgccgtcagaagttaatgaagtgcttgaaaacacgaagttagagaaaaatatcatttgatgatgtacaaacaatgagtttaaatatcacccgatcagctgagaatgagaatgatgtaagacagtgaaggtatgttatccagaaagtgataattgcaggagcagtagtacatcaccattgttccaaatgctaggtagcgtagaagcaggcaattaaaacttgataagatgcttttgcaggaaacatcttctgaagtttatcacagaggaaaggattttgtttggaagatatttggagtggaaaatgtagggggaggattgaagtgaaaggtgaattcactgctttattcaggtggaagatatggaaacttcaaagttctgctctttagttagtgtctattaaggta

SEQ ID NO: 7867 - DNA, 646 bp, Gossypium hirsutum
tacaatatctctcgaatcaactagcctagaagaaaacagataaaaaagatcaacttgatcaaacttagcggtaatgaaaaacaacactaagggtatggttggtagggtgaaaaagtagtaggagggagtggaaaagtggaaaaaaaataaaatttgagtgtgcttggtaaaaaagaaaaatgagaggaaagaaaacaagaaagacaatcattttccatcctaatgcataaaaacaaatcattccaatttggaatgacaaagagaaaatgagtgataaattagttcaaaattatgcatttttcaaaagttccaatttctttccttttattttcaactctatcaagcaatgtatggaaagaaaattactttttctttcaatttttccatccttcctaccaagcacaacgcgaaaagaaaaatcatattttctatctttctatcttttactctttcaattttccatccttgcaattttctttccactctaccaagcaaagcctaaacctatcaaataacatcatacttgactagacttgaaacttgattaaggaactctgagattgattcttctgtggccaaagctggaggagagacattacttgatggcttagcatcctgtggttctggtgtggatgaccctgaattg

SEQ ID NO: 7868 - DNA, 622 bp, Gossypium hirsutum
cgaagaggccaactgcagagaaattattaaagcactcctttttcaagcatgcaaaacctcctgagctttctctgaagaaattatttactgatctgccaccactttggaatcgtgtgaaagcccttcaggtttctgatcccaatgccattttgctttaatttccatagtatttgtctaatgctttttttatacaaaattttacagcttaaagatgctgcacaacttgctctaaagaaaatgccttcagcagaacaagaagctttatcacaggttagatatcatcagtcatacgccattttcatcttaaattagatttaccatttttttctgataatatttctgtttaactgtcgggttgaccattcggggacatttgtgttttctcactgttgagggtgttatcttttttttgcttgtcagagtgagtaccaaagaggagttagtgcctggaattttgatatcgaggatttgaaagcacaagcatctctggtaggcaaatgtttagttttaacctttaatagtaagattttaatgcatacatatagtattgaaagccatttctttgttagttacatcaattacatggtttatgctaatttttcactttaacgtgctaaggtgc

SEQ ID NO: 7869 - DNA, 773 bp, Gossypium hirsutum
  misc_feature (685)..(731): n is a, c, g, or t
  misc_feature (733)..(734): n is a, c, g, or t
  misc_feature (736)..(740): n is a, c, g, or t
  misc_feature (746)..(748): n is a, c, g, or t
  misc_feature (751)..(755): n is a, c, g, or t
  misc_feature (757)..(764): n is a, c, g, or t
caatctacaccagtccagctatggcatggaccagattttgtttctagtaaaactggtgctcgggataatgcagatgcttcggagtattcaccaatggatgtctcaccatatcaagaaaccctagctgatactcgatgttcaagagaatcttccgtagcttcggatgagtcacaaccagtagttcccaatgatgcaatagatgaggatctggttactgcaacacaacatatggatataaaaggaagtgagaaagatgaaataaaaatggagggttatggagatgttttcaataaagctgttgctaccaaagctcctcaagaagattctgtatcaggggctgaaactgaaagctttatatctgcagttgaggagatagatgataacagtgatattgctcttagttcagctgaaaaggaagtcacttcgagattgaatatcgagaggcaagatagtgacactcagatgtacttttcttccacttctaattcagaacatataagtgggtgtgacttcacctttgctgcatcttcttcagctcaaagtcaactatcatcaccaacacgctatcaccgaaagaagaattcggctaaaatttcttttgatactccttattccggttcaaatgtgagaattccttgtgcatcgtcttctgcacagttttctccctaccctggaacttcagtgnnnnnnnnnnnnnnnnnnnnnnnnnnnnnnnnnnnnnnnnnnnnnnncnncnnnnnccgccnnnccnnnnngnnnnnnnnccccccccc

SEQ ID NO: 7870 - DNA, 525 bp, Gossypium hirsutum
  misc_feature (478)..(481): n is a, c, g, or t
  misc_feature (485)..(495): n is a, c, g, or t
  misc_feature (499)..(501): n is a, c, g, or t
  misc_feature (504)..(506): n is a, c, g, or t
  misc_feature (508)..(518): n is a, c, g, or t
atctgtaaataacaatttcctaatgtactgcaaacaagtttgaaataactgatttaaatggtttaacaccaaaacaagtagaatatttgacagaaaaagcaaataatacctggtgcaatggaggacggactttggagatccgtgcagatctttcaggtggtttgcataggtagtaagcattttccacaagtgtgctgtgccgaggatccaaattttttacatttttcaagcgcatcaagatctccaacatgttagccattcttatggtagtttcaggagaacgatacagaaaacgaccgcacgtctcaagaagattgcaagcgacatcaatgttatgatgagtgaaatcatctaaacaagtctgttacaaaaagaatattagaataagaaagcatatgaaacaggtttgcatctatggcatacaaattataagacaatgaaaatgagagcaacaaactgactgctcctcatttctatnnnnctannnnnnnnnnncatnnnctnnnannnnnnnnnnntatcatc

SEQ ID NO: 7871 - DNA, 675 bp, Gossypium hirsutum
ccagcaagagggaagctcatattggtaataaactaccagttgcttaatcaatttcttcaagatgacaagttcccttcacccaatagaaacttaaggccaaagttttttttccaaagttgaccttaaagttgggttttggcaattgagaatagatccagtagaaagacccaatatagggttttgtatacctaaccagcactttcagtgaacagtgatgtattttggcttgaagacaatcgcatcattgtttcaaaaggccatgatcaaggcttattatggacagtgcactagtatatctagatgatattctcatatatagcgaactcatgttgaaaatataattcaaaattgattttgctttttaatttattaactaaatttagttagtcatgtccttgttttttagcattgtttctctttaaatttttaagcctactatatatttaaaaaaatggctagttgaagtgggaacttgattttaaaaatattagttaagattttcatgttcatttaatttgtatgcatgcctacataagagaagatttttgttttgaatatcatacaacagggaattatttcattcttttcttgagaattattttttacttcctttgttaattgttagttctgattactgcagctaacttgtaacatcatatatccgacctagtcgtc

SEQ ID NO: 7872 - DNA, 674 bp, Gossypium hirsutum
aagaaacttccaagcaagcttatagttttcgcttttatatgtttgagacaagtaacaaataggaacttatagagactaaaacacaagacatccatttgtgttgtgttttcagcactcatatatggaaggacagtgtaggtgatgaaatatgtaatgatattcacctaaacaccatcatgcatatttcgaaaatgaaacaagagcatttctacatacattcttacctatccttctcagagcagtaaaatgcataggagtcattggagcagagggggttcgcgaaagatgacagcctgggaatagataaaacaagtttgttttcttcttggttacttggtgaaatcattttagcactgtgagacaaatgcgccttcttcttagccctcaatgctctagggaaacagtttggttgataatcgggctattgaatgaaagaatctggcattcatagtctcttccttccacttttgaaggataaactacatatgcaggtatcaaagatgtatcatctttgtaatggtccaactaacggggtcgcccctgtgctcagaatgttaccttcactatttttgaaagctgtaatgacttcccttccatgaggaccattgtgaggtccctcacttatctttaaatatgataatcgaaccacattagaatctttgcgaagtatcatt

SEQ ID NO: 7873 - DNA, 656 bp, Gossypium hirsutum
  misc_feature (15)..(16): n is a, c, g, or t
  misc_feature (623)..(624): n is a, c, g, or t
  misc_feature (627)..(629): n is a, c, g, or t
  misc_feature (631)..(651): n is a, c, g, or t
tgttgatatagaatnnggtggaagaggctgaaggtggctcacacgtgagtgtcaagagtctgctagcagaggttgaaatagattatttttgtagacttaatggtcgagagatggagcctctactagatgtgataggaacatgtcctgagtggatcttgatatgaccttgtggtggctcgtgtgacaaggcacatgagtatctttagttggttgagctatcatgcaggcgagacctccatgatcgagcagttggtctaatgaggcctcctggtgaggtaatcaggtataataacaatgttcagaatgggttaacacaaataaccacttgaggtgttatatttggtagattgcttcaagaaaaatggaaaagctcttttcatggttggggagataggaggaaatgactataactacgcctttttgcaaagaaaaaccataaaagaggttaagaccatggtgcccgaggtagttgaaaccataaaacaagctaccaaagtaagtttccttttaagaaacatctgattatatcacttctaatcattgaaaccttgtttctcataagttccactgtgtagagagttatcggatatggtgctactcggttagttgttcctggaaactannaannnannnnnnnnnnnnnnnnnnnnnccccc

SEQ ID NO: 7874 - DNA, 664 bp, Gossypium hirsutum
atccaagtgcaagagggagtgccttttggattccagtcattcaagttgttgccagcttcgacttcctgttatcgcttgtggtaaagcaatatagaattcaatttccttgttatttatatatctacaataaatgacttcattaaattgttaaccatacgctttttacagatggctgggaatttcctcaagtacaaaaagagccattggtggttgtcttgctatgtttgggcaggtttatggatctctaaattacgttatatttttccgtgacattgtctgaagtatgttttggtttcagtatgggttgaaggtccacttggatttggtttgttgatgagctgccgcatagcacaggcctttcaactgtactatgcatttgtcaagtaagtggatattcttctacttgggagattttaagacagactgtaaatagacaaatgatagaaccatgttggttaaattgtttaggaatgcttgatcctgttaatttttaggtgaaatgtttcagtcatgggactgctataatttttgaatcaataaggggacgatttgttcacatattattggtgcaattttatattctggaatcactttcccatgtttggataaaaaaaattactttcagtatgtaatgtgatattaccaatagtgccgggatttgata

SEQ ID NO: 7875 - DNA, 609 bp, Gossypium hirsutum
atgcagaaggttaatcatgggggtactactacagctgaaaagcctgtttaaaagggtcaggttcttttgttgggttcgaatacgtacttaatcagtgattccttgatcggtagcaactcagggaactcttttttcaacttggatgcgtccatctcgttattgcttcgaggggcaacaatcaccttggcttgctcttccaatgtgaagttcgcccactggaacttcgggtcaatgtacttcttgtacatctccaggatctcattgtggctcacaacgccagggttcgtgaagttccatatgcctgtcaagttcctctttgccatctcgatagaaatcggtagaagttcgtccaagattgtcatgctgttgggaatgttgaccaccttgctgtatcttgaaatcttggtgatgaagttgcgagggttgtttaggtcggatgagattggcattcgaactctgagggtgcagacattgttgtattctttcagcaactcttcaacctaaaaaataataaggaagcaaattatgagcatttaagacattaactaacagacaaattggatcgaattaaagatatcaatgtagttaccatagccttggtttttgaat

SEQ ID NO: 7876 - DNA, 674 bp, Gossypium hirsutum
gactgtactggaaaatcttgcggatatgctcttttgtagctttcgtggttctcgaactttttggttttagtgatattttaccttggaattttcttttgagattttgcggctggaaacgaggattgtctctaatgaaacagatggtccataactatgcaatggaaggcatatctaggtgacaaactgatagttacaacagcttatcggtttccttgttcatctgtcttttgtttgaacaaaaaatcaggttttgttttcagtttgtggtgtgtctttaaggcgaaccgaactatggtgtgtgtttgaataagtcatctcaataacttgaaataatagatggcttgtaagactcattgctcttgtttttgttagtttgatattatttctttcttaattatgttaggatttgggaactgatagtccgaatgatcgaaaggatctggacctccgacctggataaactcgactcggaagaagaatgttcgccgcagttagttgaggaccacgcaggaatgcaagatgctcgcagagatagctcgcatggaggagctcgcgtaggcctcgcagagacaaggttgcaagagggagctcgcgtaaacctcgcaaggacgaggttgcaagccatgtctgcgaggaggaccccctccctcgtgactggcaggtatgaggttcgc

SEQ ID NO: 7877 - DNA, 620 bp, Gossypium hirsutum
tcaactctctacttcttgatatttgagtattcaacaacaaacatcgggccgtaagaaaatgatgcatatcacccaacaaaagaaaaataacattttgcatgttttgtagataaattggaccactctactaaatatcttacgcttattacatttacaaacaagtacatgaacacatacatgtacatattgcaccttccttcactcagaaaagtacctttttccgccttgtgcctcaggcaatataaggattctagagcttagggtgcaccttgcacccttgacaatactgctataaatagacaaaccatttaccttctacactgtcactaatacagcacaggctttacttccacacacatacgaccagatccttaaaattttccatatacgagaaaaataaggcagcagagtggaaaactaagagagacatacttatgacacacagaaagtaatagaccaagtcaatagagaaactacacatcaaacaaataaaaaaaattcgaaattgacctatcaattaaattaatatagacagagataaacccatgcttacagccttcaatttcagcttcaccatgtaagacaaagaaaagagaacggaaaggtaaaagacatggttt

SEQ ID NO: 7878 - DNA, 591 bp, Gossypium hirsutum
tatcaggtatgccttaagtatgcatcaacgaaggcatataatattgataaccatacgaataacaagttgctagtccccaaagatcgggctcaactaactcgagaggagcttcatgcttggttgtagaagaaaaaaaaatggaatctgactttttccaaggtgacaagcagcacagaaatgtgtactttcattcatagtaacagaaacattacaattttgaagaactttgctcacaacattactacgatgccatagctcataggctgaggattggctagtaattattacaagaagtagtatgtacaacggaagaaaaagctgctgtagaagaaccgcaaagaacaccaagaggaaaatgacaatgctgcaactcatacagaccatttttctcaactccactaagcaaaattgttagaagttggccaaccatgcagcagttctctctcatgtcgaagtggcgaacggctagaagtctccacaagtgggtcaagtgcgagctgacccgcgaaatggcaaaatgcgagaagtctacacaagtgataaagtgcaagctgacccgcaaagaggccaagtgtgagctacccgcgaagt

SEQ ID NO: 7879 - DNA, 578 bp, Gossypium hirsutum
gatctgggcattgctgctcaatacaaattgatgtcaagaatttcctccttcgtggctgggttttcattgttggtcatgccaattacgtgtgcaagcttaaacaaactcttccaactttatctgctgctcttcaagaactgagggcacaaaggaacgacgtgcaacgggaggttgatgtggctgaacaacgactattgaagccatttgagcaagttcaactatggctttcaaaagcggaaactatgataacaaaggcggaaaagctgattgaagatggccctcaacaaatgaacaacttgtgtcttggcacctgtgcttccaagaatttcctatctagctacaagtttgggaaaagtgtaaccaaaatgcttcaagaaataaatgatcacgtgagtaaaggagctttcaagaaggtagcagagagtcggccctcagcttcagtggtggtaagacccgaagaacggccaattggtctagaatccacaatcgaaaaggtatggagctgcattgtggacaaagatgtggggattattggcctgtatggcttagggggtgtggcaagacaacactctgaccca

SEQ ID NO: 7880 - DNA, 603 bp, Gossypium hirsutum
ttttttatttgtcagagtagtgaaagcgagagatttggcgtgcagcaatgccactgtcggcggtggcgtttgccacccgtttgttgaaataaagattggaaactataaggggagcaccaagtacttggagatgaataaaccaaacccagaatggaaccaagtgtttgccttcacaaaagatcgaattcagtccttatccgtggagatcaccgtgagagaaaaggaatttgtaaacgatgagtttataggtaagattgcaattgacatgtctgacattccaactcgagttccaccggatagtccactcgccccacagtggtataaattggaggccgaggccaattcatcagtaggtgagttgatgatgattctttggttcgggacacaagctgatgaagtgttcattgatgcatggcattcagatgtagcctctgttagtggtgacagcattacgaatactcgttccaaggtctacctttcacctagactttggtatcttagagtcaatataattgaagcacaggatttggtggtgcccggagacaagaatcggattccagaggtttatgtcaaggctgctcttgggaatgtgaagttgaggac

SEQ ID NO: 7881 - DNA, 431 bp, Gossypium hirsutum
aaataaacaacaaagtataatatgcctaattgacggaccattaaaagtgaatttgataaataaaatgctatttaaaaaaaaacatttattgcctttttgtataaataaacataaagaattatatttacataaaatatcaatgtataattaatacaaaagtataaataaacgaaaagtattatgcctaattgacggaccatcaaacttattatatttaaaatattaatgaattaaaaagttaaataaaaaaagtaattacatatttacaaataatttaatttttttcctacataaatagatatttaattttatctagaatgactttacatgtatttcgatcattaatctaagcatctgcatggtgtcatgcatttactacttttactttgcttaatatatgattcccagcattccaagctggatttagtttc

SEQ ID NO: 7882 - DNA, 569 bp, Gossypium hirsutum
ctattaagtgataatcagcaaacagatgtggccgccattaacgatgatgggaactctgactaggattgaaatgagcaaaactcaatgaatattttgcactgtgagcttgctgttgggctttggtcaatgtttgatttgtatgggagatcatggaaccttgcttgacagttatattacaaatgtttgatgtgggtttgtttacatttttcctttcaaaaagttatataaataattaacgaattcatataactattaattattctattttatgataaagagtatatgattgggatcttgaaattgattttttttttgccagagaaattgaaaattgattatgaaaatttaacattttttattactaaattataaatatttaatttgtatttcgaaatgtatatttttatgtaactttagattaactacagaatataattctattacatggtaagagcacatttcgaaaattgaaattaattgtttcacaaatttactaacattgatatattatttcaaaagtttggataaaatttctcaagaaaatttggtaaggtgtaaagtacttggat

SEQ ID NO: 7883 - DNA, 667 bp, Gossypium hirsutum
cctgggtatgtgtaatcctggattccaagctctcgtctattttttaagaagttcttattgctcttatgactctattgatgatcacttttgaattgataataaataataaatttgaagattgtgattcttgtgttgtttcttgtttcagtactcgatttgattttacttttttttccccttttatcgcttgtaaatttatagagatttggtttaggaagcttatcaggattgatcaatgtgcttttgcgtttttctttgttcgtatttgattgataacactgcactttaaaatggcttttatttatcgatagaggtcgtaatttcatgccgatatagactggtgttagagactcgactactttgctctccgttgaaagattttgttggttgtgtcttgattatcctgatgcttaaatttcatttcccaaatatgaactagagtgaagtcacatttacatgttcagcttaatggttggtcattttatctggttgttcattacatgttcaaaataagttctatcttggtaattatttctggttgatttttagttaatgtaagttaattgtcaagcacaaagggtcaaaacttatagattccatttactggttaatgttggcttttcttttccaattttctcccctcaggggagtattgtgcctaatcacg

SEQ ID NO: 7884 - DNA, 607 bp, Gossypium hirsutum
gtttggctagtcttgtgctcattgttttctcactgtcttgtaagcaaggtctttagtggaaataaaggctcgataaacgagattagacgcattaattttttcattagtggttgacaccaaaataactagtgatgattccttctttttttccttttttttatgtggtttgacggtttatgcttgagatcatggtgtaattggctttggctatatgtcattgttgctatgtctgtgatgattgttgttatatgaaatgaaacttctttttatcaaacaagtatatatatgaaattttaattttgatttaattataaacattcaaagaaataaatatattaatttatttttatattaaataacaataattatttatatatgtaatatataaatataaaataatactatattgataattatattaatagtttataacaataatatcaaatcaaaattgtatatataaaatttcataaaattaaaattaatgtataaaaatacattttatactaaaatttatgtataatttaagtttggtaaaataattttggataaaaattttaaaattttattggccaaaactttcaaattcgaacaattaaatttagtg

SEQ ID NO: 7885 - DNA, 565 bp, Gossypium hirsutum
agacacctgtgaaattcttccacctttatttctttcacatttgcttgctgctcagttgtctttactccatgcatgcctgtggttttccatatcattttcttgcttgttcttggctcttaattttgtgatgaagctttgccccccccctcccccggccaaatttatgtgtcacaatgttttaactttgtagaaatgcccactttcttgttgcagcaatggtatgtgaaatatccaattgaaggtccatggtatgagctattggtcattcctcttcgttttgagcttctgtgttccatcatgatacccatatctattaaggtaatttatctgaaaatgctaatgattttggattgttgtccttaactttttagtggtgtgaacctggattgtactgaacagggcagcttgctgctaatagccacagaagattcttagctagaattcttgtcctctagaatggaagagattgttaagctagatccaaataatggtgcaacagtgatgtgagttttgggtttaaattattaatagtccatggcataattataatatgagtagaggtgca

SEQ ID NO: 7886 - DNA, 574 bp, Gossypium hirsutum
  misc_feature (62)..(62): n is a, c, g, or t
  misc_feature (64)..(64): n is a, c, g, or t
  misc_feature (548)..(550): n is a, c, g, or t
  misc_feature (552)..(552): n is a, c, g, or t
  misc_feature (554)..(557): n is a, c, g, or t
  misc_feature (559)..(559): n is a, c, g, or t
  misc_feature (561)..(568): n is a, c, g, or t
aatatggcaagggggtagcacttctttgtcagattagagaacttacaaattaattgatggtncnctttaatatcatcagttgctggtgcaataaaagagttagctaatgcatcatccagaattaaagtccaaggttctgtcatgctcaaaatctgcaaaatagcaaccagacccctccgtgagaagaaaaaaggttaaggttttcattctttacttgtacagatcatttgatgtttatctcattctgcaaaagtgtcaaggactgacgtatgcaaagcatctccatatccttcccatatacatgaaacaaaaacataagaacaaatatatgggtcatatgtatggtttaagtctgaggaagatgaggcagtaatcttcatcgttaattttgcatgtttattgctatacatctcaatctatcctcgattttaaatacaccaagtatccatcatatttaaatttaagttattaattgataaagaacatgcattctaggcactcgtatttatcaagaaactgaaatggcacacaggcataccgactggcannncngnnnngnannnnnnnnctatgt

SEQ ID NO: 7887 - DNA, 683 bp, Gossypium hirsutum
  misc_feature (55)..(55): n is a, c, g, or t
tttttaagagaggatggattgtgggtggcagcaatttatgaaatggcagcaattnctgaaatatctatattttaatccggttaattttcttgatatctgaatttgtttattatgctattatatttgagtacggctatttatagaaatctgaattcaatagcaacctgaattcattgaatagacttttaccttttaaagaaaaaatataaaaaatggagcaagaattaaatttaaaattcaacttcactcatcattatcaacaaactgcttctaaattacaataatcaacaacttagataataagaatttatttgtttttgattatttggtgcatgtcctccaaatagctataagtctttaactgtcatactgcttttatcaaattaaagtctttgttaaaatttaaaattgttgaacctttaatggatgaaatgaaaggttacacttagatgctaatagatttggtcccaaattgagcatttagccatggttctatgtgttttattggatttcctacaaaaattggaggaattatctattgaaacattcaaactttgtaacttctcttggcattattttcttggcatttagccctgtctagattttttcttggcattattgtttgtagatttctacatgcaaataagaggttctgttcccgcttaatgtttttgcttggcata

SEQ ID NO: 7888 - DNA, 590 bp, Gossypium hirsutum
tgaagtaagaaagggagacaccaaatacacctcccaatgtcaattgcaaagtcaccacggattgttcccggagcggattcagctgggtttgtggctccgataatcttgcgacctgtggtaacaacattcttaccttcccaaatcatagcaacgaccggaccggagataatgtactctacgagcccattaaagaagggctttgcagacaggtcagcatagtgcttctcggcaaaagatcgatccacactgatgagcttcaaccctaaattaggcacatccaatgtcagataagctgcataccactcaaaactgtagacctcaaagtacctagagtcaattccaaaaatccaaagaaacaaacacttgataatataaaacacaggcaaaagcagaggaatttaggaaaaaatatcatggaggtacgagacagattgctcttttatctaagatacaggaactaatttgctatttgttaaggaaagggggcaaaatgatagatcttacctttcaaatagaagcctttcttctcaaatctgccaatgatttcaccaacctgaaaagaaatacagaacctcaataacacccaaaaa

SEQ ID NO: 7889 - DNA, 529 bp, Gossypium hirsutum
aggttctctaggacctcagggaagagcttccttttaccgcaatgccggactgatattttatatgtgtctgacccttgtgaacatctggaccaaggggacgagggtgatgtgggatttttccgaggagttttcaagtcattcttggtgtccaaggttcggaagatgttgattgacagggcagccaagcttcatccaacagcagtttgcccttattgtaaggcaaagttgtgggacatgctgcaagctaagatgataccgcaaagtgcaagctgtaggttgggtgcttatgaggattgtatcgagtattacgtgtgccttaatggtcatatgcttggcatctgcacccttttgccattgtctgattctgaagaggcatctgaatcagagtgataatttgaatgcaagccaggtaattcatgtagttagaattcatattttatcagaaaggaagggggttaaaacttttgagataattggaagtgattatttatggttagttcaagcgcaaaatacccgtttttggttgccc

SEQ ID NO: 7890 - DNA, 674 bp, Gossypium hirsutum
catttcactctgtattctggatttctcttgatttatggtgttggtgctggaacggggctgcggaggaaggactgtggtttggtgaaagacctcagcatcgtaaccatctttagtattctttggattctcatgtggtatgacagattcgacaactctcccgggttttgctgtacaaaacaagaggagaacaaacttcaggatcagctaaatggtgaagcaagaaaaacatatacttggccgtatgcctatgatcaatgagtaaacgtattttcacatttcgtgctagtgaatatgcctaaggaatgttggaatcttcaacaatgtgaaattattgtagaaaaatccactcccggttttcaaacagcaaacagagagtggggcccggagggacaacatatgaaatagttttcaatccagtcccggttttcaaacagcaggcagaaacaacagtaaaaagaacagagagcaccattcatacctgctggcaccttaggtggaggacgtgctaactttcgattaccagaaattgcatcagttacttttttggaagcctcttcggtaacgttttgattctcacacaaaaccgaagctgactgcctattcagaggtattgtactggaatgaactgtattcctgcaataaataggacacaagtcggaaattggaatatcgcg

SEQ ID NO: 7891 - DNA, 652 bp, Gossypium hirsutum
gcataaattattacctttgatatagaaggttgcatggtccctctataagacgctgccagaccaagcattaagcctacggttgtcgcttcatgttcctattggtgaaaaaaatcagttaggtatattaaaacctaataatgaaaaagggctacttgagcctttagtatacttatcaaaaagtatgcaggtttcttgcagagatagaagttgttcctacctcagtgattacagctatagagataccagaaatcactaagcaaatgcaattacattcagttaaccttacgattaaagacttcgaaacatgatttttcatcttaaaatgcatttagtcaacactgatttctcccccccccccttttatcttgagaattccagaaccagtcacaggatcatcacgtaactaattaggttgtgctgtaaccaatcaattgcaagaaaaatgttttaatgaacaagaaaacctgtgaaaagtactggtatgtgtccgtaatggttaaaacacgcagaaacccgtgtaatcccagagcaaggagaagtccagcatgaactgcattaggttcctcaggcctgttatatattatccatgttcttgacacttttccctgcaaaagcttaaaatgcatcacataataatcccaaactagcaagc

SEQ ID NO: 7892 - DNA, 622 bp, Gossypium hirsutum
acattttttgtggatgttttacttttctccttcagttgcaaaggacaaagttctagaatgaccagctgtaagatagctgaaaaataatgaaataacaataaagaaaaaagtaaaacacttgctctcctattatgttttattcgggattattccccaagaacatcaacttaatagttaacaccacatctattcatcaataaaatataaatcttcaggaaaacttaagactacttataaatttacagttgtgctgttttcttccagacagtggtttgaaaatgactcaaactataattagtaggcaaaagatgttctaagaagttcggttcttagaaagaagtcaactctaactctaatttatttgcttagatagaaaagcaagcattaatacctctataagcttctccacttttgtgaaatggcgaccaaaagatgtatacctcattccatggagaaaaggtccaagatagacagcaagattctcctatagaattagaatgcaacatataagcatttaaattgtcaaacaaacttttagtagtgagtttaatatattgttgtccacgaatatttatacattttatgctcaaacatttttacatcatacacattatatagatgc

SEQ ID NO: 7893 - DNA, 620 bp, Gossypium hirsutum
  misc_feature (6)..(7): n is a, c, g, or t
atatcnnttaagcaaataaataaatcaggtgagatcaatttaaatggtactgaatctgtgacgatgccagaactatttgtcaaacagcaaaacctaaaactcttgattatgataatgggggttgtcgttctgggaaaatgatatattttcaaaaaatatatatagtttgaaagatttgatgaatacaataaaaaaaaagaaggaagaaataaagaaaggagagttggaattaattgttgttataagacaaacacatggaatatggaataaaacccaaagcatttgacaccattgcaagtgaggcatagagagacatgttgaccggatattcatattaccctcactgttagcctataataatttaatgagttaaagccttaaacacacatacattgagaaagagagaataaagtaaggagaagaaagcaacaaaaaatttccatttcccggagaatctagagcgcatcaggcgctgaccatgggcttcgaaaacaattaacaaatcattaaagcatttaaacatatctaatcttttgttgtttcctttctagttatcttgtttgatcgacctcctaagcaactgggattaaagaaaaggccatgggaggtccacaatttca

SEQ ID NO: 7894 - DNA, 627 bp, Gossypium hirsutum
gatgggagaattgttgcagtaaagaagtccaagactataaacgaagggtatcttgaacaatttatcaatgagatctttattctttctcaaattgatcacagaaacattgtcaagctattaggctgttgcttggagaccgaagtgcccctccttgtttatgagttcatccctaatggaaccctttcccatctcattcatgaccaaaatgaagagtacccgaggtcgtgggatatacgattacgcgttgcaacggaaattgcaagtgcgatttcttacttgcactcatctgcatccatctccatttatcaccgagatatcaagtctagtaacatactgctagatgaaaagttccgagcgaaagtatcagacttcggaacatctagatcaatcaatattgatcaaactcacttgacgactcaagtgcttgggacttttgggtacttagatcccgaatatttccagtcaagtcaatttactgaaaagagtgatgtttatagttttggagtggttattgttgaactcttaacgggaaaaatggcaatctcaacttttggattgcaagaaaggagaggcttagtctcgtattttatgttgtcgatggaaggaaaccatctgctggatattgtt

SEQ ID NO: 7895 - DNA, 692 bp, Gossypium hirsutum
gcctaaggagaaaccaccctccgaacccggaaactcgaacctgttttcaaagggagttaggaaaaacctgtttccgtaaggtggtgaaagaaagcctatatctaacttctagttaccccttcatagttcacagttgctttctgaagcttggggtttgaagcaatggagtttcccaagtgttgcagcactgcttctccgtattcccggaaggatctgtgagtttctaacagtcagcaactttaacagaaattatgcggacataaaaagatcagagcaatatagtgcaccataccgtcctttaagatcgggatgattctgattaatctttagtcgcagctccacagcaatagctggttcctccagaccctcgaccagatcggttaaaactttgcttccaacacctttgccggaagcccttgctgaagcaagtttatttaggagtttgacctgcactcagcagaaggtcaaatggaattgtatgagatggacaagtcgatgctgtatattaagtcaatgttttcattgatatatatgggccaacctaatacatgcaagaataggcttctctgcaacataaaattaaacagcttaccatcaagtatgccccatcatcaagccagtgattctctttaagagctccatggccactggtttctatagctagatgtgattcctctccgatagagttctga

SEQ ID NO: 7896 - DNA, 549 bp, Gossypium hirsutum
tgtaatataaaatccctttcatgtcagtcaagtaataaagcaacggaaagaactcattcgtctataaatttaatgtgattcagacaaatgttacttaccgagcgtgaccggtttgtctcttggcaactgcccttttcccattccagatgtttaggcatcagaatgcagaaaattgcaagcattctgcaacgcgaccaacctagcatgatggttctgcaagtgcaacttcatacaggaattctaaacaagggacaacttcatatatatccaatcaacaatcaacaacagtagttttatatctatcaatcaacaatagttgtttgcaaattcacatataggacagtaatctttccttttagtgcccaagacaagaagttgccttttttttttctttgctttcgatgtttagagattaacttaaatggtgaatgatattgataggctagtattagctacaaaaaaaaagaaccaaatgggttgggctttgctaaatacatatatgcgaatatgtatatacataaaactaattgtaaatgtaaaaccatcaaa

SEQ ID NO: 7897 - DNA, 635 bp, Gossypium hirsutum
tccgtgaactgagatgtgggactttaggaaagaaagaacagatcgttgtcttgttttttcttttgggtgtttcaagttttgatctttttatgttctgttagtgattactgttttctgttttattcagaaaaatgtggtttggattgatatgtaattaaatgaatctgtaaatgttttactatttgggtcatgatgatgagacaaaatttcatgatgaacagaaggcaaaatcttgattcacactcatctcttggcatcttggttttattttatctacttttgttgttctttttctttttggatatagcagtatcaaaacagttgtaaaatttctgggttgtggagggtttttctctgtctcaatttgtggaaaaaactaaaaatttaaagaaaaaggtgagtttgcaagagaatctcttccctgttctgttctgtttttgttgtcagaaaaaaaaattcaggaatttctagggatcatcaaaaacaggggagagtggacccatttaaccaggttgcccccacctgtttgtttgttgatgcttttgcatatgcatcaaagttacttcttggttgttttaatgtacttttaattattggtaattcagagatgcacttaaaacccctccctgctttgg

SEQ ID NO: 7898 - DNA, 617 bp, Gossypium hirsutum
gctataggaaatccagtaaacatggtgtcacatcgggattggagttcaagctagatgagctgaggaaggaactcgcttctcatgacaaggaaatattccctcattctgtgttgtcaggccaacagatcagcagcataagcgcccatttaccaaattcaattgaagaggcaagtccaaaactttctcaactcttttcttgtgtatttatcctatgcttaacaattggtaggacaaaactcttgtttgctaccatgcaaaggaattttactgctcatccttgagttccatctattataaggaccggatcagattagtcctaatttaacctctggttttattaaaaagaatcaaataaggccaaactataatagagttaacatttactattttaaaaacatgaaaattattttttcattttcagtaaaagatttcattttacagaaccataaaagctttcaaaatattaaatttgttaaacagtaaaagttaactctgttaaaatttggctttatttcattcattttaatagaactaggattaaattgatctggttcctataatagagtaacctgccaaatactttcaccattttcattctattatttttgtgtctcaag

SEQ ID NO: 7899 - DNA, 598 bp, Gossypium hirsutum
cggcaccgtattttatcccttgaaagttataatacaaaagacaggtaattatgggcataaaaattatttataaatttataaatttaaaatttttataactttttgttataaattttgtttataaattttctgattttttaaaatttaaaagggtttaattgaactttttaatttgttactaagtttttttgacctttagtcttattagtttcaaaatttttaatttacttttaataaaagagtatgggtcaaattgaataattgtgtaaaggttgagggataaatttattattatactttatgtataaacactaaactttacaagagctaatttacccattttttcaataaagaaactaaaatataattcataatataatataaagaattttgctgtatttttacaaaaaaacacataataatattcttataaaaaatacatatagttaataaatctctcaattattttttatctttgaatagtattttactttaatttagttggaatgtcatggatttttttttaagtacatctagtaaatagactccttaatccataactaattaagaagattatgcatttcagtacactcgaact

SEQ ID NO: 7900 - DNA, 610 bp, Gossypium hirsutum
ggagaaggcacggtgacaaaataatatttgacttaattattagagaaggaaacttagaaataaaggtattcataaaattttagacaattatgtcattaaccgtggctacaggcctacaagttcgaaattttcattaagatctatttttcagttccaaaattgggcaggaaaagaaaagaaaaacaccctaggaaggcatgaagacaaccatcttaataaatacaataactaatgcaagcataaattgatcaccaataggcaaatatgatttctaactaagaaatcgcttcataaatttgtaaacccccaatctcagattgggaatttgtgacattctattgaatatatatagactaaagctcactaaacactaagtttatcacccgtacttgtgagctaccatttgtggatgaaagtgtgaaaccctttaggtcaaacaagcaatatctcataggttgcatttcgaatagcaaaatgaacagatttttctcagacattacaaacctgatgagtatgaaggatccttactaattattcacttaaaaacaaaatatggatccactaaacaaaaagaaccataaacttttactatatcactactgccacctaa

SEQ ID NO: 7901 - DNA, 599 bp, Gossypium hirsutum
aaggctctttgatcttcgagatcatcaaggcttcatcgaatcgaaagactcacgcgtcttgctcataaaccccgaatcgccactcgatttcgatcatggcgaagcaagcaagggtttgaaggcatcaaacgcaggtaagcttcgcttctcccttttttagtataaaacgatgaagaaaagcccactgaaataagtgaagaacgagagttcaaaagggaagggaaatcaccttttcagttttttcgattgctttctattgtctctgtattcatacaatatgcgctgatatttcgttttttttgttgcgtaaccctttacaaagactgaaattctggctttatagtcgaaaaggaaaggaaaaatttacgaaaaataaaaaaaatacaatgtttttctttttttgtttccctttgctgttgttgcttgtttgtctctttgcaggtgtgggtgtgctggcgctcgggtacgggtggtgcgtgaagaccgtacggaggtgcgcagggggccgtacggaggcgcgggcatggctgctggagggtactgagcgtttgacgcaaggaagggggacgacttagggtttctgaaacctgtaaggatat

SEQ ID NO: 7902 - DNA, 651 bp, Gossypium hirsutum
cgattttgcctttaacatgtttatgcagttatgatcaagcttcgatctctttgtaactgatgtccctataagtttattaactgatgtctctttgtaactgtatctggtctagatgctatatctgcatatctagttataagaaacgtaccatagcttatccggtagctgacttgaagttcctatctttgatattagtgtctccatgcattcatgctctgtaagtgattgtccgtatgatcaaattaaatgatggttttggtatttcaggaatcctttgagcgtgccaaaaaatgggttcaagaactgcaaagacgaggtaattgacttacagtattttaaaatttacttagttcaagcatgttcatattcctaacatgctgtttgattcgtattacaacggttcaggaaatccgaatctgataatgttcttggtagcaaacaaggttgacctggaagaaaagagagcggtgggaaatgaggtatctgcaaactgatattcgcttcaatcatctattttaccttttgcaactcgaaatattgcgattaaaagccgctctactcataattgcatactgcatcaccactgacaagtaacccctgtatgtgtttaagtgagttttaatgtttttgctcaggaaggtgaagtatatg

SEQ ID NO: 7903 - DNA, 570 bp, Gossypium hirsutum
tttcgaggttgttactgtgacccaatttcctttatgagtgagcatttgaaggccaccattgacatcttgtataagcgaaacaaaaaagccagggtcagtatgttccggcacaccgatggaacctttggattggaaagacggtggatatagattcatggcagacacgtcaaagcctgcttctagcttgaattccttctcgatgtaggtttcttcgtatcccaagattttcgagattgctttagctaaaccaagttcaacctcatgcatccgtttgaagtactccccaatggcacctctgtcaaaatataaatatatgtaaactttaaataacatatgagaataatatgaataacaaatacgaaaaactacataaatacacaaattatcgagtctagatatacctaaagctagccggtttgctagggcaatggtattcaggatgtgctactatctttagatactctctattttctccggcatgggatcttaaaccccaccttatcctatccataggattcttctttaagtactctctcctttcctcctgattgtcagtcaaagaaatcggaa

SEQ ID NO: 7904 - DNA, 582 bp, Gossypium hirsutum
ggtataatttgctgaagctcaaacacattgtccgtcaccatcacttaaaacatattcctagttcctcgaatttcgaactctgggttgcatctccaagcccttttgtcaataaaaagtgttatatgtattaaaagcagaaaaaggaacttaattaacaatttattatcatattgcacttgtatcattatgttagtttcttcatgaaaaacaaagccttaaaagttacatataggagtgatgatcaatctctcaatttataatggcaaaccacatagacaactgagattagccattggagtagcaactagcatgcttgacatcataaaatgccttaccatctaattgtttcaaatatccctcaaaattaaaacatgtatatgtacctgagtggaatatcacgagtttatgacaagcaagtagttaagcataacaccttttcaagtaagctgcttatgtagaaatatacagatgaaaaggttcattgagatgccacttatgggcgactatttgcaaaaaaaaaaaaaaaatggccattttattttgggcttttccgtttggaaaaaaaccaagggttttttgttt

SEQ ID NO: 7905 - DNA, 639 bp, Gossypium hirsutum
acaacattagtcgaaacagaacacaagcgagaatagaagaagaagaaggagaaaagttacctggatgagaagaagaaggacgatgaacggcgcactgagtttggaaaatgtcctacaggaaaaaaatctgtaagacattttacataaaaagcaagcaattttacccgtgttcctgaaaatgttttccgtaggtaaaatgttttcaggttaccaaacaacgtaaaaccaggaaaacattttccggaaaatgttttcttggttgccaaacggagcctaacaaataaggttcatttccattttggtcatcctaaatttttttcatagaaatgcaccattagtcctccgctactatttaatagtggagtgattaatttgttcaaatttttttttggatgacaaaattaacaaaaataaattttaagcggcgaaaataacaacaaacctgattagtttacccttttaattttaaacaaaaagaactttcaagcaggcttctgtcagcatcattttacatgcaatcgaccattttcatatttattcagcaatcagcaatgcatttttgcagcatttaagcataaggataaatttggtaatagatttttcacccattgttgtttatgaactacaagggcatcaaaa

SEQ ID NO: 7906 - DNA, 602 bp, Gossypium hirsutum
cagtgtccaaaatccaagaaaaaatattattagctgaaaaaggagtacgagaagggatacctgcataattgacagcaggtgcaggcacaggtcggcttttattcaacaactccaagagctcagaatactgttgaggagtaaagacaggggcactctgagaattgagcagggaatcgtcggatgagactgcaagagcagccggagaagccttcttacggttgacttgaattttttacggttgccagaagcggtagaaagcaaagcgataggttcggaagcatgaggtagaacagaggaaagactccgttgagcttcttcttggacgatcatggaataagctctatttaccgaaggtaaaggctgcatcaagaggatctgactacgaacggtagcataggtctcattgagacccatcaagaactgaaacaatcgttgttgatgaagatggctcgaattttgctgggcgacctcgcaatcacaagtgaaaaaagggacgagagcagtatattcatcccaaagcaatttcaattgcgtgaaataagaagaaacagtagcatcaccttgagtgagatgtgcaatagattgatgaagaaagaaataca

SEQ ID NO: 7907 - DNA, 611 bp, Gossypium hirsutum
cggtgtgagcctcatctttacactatatattttaactacaacaaggtttgctagaagaatttgtttatggtaggctggtgagggtatttctggaggatgatccaatcacttttgcattgggtttgataagtgatataatactaactttgcaacttaaacatattgtacttacagtgcaaaggagttccttgatcccatttattccaagaaattatggagcccatctttttttccccttctatagtgctctgtgaaaatggggttttcatgtttcatatttttctttgattaataacttctaggttttcaattttgtgtcttaatcaaatttgctttggttgcattgtagttgcctttttttctaatttaacttttgactctgctttggtggatgattgaattttctccatgaagttgaggcgctaggttgttctttgtcctaatgttggttgtctactaaagactgttatttccatttagattttctactagcactccatactgttagaataaccagcttatgttgatcttcatgctgtatccagcaagtgtatcaggaagaaaaattgaaccaatggaagaattggatcattcctcaagcgaggataatg

SEQ ID NO: 7908 - DNA, 623 bp, Gossypium hirsutum
tgcggttgccaaatgtaagtgcaaacaaatgaaatttcacagttgatacaaaggcaataatttggtccattagtcacttgtcatccaaaactatagttgaccatgcaaacaagttaattacttaactaattttaatggctacattatatctaagctatctatcctgtcagtaacttgatagtaataattcaagtaacttgatagtaataattcattgccactgcatgacttcaaaactacttaccttttgcagtgcttcaagttttctctggagtgcatcatgctcagcttgaatacggaatggaacaccatgtttctggtacacattattttgtgccaagtcttcatcaatgtcattagcagtggtcgcaaaaggatgatttgcgggaatccatctgattgtatcagggtcaacatcaggaggaattgaatccccctctttaaggaaaattgttggtctcttccactggtatgctctcgacctccttttctgatggatagcttgctgctctttagtaagtgtaactggagctaagcgataaagctttccacacatctctatggttgaattgctcttcccaaccttcaccaatggattgttaaatggatcatcatacttgaga

SEQ ID NO: 7909 - DNA, 654 bp, Gossypium hirsutum
  misc_feature (647)..(647): n is a, c, g, or t
tgcatgctttaggcatggaagggacagtcaactagttaataatgatcatatatgggcccactgacaatcaatgcatgatgacatgttcaagaaagtaagggtaaccttccttttctagccttaggatgtttggagttgttcaagtagagtttatatagcattgcacagaaactattgaaatgcttaagtttcactcgagatattattttagctgtggtttggaaatattattttagctatgcagaaagtggacagttaataaatatgctggagttattgcatttgttaatcatatagacagaaattgctctgaatgaaaattttcgggctaacgcagcttttgtttctacaattggatcttccatttgcttcaccacctatgctttctaatttgatttgttgtatttcctatttaacaggaaggagcttttaagagctattgatgtacgtcttattgcagttcagcaggacttggcaacagcttttgcacgtgcatcttctgctggttttaactctgacactgtctctgaactccaacaatttgcagattggtttggtgctcatcgcttgaagtaagaactctagaaatcctattcattctgatgctgtctgtctgtctgtctgtcagctcggactattcttcatgnagcatgg

SEQ ID NO: 7910 - DNA, 636 bp, Gossypium hirsutum
  misc_feature (251)..(251): n is a, c, g, or t
cccccttgagacggatcagcttcttgtctatgctggtgaatatgatcttatctgcaactggctcggtaagcatgttctgtttcgtttatggatggggggaggggcaaattataccaaatacatctagcgaattacggatcacaatatcatatttggaacaggcaattcaagatgggttcatgcaatgcaatggtctggtcgaaaagaatttgtagcatcgccagaggttccatttgtggttgatggctcgnaagcaggagtcttgaaaactcatggacctcttggttttcttaaggtctggtccttctctataccaacatttacccgtgtctttaaatctagttgcagctggctggttgttgatatagctgcatgatgatctttaacaggttcatgatgctggtcacatggtgcctatggaccagcccaaggcagccttagaaatgctgaaaagatggaccaagggttcactagctgaaggtggtaaggcagagaaactgtttgctgaaatgtgattttttttttcacttttcactgcttgcaatcagtgttagttacccgctgctcttagagtgggaacaacaaaacaaagtaactttgaatacctgtatatatatgtatgtggatgccatagga

SEQ ID NO: 7911 - DNA, 594 bp, Gossypium hirsutum
ttgctttactagcaggttctctagattcttcacttaattcatcagctgctttctcttcctcgtccacctttcgagcattttctgaagtgctatctatatgcccggaaagattcccgtcagcatcagatttaacttcatccgactcctcggcattatttgggcttccctttgtatcttctgaacatcttccttgggaaactgaagccgttttcttcccagattcttccctatctgttaggttctcgtctaccatttcggtgtctgatccttcagattcatctgggaaaaaggaaagaaacattcaaagacatgaaatgaggggggaaagagaaataatgacccaagatcccatatcatatttgttccacaagtttcaaagtaatatgtccgacatattaccaaaattttgtggctttcaatgatgttcaaagtgcaatatttgatctaaatgacattagttctggttgcatcaccaaaactaataaagcaagctaactttatagcacaatgtacattcgacagaaattaaaacagcctaaagaaaatttatgaaaataaatacacaatacctgagttcattttaggaattttttg

SEQ ID NO: 7912 - DNA, 652 bp, Gossypium hirsutum
acaactggtatgcttcatcctgcaatccctctttacaaaatccattaatcattatagaatatgtgtaaacatcagggctttaaaccattgagtgagattttatgaaataattcctttccaacttcaatatgcccagctttgcacaagccatcaattaggatattataacagacaatatcgagttccaacttgctgttccgcattgcttgaaaaagttccaaagccttttcgagtttatcacttttgcataaaccattcaacaaaattgaacaggtcattacatttggaacttgtccaaaagcaatcatcttcctcaaaagttcacatgcagatgaaactctccctagttgacacataccttgcataagagtgttgtatgtgacagtatccgcaattggtcctttttgggatatttcgtgaaagagttccattgcttcgtctatccttttagctttgcaatatccattgatcatgatgttgtaactagatatatcaggtgcacaacccttcttaatcatcgaccgaaatacttttctagctttatccatcctgttttgcaagcaatgaccgtttattaatgcaccataggtaacaacattaggctcaatgctatgctttatcattgtgtcaacaatatcttcagctttagaaa

SEQ ID NO: 7913 - DNA, 741 bp, Gossypium hirsutum
  misc_feature (22)..(22): n is a, c, g, or t
  misc_feature (555)..(561): n is a, c, g, or t
  misc_feature (590)..(590): n is a, c, g, or t
  misc_feature (592)..(592): n is a, c, g, or t
  misc_feature (643)..(654): n is a, c, g, or t
  misc_feature (656)..(664): n is a, c, g, or t
  misc_feature (666)..(685): n is a, c, g, or t
  misc_feature (689)..(690): n is a, c, g, or t
  misc_feature (692)..(695): n is a, c, g, or t
  misc_feature (698)..(700): n is a, c, g, or t
  misc_feature (704)..(707): n is a, c, g, or t
  misc_feature (717)..(717): n is a, c, g, or t
  misc_feature (720)..(725): n is a, c, g, or t
  misc_feature (727)..(734): n is a, c, g, or t
aatgatatgttatctgctttcnagtttaggtaaaagggtttaatttaactttcaaagattggtatgattttgccattttttttcaatataatcggaatttgatgctcgctttggtttgcgtctaggtttgctgaattttatattctgtggatagttttgttttccattaactgtttttagtctttctgtacgtgatgaaattttctgttgtttctgaattccccatctctagagttgcgccgatatttcccaaggagttttgattccttttttggttttaatacgtttatgtatgctatcacgattcttatgtagcatttcaataaaggaatgtcatggttgatccacttatagcttgtcgcgatgtataaagagtgagcatgtattttaaaacaaaaataatgaacctgttggagttggagtgcaagtatggaaaagtgagcggaaaaaaggcatggtctttatttcttcttccttttttgttgtttatatatgtattttgattttgcgtgtattctatatatttttttcaggttttgagttttggatggttcnnnnnnngttgctaaggctttgtgtgtgattacaangngataagacacacacaacatgtgcgcgaaaatatgaagtgctctcaagagannnnnnnnnnnncnnnnnnnnngnnnnnnnnnnnnnnnnnnnnggcnnannnnctnnngatnnnntctctttatntannnnnntnnnnnnnnctactta

SEQ ID NO: 7914 - DNA, 656 bp, Gossypium hirsutum
tgacttatgttgctctgattttttattttttcttgaaatatttatgcctgatgcatatttggatttgatagaggaatgatatgaccttccaaatcatactattttaatacctaaaaaagaaacagaaaaaaaattgaatatatccatgtggaacatatactcgtatttacacttatacctaaatctacgtaacatagcttgtacctttattctaaccattttcaaaccggcacattgatcagaagaactatgggtgcttgacagagtaaaaattaaaaggaaattaattttgaatgtctttactagaaaagaaaagtgaggaaaaggaaaataggaaaatttttatccgacgaataaaaataaataattccaatttggagtgacagagaaaatgtgagacctaagtgtacaaagttatgcatattttaaaaaatatttttaaatagtactttaatggaaagaaatatatatttttcatttttattatttttatattttttattttcttttcaccctacctaaaagataaaaaagtattacaataaaacattataataaagaaagaaaaataattaaattacgtagtgatcttgaatatacagctgcacccctggtgatgacatggttttcttaatcttagctctggaacttacttc

SEQ ID NO: 7915 - DNA, 676 bp, Gossypium hirsutum
tacgctaaactttcattcaatatcttcatcatgttacttttctggtgagattaactatgataggatttgtgttaaatgccggtggtatggtatgatgattactaacattatttatatatttaataatatttaaagttataaaatatttttatttttatgtttatttaaatattttaattaatccagtctattaattaattaactaattacatcacttataaattattgtttttttacaattgttattcgaacttaagctatttttgcttaaataaataacttaaaaaaactaattaactttgtgaaaaaaattaaacataatttatttagaatataaagaaagtaaaaaaaagaaaagttatgagaaagaaaattttaacctttcattggagggtcaagttgtttagtggaggttgaaaatgggggatgagtggaaaataatcacactggagtgtacatccaaaggatttgaaaccaaagcatcatcattcctgagacaagaaggcatgtatgttcctagtaggtgtggttggcttcagtcttcttaactcctctatctttccttagcttgttaagtttaaaagcatcatcccatcggcctactgctttatatacattagccaacacagcataactcgttggtgaggtgtaagttgaatcacttcctcttgcaatg

SEQ ID NO: 7916 - DNA, 640 bp, Gossypium hirsutum
ctgattgactgtacttattcctataccttctggctttctgcaatgctgggaattttttagtttcttcatattagtaaccttatattcctcaattctttcatacatcatgtagcttttgcatatctataatcccaagtctttcaaagtttacagtttatttttgttgcattgacagttttaccgtgatgcctatagttagtaaattcaaatacgcgattcttttttcttttccttttttgactatttcaggtgtaatattcgcttccaaatttaatgtggtgtcctagtcgggcacctggtttacagtctcttggcatagtaagattgttgtttcacttaatacatcattcactgttttggtatgataaatttctgactaggttcatgacataaagatttgagtagtaaatcttccccaggtaaccttatctgtgatgattttgttgtgtagtggtgagaagatgcctgatatcaagtggtctgaacttgtagaagtcaaaggaaaagttagattagaggcttttgagaaatatattcaggagcttgctcgctcacgcaatagagggttgatggtaagatatggtttcatgagttactgtcatcaattcgtattatgtagtgtgtgatttaccttgcctta

SEQ ID NO: 7917 - DNA, 660 bp, Gossypium hirsutum
tgaatttaattttcactgtttataaggtaaaagtaccatagagccctgtattaggagtcatattatattttaccctctagtccaaaaatagacaaactagtctcaatacattagttaaagagaaaactagtcatttctaataaaaatttaatccatttctactgttaaaaactgaggtgattgatacaataaccacatatatctgatgttgatgtgctgggaccagtttgctctttgacctgtacagggattaatttgctcttttctttaatagagggggcaaaatgcaattagacttctagaacaataacttccatggtacttttaccctgtttatgataaaaagtaaaaaccaaccgattctgatataaatatgggaattacatacaataaagggaggtctttaaattaattagaagcataagacttacaaatacatattacatgggtcgatttcaggaaacaggttaatataaaaccgaaagccatcggggcttatatctctgcatagcaaacctgccaatacacaagtaaattataaatatttgctacttagacatatttaaagagaaagcaaagcagagttgtacctttgctctctgcagttagaagatgctccttggccatagccggagcaatccctaatgtcattgcagcatc

SEQ ID NO: 7918 - DNA, 1265 bp, Gossypium hirsutum
  misc_feature (77)..(77): n is a, c, g, or t
aatttaaaagccatgtacataagatgggtgaatttaattttcactgtttataaggtaaaagtaccatagagccctgnattaggagtcatattatattttaccctctagtccaaaaatagacaaactagtctcaatacattagttaaagagaaaactagtcatttctaataaaaatttaatccatttctactgttaaaaactgaggtgattgatacaataaccacatatatctgatgttgatgtgctgggaccagtttgctctttgacctgtacagggattaatttgctcttttctttaatagagggggcaaaatgcaattagacttctagaacaataacttccatggtacttttaccctgtttatgataaaaagtaaaaaccaaccgattctgatataaatatgggaattacatacaataaagggaggtctttaaaataattagaagcataagacttacaaatacatattacatgggtcgatttcaggaaacaggttaatataaaaccgaaagccatcggggcttatatctctgcatagcaaacctgccaatacacaagtaaattataaatatttgctacttagacatatttaaagagaaagcaaagcagagttgtacctttgctctctgcagttagaagatgctccttggccatagccggagcaatccctaatgtcattgcagcatcagttgggcttataccagttcgaagcgcttcaggcttagtcacaaggcttttgattctagcaaaaacctacggataaacaaacaagttatgtttcaggttaaagttaaagtagtgaacaaaatattgcttctaccttttttccagcaaagtatatcaaataatgcatatgtgtttaatttaaaatctatttgcaaatgacagaatgggccccaacatcaatatgataaaacctctaccatcccatccacttgtgactcctacagattttcacccctttaactttcaagttgaaagtttaaacttctaataattgggcgggtttccgtggaaaaaaacccacaaaaaatcttttccccttccaggctttcttattttttaaaaaaaaaggaatttataattgttccaggttcccaacaaaattctccccccttaaaaaaatttaaggaaaaaaattacaaaaaaaaaacgggaaagttttttttcttttctcaataagcctttttataaaaactttgatatttcttttctttttaggggaaaaaaagggggaaaaataaaaaaaaaagaaaaggaaaat

SEQ ID NO: 7919 - DNA, 654 bp, Gossypium hirsutum
cagaaggatgactgaacgagctgagaaagctgaaagcgaactagaaactttgaagcaagtagttattgagctgacaaaagataaggaagcagctgctcttcgataccagcagtgcttagagacgatttccagcctggaaaagaaacttgcttgtgcccaggaggagactcaaaggctcaacaatgagatagatgatgcggctgcgaagttaaaaggtgctgaagaaaggtgtgatctgttggacagaacgaatcagagtctgcatgctgaattggagtctatggcgcaaacgattggggaccaaaatagagaactaacagaaaagcaggaggagttggggagactttggacctccgtacaagaggaacacttgagatttatggaggccgaaactgcatttcaaactcttcagcatctgcactctcaatctcaggaagaactaagagctatggccgcagagattcagaatagggctcaaattttacaggacattgaaactcgtaatcatggtttggaggatgaactacagagagtcaaggaagagagtaaaggcttgaatgaaatcaatttaagttcagcaatgtccatcaagaatttgcaagatgaaatcttaagcttaagggagactatatcaaaacttgatgctgaggttga

SEQ ID NO: 7920 - DNA, 699 bp, Gossypium hirsutum
  misc_feature (645)..(670): n is a, c, g, or t
  misc_feature (673)..(673): n is a, c, g, or t
  misc_feature (677)..(685): n is a, c, g, or t
  misc_feature (689)..(692): n is a, c, g, or t
tgtgtccctaagaacattgaaggttgggatattagatattcaggttccagtaagggacagccatttgcttcggcccgtcggcgttcacctccccttggtatcaagtgcaatcgtcgttcaagactgtaaaggttcccaatgaatcaaaatcccataccggaaatgaatgatgcttagcttcttctcaactcgagtatcggaaacgaggtccgtggactttttttttgcaggaaattgtgttggtttacctgttgtgctgcttgcttgtgatcataatcctttggctagaagtgtacaggtagtgtatataagaacatatgcataggattgtatgtatgtatgtatgtatttttggtaaaatgtatgtatatgtgttatgcacgcatgcatgtacataagaggattctaagatatgtatgtattaagtgagatattatacctctgtttttatgaattctaagatatgtatgcgttaagtgaggctttttattaaatacttctattcttttcttcatgttcttcttattcaatcaattcagtaattttgggtattcatgaaatttggatttttaaatatttttttatttagatttgtctaaaggtggtgttatgtgctaggtctagtagccttggtccataaacaannnnnnnnnnnnnnnnnnnnnnnnnntcnaccnnnnnnnnnaaannnnaattaaa

SEQ ID NO: 7921 - DNA, 636 bp, Gossypium hirsutum
atatttagtcattatgctctaatttggtaaatttagttcctacactttttgaattttaaaattttaatcctgatctaaagggtagcaattaaatctactaagttaaattttgctactagttatgttactacccgtaagttgtaaatttagtctatattctccaatttgatcatttttatttctcacgctttttgaattttgaaattttagttttaacttaaacaatatctattaaatccgttaactaaaatagcttggcatttctatgagtattatgagaaaatagtaacttagtatgacattacacatacgataatatatttgttgcatgaaattttgaaaataacataacaagtgtaagaatgatgtttcaaaatttgaaagtaaaaggattttaaatgaccaaattaaaatacagaaactaaatccacgtcatacacctaatataaaggctaataaaagaatctgaccaaagttctctataaatagtgtatatcacataacttaaagggataaatctcaaaactacacatattatacttcctccacgtgtccttccacatgtcataaacgggcatgccacatgtttaacatgtccatgtccatgctgggtgaacctctaatcaagcgagccta

SEQ ID NO: 7922 - DNA, 649 bp, Gossypium hirsutum
acggagaagcagtaattgtggtaaactacttgactagcctttttcaagattttttctcctatttagtcaaatttctcttttccccctcttattgtttgacggtacaaacagattttaaaaggatatgaaaattatggtaatgtttggattgtaaggggttcattaaattgtaaactatccaccgtagttatggcttttgaaggctgaatccgatggacatttattatttattattgtctggtaagaggaggatcaaataatgggtgctttagaattattgtcggttcacgtcccctggctacagtagtgttgcaaagagcatggttccgggtagtaaagctggttttcctgctttcggtctatcgcatccatccacctctaacagtgagtggttgcttagcctaatttgttatttggtccttcttttactttgatacacttagtcgactcattcaatttccctattaggaacactgattaggcattgttgagatgagaaattaggtcatgctatttacctttttcttttgaccaatcaattgaaacagatattctttaatttggattatgggaatcggtgccatgcttataaagtttacgacgtaaacattgtgtgatggaaaaaagtagtgtaagtcgaagcatgaag

SEQ ID NO: 7923 - DNA, 670 bp, Gossypium hirsutum
ctttagttgttgggggaccgaattggctgtctgaagaacaacacttcaaaggtcgataatgaaaatgaagcatcttcttttctgccaaacaggttagaagagggaaaataaatgagagactaagaagcttgcaagatatagtcccagggtgctatagggtaattattataatattatgcttcgagttgcatcatgcatatagtatagcaaaaacaacaaagatcgtacataattttttttattctgatgtactgataatctgcagaatatggggatggcagtaatgttagacgagataatcaattatgtccagttcttgcagaaccagatcgaggtacgttgaaaaacaaacacatcatttattcacaattttcgtgctttcaagccatttttcaagcgaaggacaatatagtcaatacatgtacatatgcatgtatgaatggctgataaattaacaggaaacaaaaaaaccgaatatcgattcaaattaatttagtttcggtttatccgaaaattcattttcttgcaaaataattttttttcaaaattaaatccaaccgcatgattataatctttcatgtatatgaaatattacagtttctttcaatgaaattgacggcagcaagtgcatgctatgacttcaactcagattcagacgatatggaaacca

SEQ ID NO: 7924 - DNA, 597 bp, Gossypium hirsutum
ggtttatataaaaaaattggcaatattaataatcttttttggtaatttttttttcccaagtgatgccaagtttgttgttaatctgcacaagctaacccacttgattttttcaagctaaatctggtggctgaacctgcctcagctatgacttttgctgcttgttacctttgattgaatgaactatcaaaggctgaaatgggatactccatcccacatcagatagaagtaaatatcattgatggaaaccataaaggcctaaagttactccagaacttgaatttgagcttttgactattgagaattggtggcttaggcctgaaaaattgctgggcaattgcaatctgtattagctcatgtaacaacttggatggcgtatggtttggtcttaatccttttcatttgtttatgattgtaaaatgtgaacccaatgatgatgtctaggattttgacggggaaggattatgatgtcagtttaaagtcaagtaggatttaggagtgactgatgaaaccaatataagacttcaagtctcaattgactaacaattcaaaccggaaaagctcagtccatgactccatggttttgagacctggaattga

SEQ ID NO: 7925 - DNA, 670 bp, Gossypium hirsutum
ttggcctttgttgtaatccgttattatgttgtccatttgcattagtaaataaaaatatattagtaaataattaataatatatctttaaataattatcaggttgataagtaaataaaaataactaaaggcataagaaactaatacacttaaataacttaatagaaatatataaaaaagttttaaaatatatattaaagaattattcaccaatatattaaaatttagaaataaaagaataagaatataatcattaacaattgttaaattaagctttgatgatatgttttgatataacaaactaaaatgtttttgaataaaagttaaagttgaacaaaattgacaaataatttctcaaatgaagtctaagagataaatttttcaatctttactttgaactcttagaaaattttttgaatcaaataataaaattttaacaggtcaaactatttttaaaaacaaatcagtaaagctccaagccaaaaaatattgacactttttggtcaagtattgatagtttttcaaaatatcgatgactactttaaaaacattattaaattgacattttgtttttcacaaattcaactaagtatcgattcaatatcgaaacttttcatatgatatcgataaaatttttctggtatcgatatcttcagctccaacagtcactgaa

SEQ ID NO: 7926 - DNA, 568 bp, Gossypium hirsutum
tttctcttccccaagttagctactaccatactgtgatcgggtcaataacctctaaatacaaatacaatttgtacaatgtcaacttacatcgacaccaaaacataaatctatgattaccaagcttaaacctgactcacttaccttcccttaccaatctgtcagatatagatcatgatacaccaaggcacacacacataatgtgactttaaagcgttcaacttacagtattaacatttcaacagccaattcgacaccgagcgcgattattgaactccatataatacctttctagctttacaattcacataagtaaaacgcaaaagcacgtacaattacgagctcaaaatttccgcgtacaacccagttttacctcaaacaactagaacaaagcccaaattcataatatacaaccctaaaaatagcacccagaaaaaaatatcataactttgactaaatataaaaattgaaacaaacccagaaaaaggaacccctacagttatatcatatgtaaaaaaaaaacgaactttctaacacacacgtgaaattctcacaaaaaaaaggggaaaaa

SEQ ID NO: 7927 - DNA, 546 bp, Gossypium hirsutum
cggaggtattatctgttaccattatccacggtaaaaatattatatacttattatattaggaaattagattgcattttgttattctttattaaaaattgtataaattgctcttatctattagattaaagagcaaactgattctttctgttaaaatttcatccatttttattattaaaaattgatgtacttgacagaataatcaaacagttacacatgatgtgtcatgtttacttcatgttgatgtacatggaccaattttttaatagtagaaatagataataggatcaatttactcattaatttaacgtataaagattaattttctcattttttagtaaatgagacaaaatgcattttgactcttaatataattgcctccatggtgtttttacctttgtcaactgttgcaaattgtaatgagattaccattggggtttcactcgtggtaattgataccatgtcgtttcagtcataaatcggtatcaaatagtttatgttttattttagtcaaaattttggtatattttgacccattccagtcaatat

SEQ ID NO: 7928 - DNA, 663 bp, Gossypium hirsutum
ttgttcggaaatcaaccgttgatacaaggacgggacgagtggttgataattgtattaagattcgtagaaagtgattctcttctaacaagacttaaacatcagttaaacgattctccatagttaaagtgattgagtcaacgaaatctgacctgccgaatacacaatttcatcacatcatgttaatacgagaagcaatcggggttttagttaataaactgaagctaaaaacggtggccaagtaatgtgtatattaacaagaatgctcataatcaaagtgcaatgaatgattgaaaaactccgaaaaccatggaagcagaagctgaattctgacagtattgctgtgtacaagtattgcattaatggctgcctgttttccttgttaaaagcacggcagcattcacgggcggcatacaatggctttgccccattaaaatattcaaaaatttctctaattattatttgaacaaattttaaatggaaataaacttttatagaaaatattttttataaaattttaatttaatccctttaattatgaaataataagtcatacaattgtaaaattttatttcaatttcacccgtttaaaataagttttctagcttcaacactgctagcaaagtacaactattatcttgtttatcaagggtggagctagaggag

SEQ ID NO: 7929 - DNA, 558 bp, Gossypium hirsutum
  misc_feature (550)..(553): n is a, c, g, or t
gtgaacgggatgagaacagacattggatggaaggctttgccaagcctttaggcatatgttcgacgaatggtgctgaatttgggcaggtttttgaaggactgaaacgagcttgaagtctatgaatcgataaactgttgcttgagaccgataatttatggatagccaaaatgttgcaaaaggaggcctctatagattctccaaggttgcaggaaaggattagagattggttggccatagcgtggactgttactatgaagtattgctatcgggaatgcaatggagtcgctaataggttaagtaagatggcgttactcgatcaagtagaagcacatgtttttgtacgccaccgaatgaagtcatgaagcaactgcatgatgagtcagctgcctaaccggagacttcgctacatgtaaggttcaataaccaataaaataaaagaataaaaaaataaaaaaaatttccctcctgtgatcaaactgacgggaaaattttaaattcgacccgttagattagattttagggcttagggagggtttctatttttttcctnnnnttctc

SEQ ID NO: 7930 - DNA, 467 bp, Gossypium hirsutum
ttatattgcaaatttgtatcatcaaagggaaaataatgagtggccaaaatccaatatagccattcaagatgaaaaaggaaattaacttagatttaaaagaattaaattattatttttaaatattagattttattatataaattgtttggtgtattattaaaaattaagtattagttttattacgagaaccataattttcttttttgatataattctgattcaaaattaaattattcttgaaatacataaacatctaattaagatttaaaaatagaattagtgaatattggcaataattaattttaatgtcacatttgtaagggaaaaataatttgatttaggcccgtgtagcatataataataatttgattcaatataagggaaaaagatacttacgaatactctttatagtttagaaactactaacatatccctaaaataacattaactcatcctctacagtcgca

SEQ ID NO: 7931 - DNA, 593 bp, Gossypium hirsutum
ttgatatgactgcatatggttgtaaaccttcccctgacattctttgttgttatttctgcaatgtagatgggcgcctgtttgagattgaaacggttatccattgtgattcaacatttaaaaacaaatggataaaaaaaatgtatcaaagaagacgtcagatgagttaccaagtaaccggaaattccatttgtgaatcctagtgatattcttccaaggttaagcaaccaaggggccttttgaaaacaaatgaaagcatggtattatgaaatgaaagcaagcaattgcgaattgatcatgacagcaaccaatcctgaaaatcctctaatggatccatcattgtcttacagctagaatcctatattgagaatgtgacttagatttgctgaataataggtttgcaggccaagtctttagggatttttaattttgtcacatgactttaggggtaagtagcaggatatatcttctgttatttttttagctaataatctgaataatacaacagattatagtgtgtttccaatatatttttcttttacattttttgtgttcacatgtttttctaaatactaataactggtatctaagctcta

SEQ ID NO: 7932 - DNA, 659 bp, Gossypium hirsutum
catttgaggctcttgaccaatataagacttttcaagagaaggaaagagatgtaactgaagagtttgaattagccagaaaagaggagaagcaagtagctgatgaatacaattcagttaagcagaagaggtatgattattgtgttgcaacaactctgatcttggtaacatagagaaataaattaaataaagaataaatggtatttgaaatgattaaacctggtgagacttgatgtctaggtggtctaagaatgtatgtgatggcactgttatattgatttcttgattgcaactgaggcaatggcttatcactgacagttggatctcgtaatggttttggaaagctgatttgcctgcaatattatttatatgcatctgtaagggaaaagggttccctttccagacattttgaaacttagttgcttgacccttttctaaatgattatgcagatatgagttgttcatggatgctttcaaccacatttctagtaatatcgataggatttacaaacagctaacaaagagtggtacgcatccgttgggtgggacagcatatttgaacttggaaaatgaggatgatccttttctacacggtatcaaatacacagctatgccaccaacaaagcgcttcagggatatggaacaactatctggtggagaaa

SEQ ID NO: 7933 - DNA, 786 bp, Gossypium hirsutum
  misc_feature (198)..(198): n is a, c, g, or t
  misc_feature (278)..(278): n is a, c, g, or t
  misc_feature (297)..(297): n is a, c, g, or t
  misc_feature (500)..(500): n is a, c, g, or t
aagcttgaggcagaattcaaacaaaaaattgatgctctagtggctgaaattgaaagaactggcccaatttgaaggctcttgaccaatataagactcttcaagagaaggaaagagatgtaactgaagagtttgaattagccagaaaagaggagaagcaagtagctgatgaatacaattcagttaagcagaagaggtatnattattgtgttgcaacaactctgatcttggtaacatagagaaataaattaaataaagaataaatggtatttgaaatgatnaaacctggtgagacttgangtctaggtggtctaagaatgtatgtgatggcactgttatattgatttcttgattgcaactgaggcaatggcttatcactgacagttggatctcgtaatggttttggaaagctgatttgcctgcaatattatttatatgcatctgtaagggaaaagggttccctttccagacattttgaaacttagttgcttgacccttttctnaatgattatgcagatatgagttgttcatggatgctttcaaccacatttctagtaatatcgataggatttacaaacagctaacaaagagtggtacgcatccgttgggtgggacagcatatttgaacttggaaaatgaggatgatccttttctacacggtatcaaatacacagctatgccaccaacaaagcgcttcagggatatggaacaactatctggtggagaaaaaacagttgcagcacttgctctactcttctccatccacaggtacacctgacagatttatat

SEQ ID NO: 7934 - DNA, 526 bp, Gossypium hirsutum
  misc_feature (511)..(513): n is a, c, g, or t
gcttagactacacaaaatctgcatcctgtcaatagcgggttcacctcttcctatgttcttacggtcgactatgtacgaaatatgttagccttcactgccccatgaatttggtacaagggcaaaatctcctgatattaagctgctagaaggtttcaagctcctcgccagcatctttctttttggggctacctgaagaatcacccgagggtaacccgtttggctggcggatgatattcaaactagagtgtaaatgctctgggatggtctacaaaaaagggggaaaataagccattgttattatcatgtttaagaaagtcaactcttgaataaaaagattctgatgcttaaatgagtaaaaaatggctgaattcagtcagttattgaaagcccttaggagtaagtgtatagttgtaggttataatataaaagtaagaataccatattataatgctacctgatcgccaccatctggaccttcagagtgaaagagaattgggcggcagcgcttatnnnagtcatcaagctt

SEQ ID NO: 7935 - DNA, 653 bp, Gossypium hirsutum
agacattaaaggtgaagtgaacttgggtggtactcagagatctatgcccatggatccttcctcaatttatggacagggaatcatgcaatcgaaacctggaataggaaatgcaggtgattataactaatggtgttatattctgtttgcacatgtcaatctatggaatgctaatgagtttcattttcatagaccaaagttctcattaagtatcttttacatttataggtttagataccattatgtcatttccagtcagctcaagagaaacatgtatcatttgttttatatacacaccatcttatcgttcctcgcatattcaagtcattttcttatctgaacttgtataatatgataactaaaattcaatagaaaagccagcacaaagagtgtttgtttgtttgttactgctaatatgcttagtgctgctgtaacttaagatagtcgggtgcttctctagtttggcttgctgagtgcgaaatctgtcacctactgaccatagtgtctatgatgttgctgttctattagtgtcaagtttatttcttctgacagaaaagcaacatatctaactttggctttgtgttttattaagtcaagacatttgtgtagatattcttatcctttcatgttactcttgttcttcaaggtttgatacc

SEQ ID NO: 7936 - DNA, 625 bp, Gossypium hirsutum
  misc_feature (552)..(552): n is a, c, g, or t
  misc_feature (614)..(614): n is a, c, g, or t
  misc_feature (616)..(618): n is a, c, g, or t
catatgcctttattaatatcagcactggttataataccaacttccccactaaagttcaatgatttgttgtattaggcaaaattgaaggatgttcaggaggccgagaacaaagcaattgaccggcttaaacaattatacaagaaagaagatgctcgtatgttccttgttctttgattatttcttcttcttttttttaacattaatctcattataggtttttatcatatctactcttttttatacaatacctagaactaatcatagcccctccccaacccttaactacgaggataatgtgcttcaacgcactcaaacccgcgtcatcctacactggcaaaaatggcgatgccaatcgagctaagactcaatcggcatgttttttgaattcttaataacaatataacccattgttttgacaagtagcttgatcttgttacatgtgtgcttctatctcttagactcttgtattactggtttgatatgcatttagtggtcataacttgtgcaatagtccccaagctttgcaaaaaaaataaaggcaactttcttcanaaagtgctgaaaattggaactatttcttgaatgccgttcacaagaacctgtattgtcccaantnnncactgag

SEQ ID NO: 7937 - DNA, 609 bp, Gossypium hirsutum
gcaatgtgtcgagagttgtctaaggtaaatttggaggtgtaagaataggtactttattcatggtggtcttccaaacatatatttagatgtgatagggagattcgttcctatataaaggtcatcaaatgaaaatgatatgattgggtgagtacacacatgctaagcttacagggaacatgtgttgatgaacagcgtggcttagactaggagtgagtattcgatcgagtcgagtcgaattctattttagcaaccgaattcaatttgaatttttttaattgagccgaatcgagtcaaaaaatttcgagtcgagtcgagttaataaatcttattattgatacttaatgttgcatttacatgaaccgattatttaattaatagacgaagtacaagcttttagattaattttgagtaaagagaaagggaaagtggggcgattcgggaaggtaagtaagactaccgagtaaacatttatcaaaacaacgtagttttatcttttaacttgatagttttgacttttaactttaaataaggtaaacatttatcaaaacgacgtagttttgtcttttcttttttggattttcgaataactcgaactaagtgtgagcattt

SEQ ID NO: 7938 - DNA, 989 bp, Gossypium hirsutum
  misc_feature (455)..(455): n is a, c, g, or t
  misc_feature (513)..(513): n is a, c, g, or t
ataatggatcggtgaaaattcatgcaatgtgtcgagagttgtctaaggtaaatttggaggtgtaagaataggtactttattcatggtggtcttccaaacatatatttagatgtgatagggagattcgttcctatataaaggtcatcaaatgaaaatgatatgattgggtgagtacacacatgctaagcttacagggaacatgtgttgatgaacagcgtggcttagactaggagtgagtattcgatcgagtcgagtcgaattctattttagcaaccgaattcaatttgaatttttttaattgagccgaatcgagtcaaaaaatttcgagtcgagtcgagttaataaatcttattattgatacttaatgttgcatttacatgaaccgattatttaattaatagacgaagtacaagcttttagattaattttgagtaaagagaaagggaaagtggggngattcgggaaggtaagtaagactaccgagtaaacatttatcaaaacaacgtagttttntcttttaacttgatagttttgacttttaactttaaataaggtaaacatttatcaaaacgacgtagttttgtcttttcttttttggattttcgaataactcgaactaagtgtgagcgtttggtcgaattgagtgaaattgttcgagttaaattagaaaaattaataatatcaaattaaaatcttgttacaatataactattttcatgttagaattcataaattttgaaaccatatatatttgaaaacttttttaaagcataatatataataagatattttagtatgaaaaacttaaatcattaatcacttatttagattccaaaattattattttataaaatttttaaaattttaaaatttttaaaattccacttttttaatatttttttagattttaaaaaaaaaaatttttttttaaaataacaattttttaatttttttaatattttaatttttgaaaataattttaatttttt

SEQ ID NO: 7939 - DNA, 656 bp, Gossypium hirsutum
ggatcaggcaagaatgaacaaatatcatagtgcagattctcacatcttattcacagaatggaaaagttacctcacttctaattatctagtgtcacactgaaccatgaatcacatgaatttctaaatggaccacattatctcatctttgctcccaactctgtctctaccttctttagcaaataggtttcatcaggaccaaatgcatcaaagttagttttgggagatcggattgttttcttcccaatgtaacttcaatacagaataccttgtaccaaattgaagtaacccaaacacaatgaataaatccgacaaataactagtgaatatattaaaataaatcttctacatctttgtagtcccacgttaggagcataaatgttgtttgtgttggaatcttacattagaaaagtttttgagttgtgggaatcttagctccattatatatctagttttaaacctgagctatatgcatgcaatattcgattcaataaaaatgttcacgaatatatataaagattagattcaatatttaaatttgcatggtatgattttaaagtaagttgtttttaaatttattttgatttaattccgaggtttaattgaataaaagactcttaaattatactttttgtttgattctactagtgttgatgctg

SEQ ID NO: 7940 - DNA, 659 bp, Gossypium hirsutum
attggctcatggaaataatcatacaacacacaacacatagaattgcagacaaagagatttcgacaagagaaaataacatgcctgccatggtgatggatgtgatcgatggctgcagccacattgtccactatttcaacagtgcattccattgaattgtattcatgatgaaaagagcgtgcttgtgggatattcatcaataaacttgcccttggtccaccatataaagtaacacctgcaaaagatgcattactgttggttacccattaggtattccaaatattgtgttacaatataatggaaatgtgtggaaattggtgaaagtacctgccaagtccctatagggaccagattgcaatagagttaacatttacagtttataaaatgccatgaaaattaattttttcatttgcagaaccataaaaagctttcaaaatattaactctgttgaaatttgaacttttttggtgatcatggataattgaagtttatttcaaaaaaatttcgaagtacaatatataataagtgaaggtatttgcaatgtaccttgtatacgaagatcaacaattagctcattaagtgcaccgtttgtcactaaatctttgtgtacaagaagagtttcctgtcataagtaaaagagaaacattaaagaactacataat

SEQ ID NO: 7941 - DNA, 678 bp, Gossypium hirsutum
ctgtcttgatgtcccagattggtgaagctgctcgaggatatcatggatggcagcagaattttgattttcatggataccaagaagggttgtgaccaaatcactaggcaacttcgcatggatggttggcctgctctgtcaattcatggagataaaagtcaagcagaaagggattgggtcctttcagagtttaaagctggcaagagccctataatgactgcaacagatgttgcagctcgtggtttaggtatgcatattcctttgttctctattctgtgcctttgttgttctttctgactagtacactgcctttttacttgtaatggaataggatttgtgcctaatgtgtcttctttgtgagatttgtcgaggttattgttatcatcattttctcttcagttttcacacacatcttttggttatataaccaatttaccagaaactgcttttctgttggtgtccttattcctgtctcttctgtgtcttctatttgtaacttcacattgttagacattttactgctgttaccttttagaacattttctctaaagatgtctaacatggcaggcctatttgaatttgctttttcttatgttatttatattttattgaatagccatccatgttcattactgttatttttttggttaaacattcatgtagcttatcgttgatgcatgt

SEQ ID NO: 7942 - DNA, 647 bp, Gossypium hirsutum
aaccatcctcatagatcatattctttcttttccatcgcttataaaggagaactgtcagaattatctttgaaatgataaaggcaatggagcctatggtgatgtaaaatgctaagccaagatcatttgccatttttatggctgcaaaagcaaggtgaaaaattagtcaaaacttgaaaattatactttggcttggaatgccaacttgtagaaaaaagctaagaaacaggaaaaagaaaaagaagaaatggaaaaatggaaatataccaattagctaggatagacagacttcttgaagctcacaactttgattttaaaaccggcatggatacccaaaagcagctgctgggagaagaacagaactctttacaagattctagaaaagaaaaaatggagaatcaatggaaaactcggaggagtttttaagactgaaaatttcagttcaactcaggtaattgattctcacaagcaacatctcccaattattaggacctactacctagctcaagctggctatcaactttctaacaaaaaatcttacacagtagctttcaagtattgttcccaaagctctatctatcttcagtctcaacctatcttttcaaagacaataaaaaacttgctaaaagaacaggacatccgaacatttg

SEQ ID NO: 7943 - DNA, 620 bp, Gossypium hirsutum
  misc_feature (49)..(55): n is a, c, g, or t
  misc_feature (250)..(250): n is a, c, g, or t
  misc_feature (252)..(252): n is a, c, g, or t
  misc_feature (269)..(269): n is a, c, g, or t
  misc_feature (272)..(272): n is a, c, g, or t
  misc_feature (277)..(277): n is a, c, g, or t
  misc_feature (279)..(279): n is a, c, g, or t
  misc_feature (284)..(284): n is a, c, g, or t
  misc_feature (287)..(287): n is a, c, g, or t
  misc_feature (290)..(290): n is a, c, g, or t
  misc_feature (298)..(298): n is a, c, g, or t
  misc_feature (301)..(301): n is a, c, g, or t
  misc_feature (303)..(303): n is a, c, g, or t
  misc_feature (306)..(306): n is a, c, g, or t
  misc_feature (308)..(308): n is a, c, g, or t
  misc_feature (326)..(326): n is a, c, g, or t
  misc_feature (328)..(329): n is a, c, g, or t
  misc_feature (347)..(347): n is a, c, g, or t
  misc_feature (381)..(381): n is a, c, g, or t
  misc_feature (438)..(438): n is a, c, g, or t
  misc_feature (444)..(444): n is a, c, g, or t
  misc_feature (449)..(449): n is a, c, g, or t
  misc_feature (491)..(492): n is a, c, g, or t
  misc_feature (533)..(535): n is a, c, g, or t
cgacgacgagatttccttccccttcttctcttctttcctttcacttttnnnnnnnaaaaatccttgcaaacaactcccacccaccaatttttctcatccagatgcaaaaataattgtttaaacctattttatacttcaattttaagttctttttaaacaaaaaaaaaacccatcttctacaaaggttgccaattgtttttcaagggaaattttttacaatttttttgaaaataaaaattggaaattgccntnctttggaattgggcacnccnacaancncctgntcnaancaaccccntcncnatncngtgaaacccaaatccggncnntctttccaaaaattttcnacttttccccctaaccgggggccgggagggaccntgatttaataattaagggtaaaaaaattttaccaaaaccaacctaaccttttattanccaaanactgntgaaaaaggaatttttcttaagggggaaaaaagccaaaaaannaaatttttaccaaattttaatttaactaaattgaaaaagtnnncaatttttttttcattttccccttttctgaaaaaaaaaaaaacttttccctttttccccccgggtaaaatgggccccccttcccc

SEQ ID NO: 7944 - DNA, 569 bp, Gossypium hirsutum
  misc_feature (555)..(556): n is a, c, g, or t
tcccctcgggacaattgtgcatttcagctgaattccccatcatgcaggttgcacaaagactccagaaactacaaagaagtggttggaaaccacgacgaacaattattttgtgcaattgggatgctgaggagtatggcttggtctgtcttgcctggttatctctcgtatgcatctgtctttattgcctctttctgaactgaaatataagcagactagtacttccagacaggatcgacagaatgggtagaagaaaacagagacttgttggcttcaagggcggttgcatacttaaatgttgactgcgcggtatctggagcaggatttcatgcttctggaactccacaacttgatgatctgctcaaacaagctgcacaacaggtatctgaaaactgctaaaccaaaccaatataaggacaatagcaatagtagccgagtctaaatggaagaaacgaaataaaataaaagaagttctgagtatagtcagtgtgtcattggagttcaatccttgtcactcttctctcacttgactagtcatttttctatttgattttgaanntttcaagatccag

SEQ ID NO: 7945 - DNA, 585 bp, Gossypium hirsutum
  misc_feature (562)..(562): n is a, c, g, or t
  misc_feature (565)..(565): n is a, c, g, or t
  misc_feature (567)..(571): n is a, c, g, or t
ttctgtaatttgtcatttacatgtttattttctgtcatcatatgccacctcatatgaggacaccctaataaaaattcccttgaaaatttttgacaaaaaatgcttacaattttaatgactggactgggatctttaaataaaagaagtagcccttaatttttaaatacaagtactatatctcaaattttgtcaaagcacagggactaacaacttattacatacattgtttaggctaatgtactaaaaataacccttgaactagtacactttttcatgtaagctcttatgttttttatttttttttaaaaaaagaaactaaataagctcctatacttttttttttattcatgaaagtgttgaatttaactaaaagtaaaaaaggaaaaaaggaatttcaagctaaattgctaatctggcaaaatgaaataataaaattttgttgatttggccaaaatcattaaaaaaaaaatggcttcctttttgtttcattttgaggtttcccaattttatggataataaaaaattcaatctaaatatctatctatgggataaaaactagttnacncnnnnnaatttaaaaaaaaa

SEQ ID NO: 7946 - DNA, 568 bp, Gossypium hirsutum
gtttcctttgagacccctccctgcctctggaatcccgccctttttttcctcccccttttctgtcttggtgttgcttgtatgctatttttaatgcttttgctagaatttctcatgtttcaatattttaaagtgcaccgaggacctgccttgcttctctctcattctctctgtagttgagatttagcagggatgcataccatctatattctacctcgtgcgtttctagttttttcttaccattgttgccctataagtgttctaacacattatgaaatggcttctatttctctgttctaatcctcccattgtctcaaagttttgagctctttgttcattatttaatcttctttgtttcctttgcgcagagctcaaccaaggaagataaaattgatgttgcagatttgattggttacagaataaaagtgtggtggcccttggataagcagtgagtcccataactttgctgttctttgcaacagagtccaaaagtttactgtgaatcattctgtgaaatagattgattgtcagtctgaatctcagttgtatttcacatgttatttaggttgca

SEQ ID NO: 7947 - DNA, 654 bp, Gossypium hirsutum
ctatgcattcctgtatataatttaaaatttctacaatggaattgtatattattgaaacttgggttttacttggatgaagtatacggggcagtcaggtggatcttcaaaacgagctagtggtcgtgaagcagttgctggaagtgagtttgacccacaacggtctcgtacaaccgaagctagccctgggcacaaacatttaaatcaacagcgaggtcctgttgaatcttcttctgaccctaagcacactggaagaaacaccaagaactacgaagttgccctcaaggggattgagggccttcaatttgagagcgatgagagaaatcagtattaaaattgtgagctatatgaattgttgtaaagcatgaaatgatttgtgtttgtccttgttggtgggttgagttgaaggaatttgtaaaaagttggagctctggagttgggactctcgtgttgtgcacccaaagcataaatttctgcactgatggaagagcttgtgaagtgaaaattgactgacactgctatcgaaaaaggtggttgcctgtgaagggcaagaactgtggtgtggttattttcccaacactttttaacttgctgtttttacggtgcccctttcatcttaagatcattgctttactcgtctgggacttgttgaggtga

SEQ ID NO: 7948 - DNA, 642 bp, Gossypium hirsutum
  misc_feature (60)..(61): n is a, c, g, or t
gcttcacagggtcactcttcctcaagctcttgtcatggccattaccgaagcttgcctttnntcatctctctttctctgtaacagctactgtccctttaatcttcatagcttcaagcttttcatcaatctccttccagtctttccccttttccttcaacacctcctctctcggccttgcctcgccgaaagaagggaaatcggagagtaattaaaggcatcctcaattggcggaaagagaaagcaatctctgcccaaggtctcacttaattgaaggcattgtaatgacattgttatagcaaaacgtaagcagccatctataggccccttcccaagatttaattaagattcagtaatactaatgtatttgtgctatgtacaaaaatatacaattataatattattggtggccaaaaaaatgattatattaatgtattttatataaaaataatgtaaattttagtatttgacaaatctatcaaatttgaaaataatataattacaatatatgagaaataagaatagctaacaaattatacttctaactcaaaccaatccgtacaatgctaaggccggtaaattttgattacattgcttaaaagctttcatatttttaatccgcataaaacaatggaggatgagaag

SEQ ID NO: 7949 - DNA, 572 bp, Gossypium hirsutum
cagggctgtttaaagagttaggttgtgaagcaaagttgaggttagtaggggatggtagtgaaaagccttatgtcactgataatgggaattacattgtggatttgtatttcaagaatccaattaaagatgggtttggagctgggaaagagatttctgccttggaaggtgtagtggaacatgggctgtttttaggaatggctacctctgtcatcattgctgggaaaactggtatagaggttatgactaagtgaataagtgttgactggaatttactttctgtgagggggtaatttgttaaaaaagaaaaaaagaaaaaaaaattgaaaaaaaagaaaaaaaaattgattctgtgtagagtgattgcagaatgttgaatgattgaggggattttagaaaggaattttattggttaatgaatatgtagttttatggttattgctttttcatatttaagattccaattttctgtattttcttgggttaccttttggttaagggattcaatttttttttttttaaaaaaaaaaatttataatttaaaaaaatggtaaaaaagttaaaacccaaaaaaa

SEQ ID NO: 7950 - DNA, 617 bp, Gossypium hirsutum
acagccttgcctttggagcttggcggtttacaaatttggtaacaaggacttgcagacatgtcaaatgtgggtgaataaaattaatgattctcttagtaaggaagttgggagaccaaagaatcttctggtatatatcttctatagtatgtaaaaattttttcgtttcaagatataatgccaatgagaaattgaagatattttaagagatttttttcccatttaataaggtatttgttcatccaatgagtgggaaagggaatggacggaggatctgggaaaccgttgctcctatattctcacgtgctaaaataaacacaaaggtaagcttccataacaaatgcagatagatcttattgcattattttcctaacattatcaactgttgcattttcccattaattgtcatgttttcttatcacggaaatttaaacatattaatcctagttataaaggttcaattaatacctattactaagtcaagcatgcctggctagttataatgacctgttgtttcaatttcaggtgatagtaacacagagggcagggcatgcatttgatgtgatgacatccgccacaaatgaagagctgaattcatatgatggtgttctagctgttgt

SEQ ID NO: 7951 - DNA, 576 bp, Gossypium hirsutum
gtgcaaggttgggttttgtggttgacaaccaccctttgatgtgatatattttactttttcttaccctctaatattgttttgatatcattctaaacaggaaaatttagacacttgcctgttgtacagaatggggaggtcattgctttgcttgatatagctaagtgtctgtatgatgctattgctcgaatggaaagggcagctgaaaagggaaaagctattgctgctgctgttgaaggtgtagaaaagaactggggaacatctttctctggttggtagatagttttatcttttatcttcaatagttgtctttttgtgccttttctgcttattgttggtccttgtattactcgtttttgtttttatagtttagctatcagctgaccacttttaacatttttaagtctatgctgccttttgaggtgatatgcaggtcagaatacattcattgagacacttcgagagcaaatgttcaggccctcactgtcaacaataattgcagacaatccaaagtaggtaatacttttgttttttctttttaatgtagatttatttggtcctttatggtattttgaataa

SEQ ID NO: 7952 - DNA, 668 bp, Gossypium hirsutum
acaacaagcacaacgttcaacacctcctcaaacaaccaaacctttgatacaaagagtttcatttctcttactcgataagaaggcggattttcagaaatgtttcgaaccaaggctggtagctttcggccctctgcaccacggtaaccccaagttccagcgtgccgagcagtccaagcttaaattcgccgctcgcttcgtgcgtgtcagcggtactaaccgtgatgacctgttcgacaaggtcaaggcacagatagatgatttgaggaagtgctataagccggaggacgttgaagcttacgacaatgacaagctagcttgggtgttgttcgttgatggttgtgcattgctgtatgctgtacgctatggtatggaaggcaagtttgatgagttgactacaaaagctgatcttttggtatttgcacaacttgatttgtttttgctagaaaaccaacttccttacaagctgcttaagatattgattggctcagccaaagatccccaaatatgggaacaaccaatcacagactttatagctcagaaccttatgacaaacacagaatatcgggagagaaaacatgtagatgatgataaagattatgcacatcttttggagcggttacgtgacgagctcctgacaggggaggaaatgaggatagacagtagcgtga

SEQ ID NO: 7953 - DNA, 633 bp, Gossypium hirsutum
atctccgactgaaccgttggttatttttcatcttaagaacatgtttatggttaagaccgaaagggacagagaacaagccatggaccctggcagtgtggactatccagaaactctcccaagtctccaactgtacttccttctgggaattgtggatgaagtggttactcccatccttcttccttttatattgaacttctttgcctttgcgtacctggattaccgacatcaggttagttctttgcaatgctgctgaatttgtatgctttctccacaactctcactaggaagctcatcacacataaaaatggaaagtttattaatatttgaaagatgcttttgcagatcatgtcattctgcttgtgatctccttttccatttaatcatgcagataattaacgactacaaacaacactatgagagtggcgccgcattctggcctaatgttcacagccgcataataccaagcttactgatctctcaacttctattattgggtcttctcaatacaaaagaagctgctaattcaactcctctgcttgctatcttacccatattgacattatccttcaatcagtactgcaagcaccgttttgagcctgcattccgaagatatccactcgaggtaagttccat

SEQ ID NO: 7954 - DNA, 695 bp, Gossypium hirsutum
  misc_feature (598)..(612): n is a, c, g, or t
  misc_feature (614)..(632): n is a, c, g, or t
  misc_feature (636)..(642): n is a, c, g, or t
  misc_feature (645)..(692): n is a, c, g, or t
actcctgaagagctcattctggtatattttttcctttccaatattttgcccttagtactgagtcttttgctgcaactggatgctagtattccttttgactaccttctaatttaagttgaaatgctttacccttatttgaatctatctattttgatagtccccttcaacatcacatatagaggcttgccaatttgttgcgaatgatcacacagcacaattatgcctccgcattgttcaatggctagaagaattggcttctaaagcgctagatctggagaacaaggtgatcgattttgttgactactttatcatttttgtttgattcattatactgtttgacgaagaagcagttagtggcatgcccatacatgttatgacttcttggaaaagcgaagctttcggtctttcactattctcctcccttcactatcttctcctgtttcttttcagttgcacttttagtaaggagatctgctaaataaggtgaatagtagcatctaaaaagaaaagattcatagtataacatgtttaactttgtatgcttcaaccattcaaactatgagtttgtttggcatctgttttgcggtcacatgcttgnnnnnnnnnnnnnnnannnnnnnnnnnnnnnnnnncccnnnnnnnttnnnnnnnnnnnnnnnnnnnnnnnnnnnnnnnnnnnnnnnnnnnnnnnnttt

SEQ ID NO: 7955 - DNA, 617 bp, Gossypium hirsutum
tctctctcttttctttttctggtcagtggaatgatatggtggttccgagctggattcagaatgattgtagtgtttctgagcatcatgcttaactgtttttcttttagaatctctctctctattcgttgggtagtaggtccaagtagaatcactgtaacagtgatctcttcgatcattgcgctttttggagctcctatgaccatgcttattatgcctctcccaagactgacagctggagatactgggtatatcatcatcttttgatcttgatctccctgagtgatgatagggctttagattttgaccagcaacttgagaactgctatcgtcccttccatcatcagaataaacatcttcatcatcgacaatatgggaattccaatttttcatcagtgaatttttgttaaagctgtcttcagagtagcttgcagtccttcccctctgaggataaatttttttgtgatatgctctttctgcctcatcatagcggcatcttttaccatcattctcatcgtagagtagcttcctaaagcatagaaaattagcacatcaaagatcagcatataagaataaacacataccaaaaagaaaaacaacaatttgagtgctgtactttc

SEQ ID NO: 7956 - DNA, 643 bp, Gossypium hirsutum
cctgcggtagtagctttgaattgaagtgaattggagaggctttttctctcttttttatgcatctgaattttttatctgatatggcgtttttggtaatttgattagttaggtcggaattttgtagagcatgcgtcttccgtgcgttccacgtccgcagggcggccagcaacggcgatgcggtcaaccacgccaaatttgataccgccgaatagaacttcagttcgcacgccagttactatacctccgattgatcctcctaatcgaagtagagacaaaaggttagcattcatgaattttgttacttaggaatatattttgaatttacagatgcttaatataaaaggttaatattgtagttcatgtaaatgttaatgtatttaagtaagcctatttatagttattattattttaattaaaatgttattttccatctgcttttagccgatttcgtgaatggtatgccacataatctgtttcatttgtaagagaagataggagaatggtgggtttatcgtggtggcgtctgaagaagtgaggagagtaaaagcaattcaaattagtcttctaatagaaggaaattttaaatttatatttaagactcaagataataactagttagtaagatggcaaccgattgctagat

SEQ ID NO: 7957 - DNA, 664 bp, Gossypium hirsutum
caaggaaattggcacatgcaaaatataaaggtttatgtgagttgtagagaatgcagcattttctccttccttgattgaggccatatattaccttttttttgttagtacttgtactgttgtcttttctttatctgaagttactgctgtttacttctgttaaccacttgttcaatttggtggagtggataaagacaggtttgatgtaagagggcataaactggtctgatgttcattaaggtttctgattacaaagttgaaacagttgtttgattcataaactggtggaccaattgttgtaatatttacttgtgtgtggttggctttttgctttgctaaaaatatttggttctttcaagtctgctattttccaggcatcattttctgtggattatagcttaacttatgctccttgtcataatcttgcttcgcaaggcttcagtatattttgttgtagtttttgtggggggttttccttgaatgatgtattttctctttgcttcactttttgtttgaccatgtgagtttgaccatagatcctgaaggaaaatatgaagcattggagaagtatgggaaagatttaacagcaatggcgagagaaggaaagcttgatccagtgataggaagagatgatgaaatacgcaggtgcatccagatcctctctagg

SEQ ID NO: 7958 - DNA, 644 bp, Gossypium hirsutum
tttaaacattggcaccagagtgaaccgccgtctattcctctttgcaattcccacacgtcaaaacaattaaatttcagtctactgccatgattatcatatgcaagggaagtgtttggtaaatataaaaaatgaattggaatgacaaccttttgaacatctttagtggtgggcctgtgagggggaaatgtggaattaaaaaaacgcaacagggaatctaatttctctttacttctgcactgctttttcctgtaataaaaaacaataaaatatatagtaggccctgggcaatgaaaaaacatcaccttttgcttttatttgtaattacaattttcttttatcttactcacccaaaaaaaaaggaaaacatttaaaatacaacatcttttgatggggggaatcatttattgttagccacaaataattgtttataaagacaataatttggagttcactgttttgtttgaagtaacatttgggggagaaaaagtggtctcagaactctagtggatcgtccaaggtattaaaacatgtgatgctgaaaatagatgaagttaaaacataaagccactagttgggtaagaatgggatagtaggtaagtcgcttaaatgatggattttttattcaatcaccaaacagcttacaa

SEQ ID NO: 7959 - DNA, 643 bp, Gossypium hirsutum
agttgttccaatattactcttttgttccttgtggtaataatccttccgcaacatttacagaacctaagagtctcaagtaggaaaaagattataatcaggattatgattttctcaagttatattgctaatgtatcacgcaattcctttagtcatttgcatatttgaatcttaagtatggtaacttcagtgtagctaatatccaactgttgtctattagtatgtgtttactcatagactattactacataatacgctgaggtatataccgttacgattaatatttcaggggacaaatgtggtatcaggtactggaactggtttagttgtctccactggatccaagacctacataagtgccgtgttttcaactattggaaagcacaaaccagcagatagttttgagaagggtatccggcatatatcgtacgtgcttgttggtgtaatgcttctagtagtcacaatcatgatattggtagagtactttaccttttatgatttgagtgagagtaccctttttgggatctcggttgcatgtgccctaactcctcaaatgcttcccctcatcatcaacacaagtcttgcaaagggcgcacttgctatggctagggagagatgtatagtgaaaagcttatctgccattaag

SEQ ID NO: 7960 - DNA, 676 bp, Gossypium hirsutum
  misc_feature (599)..(619): n is a, c, g, or t
  misc_feature (652)..(659): n is a, c, g, or t
  misc_feature (662)..(664): n is a, c, g, or t
  misc_feature (666)..(667): n is a, c, g, or t
  misc_feature (671)..(673): n is a, c, g, or t
ctcctgttgttcttgggcttcccaggtgcaaccttagcaggagttgaacgctcagactgtgagaataggatcatgatttgcatgagtatggtaacaatagccaacccaactgctgacaatgcaatccctttccatgatgataaaagtgaagaccattgcagaaaattataagctccataagccacaagacatgcccaagaagcaacaacctgaatcataaataagaatattattatcatatgtagttccagaaccaaaaaccaagagaaataccacagcagcagattggttaattttgcatcaacaatctcaccagaagagatttaataggccgaccgatatcctgcaatggttggtcactgaaagtgtcctcagctatatgcttgtccaacaacttgtcctacattagaaatcaaatagaaacaaaaccattagtaggaaatttatgcatgcacaagaacaaaccttgttaaacattaagccaagaaataaataaaagacaaagatacacaactgtttcaaggttaatccttcttttcattttcaatcataagatcatctgacatgcaaaccagaacacctagaataaccctcttatnnnnnnnnnnnnnnnnnnnnntatgtaaactgaattgtgttcatcagctaggtnnnnnnnncannntnnggannntcc

SEQ ID NO: 7961 - DNA, 666 bp, Gossypium hirsutum
actaaatctgcttctgatttaaatgttgtttgaaagacacataattgaaaggctgtgattaacaaataaaatccaatgggtgcttgtaacaaaaagcctatgaaaatgagaagttttacttgcaatttagctacgagacgaggagtataaaaacgattactgcaatttatctacggaagttttaggtttagggtttagtgcttggagcatggactctagaaggaacgataatgaactttgcagcaaaaatgaagcacttgtttgttcacctgttgactgagcaaattgctgagttcaaatgaaaccaacaaaattattgttccacatatgctctttgttattttagagacaagatgtaattcgtggcaaaccttgaacattataataaaaactgtaatcagtaagcttaatttaatgcagatgcttagtgcatacatatgctgtgggatttaactttttatgcacttgattttggaagcatagaactgctgctggctatgatttttgcttctgtaccatgcttcgtatttgatacatggaatctgctagcactactctgagaaaagaacttttccttcttttttcttaccattgtaggtcttcacaagtcggcattttcatcagttttctcttgtcaatttttggtctcatttggcgtttctagta

SEQ ID NO: 7962 - DNA, 586 bp, Gossypium hirsutum
gactgatttttttcttcactggaatttcactaggctcagtcagtttattgaaatcttcaatggtagtatatattgaaatattcttcggtatagcgttaggtttgtaagttatttgaatgtggaaatgttaatttaggataattagtagcaggaaggattttaagattgatatattacgttgactggaattattagtttgcaggatatctttcttctggaatactcaatcctatcgattagaataacgtactcgaatctaattagtctccgataaactttaattatgtcttttgagtttcgtatttctgttaatgcttttataataaagactaaaattgaatcaagttttaagtttatctaatgtggaggttatgataagatgataatttaatcgtagtttgaaagttgtaaaagttttacaagaaagtgtttctaatatattgaactcggccttaattagaaggatacaacgtattttatcttaacaaggtcagtgactcttgcgctatatttttaaagagcataattaggttgcagattgcttagctaagtttgctctgaaaaataaaaaaaaaacttacaaatt

SEQ ID NO: 7963 - DNA, 638 bp, Gossypium hirsutum
atatttgaggtctaaacagaaaattgaatggatacatggtaaagacgagtaaaataccataaaaaccatttcaattcttctggaacttcagtgaaataagtccatcggataggatgaataaaaggataatcagggtgaacaccaaagggtttgaggacgagacctccaaagtttttgaaaacttggagttgatattcaaacatcatgtctcgggttttttggtggaaagttttttcttcaaaaagcctcataacctctgaaggaaattctggattcaggttgggtggaatgagaaaggcttgtacagagttttttgaagaagataatgctactgttctgtacatcattatgggcctgggctgggaagttctgagtgctataacctcttttgttggcctggttaaaagatctgccaaaacataggtatttcttttagtgtgtttaacatcaaaggaatatttagaaaactatttagcctatctcaagagttgagaatgtggaacagttttctgtttgaacttgagcatttgtggaaatgaagacatgtccatttcaattaagaaatggtattcaattagatggaattcaacttttgaaatacctttcttaactgcaaggatttctttgaaagtggagtg

SEQ ID NO: 7964 - DNA, 614 bp, Gossypium hirsutum
tacaaaaaccaagttagaatccgtttcaaaatcgaatgaactagaagagacaatgcggtaacaatgatgcagaatcactgactgatcatactttcgatacatcattcagttttatcacaacacagcatgtttttaattgctttgaacattgcagctgaaaaacaaagatttaccaattaaaaaaacaaaaaaaatgtcaatatctgggaaaaatataatataagccatatagtggttgtaacagtcattgatgataattaaatcagaagggcgttacaataaccacaacttgcaattactttaatgcaattttttcatggagagtacccaaagaacagattttcaaggccaaaacatgaaataaagtggaaaaagaaaacacccattatggatatttgaaaagattagtgggaatccaactaattgaagagatcaaatacaatataataagataatgaagcaagcaaaaagtgtttgatgatccaaaaggtaaagtagaaatgttaacagttcaatctttttgattcagctttttacagcaaccaaataaagcttgaaactttcaagtacatttttttttctcttcctctttaattacagtagggaaaagactg

SEQ ID NO: 7965 - DNA, 647 bp, Gossypium hirsutum
tcaaatcaggaccctaattatgtaaagagcatgggaaaaaaggaataatcagtcttgtgttatgaattcctatttacagaactatcacaaacctcaagattaatcaccgtgatctatgattttcatctgttggacaccttttgctgtaatctggttttccagacttggtacggtaatgaaatacctttcaatttttgaaacaatcaaaagcttttggttgaataaaaatgataaaccagaatatctagatcttataaggctatttatacaactgtagaaattcaaacatgttaaaatatatatatcatacttgtgaccttttataattattcgaataactcaaatgaatatgaaaagctgattttagatgggccaaatattccaatgacaaacggcagtgcttgctcatgtcttagaaaagctatagatcagaaaacttgtaccaaaagacaaactctttgaaggaaacgtgggtaataagacaagttccttcacactagaacaatcaaataattcatcagtaaaagtattgtataaagtaaattacagtctggtatgaatcattacaacgtgtaaattaaatcaattaaatgttgttggcaatgaaaaatgcaagaaatattgataaagcatgtaaagtagaagca

SEQ ID NO: 7966 - DNA, 604 bp, Gossypium hirsutum
atcttctatatttcccttggtttgtttgtcatatttggagggagttaacaccattacttgctggtgaatgtcaagcatccattgagcaatccagtttaacatcttgagcaaatcataatatcttatatttttattattttgttttaattataatgctcatacataggaattgttaacatcaagagcagttgcaagttttttgtctcagtataatgtaagatttaattggtcatatgatagcttgtcagttgtctagaaattcttgggccatattttctaccaagtaggccacatgacttgtcatacccatgaaaagaatgttctcttttttttcctagatgtctttcccaaaggtttttaagagatctttagaaactacataaaaaaattagtacatttgtttcacatttttcctggcatcctgcgtgataatcctattaagttttggaatagccaggtggtgcaagaatgaactgtactggatcaaatgttgcataatgttgactaaattcagggctttattgaactttacatttgagacgaagtccaaggataatcattgtcattgtactgccctttagccttttgctttgacagtgtgctt

SEQ ID NO: 7967 - DNA, 595 bp, Gossypium hirsutum
  misc_feature (588)..(590): n is a, c, g, or t
ggttttcaccctccaggaatgtgcaggtcagacctcgcaacacgagtggcatgtgcggggcatatcgtacctacatcgagaccatcattgtttatttaatacggccaatccattagaaacaaaatcatagaacaccacaacactgcccttacctgcaaatcacaaatatgaacttctccgtggtacggccaacaatggtctgggcgattcgtttccaccacaagggcaggctcactaggaatactacagtactgaagtattctctcaacagatataattttattctccatattgcaaatattccacaccacccaagcttgcaacatatttagattgagtccatacgtcacagctaacccggcaatacctaaacaaaagaaaaatgcatacaatcattctcctagaacatttgttatctagtagtcaataaagctgccaatatgaatctgcatttacttaccaggatcgataattccctccggtatagagattaaaaagaataaagagaaggcaaaagtaacagaagacagtaagtccaggcggaagcacagccattccattgcaccggcaacatggaattttggacgnnnatacg

SEQ ID NO: 7968 - DNA, 665 bp, Gossypium hirsutum
gtacagattcatcatattcaaccgatgtaagcttttgattttgctcaagcggcttactgattttgcttctcctagacccagatctgctatcaactccaaagcatattttctttggttcaatacaattccttcacttgacctcatcacttctattcccagaaaatacttcagcactcctaaatccttcatcttaaaactctgatgcagaatcttttttagttcattgatcatgtcaatactgcttccggtaattaacagatcttcaacataaatgatcaagataactatgttacccccacttctttttgtgaacaacgaatagtcatatttgctttgtacatagcctccctgcgttaacgcctcagtgagttttaaattccactgccgagaagcttgcttcaggccatatagtaatttgcatagacgatatactcgagactccccctggctgcgaaaaccatccggaagttccatatagacctcttcgaacaaatccccttgtaaaaacgcattatacacatccatctaaaaaagaggccaaccagaagatgctgccatgctgatcacagttctaacagtgacgtgtttcaccacaggagaaaaggtctcctaaaaatctatacccgcctgctgattatagcctttcccaaccagtcgagctttaa

SEQ ID NO: 7969 - DNA, 552 bp, Gossypium hirsutum
ggtatttgaaggaggtgaaaagtgataataaatgtgtgatgacaggtgttatcggttctgacgctagccgcagcatgttcaacagctagcgtggtggatctccttttccagacaagcagctccttttgcactccaaagtgttgcagtagatatcaactgtcagctgctatggcgtttctcacttggtttctgtctttggcttcagcgcttctcaatctatggttactcccttcctcgtaagtttctctaggttttatactataaatgttgcgtctcaaggtaaatgtaatgtagattattgggagagcatcaccatgcggaaacaaagggcaggtaggtagatgggataaaagataggtcacaatcatgtaaagtttaaaacctttacctagtttatgtatattctgccacttcacacataatccgcctgctgatgctaactttatgcttctctctgctcctatcttaaccaatttctattctgttaacttcattcaacaatttcctgatagtaggttgtggcggatctttttacatcataagatccaccct

SEQ ID NO: 7970 - DNA, 595 bp, Gossypium hirsutum
  misc_feature (44)..(46): n is a, c, g, or t
  misc_feature (577)..(577): n is a, c, g, or t
aggtgtttatgggtagggtttttcttaaataaaatatgttatannnggaaggtgtcatatgggtatgatttttttctaaaagaaaaaagtgttatactggtgtatatggcatggttgggttcggcaggatttaggtcttatattaataaatatatgttttccacagcaactctattttttttcccaatatatataaggagatagattcttattttcactttcctatgtaaaggaaaaaaaagaaaatcctccctagaattttatttagtaattgtaagattcggatgggtaaaattttaatagctgaattcattttttaagtttaaatatgtaattaatgcctgtagtttgacaaaactcaagatttagtttttgtgcatcaaaagttaattttttttatttaatcatcttctagttcaattattaatacatttagtaattttcatcaatatttatcatatttatttttcatcaactatatataggtcatataaaagtaatctaatcaacttttgaagtgtaaatataaaaaaaaattattttttaaaataatgactttaaatctttaattttaccnaaagtataagaaataatc

SEQ ID NO: 7971 - DNA, 606 bp, Gossypium hirsutum
  misc_feature (36)..(38): n is a, c, g, or t
  misc_feature (56)..(57): n is a, c, g, or t
  misc_feature (59)..(60): n is a, c, g, or t
  misc_feature (542)..(552): n is a, c, g, or t
  misc_feature (598)..(598): n is a, c, g, or t
  misc_feature (600)..(600): n is a, c, g, or t
  misc_feature (603)..(603): n is a, c, g, or t
gagtcggtattaaatcaagctgttatggtttctttnnnggttaaaatattccatanntnnctttattttttttaaaatttaatatctagtctctaaaaatattccataactctctaaaaaccggtatcaaatttagttttattactttttaaattttaaaattcaagtttaactgttaaaattattttgttaaattcaagtttattagtcattttttaataacattgccattaaatgaataatttattttaatttcaaaatgccacaccaacaaatttaacaatgttaacaattagacccaaaatttaaaatctgaaaagtaggactaaattccaagaaaaaaaagtacagggactaaatttaaaatttgtgaagagtacagggacctatggcatattttaacctttattttttttcccaaagcaattaatcattaccgaaataagcaatgaaatggaaaatggcaaaaagcattgagagttcagttcatagcaatatagcattatagcattacctaataattacagtgattcagtcagcannnnnnnnnnnaggcttaattacgtatacacaaaaatcaaatcagaagcaaaatatnantcnaga

SEQ ID NO: 7972 - DNA, 536 bp, Gossypium hirsutum
  misc_feature (504)..(508): n is a, c, g, or t
  misc_feature (512)..(516): n is a, c, g, or t
  misc_feature (519)..(522): n is a, c, g, or t
  misc_feature (524)..(533): n is a, c, g, or t
tggtaaacagccttcgttggagataagagatccagcaatcaaacagaaggaagaaagttttactattaaaacaactaataaaaattataaaggccaaagttctctagaagggtctccattcactaataaacaactagagcatctacacaagctttttcaatcaccacaatttcggatgaattcttatcttcctaactcatccaataatccttcttcctcctttgcccaatcaggtactgatttttctattttttcagtgtcaggccttgtaaaacaaacacgtggatcattgattctggagctaatgatcacatgactattagtaattttcttttttcaacttacacaacttatgcaggaaacaaaaaaatcaaagtaacagatgggtcgttctcggcaatagccaagaaaggcactgttaaaatttcgccttgcttggttttacatgatgttttacatgtaccaaatctagcttgtaatctcaaatcgttcagtaaattatcnnnnntctnnnnngtnnnngnnnnnnnnnnttt

SEQ ID NO: 7973 - DNA, 657 bp, Gossypium hirsutum
ctttgctttctcctttttccttttatggaagtaaatgatgtttttatttcactatgtcatggttgttgtcacttaaaaacagttgcaagagggttttcttgtaaatttagcttccaaacagtaaatcattcaggtaatttatgaaaaacactagtttggttttttaatataatttgtttgtttattacaaaagcaggtatggcagcttcttcaaatcccatattctaggatgtcctacagttgtttccatggatccagagctgaacagatacatactaatgaatgaagccaaggggcttgttcctggatacccacagtccatgcttgatatcttgggaaaatgcaatattgcagccgtccatggctccacccataagcaaatgagaggagccctccttgccctcattagccccactatgatcagacaacaactttttcccaaaatcgatgaattcatgagagctttcctctctaattgggacaaccaagtcattaacatccaagacaagaccaaagaggtctgtttttgtatttgtatatgttaatatcacattcaaagcttttcatgctttcctctgtttctaatctgctttccttacagatggcctttttatcatcactcaagcaaatcgccagtgctgaatccagttcagtagc

SEQ ID NO: 7974 - DNA, 571 bp, Gossypium hirsutum
agagaaagaaatattaatgccatagtcttggattctattatgttatttaactatcttttctttgccatagtcttggattctattatgttatttaactatcttttcattacagtacaatgaaattgcagtatacgtactttaatctcctgaatgcacggcatgctatttccctcttcattctgctgccactgcactcctttccatctctctattgcatcctttatgtatatgaggaacaaaatgaggaaagatttttcaatattttataatcacatagacattgaaataattaatttattttttgttgctattccatttaataatatttgtaaattttcattaggttgcgtctaaaatagtttaaatgccaaaaccaaaagtaataattagataactagaaaattggactaaaataattttagttatttcaatttctttaaactatttaggcaattaaaaagttacatctggaaggtaaggttacctctaaaattattttaactaaattcatgattaagctctctaaagtaaagtatcaattttctttatttttgatctataaaaaaattta

SEQ ID NO: 7975 - DNA, 503 bp, Gossypium hirsutum
  misc_feature (17)..(17): n is a, c, g, or t
  misc_feature (395)..(396): n is a, c, g, or t
  misc_feature (398)..(398): n is a, c, g, or t
  misc_feature (409)..(409): n is a, c, g, or t
  misc_feature (441)..(446): n is a, c, g, or t
  misc_feature (466)..(466): n is a, c, g, or t
  misc_feature (468)..(472): n is a, c, g, or t
  misc_feature (475)..(486): n is a, c, g, or t
  misc_feature (497)..(498): n is a, c, g, or t
atattacatagaagagnttatcacgccttttgaaagatcaaacatagaatctagatcattaaaaaaaaaacataaaatcttgggaagtcaaaagtcaactatgttttttatccacacttctgaatcaaatcaggaaaaacatgatagccattaaaagactgaaggggtatgctttcccaaaaaaacacctattatgtttgatgtttgaaaatgtgatttgttttaacttcagcgaagtgttgaattcactgaaaagaaccattgctgggaaaaaccaattccttcccgaacccaaatccttcccctccataattaaaatgtggccaagttaccactgaaaaatcgcaacccctgataattaaaaccttctttctttaaaacccttctttcttgcnnanttccaatgctnttcccggcccgccggtgttccctgcgggacannnnnnttttgggtattaaggactgnannnnnatnnnnnnnnnnnnactgagtgtgnnacgtt

SEQ ID NO: 7976 - DNA, 555 bp, Gossypium hirsutum
  misc_feature (517)..(518): n is a, c, g, or t
gagctgctcgacggagttctttataatgcatcatggagaacgacgatatcagttttcttctgtgtatcatctccagcgcattaaatttgatcattggcctctccttttagtgttgaatgactcttgtcgacccagtgggactgagacgtttaaggttttttttttctggttggttatttcacagtggcttgatacgttggttaagatgtgttgggatgacaattactcgcttgttgaattggtccaacagtttgtggttgatgcgtcggattagaatgggaaagtttttggtagtattggtaggcgaaaaagggaattgatggctcgattacgaggtttgcaagcagctaggatgtttacaggatgctgggatctatgttgctattgtttttgagagtcggaggcgaacggggactggaaatttgcgatggcgctgtctggagctaggatgggtgaagacgaatgttgacggcggttgtgtcggaaagaacttgtcaggcaaggactggggcctgtnncggaactattatgggagctgggatgtcgggttctcca

SEQ ID NO: 7977 - DNA, 560 bp, Gossypium hirsutum
ataaaatttgtgcattaaaattagcaattacctaaaaacttttgctcatttatatcaactatggcagagcttgaaatttatttttggaggctagaattaaattgtatatttttacgatggtaaaaatattattttatcattttaatagtctatttattgtataattttttaaaagattaaatcaaatttttatcatttttgaggtaccaaaatataatcttaccccctttcatttcctttttccttatagtatcgccaagctagcttggggatcggaggacgtcagagttttcgatcacactatcaattggatatttgggtatagttagtctcaacattttgagtatggcatgtataagaaacttggtcattttgttatgtgtcatattgattagccaaatgtgttggctcatattggtattccgattattttgtatatggccatgagagatggctcatattaattatttgggttgtaaccctaattaattatgcatgcatgcaaatgtctttatgctttgatgtggttgtggatgatgagtgtgatgaatggtatatgt

SEQ ID NO: 7978 - DNA, 626 bp, Gossypium hirsutum
tctgccgctttggctagatatctaaactttcaaccatgaaaaaacgttttctttttagatttagatgttttctttgttagagaaaaccaatctgcaacataagcattttaaccttaagcaaacatttttattgaatttaagggtaaattacgtatggttatattatataaccaacatattaagcatacattacaataagaccgaaatatttatttagttgaatttttaatttaataaaataaaagatataatcaaggatcaagttgacataaatcaataagcaaatgctgcaaccgacaaaaccatttgaatacattggttatgtatttgggtttgatatagtcggagatacctgtgaaaatggaatgaaggagcaaaagtatattgagatgtgttccctaccataccaattaatccatgttggcagaaatatataattgcaaaattaagatgaaggcaagacatatgttgttttgttttgatgatgggaggtaagaaataaaaagctttagtccacatgtgatctacatctagccaggaattgttgggcaaagcaagacaagtgaatgaaagagaatgtacgacacataaaaactggatccccggttaataaaaaaatccatccc

SEQ ID NO: 7979 - DNA, 565 bp, Gossypium hirsutum
ctaggtgtgtgagatgttatccgaatggaacaggtactagttataacctctaaaacttttgtaaatttttataaggtaggaaatactatttaaaggaaggcttagattttacaagcattgaaataaatcattagtccttgatgtttagatatgtaatccatttattcttctgtcacttttattttgggtaaagttgcttctcattagaaaagtttatgcaggatacgctcttagttcggttgaagggcgggtggcaatggagttctttgatctttcagaggccagtcaagccaaaaagtacgtatctgtcttttttccttttagctgtatatattgaggtatatgctggttatgtgtataacatgaactttggaactgttcttcagctgatcctacccacttttcattatcttttgcttttattaatgggttttttggatcattggtagatatgcctttaagtgccatcggaaatctgaggctggacgggacattgtatatccagtaaatgctattgcattccatcccgtgtaagtttctgtattagtcctcaatttgtatgcta

SEQ ID NO: 7980 - DNA, 624 bp, Gossypium hirsutum
cagccgcctttgaaagccaaggtttaaaggttttggatttagtaactacaggcatccaatgcagcctacgacaactactagaatacggatactttcatgccgatcctcatcctggtaatcttttggcgacccccgaagggaagctggcttttttggattttggaatgatgagtgagacaccagaggacgcaagatcggcaatagtagggcatgttgttcatatggtgaatagggattatgaggcaatggctcgtgattattatgctttggatttcttatcgactgatgtagatgtttctcccattgtgccagctcttagggacttctttgatgatgcacttaattacactgtcagtgaacttaacttcaaaacacttgttgatggtttgggtaatgttttatatcaatacccttttaatggtgagctgatatttctttttgtccatttacttttgagccctataattcagtttggttagtaattactaacattttatggaggctaatggtttggtttttaatgttgttgcagtacctgcctattatgcactgatattgaggtcgcttacagtgctagaagggttagccctgtatgctgatcctaattttaaagtgttggctgct

SEQ ID NO: 7981 - DNA, 692 bp, Gossypium hirsutum
gtcaagacttgtgcaataactttcatatatctaattcatgttatatatccctgtatattctattacatatataatcaggataagggcatcatattttggaaggtcaagacttgtgcaatatctttcacataaataattcatgttatatatccctgtatattcaattacatatataatcaggataaagcaaataatggttttggtggctttgtattgattgtcatttttttaataccctttctccagagaagcagctgtcattgcacttattaagctaggtgcttctcctggtgctgttgatgatcctacaccaagtttccctggtggaagaacggctgctgacttggcatcaagtagagggcacaaaggaatagcaggatacctggctgaagctgatttgaccacccatctttcttcattgaccgttaaccaaaatgtggtaggcaatgatgcaactacacctgcacaagaggccattgagacttcttctgaagttgctccatgtaatgggacattagatgacaattgctcattgaaagggtcccttgctgctgttagaaaatcagttcatgcagctgctctgatccaagctgcttttcgcgctcgctcagcccatttaagacaattaactaaaggcaatgatgatatgtttgaaatatcacttgaactaggtattcttgggtctttgaaca

SEQ ID NO: 7982 - DNA, 598 bp, Gossypium hirsutum
ctcaataaacacttaccttctattgcaccgaattgagctattaatattattttttgtttaattaccctttttttgcatgaaaagcactaaaaactgttggaagaataagggattaattcaaaaatatggtactttatgagcttaactagaaacagagagtaatttaagggattgattagacaaagtactttaagagcttaatcgaatacaatatatgataagggcttatgtaggatatttagaaaagaacaagggacctttttagcattttagcctttctccaaatgctcaaaatgctttaactctttctatatcaaaataacatagaatctccacacatcaaaggaaccatatgtcttaattctttctttgtcaatatgagaaaaacaataacagcaaaggcactaaaggattgcatgctccaatcttttactagttcatatactcatgaggagccttctataattttttttttttttttgggggggggaaaaaaaattaattaaaaaaaaaaaaggttttcctttttccccccgggaaaaactttaaatttaaatttttgggaaaaattgaaatttgaaagggtttaagggcaaaa

SEQ ID NO: 7983 - DNA, 647 bp, Gossypium hirsutum
gacaatgaactctgccaatttggaagtcagagttggaggagctgcacttctatcatgtactgcaaaagaacataaacagcagtcagtggatgtacttgatcggtctgggtatttaaaacctctcatagaagctttagtggatatggcaaagaagaattcaagatgtacctctttagaaattgaggtcagaggtagagccccaagagaatttattgaaagaacggcattccaggaaggcgaggagtttgatgtccctgatcctgctattgtattgggtggaaccgttgctttgtggttattgttaatactgtcttcatgtcttccaaaaaacagaattaccataatggaagctggtggacttgaggttctatctgacaagcttgcaaattatgcttccaatcctctggtatggctttccttctctccctctttctatatatatgacaaaacctaatgtgttctgaatagataaaaatataaattaccatattcctgaaatcattgcataaattgttttcattgatatgattttccatcatgtatgttgatacataagattccttgccaaaaaatttggtagcctagctgaaaactgtttatttacaggcggaatttgaggatacggaaggtatatggataagtaccct

SEQ ID NO: 7984 - DNA, 639 bp, Gossypium hirsutum
  misc_feature (625)..(635): n is a, c, g, or t
ctgcaattgatatatttgccacatttgctccggacagttggcatataattcaaagttgatataacatctttctttgatttgagaaaatatagtttggaaattttatgttaaatattgcaagggttatgtgcgtgggctgatggaagcgatcacttttaagttaacagtagttttatttagattacttgagaggctcagttcacacacacacgcgcgcaatttaattgcaggtctaatacagctcatgaatgtaagagggacttagtgatggaaggtgttaatttattccttcttcaacaattgtgcaatcttattggaaatgtagtaggaggtggattgtatggtgatcatgggattgactccaattgcagttggcaggacactagcatcgcaaacaaacaaaccttcagcttcccaactctgaccattctcatccacaacaccctcttcctcggttgagcccattcaacaacttcctatctgatgagctgtaagatagagggtccaatactcatccttggaactaagccctcctaccacgggaacgttatccaaaaactcctgcaaactttcttctgtaagacctttgcatttaattctctggccatcgctttgataggtttcnnnnnnnnnnnaaaa

SEQ ID NO: 7985 - DNA, 644 bp, Gossypium hirsutum
tgggaagggaaaccatgttggcaggaaacacagtccatgatcacagtagattctattcacatgaagttgatggtattgaacagtttgtatgggtatttgccccctgaaatccataattgaagatactgtatctatgagactatcatccatccctatccataattgatgatatttttgaattccactcttttttttattagactgttatacgagttgaagatattttaagttttgaccaaaaggacttgagttttattctaaatttatttttaatataattacatttactgaaccagttgtactttttattcataaaaactttttaggtttcatttttttgagaatatttggacatgtttcactgtacctttgtgtatatcattattaaaagtgaattaggcatataattaatgcttcaattttcaaatctaattctggttttatactatatatgagtggaaagtgagaatgagaaaggatggattaattatccaaaataggtgagaattatattctttttgtaattcttatagaatagtcattttgcttatgtttggtacctctcaactaataatttggtagaacacaataatttcagtgatttcctaaatatacaaggcgccatctacatttctacactcgca

SEQ ID NO: 7986 - DNA, 656 bp, Gossypium hirsutum
atagtcagtcaatctgcatttgcaactgtaggttactagttgaatgctttttgaatggggttcttgctgattgacatttcaggttttgcttaatggattggccgatacttggcctgcaaggaaatcttggacaattgaccgtctagtgcccaaatatggagatacaacattcaagatttcttcctctttaaaagtttcgatgacatttaaagattatgtatcgtacatgaaacaacagcatgatgaggatcctctttatattttcgatgacaaggtgagtctagggtagtcataatatttatactattttttaaagtgcaggattataattaatcagatagcgaccttcttggaaagtttgggaagtactttgattgtttgccatgcagtttggagaatctgcacctggtttgttgaaagattacactgtaccccaaatatttcaagaagacttctttgatgttttagataaaaattgaccatcattcagatggcttgttattggtccagcaaggtctggtgcctcttggcatgttgatcccggacttaccagtgcctggaatactcttctatgtggtcgtaaaaggtatttttgataaattacctctgtatttataaaatgctttcatgttggtggttttggaatttacatgtgc

SEQ ID NO: 7987 - DNA, 591 bp, Gossypium hirsutum
ctttgagtcttatgcccaattctttttcctcttcgcttccttcatagcaaacaacaggggacaagaaaataacataaaccaatgtacctagggctaattgagtaaccatgcaaaacatttcaagaacaaagagattaaaagatgagaaaggctatcttagtcggacctgaatgtgagtgtcagacatgagtatatatccaacatgggtatatttgaatttttccaagtttttccaggcaattggagggttattggaaggtcatatccccgtacacaaatccagatatgtgtcagtattggacacgggtactttagcaaaaagaagagtcaagagtaacattggagaaaggtaccttctttgtcaaggagacctttctcttgccatgcagtgagctcacttccaatagcagcacattctccgggtttccaaccagataaaccaagctgatgaacaccaagaattagggacctaagtggattattccaagaactagctttcttcgtatccagattatctgcaagccaattggctcctcccatagcttcatgtgtattgtgcagcctaagtcaatgcaagtcagtgcagcacga

SEQ ID NO: 7988 - DNA, 654 bp, Gossypium hirsutum
tgatatgcttgctgccggacgtcaaaaggtttccgttatatttgctttttcatctttgattttgggctgttctctcttatttttccaagtactttggctgtccggatatactttattcttttcaaccatgatttttttctttgagggcagaaattccctagttcaccatcatggtagtactgcttttgatttgtttccactctcgcaaccgatttctagtgttttatcaactgatatttagttgttattattattatttggtaaagaaaagagctgaagaaaatcaaaatctgtctcagatgttctgaaccttaaatagaattcaaagtttaggtgttttaatttcctttttttacttagtataacctttttgtttctatcttatgagatgcaactttttttccttttttaagctgttaggattggttagagtttacttttatgtcatctctttcagcttcaacaatttcgccagaagaaggatggtaaaggaagtagcagtcgtggaaagtcttccaaaaagccgaacaaatctgatgctgatgcagcatcttcagttggcaaaccaacagtctcatcacaggtctccaaaggggaaactgtagctgttgacttgacagtgtcacagtttatggagagttcattcccttctgg

SEQ ID NO: 7989 - DNA, 584 bp, Gossypium hirsutum
  misc_feature (580)..(580): n is a, c, g, or t
tcttctatctttgatctagttttgagttgtatttttcatgatacagttccattttcatgataatctgtataaatatttcaggacttcagaaagagatgggacaggcagtctcgtgcgttctataacttatttaggcaggcagatagagttgagaagcttgctgaaatcatccaaagattggtaaggctctagattccttctatgattttgtttgaaaggttaaaatagtttctatgttatatcagttgtttcaaatgttaaattaatgttgcatattacaggagcaaggtgatctgaagctcagagtacgagctttggagtctgaaagggctttccaacgtgttgctactgttcagaagactgtagggagcgtaagttaaattataaatttctttttctttccgtctaatttcatcgtttgagatttgtttttaactatgaaaacattttaaattccttcaaacatcattttgcactgttgaattattggctttctcgcatttccaagtggatatagtaagttttttctttgtttttcatttttttttgggggtgtggcggacttcacattaagttctcngtag

SEQ ID NO: 7990 - DNA, 655 bp, Gossypium hirsutum
cccacataacatctacatgtaattataaatcaatagttcatgggctctataactcttccctagccaatttgcttcattgatacatggaatttgttgcagaaaagaaaactaaaacttacctgtcgttgccgctgctccaaccgcagcttctctgaatttgccatttcatactccccgttttccagatacctttgatcaggtctcagccttgaatctgtaggaggcaacttttcctgtgtacatcaaggatattgaaatcaacatgccaattactgcaagcaattctgagggtacctagttggtgcatcggtttcaaagtcattccatttatttcctatagtttcaaatggacaaactgatttgatctttaggaccaaaatttcattaccaaaaatcaaatataaatcatcatttcacaaaaaccatcaaggtattagatgtaattcaggaattgtagggatagcccaaaaatgcaaggaaatatatttaaggcattagacagctgcctagttttaatccaatcgaaactattataacaatcaccttcagaccaggagtgagctcattcaatgtgatggcaaaacgtgttaagttatatctggtggagtatttaggaggcttgctccgcttccagagcagatgggtttctgacaaa

SEQ ID NO: 7991 - DNA, 649 bp, Gossypium hirsutum
cctatcagtcaaccaggtaacttctcatttaccgcgtcatattccaatagatagacctgtaccctacgaacaattaaatgcatttggataatatcattgtcatgaatctgtcaattccgcgcatgccatataaaccgcaaagtacacaccatttcccaaataacctcaccagtagacacagtgaaaacatacagtagccaatcatgaaatgagacatccgataattcatttggccacgtaatgtgtaggactcccaaatatccaaaatcgaagggcaattgcgaaaaatatgttccagagtctcggcagagacacaagggcacatagtggatgcccgcaatcttctgttatataggttatagtagttaggaataaaattgttgaaaattcgccatactatagttttgatttttgtcggaagttacaactaccataatttgttgtaaaatagtttataagagtctgtagtctcaaaatagttcgaagaataaggagtctataaccactacagacatagaattttcctgaaggctcaaccccccaactaagaagtcttcatgggcatcctgagcaaggggaatacataacaccctatttgcaatggctcagcccaggacactggtaagtctttgctcgtcctattgccttg

SEQ ID NO: 7992 - DNA, 619 bp, Gossypium hirsutum
tgttctcagagaatttttaagaaaaagaacgattattaccaaagttagtggagtccaaccataaaagaatccatggcgtctgatagcttctccgtctggagaattagaggtactagccagtaagcacaaacttccaacaatagacatttctacagtcatcaagtatgatgagtgcttcttgacctgtaataaagaaatttttaatgaaagttaagaaataggcaagcattgataatttgtttattaaatataggaaaaaaggaaaataggccgtttctcacctgagaagcccattgacataatgcagaagccagaccagaaagtacagaagcaactaaaacagggacaattccgtaaaatagaatttgctcaggatcatcagtgctagaagctttgctagaaccttcaccgatacttagaagaacagctgccatgatcaacaaaaacagagctccaatttgttgaattgactgcctttgcctgcatagacacacaacaaattaagccaaaaaactaaaaaaaaaaaaaaaaaaaaaaaagggtttttgaaaaaaaaaaaccctttttgcaaaaaaaaaaccccccctttctaaaaattttcggcaaaaaaaggtttttt

SEQ ID NO: 7993 - DNA, 629 bp, Gossypium hirsutum
ctactgaagttatacagcccaacaaccaaaatcaccagacaaaacatcatacttccttcttctcagaagaaaaatatatagcaaagcataataagaggcgaccaaaacctttgtaggatttccctgagggtcaaaggctttcaaagcgggaggtccccgaacctcaagctcattctctgcttgctttggacaaagactttcaacagatatctgaaacgacgaaacaaggcttggttatctaacatataaagaatttaagcatctacctggtgcacatgatcatagaggaacttccactaaataaataaaagacataacaatcaaaattaatatattagcaatctgaaatgcatcacaataaacatttaacaattctgacaaatgcatccctataatacactttaggtatgtccacacgggatgccctgttatacatcatgatgggttacttggaccagctaacataagagattcttagacatcaaataatatattgacaatgatgttacacattatgataaacttacaagtgcaatcagctttatatacactctttcaagtctacatgtataaccccagttcatcacatcacaattcaaggtttaacacgctcaacttcttaacagcag

SEQ ID NO: 7994 - DNA, 569 bp, Gossypium hirsutum
atctgctgaattaagattttttttaaataaattttttttaaaaatatatatttgaaatatcggttgaatccctttgtaggaaccaatgtagcagctggttaatgtatcaaccaaattttttcatccaaacaggaaaataaagaggtgatggccaggaacactgaccgctgatgcagtcgctgattatatcaacgacaccgcactgattggcgatcctaagagctccaacgtaggggatgtcaaaagaactaagcaaagaaggcaggttgaagaggctgcaaaggcaaataagttcagtagcgacggcttgttggagaggtttacagcaatcgtctggcagttggacatcagtgttgttgaagtaaggagcacaagacatcaagctctgcaaacaagtcggatttgcaaccgtaacggtcgccatcgtcgtccccaatatcacaagaaccgccatcatcaacatcttttgagccattgcgtttttctcaattaatctaattccgctgtgtgtgtatgtgttgtttttcttctccctgccctcccctggctgctatgccattgcctatata

SEQ ID NO: 7995 - DNA, 593 bp, Gossypium hirsutum
aatctttgtggtgatggtgatttaccgccttggtctggtgtaacatgttcgactcaaggagactatagagttgttactgaactgtatgtatcatatctgctatgatttttgtttttgcttaatatgcttattagtgaaaaggatgtgtctttgcttcacaaacgccatctaatgaacaatgcaaatgccttttgctattgattcttgttctatatttcattccaacttgtatctatatcttatgttacggtttaggggggagatgtcaaaataaataccgctctaccatgattgaattctaatgcctttgtttatctaatgaacaatgcaaatgtatttcaccactgattcaacattctatgtttcattcacatttatcttatatcttacattatggaattggaggaaagatgccaaggtgaatattgttctgccatgattgaattcaaacactttttggtttctcattctatgtgttcttttttttttcaatttgtatcttatctcattttagaggctacttgaaagatattcaagtgactacttttctgccttgattcactattgaatgtaattctattggtttgaattgc

SEQ ID NO: 7996 - DNA, 570 bp, Gossypium hirsutum
gtgttgggaatatggatgatttccatggaaagaagtggtttttaaactgtaatgatatttgaaacatggatgatttccatggaccgggtgcttcttctatatatacacatttatatatgaattagtagttcttttttcttctatggaaagaatatgagcaaaattattgaacttatatttctatgagcatattctgcattatatcctatcccatcttaggaattgttagttgtattatgtcatggtgatctatctgttcaacccttttggtacttttctctagagtaaaaaaaaaaattgatatttattttcttcatccatttcttgatagaattaaaaaatgaaaagaaaagaagtataatttttaaaaaaatacataaatttgaactaacatgcttgtattatcatttcaatttagaagaattgatttttatacacctagcacaatctttttttttccctctttttcactccctcctttttatctttacacttttccatccgcatctttaaaatattcaggtttcaaatactaaagggataaaatattttatatttgatgtaactcta

SEQ ID NO: 7997 - DNA, 499 bp, Gossypium hirsutum
ctccatgcgctgaaatagcaggcactgggaccaactgaaatgaaggaaacatgtctctaatgttttcatgataatgattcccatcaggaaattgcaatttgagtttggaagtcccaaatccatctaaagggttgaaggatattttcatatgttcaagtggtggagaagaagtaagtgaatttatgggagatccatttccgatctgttcattaacggttgtctgaggaattttctgatacgatatgcactgctgctcattcctaggctccaataccccagttttcgtagaagtggctggttcagaatcatcatcattgccaattgacacctttctgcgaaaaccatttacaagtaatttatggccaagtccaaacatccttgatgacttgtcatcatcctcctcatcagaatcaatagatgtagctttgatgttaggattgactgggttcttgtttccatgtggcaatgaggtatttaggatagagccaacaccatttaa

SEQ ID NO: 7998 - DNA, 649 bp, Gossypium hirsutum
agatagcatcaatgattttcagcgtcgactgaggcatatattccttgttgcttaatctgtcgacgctttgaaacgctagggttaagatacttcccacggctccatctccttgcccaggtgccttatcaggcataatgctgaaccctgatggcaaaatagatacaaattttgggttaccaccattcaagatttttgacatggccatgatatccatcggcgcgtatactatgtacgagccagtttcgtcggtgtagctttcttggagatatagtatctcgatcttgtttggtgaggactgcaaatttattagtatgcttattagttagttcatggaggaaattgtgatgagaaaagaaaaggaaatgatagaaacacttacattcacttgcataatggaaactcgatttttaggattttcaccattactgacatagacaagttctcggacatgtcgttggtttgaaagcaaatcccactgcataattgtacaccccgtaatccatccatgaaaagttacacgctcaatggagtaatatacatacacatatatgtttgtatacatgcatgcattcagacagcagtacaagaaaataaccctaaaaaattaaacacgtatatatataagttttacataccctgtttcttgtac

SEQ ID NO: 7999 - DNA, 611 bp, Gossypium hirsutum
  misc_feature (602)..(604): n is a, c, g, or t
  misc_feature (606)..(607): n is a, c, g, or t
atttgtcgagtttatgagcaggaagtagagaggaaggctcggaaacaatttaaaggattatttgacaagaagccaggagaaattgcagaagttcaagttgaagatagagctgggggtgagatcactggtgaaaaccagaagaatgatttgtcggcgccattattagaaagagacgattctcaacattgtaatgaagctgatggtggtcaatatggaatggcctggttttacagcttgtggcctcctgggagaagaacattttcagctcttggccttgatagatgtaccatactctaagattctaagtttctcagggaagaataaaactactaggtataattttagaaaagagcaaggtttcttcctgtctttcaactcttttcccatagttttgtcaatcgagttgtgtttcagaggtctctgattcttcaaaacttttaactttctcttctcatatcgttagaattgaaaccgaggtaccaaaatttatcaataagaaatgtgaagggtatccaatgatcttctatatttgttgcaacgtatgtcatatgtgaatattctttatcgcaaattttttaagccttcaagcagacttgagatgnnngnntgaa

SEQ ID NO: 8000 - DNA, 591 bp, Gossypium hirsutum
  misc_feature (579)..(580): n is a, c, g, or t
ggttagactttttcctgaacaacagtgctatctactttgttaagtaaaaggagtgttttgttttctaagattgggcatctcgaaatagatgcaaggtattatcggaagaacattgagttacagctaaaagtccattagccaaagcaaaattatgaaacgggtaagaaatatattctaaaagaaaagagacctaccatgccaggaaactggtgtctcctctccacaaagctctgatggacatctgtaacttcctcgtctgcaaaggggggaaaaagggtgaagagtttctttaacgtaaaatcatcaaagtaaaatgaaattggaagtaaatataagaagagaaagaatataccaacggagacttcttcggcatcggcaaaaagtgaagacggagaaaagagtgctatgtccatttttatttttatttttttttccttttagttcaacaatacactgcaaagggaaacaaagctctctgccaaaagtacgaacaccaacaaagcgaaaaagggcgatgctcgctgggttttacaactttttttagttctttttctttgatggagttggaggcccatttannataatacgggc

SEQ ID NO: 8001 - DNA, 619 bp, Gossypium hirsutum
cctctgcatgccaatcttgtcaaggcatatccaaatgtgttttgataatgttttggacttttctaattttgtttttcttttttttctccatctattcgcacatgtactatacgtacttccattgtgtcggacatctgtccctgcatggagagttcatgcttcatagttacaccataggttgtggaaaaaacaaacttagctaggtccttgacatacagagtgcttctggcagtccatcaatggaaattctagtagatgacttattatcttgcttaatttttctcaatagctgtatggattcatatatggagtagttttttcctattaaatactagttattcttggcttaaaacacagagaaaccaatgactgtaacattttgaaaattgaaatcattgcttttgatatcagaatagagattctgacaattacaacttagtaaattaaaatttggcattcctctaactgatttttgacacggttgaattattttttttcgagattgtgatataatggattagtttgtcaaagggagactgtgacacagttgaaacaaattaagatttggcatgcctctaaatagtttgttctatctagcatcttgagttgaactgtacag

SEQ ID NO: 8002 - DNA, 436 bp, Gossypium hirsutum
  misc_feature (428)..(429): n is a, c, g, or t
tggagtagcacttctttgtcaagattagagaacttacaaattaattgatggtcatctttaatatcatcagttgctggtgcaataaaagagttagctaatgcatcatccagaattaaagtccaaggttctgtcatgctcaaaatctgcaaaatagcaaccagacccctccgtgagaagaaaaaaggttaaggttttcattctttacttgtacagatcatttgatgtttatctcattctgcaaaagtgtcaaggactgacgtatgcaaagcatctccatatccttcccatatacatgaaacaaaaacataagaacaaatatatgggtcatatgtatggtttaagtctgaggaagatgaggcagtaatcttcatcgttaattttgcatgtttattgctatacatctcaatctatcctcgattttaaatacnncaagtat

SEQ ID NO: 8003 - DNA, 610 bp, Gossypium hirsutum
cataccactcgcaatcatggtattgtcctttgtgttatccacctcatgtttttaatttagtttatttttttgacagctgcatccttgttcaaaatacctggttatgttatctggagttgttatttttgtctagtaaacaccaatatttgctccttgttgttggtaatcaatactctgcctttttctcttttccttttatttggggttgaattgagctgattgggtggggggtgggggataagtggggagataaaacacaaccaaaggatcggattcttataaactcatctttgtttcgaaaattggaaacagtcaggtttcttcctcaagatgctttaatgcaaaaagagctaccttagtagttggcctttcacctccaaactaatgtactgagaactctcctcttgaattcttttccttcattaactagatgtaaaaggcttttgttcaccaagtctctgtcaagggttgccatctactattatcagacatcttttaaagtatctgatataggaaggaatgagtcatgtacataggctgtcaactatagctgggtgagtgttagttttcgatagacatttacagagggtcctttctttaaggtaaatgg

SEQ ID NO: 8004 - DNA, 630 bp, Gossypium hirsutum
aagttgagtctatattctgaatcccaaataatccgattattgatgctatatttgttccttttagtgtttattaaggcctttaatggagttgtcagtttgccataactgtgaagtaatgtttggttcgttgcagacagatacagcttccgtcctactcgaggcaaagggatacatacgatttcttcacgaacaagttaaggtctgtttttcttgcctacgtttacttgtattatccgttgttcaattatttagttttcttgaaggccaattttcgagtacttatgatcgctcatgtcattggagatgttcacgatatgcagaaaaccgttttccgtacaaatggcaattttaactaaaaaaaaatctcggtttttctgttcttttcggatggtttcaggtgttgagtgctccgtatctccaaaccatgccaacaaatagtttacaggttagcattaaatggactccgttacacacagagacattaaaaatatgtaacacggagatgtaaaagtatcggacacactagagacatacaagctagggtcagtgatagtagttcgaaagttccgattttggattcgatttaaaattttctttctctttccagggtgatgatcagtataacttgag

SEQ ID NO: 8005 - DNA, 568 bp, Gossypium hirsutum
taataaacctaatttaataaaggagaaaagtcccaatttccgtttggggtaaaagattaattgggggccggaaatgggcaacaatgcccaattgggggttgaattttttttgtataagttagtccctgaacttggtaattgttcccagattagggcttgaactttttttttctgttcaagtaagtctctgaacttggtaactattcccacattagggctttaacttaaaggttttcaaggaaatatcagggacttacttggaccaaaaaaaaattgaagccccaatgggggaacaattgccaagttcagggattaatttgaaccaaaaaaaggataaggccccctgtgggaaaaaattcccaatttcaacccccaaaaaagaatttaacccttttttttcaagggaacaccccccaaaatccccctttttttttttgggtggggaaaaaaatattcccattcccgaaatgggatttccccaatttttttttgggtacccaaaataattgtgaaaaaaggttacctctccctaaaccccaacccttatttctcaaaagtttgtgggggc

SEQ ID NO: 8006 - DNA, 526 bp, Gossypium hirsutum
aaaaatgcccttaagttaaattacttataaaaattttaaatttggttcacaaattgcttccgcattaataaataactaataaacggataagattgatgtgttacaagaccggggtgtgtcttgggaggtcattagccagagatcacttaggctgctaatggaacgcttcgaattcgggccggcccgtcccgatcagtttgaggtgtcacaataccaattgaaaaaatcccccgatttgtacttcgttccaacattaatgtacgtactattagtggaacaacaaaacttggtttacaactatttaaaaaacaattttattctaacttttgttggaatagaatctagatagaattaagagagtttgcaaaacaaatccaaagcgcaagtgagttaaagagataagtaaagagagaatcgacacacaatatttgttaacgcaaattagattccccaatcatacatctgcgagccttacttagagaatgattttattcaccaattggtctgatcatctattgacttaagc

SEQ ID NO: 8007 - DNA, 605 bp, Gossypium hirsutum
tataaatggcatttcaagcataacctgccagttttctactaagcccaaaaggtgatgcaacagattcaaatacaaccatgttatagactatatataaaatataaattcttgtagtattaaagaacacaaaaacaatgtcttttggtgtaagaatacacatgaactatcaaactctgacaaactagagcaaagtggattacctgctggtcatcatcattttcggcatgggttattcctagcaatctccaaccttcagcattctcaggatttttcataacttcagcctctaggtcaagcactgcttcactcaaaagtcctttcctcaatagctcttgaccttcttttaaaggattttgatgaccaacatatggattcatatcagaaaatacatagacaccccttgaagcgtccaaccgctgaggaacctacaagttttcacaaccaaaacattcatgtagaattaagagaggttataaagtgaacttcttcaaggctaccagacttactcatcatatgaatttgcccagctatcagacgaactatctcccaaagccccctcaccaacttgatgaccaaattcttctgcccagtcatcaacatgcaac

SEQ ID NO: 8008 - DNA, 661 bp, Gossypium hirsutum
acatcagccagtcaacaaaaaggattgcgagtgtgctgagcattttaaactgcctctaaatggcaatactcagctcatcggaagcttcatgccaccagacacgaacagtaaattccaagcttagtctatgtcctacctttaaaaattgcaattcccaaaatggctaggaaattgaacatggcaccatatccgtaaagaaataagttctgtgaaacacaaaaagcaaccacgagtaaatggatgatttaagctaaaggtaaaagaccagaagtgtataaccatttacttgctttcattaaattacttagaagtctcccagaatctatgccatgtaaaactacttcagagcctttattttccttttctcctagttgttactaagatccaatggtaaaacccatgaaaaatgtgccattaactgcatcaccaggctcgcttaaaacaaataatatcagtacaaactcacctggtggtatatgcttgactcaaattggctctttaaagcatactcattgaagactgatgccagggatggaacagtaacctgcattaatgtcattgagttgaatttcacagtgtcatattctctagcataatagatacatttagatattatgcacataaataaacataaacaacactgtgataccgatgtctttgc

SEQ ID NO: 8009 - DNA, 633 bp, Gossypium hirsutum
gtaccaaatggtaaaaatatgactccagaaaggaaagtctgatattcgatataaaaaatacaagccataaatagattgatcgttgttaaatatttgcacaagagtcacactgcatattgtcttacgttatgaatatccataaagaaaccaaaggcaatcatttccaaacaatcaaacaagaaacaagaagggctatattggaataattgatagtatgaagttgaattaccgaaagaagaacagcggtctctgctccttgcaaatccttgaaagtaatatatgcaatttgagacccttcatcacctctgcataagcatataataagctttatacccatagaacggtaatttacgaaaaaagatgataggaactaaaagagcaaaccaacctctgcatttcaacatattcaatatcaccagaaaaggaaaagaactctttgatgtctcgctcggttgcttctaaagaaatattgctgactttaatggtcttaatctgcaatgacaaaagaaaacattgacttattgaatcctgataataactaggctaagagaaataacagttatcaacctaaattaatcaattactaacaaaactcgaacccagacacctgatctgataatcagtcctaaaccc

SEQ ID NO: 8010 - DNA, 364 bp, Gossypium hirsutum
tttatttttctatttcctacagataaccccccaataacacaaaaattgtcattaaatgtaaacacgttgcaccaaattcaaacttcaaaacattcatagtcactagcctactatttttcattaaaatacttaaactaacataaattacaagactaaagagaaaaaaaataaagagcattggaaagacctgaatgtaaggagtcaatagcgatagttgtaaagcccaaccaaactgaaccccggcggcgaccgtacaactaagaaccagagttatcaagctacaatccttagatccggcatggatcggcgacgataagttagcgtttccattgggaaccctcgaggcaggcgacgaagaagaagc

SEQ ID NO: 8011 - DNA, 625 bp, Gossypium hirsutum
tcattttgttacagagaatctactttttatcactccaaaaatcattcttctccttacgcttaagaaaaccacacgcttgcctttatctcctgtaaagccacaaatgaaacaacatatttgattatcatattctaagcaacaaaatgcatatcaccaatacgatgaactgacttaggcctcagcatggcctcttttttttgctttacaatgagcattgaaaagtattctgtttttcactgaactaaatatactttgatcaacataagacttcagtgtccagatatcttcacaggcactgacaaacaaataaagctgtacgttgtaagataagagacacaatcggcattgttgacatcatacattgaaattagttattacagagatgagcttctattggattataaaagtgaacaaaaacaagcaatagaagggttataagtgcttcaaggtgcaaaactctaactgggaaaacttttggctaatcctgagctacattttttagaatatattttgattctaatcaaactttgcactttcaacaccactatttacttcatcagtagatcactgttgatgtgcaccttaaaaccttgtgcaaacgctttagacttcaggtagtgtgagc

SEQ ID NO: 8012 - DNA, 620 bp, Gossypium hirsutum
agaagagggtcccttgaactgggatgcccctcttgttagcacctttaaactggaacttggggacaaccagagaaaaaagaggtgcaagaacctgaacaaggacaccatgtaaaaaatttaaacggggaaaatggtttgatatatatcatacctgcttcaatcagtattgaaaaccctaaaccacagcaaatcccagcaataactctctggatttatttgcagacatcttttactttaaagaatattttggtagacttattgtttggttctaagtaacttctaactttttaatctttttcttcaagaaataaacctctgagaccaatacatcatgatttagcacaactaagaaacaagaacaaggagcaagttaccgcaataacgggatgtgctggcttaacatgtaaagctggagctgtcataacaattccctccagcatttcttcaatataaggatacgaagctgcctgcgaattcggaacttattaatttaaaagtaaccgatacttcaggtacttaaagtaattggtagatgttatacctttaaaaccagagcaccaccagtagaatgaccaaaaaggaacaaaggcacacctgggttttccgattttattttttcc

SEQ ID NO: 8013 - DNA, 634 bp, Gossypium hirsutum
  misc_feature (60)..(62): n is a, c, g, or t
  misc_feature (594)..(594): n is a, c, g, or t
  misc_feature (598)..(600): n is a, c, g, or t
atccttcttagacgaaatcagctcaggccgtaaatcagaagaagaggaagaaggcgccannntagccagtaaagacccaacttggtaaggagcaactggcatgtcaatgaaagatgatgctgatggattatatctcattggtcctactgggtggtcgaatttgcacgtggatccaaacttgcagtgtccattctgcaagtagaatgaacaaggctgcaccccctgtttacaagaaagaataaaatccatgtaaaaactgaagtctaatgtcttagcatagacactgcatgtcaacaacatgaaatcataaaggtaataaactagcagttcaagatagcaataccaaagttaagcctgaattgaatttattttccacaataagtagtcgtggatagataattatcatttcttgacccacacagactgagatataaaatgaatcgacatggtgaagtcatgatgaaattgttaccaaactaacttttagacaatgcctatttccttgtcatgaacaaggaatgaaataatagtaaaaaagaaaagttacataatatcaagcagttgctgtggactaaacatgaaggcaatttatgnatcnnntgacgtcactcctcaaaccccattccctgtgtct

SEQ ID NO: 8014 - DNA, 634 bp, Gossypium hirsutum
tggcttggggtttcttgtttcggattttgttttacttctctttgttattgggaagcaaaaacaaaagatcatgaaaaacccggatgattgtttttaacaagtttaaggttgggatttagcagaaaaatgttgctgtaatttgtgtgcatctttattttatttgatttttactgtcggtaaagcttagattgaagtgcaaaaccttttcgtatctggaaaataattcatgttccatttcttaaatcattatttttttgattaattgttacaacttacaacttttaattcatttgtattctcttgcaacctaatagtacgattttgttttaactgttattctttttatttatatatatatatatataatatatgttggtttttgcgtggcttttgctttagatataagtaggtaaccaagttccagcttaaaatatattttcactttgattgttgaacgttttgcttcttttttttttcaaaaaaaactatttgatgaaaagaaatatttgatttttttttcctttttaatagggggaataatgaatttaaattcaattttaaacaaaaattgagtcaatctaaaggctctaactcaacagttgaatagtttttgaaaaactacaaacggacatga

SEQ ID NO: 8015 - DNA, 517 bp, Gossypium hirsutum
  misc_feature (305)..(305): n is a, c, g, or t
  misc_feature (479)..(480): n is a, c, g, or t
tcttggagttctcggatgccgcttttagggtgattgctgacaattatgtgacagatgacagtggtactggaattgtacactgtgctcctgcatttggtgaagacgattaccgagtttgcattgggaatcaaataatcaataaggtttgccctaattactttatctgaatgtattaatttttggctgtacggttagacttggtattttgacatataggttgttacatgttgcatgaattttcatttggtgtccatgcctttataatgttcttgctcgatggtttttgtgtaactaatacgttttcnttatgaactttcttctctggttgtccattgaacatgagaagcggatgaataacattttcttctggaagaaaatgaaggattccttgggaatcctacaagatccattcgttcttttctcattgatagtcaaaatttcatatggtttcatatcatgttgaggaaagaaaaaataannttttgccctttccgggtgactgaaaaataaagatata

SEQ ID NO: 8016 - DNA, 657 bp, Gossypium hirsutum
gtcaaacgtgtgggttttttatatgcaggtattcatcttagggcccgtgaggcaagtgaggaaagcggcagccatgctgaggggaagaatgatggattgatatttgatgtcttgtagggctttcctctcaaaaactaaaactgaaaactgttatcagaatgatctttaaactccttacaccgtttgtgttttgccttatcttcctatattttgtacagccgtcactgtttttacccattgtgttagaactgctttgatctgattgctgaaaatacttgggacatatccgtgatgtacaattgtgatgttgaactgccactttgaatctgtggaagaacggctccattagccaaagagtcggtgaaatcgactcttctcaagaaaaattaagattggaaatggttcaacacactattgaactttttaaagatttattgcccaatatcattatatggtctaatcacattgttaaaaattaaagtttagagattaaatcttaattttaagtagaatagagagatcaaaactaaaattttgttatcgttagcgagatcaaaatcaatatttaatcattattttataatatttaaaaaaacaaccttagttatgtgatacataagggaaattaaattttgagcatagtatgaggacccaaaa

SEQ ID NO: 8017 - DNA, 669 bp, Gossypium hirsutum
agcttataaaaacaaaaacccaaagctaaagagagaaatagaaaaagaatggaactttctttgaagacctttggtgtgagttgaagagagggttaaagggggggagggggtatatatagagggtggaagaggggcaatgaatggagttcaaggtttggttggtagctttgtgtgcgcgtgtgtgtgtctgtgtgagagagttaaaacctgtaactcttccgtaccaaattaaaaggggttaaatttggtaactattttcatatttagggccttgaacgagacaatgattctcatattgaggtatatatgaactttttttaccttaattattttttgatatttccttgaaaatattaaagttcaggtttaatgcgacaattgccaagtttatggattaacttggacaaagaaaatgttcaaatcctaatgtgagaataaataattagtttaagtctcaatgtaagaataattaaatttaagatctgatctaaaaaaattttcaaactctaatataaaaaataattactaaatttagacctaaataatgattaacgcaattaaaaaacaatccttagccaatccgaaaattgaggaaaaaattgggaaaaaaatgaacagaaaatttatacccgttatggtgatggctggactgtacaggtgttgcgtatt

SEQ ID NO: 8018 - DNA, 572 bp, Gossypium hirsutum
  misc_feature (138)..(138): n is a, c, g, or t
  misc_feature (560)..(562): n is a, c, g, or t
atgttcttgttcaagctttcctgaatttcgaggacccttggaggatcatattcttatctccatgtccaaatatgtgtcaagcatgagtgtcaaacactaatactcaaagaaaaatgaaacggcaaagcaatatactcnaagcgtacgtacttctctcattcatgtgttccatcagaatttgttaaaagaaaatgaaaataatacctgctcaacttcagaattaaaaggcttacatcgatttaagtaatgtgtttgtgcattatgttgggtctttataatttatcaaaatattgagagcataaaagaagtttttcctcagcatgctagaggtcaaatgataaacataaagcaaaaatacaaacctcgaaaaatgaaacaatatcttgctttgagtgaaggcaactaatgaagcgtgtcaacgtagagaataccctgaaaaacccactcccataagagaaatataaacatgtaaaatatttataaaagaaaatttcgataagaagaataggcaagaggaatgatctaccttgaactcacaagaccagaagccggttcccttnnnatgtttatgt

SEQ ID NO: 8019 - DNA, 651 bp, Gossypium hirsutum
ccaagccattcaatccgaccgatacctcgggcacacaggtttcaacatcccggcggcctcgttcggcatcttcactatgatcggcgttacgatatggataccgatttacgaccgtttaatagttccatggctccaaaagtacaccaaaaaggaaggaggaatcacattactgcaaaagatgagtataggcatggttctcgccataatcaccatggttatatccgccattgttgaagatagaagaagagccttagctttgagtaaccccatcggcatagattcaaagaaaagatccatttcttcactgtcaacaatgtggttaatccctcagctaacattaataggactctccgaagcattcacattaattggtttaatcgaattttactacaaacagttccctgaaaacatgagaagcattgctggatcattcacttttattggccttgcattgtcgagttacctcagcagtttcttgatatcagttgttcataagatctcggaaagatcccaaacaggtgactggttgcctgaagatctcaacaaggggaaattggattatttttattacttggttgcagggctggaagtaatgaatttagggtattttataatgtgtgcaaattggtataaatacaaagaaggtggtag

SEQ ID NO: 8020 - DNA, 605 bp, Gossypium hirsutum
ggtattaaatgctaactcgaatcttacaatgaccagatttaaaatacgtggattaaattttaaatatgtgtgtagacaccaatttttttttaatgttacatttaagttgtccttataatatgtacacccaaactaacaactagtttggtggaacattattaataaaataataatattttaaaaatttaattataacattttgaagtttaggactaatttgaaatatataggctatgctacctaaagagggttttcacgtaaaattttaatgacacaggccataggtacagttagagagattgaaaacacggtgaaggccatggcctatcgcaatgacgtattcaataactccgatcaactgagcgagcacaccgctatagaaatgaaaggaaccgatcgaccgggtctattttcggagatatcagcagccttagctgatctccactgtaacattgtggaggcacatgcatggagccacaatgctcgtttggcttgcgtggcctacatttccgatcaatccaccgacaccccgatcgacgatccccaccgccttgccaccatcgagggccacctcaccactgtactacgagcaacaactacaccta

SEQ ID NO: 8021 - DNA, 603 bp, Gossypium hirsutum
  misc_feature (582)..(582): n is a, c, g, or t
  misc_feature (584)..(584): n is a, c, g, or t
aaatgataagcatctaaaagccagctctgccaccttgtggattgtagataacgtccaagaatcactgtttggctctaggaatggatctatgatctcatctaaacgccctttgctgattctgtcagtagcaacagaaaccaaattaacttcattatgaggcctagaaaagtccactaccttttgtgctgttatgatctcaatgagaactaccccaaaactataaacatcgcttttgtccgaaagatggaaattttgatggtactgaggatcaaggtatcccggggttccttgaggagctgttgagatgtgtgatatttcagtaattccaagtctagaaagaccaaaatctgctactttggacctgaaattgtaatctagaagaatgttgcttgatttgatgtccctgtggtatattgggggatcaatagcagaatgcagatgagcaatggcttgtgaagtttcagcagcaatggtaaggcgaactggccaggcaagtccatcacccctctctctttgtaaatgctggcataacgtaccaattgggcataaactcatacacaagtatttgttcaccatttctantngagcaacccaagaggcgaa

SEQ ID NO: 8022 - DNA, 584 bp, Gossypium hirsutum
  misc_feature (527)..(527): n is a, c, g, or t
ctgctgctatgatgatcatttggaaagttcaaataattgcgctatgtctgatttgcctgcacctgaaaagttactctctgtaccggaaggacctattgataaaccaagtgatttactgggtgagtgtaccctagacaaagaggttccagaagggaatcatgaagtttatgccggaaacaaattcatttcatgcaaaaaacgaagcataaccgaaagtacaataactgttgagagtatgaactcagttgaatcatttagaagacctcaattcagaaccgcagaatcgattcctgatgatgatgacttattgtcttctatattaggtaacatcatttttactttaatgaactattatctgccattcatgaatttactagaatagctggattgggataatttatgcactgagttattgaacttgtcatcattttcatgcaggttacaaatctttaattttatcaagttatatcattaaatttctattattgataaattaggtcacatatgctaactctgttaagtaattntaacagaaaaagttgacttagcatgcatatagggtccattctagaaaggaaaacaaa

SEQ ID NO: 8023 - DNA, 652 bp, Gossypium hirsutum
tcagttattgcgtgacattgaggaaataagtaaagccctttacttgcagaaaccttcatcaactgctttgattaccacacccaatgttaggtctaaatctgctggcaaagcccatctttcagaatcaaaatcaaagcagaattcaagaaacctttataatgatgtgaagcataaggaaaagaaatcatcttcatcatcattatggaattggaagaagccttttaaagcattaactcatatcaggcatcataggtttgatatttgtttctttctccatgtgcattctattgatgacttgcctgccttcttaaatgacttgagcttatgtgtacattggaagatgaaggatgaagtattgtctactcgtgcagtgagggttgtggatggaattgctgaatttgaagagacattaatgtgtcaatgttgtgtgtatggtagtaaaagtgggcctcgtaattcagcaaaatacgaggccaggcttttcgtgatctatgcatccattgttggcgctttggggaatgatataggagagcattggattgatctcacaaggctgttaccacttactttggaggatttagttggggagaagaggtcaggtaaatggactaccagctttaaactttctggccaggctaaaggtgcgactcta

SEQ ID NO: 8024 - DNA, 517 bp, Gossypium hirsutum
gcatgataatatctatgcttaaggcagtcaaatctcaataagtaggtggaaagagaaaattttatgaaaaccaatgtcttgcatccaattaaagaaaccttctgatattcttgctataatgaagaatatttaggcctcaaagaaaaagttcaaaaatcaaatttgcaatcatattcaaatgctaccacttacaagaataaagaaatctttcgtcttactattttcctcatcaatatggcgatccaaactatcgcctcgattagcactaccaatttcaaagtagttaatcccattagtgcccaccagttgcttaatagcgaaggaatgaaactgagcaaagaagagaatcgataatctatataaaaaagcatgaataaagtaaggattaaagattaaggaataccttcgaccaatcacaaatcatatcactactcctctttcctcgagtttttttaaagcatcacctgtcaaaaaccataacctacagtgaacgtgaggagagaaaagagcacagcac

SEQ ID NO: 8025 - DNA, 639 bp, Gossypium hirsutum
tgctgttggcaataatctcctcttgtaggaattctatatacagtcccctgttagagcatggtaattgttgtataacgattttaattaatttgatcactagttgtgcaacactacgggattcttagaaacgtgggctcattttgtgtgtcatttgagtcaggccttacccacactccactatttaaactctgtttacttatatatttcagatatacaaaacaaaaaggagagatgttgaatctccacatcagtaataagtttattttggggtaatttaagttggattaaaactgttggagccctgcctaatataagcaacctcaatttttgtaatcatcaagtggtcctctcttaatttttttatatttaattcaaattttcatttaatatataattcaaatataaatatattaaaatattgttaattaaaattatttaaacaaaatagctccttcgagtctgaattttttctcgagtttttgaacttggtgatcaccgatgttagaaattgaagaatggtagagaaactagaattggatgaagttgaattccctcatactatctgctttcatcatgggacgcttgggaaaagctaaaattggatcaagttgtggtgatcgatttttgcacgacacctgc

SEQ ID NO: 8026 - DNA, 666 bp, Gossypium hirsutum
gtttcatgtagcagctgataatatgatttgcagatattcttcaactccttaaaaataaatggagaaatgtgttaatgcacttacaaggcaatgcgtagttccactccaaattgggatatggaagacaagaatgaggataagagtgttgatacaatgtactgatcaagaactgtgcttggaaacaccacaatgtcattctagatggattcaattgaatcaatgatagtacgattattttcataattcattcgatatggcagtaattagaagcatgtacgttgatcaattctcgtaaaattacttgtacaccaccaagtcatttcatttgtaaatagattgattcaattttattaataattgaatgattaattatatatatatattcattcgattgaatcaatgaatgtcacaattcattttactacgatagtagtttgaggaatgtacaattgattaatattgtgagagttcgtcattttgtcttctagttgtatgtttagttgcaattggatttactaactaaatcaggaaaaaattgagatggcaatagaaattagttacacaatttagaaacttcttatatttgtgcagtcttatcaagaaagtaatccactgtcaatttatagtacatgatgtgatttaagttcaactcactcattaacttgc

SEQ ID NO: 8027 - DNA, 640 bp, Gossypium hirsutum
cttccattgttgtagcaatgttgtgcccactctgctaaacttatttgcatatgatcctcagcagttcgatctattggtgctcttgcacatagcacctcaaacaacaccacaccaaaagagtacacatcagatttctcggttagtttctgaagacgatagtattgaggatccaagtacccgaaactgcctttgacagcagtgctaatatgagtgttggttacgtcattcattttagacaatccgaaatcagatactttggccacccatttctaacttaccaaaatatttgttgtcttcacatctcggtggatgatggtgtggttgggacctcggtggagataatgcagcccatgtgcagcaccaatacacatcttgagcctctgctcccattgtaaagggggactactagtgttgtagaggtgatctctcaaggtcccatgagccatgtagtcatatacaaggatcatttccttattatcttggcaatatccgattaaagaaactaaattttggtgcctaagtttcgaaagcatctcaatttcagtcctaaactcaagcaccccttgttgtgaacctggattcaagcgtttgattgcaacaggggtggagccagcattagcgaatcctttgtagacttcac

SEQ ID NO: 8028 - DNA, 622 bp, Gossypium hirsutum
ctggcatatggttcaccacactgagcaagggaacactgaaggcaagaccgcaagcagtggagcaggagtattggatttgtgtaagccaccagaatacagattggtgctccacaaagtactgaagtctcattcgcatccagttactgcccttcacgtaacttccgacttgaagcaattgctgagtggcgattccaatggacatttgctgtcgtggacattaccagatatgcacttaaaatcttttaagaatctggggtgataccattaaaacaatcatcatgtacttttcagctataggaccagctaccagttctgtccaatgcatttgttgcgagagaagctgtggttctctctctgtccatggtaacacgaaaaggaaaaccgagacaacagggctggccaggtaactttataagagaaagagagagaggatgggaaatttctcccaatcttctatataaatgttgaaaattacaagccatttgcctggcagcttgagctctccgttgtgaaggcgggaattagggtgatgaatttgttgtaattttgacagtggaggatattgcttttgaaaatatatcactctactggtatttttgaatgtaaatagatatggaattgc

SEQ ID NO: 8029 - DNA, 498 bp, Gossypium hirsutum
gattccttggttctcaagccatttaacaagttccaaccccaaggtgtctttaacatcattagacacatttttgaagtgccacctcaagatatctaacccaccataaaatggtacataaaacagctttgcctcattttcattgtaaactctacaaggatgttttaatgcccttgtgtgaaatatcaactccaaggcatattgatgagtatgataccatccttttccaagctttactagaggttctcccatggcttcattgttgaagtacttacaaaaatttgtccatggaatcatatctccacattgacctaccaagtccttattgaactttgatggcaaatcatacacataaatccctttcccatcacatgatgttacatgatctttatttgatatccatgatctttgaacttgtagctgctgttcaacaaccttgacagcaaactcaacttcccatccctggcattggtgaacaaccggtcccgaacttcctggaat

SEQ ID NO: 8030 - DNA, 521 bp, Gossypium hirsutum
  misc_feature (510)..(510): n is a, c, g, or t
  misc_feature (518)..(518): n is a, c, g, or t
ctatggatggttttacaatccatgtatgatggtggaaacaatggggcgtcctgttgagtgtaggaacgccgaggatgccatggatggtaaatttgggaggaaaaacttaagggactcgcgcagagtctattcagatttggggttcagaagcaacctgatggaactaatgggcatgagcatgagtggtgttgagggagagtgtggctctgaccttgttggaattggaacaaaatcagggagcagcaaaagatatggtgaagataagaacggtggtttcggtttgaggaggaatcgatcagccggagaaacttctcaaggtgatgtatttgctcgattgctgtaggtgacattcagtagtatatcatgaacattgaaatggttggcaatgaagcaaagtcgaggcttccaagtttcagttgcttgcaccccaccccaaatccatgtgtattttacttgtgggtaacttgtttttggtgatttcaaccatatccaaagcttctttgaattganttggttgngtt

SEQ ID NO: 8031 - DNA, 645 bp, Gossypium hirsutum
ttttttactccagcttttcctggtctttctaccagtttatttctcgcatgcgctgctgctgaagaggcatcctgcaatatcagacaatagagtctgcttagagagcagttactgataaaaggtgaaccagtaaaagcaaaaatgtatctagatctgttaccccagtttttctatattttgcaataatttcttgagctgttctaaccctgggtgttgaatcatctgctgcacctagcagtttttccctgtctgtttcttttcctgcaagggaaagtgaatattcaccaatttcgttttaggagtttaggagtaaagaaaagcaagtaagattgtgaagtttacctcctttcgttttaacagcttcatgagatgaggagctagttacaggtggagtgtcatctatttcgatgtcatctggtgccacaagaaatatgtgttgtcagagaaaaccaataattaagaaagagtgtagatgtaactatggaccaaacctatgtcaagctccatctcttcatgcttattaacattctggcttgtgtctatgaagggggtctttgaaaatttgctctccaaatgagtaaaattggattcaggcattgcagatgtattcacttttcctcctttaaagcctttgactataccacc

SEQ ID NO: 8032 - DNA, 640 bp, Gossypium hirsutum
gaagaagctctgatgggcactgataaagtaggaaatgaggttgttctgaaacaaggagatgaatattgaataaacgccattgcctgttttcaagaggagagggggggggtttctttttccctttggcttctgttcctagataggatttaaacaacttcctttaaaagttcttggcaaagaacgtctccaagtggtcgattacgtgtcaagcttataaagtaaactctgtgacatgggagtgttccttaatttttattcaatttgagattaatcattgaattctagagctaaaaatcgaatcagcggtggaatcaattaatttaattcattcctttaggaatctaataataattaaataattgaataaaattataaatttatttgaccattaatttttattttttattgattttaaatgaatccttcaacttcaatcatatttaagttcaatcatatcctaatgaattctcaattcagccaattctacttatttataaacatgaaagaatcgagttaaccaaattcttgtttcacttgaaaaatagaaatttcaatcttatattcttactgctaccagtttgattactcattaataacgtaacaagattatcccattgcaggctcaaaattttccacccag

SEQ ID NO: 8033 - DNA, 574 bp, Gossypium hirsutum
tttctggcgaaagaattttccaatacactgtgtactgcaaggaagatcattttggtcaaagttcacaagccttgtatttacaaatgtattagatctcatttaaaccaaactgtttggacggtttataaaaggtaagtttgaaaatcgcaattactcgaaatcgaatcggattttaaatatttgatatttaaaatagtaaaaataatttaaaagttcttgaaaattttttgttctttgaaatatttatgaaaaggactttgaaattttgtcaaataatattcaaaagcaataaaatgaagcttattatgtcaaaataagtctaaaaatcaaaacaaaaaattaatatgaaaaaatcaagaacctaactgaatcgatatcacccccaattgttaccatgtttaaattagaaatccaattctaaatttactaatccaagctcgaaagtgaaaacccgaatttacatttataaaactattgcaaaatttgtttcaatcattcttgaataaagattggctaaaaggattttggatctaaaagataaaaaactacggggtatcaaagtttgtgtttccca

SEQ ID NO: 8034 - DNA, 648 bp, Gossypium hirsutum
gttctgcaattactttatggttgctgccagtgatcactgatcatactagttgaaatgttcagaaccggagagatgccggactgttgttcgatacttgatgaactggaatctaggcattacatgtattgttcatatctgaagtcctggatgctgaaagcaagccagctaagttgagttccttggctgaagaaacatgaagttgtcaatgaccaaataactcaaattctttggtgctaccaatgaaaattttggtaagtttttagctttatttaggagccaaagtgaaacaattaaattatttaatgaagaatttgtgttgtttgcgcccacagaaacagaaattgcatgtgggtagtatttgtgaaatagttgatgctattatgctctttaaagaagcaaaatactgaattgagtataattgaaaaatgaaaggcttatatttgagggtaataaaataatatataaaaaggttataaagataaaatggtagtaagatttaaggataattttgtcatttccatttgaactaaagttgcccaattcctaaaaaattgaaacaaatgctcattgctgtgtccaacagcaactgggatttatttgatgcgataaaactatttagatttgttggttaaataatgtgacactgcg

SEQ ID NO: 8035 - DNA, 650 bp, Gossypium hirsutum
aactccttcttatgctccctcttttttaacgcgccacgtggattttgctttccttgaatctttttaatttttcattccttattttccttcgacctttaattataattagcttcattgcatttctttttgttggttttggtatttgaatttgataattaaattcattttgatttttaaacttgattctgttaagatttgataatataatcagtatttttaaaacatgactagattgattagtcagactaattgaatcgaaaatagattaatatattgatccaaataaacggattgaattataaaccattcgcaaccataaaaataaaaaattagaataaaaatttatagttgaacagattgaaccaatttaatatttttttataaaattttaattatttatttaattattatcggtctaatagttgaatcgattaaaccgattaaatcaataatcaatagtctaatcaattcaatcgctagtctaattattaaaatattatatgtgatactctaatattatatcatgtccaaaaattatttatataatttaagaactaaaaattctattataaaaaataatgagaaagattattctctccttaacatatacttttatttaacgaacagttgggttacaaacaatacaagca

SEQ ID NO: 8036 - DNA, 478 bp, Gossypium hirsutum
tgatttcccaactctccatctcatttctctcaaaagctacttctagcatcataattgcaaattgtaatattaaagtgttgatatggtgcttgtgagaggcctgactgagaattgattgtgatcaactgattgggatcaaccctttcccggagtaactgtggaaaaagcatagcttgtttggagattataccttgaaactgaacctctccactctatacctatcatttccttgtgaagggcaaacagcaaaactaacaggaaggatggatggtccaagggtttttgctcttgctataaatacaacatttgccgcttcatatcgttgtttgtgttttttttttctaaaggaaaatgttaggagctagttggaatatgtttaaggaaattcattgcaattgcctctttgtgagggcttttacaacttgattttgccaaccttcttgatggaaaataattggtggttgggttggtaatttct

SEQ ID NO: 8037 - DNA, 655 bp, Gossypium hirsutum
ccaggttctgataattacaggttaagtcatccagttattgattgtaatttggagtatgttgcagagcttatcgatagtaataagagagaatggaggaaagaaataatctccaatacctttaacgcggtcgatgcatacattacaactatcaactaggaatttctaccgagcactatggagtctaaaactcccttctaaaattaaagcttacagtatgccgcatctcaaaaaattacatccctactaaagtaaatctacatttcaagagattagtaacaaatacaaactgcccaagatatggggaagcagcagacaacataacacatgtttttcttcactttcctgtttcagtagaagtatggcaattagtgaacttagaatggctaaatcagagtatggtgcctgactggtttgaatggcttacctgggcttttgataactgctcaattcccagaagcgaatgatctgtgtatccctttgggtcctctggacaaagagaaacaaatatgtgcatgaaaaaaataaagaaatccagtaaaggtattgtctcttttattcaaaaatacataacgaagttggacagactagaggaaaatggactcacaagggcaccgatcagagactcatgggtcccaccttctggagaagacataaa

SEQ ID NO: 8038 - DNA, 608 bp, Gossypium hirsutum
  misc_feature (599)..(600): n is a, c, g, or t
atttcttgctatgttcgagtgggataaaaataaatttatgagaaattaacaaaggtttcaaagtatgtgtcaatactgtttttttaaggttctattcgcccccacctatattatggcgtgtaaaagagttattgacaaaaaaaaaactcgaggatataatgaagctcaatgactgtctacgtttttcattgacgtaaacaatccattgagcactgagtagagcatagcaatgatatcaatttctataaaaaaattatacaataaatctttataaaacaatctaaaaaatataaaaaatagtgggagatcagaaagaaacctttttctatattttttttggttgttatgcaaataaaacttcactcctatttataggagatcccatgtctcttcatagggacataactacctaaatagatagtcatgtctttagcaataaatatagttatttaatagatatctacttgaataattatgactattttttaataactaagtgacataacttttgataacttataatttttcatttacaattattgaaacactatatatatatatattaaaagtgttacaaagatacctacatttatttgttnnataagaaa

SEQ ID NO: 8039 - DNA, 649 bp, Gossypium hirsutum
agattttcttctgttctaaattttattttattcttgcttgaacttttttattacgttgtctaaattggggctttaggttcatttattgccgatgatggctaagaattcttgttagttattttccttagttttttcaactggaaacagagctgtggttggtattcttttgagccctcttgcacctttataaatttcaaaaacacctcgaaaagccccctttttttaaaaaaaatatttttagagcttaaagatgcttagaaggttgctttgagagtgtatttggtacacccatcttgacaaaggcttcaactgggaatggatggtcccataagaagaagaaggaaacaagaacaaagaaaaaaaaagctgtgttgaaaagggccagtaacgaacgccgacaacgaaaggtggtcatttcgccatcaggcttttctttcacaagtagcaactcaccagggatgagaagcgattccccgttatcctctaaaaccattctaaccatcttcactgtcttattcgtcatttctctctctctctttatttttattatttaaaagaaaaaaaagtccatttattccttcaaaattgtaatgccgtacgtggaagtcttccacacgtgtgttctacttcatattgagtatgtgtgacg

SEQ ID NO: 8040 - DNA, 561 bp, Gossypium hirsutum
  misc_feature (366)..(366): n is a, c, g, or t
  misc_feature (383)..(383): n is a, c, g, or t
  misc_feature (497)..(498): n is a, c, g, or t
  misc_feature (500)..(501): n is a, c, g, or t
atgtgattcaagcctcatcataacttccatctaattccaaatcacgttttttattttcctatgcatttttttactgcctccattattaaatttcttattatttaatttttatatcatataatgctccaaaaatcatatcataaactttaaaatacaacaaaactcgacttttgaactcgtttttcaaatttaatagtaggctttttttttatataaggtttgtattttaaaacttatatattagcattttggttttaatacaaaacaaataagtcttctgattcaaataacaaaataaaaggagtttgatttgttggccttccttgtaggataattgaagtgaatcccatattaaaaaaactctcncaaatcaagaaagggcntcattaaccatttcagttgttagctttacagccatctcggatctgcatcccactcccacccacacattaatatagatttctaaacacattatctgcactattctcgcatctcannanngaaagcaaggaccatattatcataattccttttttgttttatgcaaaagccaatcataat

SEQ ID NO: 8041 - DNA, 623 bp, Gossypium hirsutum
  misc_feature (571)..(597): n is a, c, g, or t
  misc_feature (600)..(601): n is a, c, g, or t
  misc_feature (603)..(604): n is a, c, g, or t
  misc_feature (609)..(619): n is a, c, g, or t
ccataaaatactcggttgtttggcaataagagtcgaactgtagcccatttttttcacgagaaaatccattatagccatgaccttatcctccgaaaccgtcatacacaacggatgcctccggaaagcttcgtgaatctcttggtcagaccaaccccatctcctataaacatcaaacttcttctctagtgtggatttggtcattgatttcaaagcaataaccacactgagaaacatcttcgttgaaggatcaaaccccattctttcggcttcctccacaatctccttaagccgaaccggattatacaaaagtgatctaggctgacggttaagcagcacaaggatattcgattcggggactccaattcctctcaaaacattcatattcggatacaaatacgactccaaatcgtacacaagaataggggtatatcgttttataaccttaatagccttatcatcagagtgaaataagttcctcagtaaattaaaattagggataatttggttctttaaactacgcatcaacaatgaaggatagctactcaagattttagcaagctttggccttgannnnnnnnnnnnnnnnnnnnnnnnnnntcnncnnccccnnnnnnnnnnncccc

SEQ ID NO: 8042 - DNA, 615 bp, Gossypium hirsutum
ttcttcatcccaattgatagtccatgatagtcaaacagtaaatcaattgaaatagaaatagctttctagtgatgaagagaagaaattaaagaaaaaatatgaatgacaatacgggttagttttccctaccctttgtttgtatttcttgtagtataagatttgaagtgtatcatcataaatcaaacacccttattattctgaagagaaagaatatctgtacaacgacaataacggtgaccccatggtaccatgagagaagattacaataatagtgagatgggaacagtgaaattagattacagagaaacaaagcatgtacaaacaggctccaaaatcatattcataaacatacacctgctttaccaaaacacagtaagttgacatggtaaacgttgctcaaacattataattttatcatacaaaagataatcaacatagagaggggaagggaaacaaaaaggaggcaatggctcaagaatttatacggttgaaatacgaagattgctttgctttgatgaacttacttatgcttgcataatcactcttccatcttccatgtatactgcaccatcggtatactcaagttcttccaaacgatggatcactcacaatgct

SEQ ID NO: 8043 - DNA, 531 bp, Gossypium hirsutum
  misc_feature (6)..(9): n is a, c, g, or t
  misc_feature (46)..(48): n is a, c, g, or t
  misc_feature (471)..(471): n is a, c, g, or t
gagcannnntttggacggagaaacctgtttcaacgaacccaagccnnnaaaggtacgaatggaaaattaggctaccctttgttctatttttattttcaaaaatcagtttttattttctatttttaattaaaatttttaacagaagtaaaataaaaaaatatgatttttaaattttcattttcgtcattttcattttttacaaatatttgtagtgaaaataagaaaaatatttattattgttttttaatatttacatatttttacttttttttttaaaaaattaatttaaaaaatttctaccaaaagaaaacgaaaataatttctatttcctgaagtcgaaaccgaaagtaaccttgttttcttttcaaatttactttcgcaagagtgaaacaagagaactagagaaatgaatgaaaatggattagttctgcgccttttcttttctttcttaaaatctggtcgttttagatntggtaggaaaacaaatcattttatttgcgactttatttaatttctctcttttctactaaa

SEQ ID NO: 8044 - DNA, 315 bp, Gossypium hirsutum
agctcgatctgtgaacagaggaacatactcttcctgatggacaggtttgtgtttttcctttatgctttctatccccccttgttttggccaagagagagtaagataagaaaaactgactaaaaatgatatgtgaggggtgtatgcctttggatttgtgaaagatgaatattttatgatctattatcagttctatgtcttatatctagatgtactaattctgatggtttctatcagatgtggctgttaaattccaaaagataatagaaattataattgtcagaacatggtcagagtactgagaacgaggaaacacct

SEQ ID NO: 8045 - DNA, 655 bp, Gossypium hirsutum
ttttaaaacaccgctaaaggtcaaggtcatgacctttagcagcgcttttctcgcaaacgccgctaaaggtcatgacctttagcggcgcttttctcgcaaacgccgctaaaggccatgacctttagcggcgctttacctaaaaacgccgctaaaggtaataaaattttaaaaaaaataaaatattataaaaatcatgaaaaatataaaaaaattaaaattcattatcaaaatatagcgaagaataaaattttctattaaaattttaactaaaaatattaaaataaaaataaaaatttataatcaaaactaaaataaataataaaaattagattaaatataaagatatcataaccatgtaaaatataagatattatcatcaagatttacatcctcatcttgctcaaattttagtggcttgtaccctttcttgaaccattcatcttgtagaatttcaggaatagttatacgctgcaaaaaagaacatgcagaatttcaaccaaaatgcatgtgctaaagcttatattgtgatcaaaaattgcatgtaatcacaaattttcataggatgaattgaatttgaaacttacggtaagagggtttttggatcaagaatacgcttaatcaaattcctagcaccagatgaaaactatgatggaca

SEQ ID NO: 8046 - DNA, 650 bp, Gossypium hirsutum
aaatccagttcaaaactcagttctactttggtgaacagtgcgcagctgtcttctactttgtggcacgatagacttggccatccttgtagtggcattttaacccgtgtgttaagatcttgtaattttccttataagcaaaatgttttgagtcacgtttgtacagcctgtcaagtgggaaaagctcacaagcttccctttttctacttcaaacactttgtatttggtcccctttgcacttgtggtatccgatgtatggggttctgcacatttaccttcaaatggttttcgttactacatctcctttgttgacatgtatagtcggtatacctggctctattttctaaaaaacaagtctgatgtgactcagtgtttcttgaattttcatcagatggtacgagtacaatttggttgttctattaagagtctccaaacggatgaggagtgaatatcgtgctttgtctccgctcttatctcgacttggggttcagcacagggttacttgtccgtatacctcgaagtaaaatggtgttaccgagaggaaacatcgtcagatagttgacatggggttttcgttgttagcacgggccagcattcctctccagttttggttctatgcttttgtgcatgctgtttatctgactaacaggctc

SEQ ID NO: 8047 - DNA, 643 bp, Gossypium hirsutum
cttttctatctctatgcaataatttccattaatatcttttcttctattttttgccggcaataaatttcatcttatttttcgaaaagaaacatagttactataaaataaaacaaaaatgtaacatgaaaaaaaatataaaaaatcgatacaagaaactgagcattaaactaattttaatttattttttgaattttataattaattaattatctgaaaaagaaatggagcgatatgaagtgtgtacaacatgggaagttaaaatcaacaattttgactttgacaggctccaaaataactcacttgcaccgaagctaaacccttacaccgcgtacacatcgctctaccgttgaagtcgggttataaattcaatacccaaaatagcctccataaatactcaaaatttcgtctcctctcaccttaataaaaaagaaaaaagaaaaaccgggttttccgcaataccttgccaagccatgtccgaatatctccacaacttactttccaaactataatgtagtgaccaacttttctttccctgcaaaaggaaatattcaaatatcccttaatttatttattaagttaaacctttgcaaattccttgttttgttttcttctctttggtttcagtgtttattttttgaaagaa

SEQ ID NO: 8048 - DNA, 498 bp, Gossypium hirsutum
agaagagctcgaatcgacttctcgattttctcatcctcctttaatttctttttatcgcccattttttttcacaaaaaagaaataaaaaatttacccttcttcatccagaaggaatcagaatcccaaatcactagaaatacgtgcaatcgtttggatagaaaacaacatgacaatgctaagtttcaagcttgataggtccatttggtaaattgaggaaattgttttttttctcaggaaacaaacatttgcaacttcattgttaacgagagaagtgagggaaagcaaggaaatgagaagatgttgaattaagcaatcaaactaacaaaaagagagaaagttgccgggaaaaacggttaggcgaccctttttgagccgttgaattttgttcacaccacattcccctttactatttctttaattttcttataaagcaatctttttatttaaatattttattgttttataattagaattggcggaaagtagaaatcatgaatt

SEQ ID NO: 8049 - DNA, 631 bp, Gossypium hirsutum
gtttaaaggtagtgcatggctaaatattgaaaatggtgtcttttagtttaaaaaaggtttatgtgggctttacatgttgaatgaatcttatcttgtaggtttattattgtttgttttaattattatatatttcttggatatattttagactttgtcagatgaagaaattaattgttgttatcattgtgaacttctatttgggagaattggatgacctttgtcacctttttttgaaatgcaaacaagctttctcatttcaacaagggaagcattataaacatgaaaaacaaaacgtaattgtaaagaaaacagttaagggagtatggtttgggacaggtatacccaaaatcatgctatcaataggctttaggttatgagcaagacaaatatgttattatgccttgtagggacccagcatttttggtgcgttctgttttagttagttgaagctgccattgtcaatttttgcttgaacaatgtgcttggtttctattttctggtcaattaaataacatttctattggttttcctttatctatgttctttggcctttaaatctataatgtgtcattctatgttattacagctgaagacatttttttggagaagtctacaacttggatgacgcatg

SEQ ID NO: 8050 - DNA, 638 bp, Gossypium hirsutum
cgggaaccagaaagaataggctagacaaacatgtaaaggcccaaaacatttctaataggaaaaaaatagaatacgaaaggggtttgatctagtctatcttctttaagggatgatataaatatcatatttctcaaaaaataggagggcagccgctgagattgaacaaacagaacaaaaactttcagggtaagagcgtcggaaaagaagcagataagaggaggaagaacaagacgcaaacaacttgtggagaaccaccgacattcgactcacatctcttcgcctttgtctttacctattattttgttttttctattgtttgaaatcatggataaatttttttgaagttttttttagtttgatgattatgagctaaaagtttatatgctagaatgattatggaaccctaatatgagattattggtactttgctagggatgtttgatgcaatttgatgtttattcattcaagtgattttcatgtttaagcttgctgttgcttgatcaacattagtgggtaattgagttaattgttaaatctaaaagggttgtgattaatggacataaaacttgaatggtgcatgtttaatttctttgatgttaaatttgtaacgatatagacatatattgttactgttcatg

SEQ ID NO: 8051 - DNA, 612 bp, Gossypium hirsutum
  misc_feature (17)..(17): n is a, c, g, or t
gaagaattgggagcaangggctagactgaactggctcacactaggggataaaaatactacttttttccattgtcaagcaactcagaggcgaaggaaaaacacgatcaagagtttacaaaacgagcaaggtggggatacggaaaatctacaggaaatggaagaactagcaatgtcctactttcagaatttatttgcatcagagaatcaagaaaattttgattatttgctctcgggtattaatcgatgtattcatgacgaggataataaaaggcttattgtgcatcatacaggagaagaaattcgtgaggctttatttgaattaggacccactaaggcgccaggtgaagatggattcccagctatcttttatcagaagtgctggcattttattggagaggaaatagtttcattttgtctacaactcttaaacggagatatggaggtcagttcaattaatacaactcacattgtactcattccaaaaactaataacccaacaaatatgtcacagtttaggcccattagtttatgcaatgttatttataaagtaatggcgaaagctatagcgaacagatttagaggggtgatagataaatgcattgatagtgctca

SEQ ID NO: 8052 - DNA, 652 bp, Gossypium hirsutum
  misc_feature (61)..(62): n is a, c, g, or t
tctactacagattccagattatcttcatctgattcagactcagatgagcaatcatcacccnnatcctaaaagaaaagttaacagataaaaacccaattttggagcataatcaaagggaaaaacaaagtttgaatttccaagtcatgtaaatctcacatatggagcaagaacgctgctgtcaagaaccaaaagtggtacttgtaactctcgtgccagcgccctaaccactctctcgcgataaagttcagttcctacagaaaacaagacttcgaaattataaaatgcaaaatataattttttatgtataaatcagagattagaaaaacaaggaaagaagatttcattgaagaaaataatttatatcaggtgcatacctgggacactttgaagcagtattctcccactcgaagatggcaatcgagcaccataagaagcactgagcttcttatgtttcaaatttgaagcaacacattcaactaaaatatttttggtattctcactacagagaaaaaaatcatagtaaataaataacatcaatagaagtttaaaaataaaaaagaagccaaaaaatgcaatgatatttactgaatgtaataaggaaatgtttcccaagaaacatgtattttctgccaaggcacaactctaccagaaa

SEQ ID NO: 8053 - DNA, 626 bp, Gossypium hirsutum
aattttatattgttggttggaagtacgcggattttttaatgggttggtattatcgttgattgaggtttcgtccttaaatttttgaaaagttcgagtgtttgagatgataaattcaacaaaacgagagagttttgctggatatcggactatgcatggtgcacaacaacttatcaacgggacataagcatatgctcttagtagagattaaactcatgcccttaaatgacattaacaaacaagtgtactaccacttgatatcattaataacatttgagagcaatggttcaaaccctaacaagtgcaaatgaatattctccacgtcacaactaaatgaatttgtgtttcatgataatatgtttgaaattgagatggatcatgataatagctcagatgaagatgaagcaagtacattttcgagtaaactgagcatcttttaataagtgatcttacttaaccaaaaaagaaaatggaaattaagatggaggaattggaaatgatttgttttagcttatattcaaacaaaattttctacgccacggctaaatgaatttgcaggttatattattgccaaagaaaagtggtaaaggagaggagaaacaaaattcatgattattaatgatgatgaa

SEQ ID NO: 8054 - DNA, 635 bp, Gossypium hirsutum
attttcaccgctaacttgttttctcctcactaaagaaaataaaagcaataaggggatgatgttctccaagagacatgctattaaccttaatgtcaactagcttggctcgttttgctggctcaatgcttgtggaggtacgaattaaaatctatgtatcaaattgtatgattagaaagttatttctcccaatatctctccgtactacttttgtttgctagtcatcagtgaggaaactcctatctgcaactccactttacacgatattgtcatctttttatacttcaaaccatcatagtacttgacaaaaagatctacaaccaccaacaaaaatcaagtttcagcgatctctttgatcccaccatcatcatcatcagtttctcaagttggggtaaaagataatgcccccatcaagaactgacactgtaatcatttagctctttaataattgtttccatgcttggtctgtcattaggttcttcattggtgcaattaagtgcaattttccccagcttagctgccatggattcagaaaactctcccctgagatttttatcgacaaaatcttcgaacttgctagtttccgcccccgacctcattgagcttgtgagtagtagtttaccagacaggatttggaa

SEQ ID NO: 8055 - DNA, 595 bp, Gossypium hirsutum
gcggttgctcacagcaggagctcttggcatatattgagaaaaagaagaagaggaagaggagggttttggtaagctataaagagttccatagctcttatgaacaatattattcacatgaaagttatgcattcgagtctgatattcgattttctcatattttcagtacttctggtgaagaaacaaaaaagccgaacactaacagatgctcggaaaactggtggtggagcagttcagtttataaggcaaacccacaaagtgcactctagtctttacatttccactcatagaatgtgcaatgcaaaaaagttttgattatatatacatgatttaaattgatctgttatatatcaatgtacatgcatacatttatatatatacatactattatttgaaggaaatgaatgcattcaagttatctataatatctctggaacttcatatttcaatgttctataaagagaagcatacaaatgtatcttttagcgtacaactgcatatctctaaatgccattaaagcaatgattaataaaatattccgcgaaagactccggcacgaggcataatcctctacttctaagatcaggcttctgctctt

SEQ ID NO: 8056 - DNA, 523 bp, Gossypium hirsutum
cagctagccttgcctaccaagcattcgcactttgaaattttcaacgaagaaatcgggtgccacatggcaacaacctcattttcttcaccagatatccctcatttcttaaccttttctcacattttatataaaattttaattttttatgagggtattttattttttatttaaaatatctataaaacatcataatttttaaatttttttatatagtgattttacataaatttctttataagtataattttaaatactttttattcatatttatattgtgtgtatattagtctagcatatatatgctcacgtaattaacggaatgttacgaggatgctatatcagtacagttaataaacattagcttttattatctattttaaaatgatttgataaataatataaatttaaaaattaaaagagaaaaaaattaaataaaaagttaaataaattattattcctattattaacaactacgagacgaatggtagcgaaaacaaattacagcgtcatttgatgaggattg

SEQ ID NO: 8057 - DNA, 633 bp, Gossypium hirsutum
gtcctccatcttccccatcactaaagagttttagatctttgttccagttttcatgcaagaaagatccatcagcatcactttcacataatccatcctcccaatcctgatgtcaccaataaaagaaatggtgaaataaaatgtgatgctgagacagacaattgcgcatacatgctcagtcttaacaaatatgggagtgcccaatgaacccaccttagaaaatattacaaactgatagatgaattttaaaaaaatgaaacctctagatttggagccttatttgcttaaacagatgagcgaaaggaaagagtatagagattcagttcataatctaccttcaattgttcacgaattgaaggaacaattctatacaagctattgagtgctgattttcttgatacagcttgtttagaatgaaaaaccacatctacgttctttataagatcaaccagctctttagaggatgtcaacaaacttataacctgtaaaataagataaagaatgagaaaattcttagaagaaaaatagaagagggtattctaccttaaatcataagaaagcctaggtacatataccaattaccactaccaagtgcacactgttatctgccttatttcagcattcagcttaatactt

SEQ ID NO: 8058 - DNA, 664 bp, Gossypium hirsutum
agatgatcccgtcactatgctaccagctgatgaacttttctcagacggtaagctcgtacctttacatttctcagctcccaaacaccctcctccggccaatgtttcctcccttgaaacacccaaatctcgccgtcgaacggaaccggaagtttccggcaaagcttctaaaggttcaagcaagtggagagaaattctgggtcttagaaaatcaacccaacaagacaacactaatcaaaaccccaaatctcttaaacaattccttaaaaaatcatcttcatcaacagccgagtcatcactgagtctaccattgttgaaggacaactcggataatcacgactcagtcccaagactatccctgtcttcttcatcttccacccatgaagatctcccaaggttatcacttgattctgataacaacaacaaaccaagtttcagtcctaacccttttgctccttctagaataagaatggttaaacccaaaccaaactctgggtccgacaccatcaacaacaaccaaacaccagttgttacctccgccggcgggaacagaaccagtaacagtccgagaatgaactcatctgggaaaatcatgtttcaaagcttagaaaggagttcaagtagtccaagtacctttaatggtggtcgtccaaagcttaaacaaaga

SEQ ID NO: 8059 - DNA, 650 bp, Gossypium hirsutum
gataatacctggcgctcggcaagttctcctctcccggtgaaatctactcgaaaaagagcaataacagaatccacaatctgaaaatacgagcgtataagaacatcattaaacagagtccatggtatcaagcattattgaatgatgtcgacaaagctcaccagaagtctgaatggttcttcagacatttttgctgccaaacccagaagcagattgtactgatgctcatacgtgtaggctcgagcataaacgatctttgacataaatagaaaacaaggaatatgcttaaaaatctatttatacaattcaattgattatatatggatattgaagcttacattgtcaagaacagctcctggatccatcccaaatctttctgctattggtataactcgatccggccggctacaagtgtacgtagttaaaagagaacaaataaagtgaatttagtgggatactaaaaaaaaatagagtaaactacaccatggtgactctaaaataggatctgtcctattttggtcactccaaaatatatatatatttaatttgatcattctaaataagataattgtgcgaattagtcactgatgttaaaatttttattttttaatggattgctgatatgacgcattagcacattgaatgactgacac

SEQ ID NO: 8060 - DNA, 640 bp, Gossypium hirsutum
tgtgaagatgcctacaactctcttcttaattgtttctgtgagttgggaatgtatgatgatgctatgatagtggtggacctaatgatcaaatctagccagtttccctatctggactcctacaggcaactgatttgtggactatatgatcaaggggataaggagaaggttgatacactttttgccaacttgcttcgttgtggttatagtagtgatgaagtagcttggaagattcttattgatggtttactgaaaaaggggcttgctgatagatgcattgaactcttaagcatcatggaaaaaatgggctgccagctccaccctagtacatattcattgttaattgaaggaattgatggagcgtagattctttgtattttatcttttgagattcttgcatttttgttactgaagggggccattgcattgctcttcctcctatatgggtgctagtgatgtacagattgaaaactgcattcctttccacatgcagtctcaatacataaagcctggggaacttgtttaaattgaagcatttttacgaggctggaactgagggagcagtttttcattgagaagctcacacatccctgaattcctggacatggtagtggtaatggcccctcatcatgcaaaccactct

SEQ ID NO: 8061 - DNA, 453 bp, Gossypium hirsutum
tacaatttgatgtcaaacacaatgactaagtttccctttcgcgtacttcaggcttggttagtcttgctgatgcttgaaccagttcagagagtggaacctatcttagctgtggcagttgatgtttcccattcaagtttcaacgagactgaatagttcatgtacatcatttacgtgagatattacgatgtaatactatggttttagtacgtgtagatgccatacagaatctttcatgtcctttgcctttggcttgcattgtgctatccttctaaatgtaaaaagaacgaaaattttagatcatactgtattatttgtgcaatatgtatatgaaaaatatcagtagtttccccatggccaatcaatgttggtaactttgttgccatgctaattaatatttattaaccattgagatacaatggaatatcaagaaaggatttaaggtgtagttttgca

SEQ ID NO: 8062 - DNA, 511 bp, Gossypium hirsutum
agtttactcccaccaacatacctaagatataggtcacgcacaaaatgtccacccataatatccataattgcgatctgcatttaaatagaaaatataatttagaaaatttctactacacacatctacatctacatgttattaaataggtaaatacatcaaattaaaaatattaaatgcactctaattgtttatcatgatattgtcatttttcttgttagttgacttgtgacatcaagttaaataaatgatatattgaaatgtaaaagaataataaaacaaagttttggttgaagtggtaaaagaaagattttataaatgctagtggtatgagttcaaatatcaacatttgtaaattctttgttgtttttaaaaatgagaaaaaagacaaacgcacactcgtaataatataatttatttaaaatatgtaaggttattttagtaattttttgactatattggtgtcaagttgactcgtgacaccaacaacaatttgggtgtcccataattgaat

SEQ ID NO: 8063 - DNA, 692 bp, Gossypium hirsutum
taccatgttgttgtgatcagagccattcctttcaaatcaaaatgatcaaaattaacggtccatatgatctgaacaaaatgaaaaattccactcatgcacccttccagtttgtttattttcaccatatttcttttgtttgtttcctttgtatttgtgtgtaagaatttgtaatatattgctccaatttaagtgaaatccaatatatatatatatatatattctcttttgaagaatatgaaccctagtttaagacaaccacaagaagctaaacaacatatggaacacctttgagctttagcaattcaatggctgtcacacaactcttttgaaaatttaatttcatgtgggagaacaatgccatgcaaatatccccattattataccagggccaaggatgtttgaaccgattaaaccaattggtcaaattggaaagtaatcggaatattggttcggagaatggttttgaacttaaaaaaaataattaaaatgaaaataggcagtataaaaattaagagcagaaaaaaattgacacaactgatatttgttaacgcaatccagacacaatgctcctacatttgtatagtattgcctagtgcatgattttattcaataatcgtccagattacttattagcttaagtccaatttatcattacacaaaaaagtaattacggtctcaattgtcacaagtca

SEQ ID NO: 8064 - DNA, 650 bp, Gossypium hirsutum
acattggccagtttcatggtcttaggatataattcataggaaaggggtgcttaacagttcccttttcacaatcgagtcccaatagtggagttttagaacttgcatatcctagtctctccatgaattcaatagtccgctcttccccaccttaaaagcagaaattgaaagaaatattccaataaaatgattttctcaacatgagccacaaatgtaaaagttgttcaactctgaaaaatgaagactatcataaaattaaagggagaagaaaaaagtaaaatgaaatatttaacaaatagcctctatgatggacctttggaaactccacaaatgcatgtctatcacaagcttcaatttctgaatattttgatagtaattattgttagaattttagacccatagtatgaaatacaagaaaaaactagcctgtatatcaggtagacagaagtattgaacagtccaattccaatcttcttttgtacctctttctttaatgaaatatttacagtaagcttttcattttatttcatgtgtcatcgatagctcaatgcatgagattcttagaacaaacaacttcaaattaataccagttattggctagtaactgggaaaaaaagcctagagccaccatgtaaatgtttactgttgagcct

SEQ ID NO: 8065 - DNA, 579 bp, Gossypium hirsutum
gtttggatgatacatatgcatattcaacaaacagtacatgtttctagcaagtgttgaattgcattctaacttttgagtagtactgaagattacatagagagtctaaagataaaggacacttctttaatttgagtcatagatgaattttaagctttcagggatttttaagaattcaataattgggaaatgagttaggtctagattattaaaagattccatcttgaaccatacatttttacccttgagtcactcataactaaagcctaaagatcacttggaggatcgagagacagacacacctcttcaatttgagttccaaataagtttaatctttttaaactttgttggggttttgacagcggcaaaggaagaaaacagagaacacagaacaatgaagcaagatgcaagaaatattttcacttgctcaaaaatgtgcagcaaggcagtttatggctgatagctcatttttctcattcattcaactagaaaaacaatacatttatagtaaaatacatcaccaaatattcaactaaaccccacttatcagcattgggactaataaaatattgcttgtacact

SEQ ID NO: 8066 - DNA, 639 bp, Gossypium hirsutum
agactgaaattaataaccaacttaagcaggaaaactgggttcaactactaacagaaagagcatctgaagttgttgtgaacattcagaattccagcctgtctgatgttttagataactcaacagatataaatatcagaaatgctcatcagaatggtggttcacaggatgatgtcaaatggatggaaactgtaataatttattttatctcttcctttttatttttatttttttgaaactcttaacttaataatctttgcttttttgtatctctgtttgatcactttccctttgtaacatgagcagttatttcattttatcatctcaaccttgaagtctggaagatcttcatatttgcttgacgttattgtggggcttctttaccctgtaatttccttgcaggtatgtacaagagattcttctagttatttgttttagattctttttaatgggatattttctatcacctaacaacaatttgagcgggttatatccaacttaatgtgctatctttttctttccaaaaaattataggcaaaaaattatttgattataatgtttccgaaaagggagaaagaaaaaaaagcccactattaatactgaaagttatcattatgttagaggtggattctggaagtaatc

SEQ ID NO: 8067 - DNA, 659 bp, Gossypium hirsutum
tcaagcgtgcttaggacaggatgaagcaaatggctgatagacatcgcagtgaccgtgagttccaggtgggagacttggtgtttcttaggctgcaaccctatagacatacctcagttagaaaggtcctcaatcagaagttggctccccgattttttaggcctttcccggtgttggccaaggttggatcagtggcatacagacttcagttaccaccaggatcacgcattcattcaactttccatgtgtcccagttgaagaaacatataggcaatcacactgtccaggctaccttacccctaatcagtcctgatggagctttagcaaaagattctgtccgtactaagcgtgtaaagggctacggttatgaaaagttttgaactgttttctccttctttgcaattctctcgtgctttcctccctgcttcttttttttctctcttctctctcgtgcttcggttatttggttggtaacatattattctcttacactcacgtaattcaagaagccataaatacagtacttactatatatattttatattattatttattgaaaaaagatgtagcttttaagttttactattttaacatttcaattttgaagttttatgactttcttttccagatttgtgacctcttcacttcatggcttcactctt

SEQ ID NO: 8068 - DNA, 649 bp, Gossypium hirsutum
ggtttaggaaggatagagatggaggtcggatgcattatcccttgttgagggagaggtacatggctgattcagatggacccatcagggttcagggcaaaaatggtgttttgaaggtaatgatgaacaagaaaaagaaggttggtgagcctttgaaaaattttgatcacttggaagttgaggaaggccggagtggttcaaggattgatgatatagttaggaggaacttgcatgttcttccatcattgtactctgagacagaagttctggagaaacctgtttcttttggtaggaaagagaaaaagaaagcaaatttgctaaggacaccaacaactaagaagaataagatctctgactgtgattcagaagacagtgatacatctctgaagctacgaccaaaggatacagaagcttctaacccaacgaagagggtaggtagcaaagggcagaaaactcaagttgagcaacttcagcctaccagaatcaaagaaggaaaagttaggcgtggatgtggcacagaaaaacagaaattacgggaacgaataagggggatgcttcaggaagcaggctggaccatagattatagaccaaggaggaacagggactacttggatgcagtgtacatcaaccctgctggaactgcgtactggtc

SEQ ID NO: 8069 - DNA, 651 bp, Gossypium hirsutum
gttcccgaagaaaacctagggtaagtaaagtaaacccttgatgttattttttacagttttgttaatttgaagttatctagttctgtctgcctgaatctttatttgtataatctagttttacttgttaagggaagcaggttgtattgaaagttgaatgtttgactcgataaaccatttatttatgatttatatcgaatctgaacttccgacgcccctagaggaaaagaaattagctaaatcaataaacaaacaaatcaaaccgagcattacttcttatcattgctatttcattttattagaaagaaatggaaagtgttgcagaaatgaagcagtttaactcaactcagattcataattgataaagtttgaacaatttgctatagatttaagtcataggatccagggggcgtggaggcagtcgccacttggaattttctcagatttttgaattttatgtataaattatcatttattttagatttggtgtccaaattgtatatcattcgccccatttggccaaattgtattttatataattcgccttttaaggcataagttataatttatattaacaaagtatttttcaatttttaattatatagctttaataataatcaaatattaatctatgatgggccttgaaagactaaa

SEQ ID NO: 8070 - DNA, 584 bp, Gossypium hirsutum
  misc_feature (566)..(566): n is a, c, g, or t
actatgcttttggtttctattcatccaatattaatcgggcttctctttcatagctttgctgaaacaggagaagcactggtatcttctgttgataaaatcatatttgttggatcaccaggtgtgggaaagatggtatgatctcatgtgtggctctgctgtaattctcgatactaataagatctgatttgttccgttgagaactactgctctttactattagcaaaggaaaataaaatactttctattttccttttcagttttaccttgatgggactgcttttattgttttcattgcaaatggattgaaatgtttgcttttattgcagataatggcaaatgctgctgagacccttataccagttacacttgagctcggtgggaaagatgcctttattgtgtgcgaagacgtagatattccacacgtatgaaccctttcgacccttttcgataactaacatgattgaacatatctatattttgattgagagctgaagttgcaccgatcagtgccgttgagaatcactgttttccatgaaataggttgcccaagttgctgtcagggccantctccaatcaagtgggca

SEQ ID NO: 8071 - DNA, 664 bp, Gossypium hirsutum
tgtgatcaagtggagggttaaatttctaattaggcctttttaagtgctggtgatgtcaaaatggtcataattgccaaccctatactgacagatcctgcaattgcgccgttgcatttgctacactgaaagttaaatccaaaaattttatgttgaaatagaggtgcttaattaacttaataataaattaaaaatgttgggggatttatttatggggaccagcccagcaccctagattcgcctaagccgctaggattagctcatttgtgaaattgcatcttttatgactcctttctcatcatttattatatttggagattctgcaaaaaattcctgcttctaatttatcttttgcactgctcatgcctcttcttcacagttttgaaccaaataattcatcaaataacctctgatttatccatcaatttgattcctcaacgacactgaaaacaggctttgtttggactgggctttgctttggttatcatcggtcaattgtttgggcttagctcaactatgtctagtttaaaaccaacccacatctccaattgcaaaactcactgctttaatttacttgtaatttgggttaacccaaattcatatgaaagtatccaaagtggaagtggaaaatataaaaggataaagtgcattgtgctgtagcatggtg

SEQ ID NO: 8072 - DNA, 654 bp, Gossypium hirsutum
  misc_feature (612)..(635): n is a, c, g, or t
  misc_feature (637)..(650): n is a, c, g, or t
agaccttgccagcagccttggaaaccaatgagcgcggcaaaacctttcagttgaacaactaacgagaaaccatgccacccttccaccaacaaatacttggtcttacaacaggattagaagtagggttactttcaccatcattgaagctgccccttttcttgcaatcgcatgcttggcagatccacgacttgaagcaatcacaatatgagaagctgaacccatagtgccagcagaatccacatgttttgtccagtctgttgaaagagaaagatgatgcagatttgcctctaactgtatacccattgtgggattaagaatatcagaaaagatagagagtaagctctaagtagtataatctagatcactggccaaagttatattcttggaagtggttattgttgataagtgactagtaactagatcaactaacccattcaaagagctgaggtgagaagctgagtggcaaaacctaacaaccaaaaatagaccatctaaccttctaagaatctagactgaacccgatcagaattcactaaaaaacttaaaaggttcaaacttgatcctagcccaaaacccaaactattagaacccgattagtatttcctttcacannnnnnnnnnnnnnnnnnnnnnnngnnnnnnnnnnnnnngggg

SEQ ID NO: 8073 - DNA, 633 bp, Gossypium hirsutum
atgtgaaggcagggcttggaccaaaatccttaaaacttggacaattacataagcatgtctcctatattatctatttgactgtataatctccttaatcttctcttgtactcgcaggcttcttcgtatactttgtaggtttaattgtttatctaattgttatttctttaattggtgttgttatggtgttttccattaccgacccgtaacttggctgagatcgactcgatccagtagtaatagcctatatagtttgctaacataagtttgcatcattatgcaagtgaaccaatatttaggaaattcgtgttattcttagaataaaatacgttttaacttgcatgatgcctacttaagacgtcacataaaaaaatcttatgaaaatgagtctccttggaaagtatatgtacaaaaacattcaacagatttatttttctttattctgattatttataaaattagatattacattttcgttttaactaaacaatgtaaacttcaaaaagttaaaaagctgttaattgaagaattaaatgtttgataagcaatcttattaataacttaaaacttcatttttagacaaaaaaggaactaggatgaagattgtaacggattttcttttttcaatatgcatgg

SEQ ID NO: 8074 - DNA, 690 bp, Gossypium hirsutum
ggtccaaaggtaaagaactcatgttatttttatcttatttgtatgtatttatttcttttgttaatggtgatagagctccaattaggtaaaatgcaaccctcatgcgacagtttatgtgtaatcctatgatgcataaataagctttttttctattgaaaattatttctcgagttgaaaaatgcatttatcttgtattgtataatatatgttgcagttttcatgattattaaatagaacaaattattatttgttctggaatgccgatttaatgttctgcttctcttctaggcctatggaatcttctcctagatgggatgatggcaaatttcccttaaaagattatgatgcccaaactcgtttcagaccacctgtggtcacatcatttgctgcttcacaaaatcctgaaactagttttactgctaaggctagatttcaagagtcaaagagtactaaatcaccaccgacggtgtctatagatgacactgtatcaagaaattccagccaaatgatccttcaaaggcatgttcatacattcgtttttcagctacttgcatgatatagtatagtttattttgttgataatcgatttgaattggctcaattttgtgacattttgaacttggttttttcggttacaaattccattgtttgtagttgtatatcaagatgtctctggagtccggcttctat

SEQ ID NO: 8075 - DNA, 661 bp, Gossypium hirsutum
gtggatcactttggtttcattgttgtgggtgtttatttcatgtttgtatctctcttttgttaagtgctgattcctgtgaacttggtttttcaatcatttgatattcttcacttgtgttaaattaacagaatttcatgtccaaaatgcatttaatttgataattaaaatcacaaaaaacagtatgaaaaagaacaaaatcaacaataaacattagttgaaaatgtcaatggctggacattaacaatgggaaggtcttgagattcagccttagacatagctgattgctccgaaatcttagcatagaagatgaaaaactctactgtcaaggaggttcaagctggttcaaattttaaaattcaaaggaatatttttttattaatatttacatacttccatgtaaatgaaacgattactgtgatatatgcaggatgagataagaaaaatgtttatcagaaagcttagagcaaacccaattatagaggcttaagagtttccctgggaaataacagtattagatttgagaaaccaaaagaattctgactagccagttaaagatgccgtcccataaaatattcatgacgtaccagaaaggaatttatggaggggagaacattttactctcttcgtcttcaaaattcatcttccaaagtgagtaccatga

SEQ ID NO: 8076 - DNA, 381 bp, Gossypium hirsutum
  misc_feature (35)..(35): n is a, c, g, or t
cacccaaccgtatctaatattaccggattgacatncacaaaacataacttgctcttctcccctgatacctttgtcgatatatatggttttgaacgacaaggtctgcctaagcattattgaaccaaccacacaattattaatcccatatccacatcagctccatacgcatgaagcatcatcaatgttgggaatcattatcacatcaagagatacctggttccaactcttgcaaactgcactcattaggattcgatccgaccaatgaagtttccccactatgactatgtatccgaccatatcattgggaagcttagaccaatctctttgtccctcggccaccatggacccaaatactacttctatcatccagtctatactcca

SEQ ID NO: 8077 - DNA, 601 bp, Gossypium hirsutum
ggattgattatgaattaatcaagttattaatttaaaaaaaaagttttagattaattgaattatgaattagtacgggctaattaaactaatttttaatatatacatttttataatatttttaataatttatttaattaaatcatttagatcaattaaactgtcaaactgataatttgattaataatatgttacccagcagatggttaaacctttttttttaaagcaatttacctttaagaagatttgctcccactatcaatgtcatggatgggattcctgcctctctgcatatcatgaatacatgattaaattacttatcgggtccctgtactatagaataaagagtaaattaatccctttgctacagatgtaaagcaatttactgtgcacatttcaagtaaataagtaaaattttaaaccaccttaaaaaaaatgctggtttattaaaggatgaatttgctagttgctactattcctatagcacaggaaccttgccaagtagtttaatgggttaatataactttttagttcctaaacttggcaattaggtcttttttggtatctaaacttagcaactaattcattttggtccttgagcttg

SEQ ID NO: 8078 - DNA, 626 bp, Gossypium hirsutum
gtataattaccatcatcttcaccaatgtgatgcaagaatttgctaatggcagtaggattgaaagtgaaccagtgtcctcgaatttatgtctgatggcagtaggattgaaagtgaactagtgtcctcgaatatatgtctgcatgtaatgtgggtgacgtttggagtttggcatataatttcttcaccagattcttcgcatatggcttgacatgtgtaattgagtaaaaagatcattctgttcaaggaagatgttaataccattttcaatacacccagtcagatgttcctctcaatgataaaacctctttcagctataattttcattctctttgcacagactgggatgaggagtcgtggcttctttttctcaggttcaggcctagtagctttagtagcttccctcaaaaccttggggcactagcatttttcatgttcttgcttctttcttggccgaggaaggagcaccgggtcttttagaacgatgttttgcagcctttggtgccaatctagccagtggcacattatccttatcataggaatcatcggcttcatcaatggcaagtgctgttcattgttttcctttgcctttactagccactttcatctttgcatactctgattccaga

SEQ ID NO: 8079 - DNA, 630 bp, Gossypium hirsutum
agacaggaacatcattcgagtcctgaattatgagataaataatttttactgaagagaggtcaaaactgtcggacagcgaaacaggggaaacttttagaaataaactgtactaattggctaaaccaaaaattctgaaaattttatggtagaaaggtatatgagtctagttttaaggaaaattaacggaacttaatttggagtttcatagctccagatagaaatattttagtgactattgctcaagaagacagttttgacatgaacataaaaaagtaatggaattgtgtgtaattattctgtaaactccggtaatgctccataaccctcttccggaatggtttagggttagggggtgttacacgaaaaatgattctttttgtatgagttttttctttctccttataatgttcttttaatcacttaaatattatacatatttcaaaaagaatgtgacagaacgtataatgtaagcctctcgacttgagtttaaattgttcattttccctttggtttggtttgttttgttttgtttcgattttattttaatgaattatttttattggtcacgaaaaaatgggatgtttggttaattgaagaagctctgacgatgattcagaaggttatggagac

SEQ ID NO: 8080 - DNA, 611 bp, Gossypium hirsutum
attttgtcctctctatcaaaaaatggccaaattagtcattgtacattagatctaagaacaaattgatcattctgttaaaaatttcgttcatttttactgttaaaaactaaactttgtatgtcaacatgtggtatacgtggcgcgccacgtgtcatggtcttgttattccaccagtcacgtcaatttttaatagtacaaatagatgaaagttttaacaaaaaggatgaatctgctctttgatccaaggtataggaactaatttacctatttttttgtgtagaggagacaatacaatctgattcctagtagagggacctccatgatacttttaccgcttttaatatgattaacatttgcggttttgtgggttttaggcaacagaacaaaaaacaaatcaaactgatacaggagttgaggttaatgctccagggaccaaaatccgttcagatgaatcattcctatatgaatgtgaaaattcaaaccctcgggtcgaagggatcacaagcattcctgttggtaacgataattttgtatttccggaagtggaaggtaaagcaggagcgctatcagctccttcaagcatatactacgagatgagaatggctgcccta

SEQ ID NO: 8081 - DNA, 565 bp, Gossypium hirsutum
tgtcaagtttcttcgtgatggctttttgtaagagcatgccctccatttatgacttttaaactatatatcagagtacaaatatgactgtgaaaccttttacttttcctaaataatgtaaattagcctaattattgactctaactattatacggtagtttacttgtttcttctttcaaaagggtttttcttcccctttacaggaaaatgaatcaagttgagattgaaaaagggaaatggacctcaaccaaactggctgtattgttttgccgacatatgtttgtaattttgtccattaagtatatgcttcgtatattatcaattaatgtgtagacgggtatgttattctctttccttggtaatccaaaaagaaacaaatccctgtaagttggagactcttggatttcagtagttgattaaaacaactagccaatgttggtggtcccttaagcatctgctccgcaaaatgtaccgagctggagtagtaatttatataataacatcactgttggtatagtaactttgaaggaggaggaagaacaatcatgattcgatgaccacactgaaa

SEQ ID NO: 8082 - DNA, 674 bp, Gossypium hirsutum
cagacaatttgctgggtacaagtttgtaaacctgaaatagaaagaagacatattagtatataagtagctagataaagtaatacaaatgtgcaaagcataaatacttaaaaaaatagaagttgaaaacgaataaggcatgcaattgttgaacaagtagggagtgtggataagataaaagaaaagaagagggagaaaataacaatcaagtatcaagatagatagcaccacatcttatttccttaaatctaatatgaaaatgaccagttaaaatttacatatttaactgaatactaccagaaagcccagaaagcagtcacctaagtccttgatagttgataaaacaatagcatataacataattgcgtataactaggtctggcaaggagggcagaagaagagatagaatatgaagacaatatcaaatatcatgctcagatgccacaaacagcttctgctgtagcaaactaataggtgctctttccaaaagaacggtgaatgccccttgatctacttggaaaaggataaataagtaatcctctagcaaaagcaaacaattttcatgaagtttttttaaattccaaatccatgaaggggactagtcttgtgatacgacaaaagacaatccaatttaaggtgtagctttatttttacctacagtaattaaaccatgtaag

SEQ ID NO: 8083 - DNA, 501 bp, Gossypium hirsutum
cttatagttttccatctccaaaccaaaaccagttcagcagtgtgtgtgcttttcaatgtttttatccttttaatagcaatgtgaccttattattgtcagtattcccatctgggtccttcatgttgaaccttggataggttgagatgtccaatgaatatcaaacgagcttacaactgactaaaccagtaagaggagatttatgggttcaagcatggaaatgaaagtctatggcaaaagcaacaatttgacatctaaattattggcactaacaaacatgtagaaatgctttcatatctctctttttttctttgctatacctaggttttagtctctatgcagcatcatttaatcttagttatcttatcttgcaggcctatttctgatgtttccagtgatcttactattgaggtaggagcatcaagctttgcacttcacaaggtacggtgaaatctgttttggcatcttttagcagcaaatgtttaattatcatggtgcccacaa

SEQ ID NO: 8084 - DNA, 678 bp, Gossypium hirsutum
aggtaatcacagcgcagtactttgtatggttcttttgtctcttgcctcttattttgccatggagcaatatgaagcttaaatggaaaggtctatgttgcatttttttgtggatgggagctcaaacccactggttgtaatgggtttacctgctcgagtttaaaggcaaaaatgtctttctacagctctggatggcgagcttattgtttctggctgtgctagttctttcgtattgatcatgcttatccggcatcataactaaactccagtattcagacagcatacagactcaaagacaacgcgaaaaaagcgtgagtgacaagacaaagtaagttccttcgagttgcaaccatgtcggaatctagaattttcatctaatcaacgaccggtacattatacgagctttagatttttttcgcaggggcttagatttcaatgctttcttgcagcgtagcttgtaaaaaccattaatggagtatcaacttgaacatattccaattccatttttgcatatttttttgtgtttgggctttcatgttcttgcttaattactagtacatttgcttactaattctatactaaatttagtatttttttatatttgtatgtgaacacacaattatgcaaaatggtgaaatgctggttgagccacttgaaaattgaaattacctggaattgtac

SEQ ID NO: 8085 - DNA, 688 bp, Gossypium hirsutum
tccaaatccagcatgtaagcattgtctacctggagaaagacagatcaggcaggaaaaggaatagctcaataaccagatatgttaaattccctatcaataaaaggtcttcaatgagaaattttcaaagaagagtacatcatcacattgaataattgttagagatgattgggaagaaatggatcagcaattcaattcagatttgattcagataataattaggtttatttggtttggtctttggttaagttaaaaagtaatattcaaatcgaacataaatctatgttttaatcttttataatataaaattaatatttttaaaattaggaacaatgcttaaaaattctatagaaccaagtaaatattttaaagttttaaaaattttaaaaatgatgaacggatccaaagtggtgcaattcagtttgttttggttcaattacaggacttcattttggacttcagaaaaccaaattatacattgacctcattttctttccttccaaaaccaaacaaaccgtcattggcctccaaaaagaattacgaggcactatatcattttttcatccacaactaaattgaaccgtctgaaaatagaaacttagatgaaatctgagtcgtaacattggatcttctaggatgaagaatcatttttctgtcttttccagattattagaactctaccgcacttggg

SEQ ID NO: 8086 - DNA, 447 bp, Gossypium hirsutum
gagaaaaatgtgggagaaattgttttattatttttcattaataaattccaatatctatatatatatataaaaaaaaaatccccgagtgagaggaagatctcaagttagtgagttttgtttaaaggcttaaagctgaagctatgggttgtttgagtatgcatggaagaacgtggtaacatgcatctgttttccttatgagttggcacttgggttttgatagtatgcatggaatgagaaatataaagttaagcaatatgcaacggaacatacacattattcattttaattttgtttcttttaatattttagatataaatctttgattaattcttgtgaggttgatgctaataatattgcttttaagttcttttctttttaaaagctggatgtgctttaccattatttattttttgtacttaaacgcttgttggtatggatcaactaaaa

SEQ ID NO: 8087 - DNA, 608 bp, Gossypium hirsutum
  misc_feature (590)..(593): n is a, c, g, or t
gatgatcagagatcatctgtttggtgattgtgtttttcctaaattgttatgggagaaggttttatatgcttgtaatttgcaggtaatgtatactttatggctttaccagtttggaaaagagaaatcgatggtcactattcttcttagactgtcgtggtgtgcctccatgaagggaggtggagggtctttatgtgttgattaaaggctctattgatgctaggctttctaggaaatttgcctcttctacgtgaagtttgaacattagacttgcttaattcttttgtaaagtttacagttagaagagtgttcctatagtctttttcttgtagcttttggatgaataaaaagcacatttatcaaagaaatacgcattcacacaatcctttcttccttattcttaatttcatttcaatgttgtttgtttcatatcttttagctggctaacccaggatttcaggaagttgatgacccaagttaaacgcttcaaatattttgcaaatgcaggctacatagctcaaatacctctagtaaaaaggtccttacggtcatgagaagtggaggcaaatgcttgactgtttttttctcctcannnnatagttaaactagca

SEQ ID NO: 8088 - DNA, 633 bp, Gossypium hirsutum
gagtagccttgttgtgatggtgggtattgaccatacccagcagcgctacttgcttgtgcataagcagttggttgactgtaaccaggaacaggctggctacctggctgcggataagcctggccacccacagctggaggctgactgtacccatcactaggtggtgcagagccatatggaggatagctttgttgcgttggcccacttgatgcatatgcatactgctgctgtggaggcacatttgacccatatgactgagcagttggaccttgatatggtacttctccaggttgattggcaggaggaccatatgtttggggtccttgtgactgcatgccataagatggtggcttgccatattgctgctgaggggcatacccaggttgaggacctggctgtgcatatcctggctgagcagatccatgccctccataaggatgctgaactggggtatgattttcatacttctcttcatatccatgtccgtatccatgctggggagcagcttgcgaatagggtggtggatgcgcataatctgctggaccacgaggctgtccataattataactcaactgagatggaggcggccccatagctggagcaggtgagggaccaggtccatgaccaggaattgaa

SEQ ID NO: 8089 - DNA, 536 bp, Gossypium hirsutum
  misc_feature (51)..(56): n is a, c, g, or t
  misc_feature (476)..(483): n is a, c, g, or t
  misc_feature (528)..(531): n is a, c, g, or t
atagaaattatttccataaagtttttcagaatttatttattccaaacaaannnnnnacctatttatccgtcagcatttattctaaagttagctgtttttttttgtttggttttcttttttgctttttcagctagagccttcgaaatacgaaccaggctcgaagttcaagaagttcataccactgtatttacctttaaaaaaagtaaaataaaaaataaaatatgaggggaaaaaacattaaaaatgacttagacgcagcttaaatcaattaagaatgacttagatgttgctttagtttcagcatttaatcaaacagatgataaaccgatcctaaattcagaatgcaggggatgattgttcacatattgtaaaatattaaccttttcctttcaagttccaataaaaaatgagaaaaagcttaactctaaagagctcaacaaaatcatcaaagagatataaaagacagaaaaaactcnnnnnnnngtgcgaaagagaaagagtaaaaaccagagcgtcaaaaagcttggnnnntgcct

SEQ ID NO: 8090 - DNA, 655 bp, Gossypium hirsutum
ggagcattaccgttaaaagattttattggaactttttcaaccaataaggaaagaagcgaccataaggaatctcaaaatatttttttaatgagaaacactgttgtttgtacagcattatcttgcatacgaagggtctgacatgtattctagggtacgtactttgtaaacactaaaagcacaggtgaaccaaatagaaacttcattatgatattgataacatctttcaagtgaaacaatatagttaccaatccaactaaaattagcatgggtacaccaatttcaagaatttgaacttcctacagtagagtcctgagtattggagtatgattaaataaatataggaaaaatgtactcacccaacttcacttctccttgttctgttaagaggatgttaccacccttaatatctctatgaactttgaaaattgagtgcaaataatcaaggccctccataataagaaatcaaaagaaacaacatgttaattagaaagtgaatacaaattatacaatgcatgaacatccttatgggagacgttaattgttattgtctagggtcccatacctaaaaggcaagtttgaaaacaaataagcacataaatatggcaagcgagcatgtactgattcacatgtaagtgctgttaatatcccatgacca

SEQ ID NO: 8091 - DNA, 608 bp, Gossypium hirsutum
  misc_feature (59)..(61): n is a, c, g, or t
ttttcctgcaattgaaattttgtggggtaacctgtcctcggaagttgacaacgttttannngattatatgatctaaatttatctttttttttaaattataataataaggtaaatatcaatccaagccactaacataagaatgaatttttttaacacaatatttaaaattatttatagtctttttttcaattttaaaaaaaaaaaattaagtttcagtgcattaataataatattgataccaattcaactaataaaaaccaattttaactctaaagtaattagctaaacaaaatgaactgagaggaaaacgtaaatgaagagaaatctcccaccccttttctttatccttctcggtgtccaaccaatcttactgtaaatatctaaaaaaacatcaatctatttcatatctataccttcatagttcatatctaaaaaacatagattataggaagaaactatgaacaagtaaatctacattatttttattaaaatagaaattccaagatattcttccatggtagaagctcaagagatctgatatgatatgcagactaaaagatggaagtttctctagtcttgagagagcaaaactcgtggcatatgttatc

SEQ ID NO: 8092 - DNA, 647 bp, Gossypium hirsutum
tagttcagaggacgtggaggatccgagggaaacaggaactacaaattttattatggatctctcaaggtcgtaatatgcctacccctaaacatgattcaccctcttattggttactaattatggtgtagacggttcaatagtcaaaactgttgatgaatttattcctatttgtggttgcaccttttatagcctcttcaattcaaccctctcattacagccagtgaagcttaagattcttatatccgatccagggttgaagatcctgctatcttcctcaaaaactgcagtggaggccttgtttatgatatgtttgtactgccacctgttatgatggccaagctctgctgactgcagatccattatagaagaagctgctaagcttgttgaggctggtatgcagactttggtgaataggttctatatatcagtttcagccttcaggaaatgtttaagctttcaaaaggcatgcttatgaacttgctataatttgctttgttgctaaaaatgacattgttaaactctctccataggtcttttgaaaaattgccctggaaattttagtgtacatacatgcatttcaaccaaaagtccttttctatgcttccagccacttacatgttctcaggtcagtcttcagaatggctaaa

SEQ ID NO: 8093 - DNA, 635 bp, Gossypium hirsutum
  misc_feature (61)..(61): n is a, c, g, or t
aattctaaacctacctcaagtttttatacctcaattgttatttctgtatcaatccttgggnttggaacaaaagagttgataaaccaaggagacttccatgctgatgaggattctatacttctttttaatggagtttcactgaacctggcaatccacatcaatcaagcaactggtgagtaatcgatcaactaatgttagcatttgatgggaaataaacaaaagcagaggttaacatacaagcacacagaatagcgaaataatataacgatattggggagcagtggaaccttacatattgtaattttcaatagcagcaccattcccggcattatcagccaaattctccaaggttgctgatgaaattgactggctttcactgttctttatttgcggagtaggagagctgacaattacgcatgcatttcccgaaaagcattcagaagccaaaccctgatttcttggagtcagtgtgcttgaagacaataatggtctgtctgctttaagaccaacatgttcaggagaaaacaatagtagatcatttaaattgtgctcaacaagcacttctggaggccgttggacctgtcaaaagtaaatcagaaaaaatagtaaataatatcaatcaattcatcacgtga

SEQ ID NO: 8094 - DNA, 671 bp, Gossypium hirsutum
gtttgattgaagttgcccaattttttatcagcaattttcttttatctttatctttattattgtctgtaaatgcaaaaacccaaagcctgagttgagaaactgagatgtcactgtttttacaacagaaagatatatactagaagttaactggcaagtagtatattatagtgcggtagatgttgcacagcgcaggggactgagcttgtcatccaacaccaatcttgctgtcatccaattacacgtttcaatgatttgatttaacattttcagggccacatttgccaatctggtttcttgtatatacatctcaatcaaagatttatacacatgcattgtgaaagtccgactctttgagcgcaaggagtgcttttagaaagaaaacattccctaaaacattccctgattcaaccttgataaacaaagaagtggcttttaatacactgtaatctgtattcgtcttttaccaaatactgtgactggaaaatgaccatttagccatttttatgcttagggaagttaaatttaaaaaacataagacgaagtccgacaaaaggtacaaaacattaggtttaaataagagctgatggggacatttctgagtaggaaaatgtccccacctctcaaatgtaagataaatttgtaggttaattggtctgctgcttagtactgtc

SEQ ID NO: 8095 - DNA, 650 bp, Gossypium hirsutum
caattcttcttggtaatgcatatgtaacaactagcattgtatttttctactgttaataatttcaactattgttttgtaccttcagcttagctacttcatgtgggactccttaacagttggtgtagcggtctcaatcatgcataattttgactcgaataatggagagaatgaatttgcaaaaatggaatacatgaacataattgtcaattacttcgaataagccttacggagtatccggtggttccaatccattcttcgataaccttgaagttccaaagtttaaactgaaaaaacatggagtgcatagttttcatgttcagacaggacttcgagatccattttgcttcataaagaattgaaaagggaaattcaaggttagagttagaccaccatggatttcgagctcgtattctgtttaaccatctaattgtgacttcattgcattataaccatttaggatgactacacaatggaggtaaccagcctggatgcggttcgcattctttttgagaccaagacaacctaatccgaacatcaacaacaaacttaatcgaaaaattttcataagctttttggatgtaagttcttattatatgaacttcagtttatctgatattcattgtgcatatgtatactgaacaaatgtcata

SEQ ID NO: 8096 - DNA, 577 bp, Gossypium hirsutum
  misc_feature (478)..(478): n is a, c, g, or t
  misc_feature (516)..(518): n is a, c, g, or t
  misc_feature (520)..(522): n is a, c, g, or t
  misc_feature (558)..(560): n is a, c, g, or t
  misc_feature (562)..(563): n is a, c, g, or t
  misc_feature (572)..(572): n is a, c, g, or t
taagtgaagttggatgaatatgaaccgttcgatttactgatgatcagattggacttttgtggttgggaagaaatggcccattggaccttttggcaatttttttgtgaaattaaaaaataaaataaataaatggtacttatggtggataggaagaaaagaaattttacaagacatttggctatcatgcaaatatttggacccactttataaataaatgtaactaaatttttttatttaaaaataaatattagatcataattcttttttttaaattagatcataattattcgatctctctactcaaaaattaattaaggtatttgttagtagtatttttctttttcttttttcatactttaaaattaggtagcctaattatgttttagtgataataatataaaaatttaatgttattagtgggtttaaattaataaataatttggttggcattctgtattgtttttattgtaacaataangagaatatgagttaaaacgtatttaagctcgttatttnnntnnnttaaggggttaaaaattaataaaatcattagttatnnncnntaaaatgangtgct

SEQ ID NO: 8097 - DNA, 630 bp, Gossypium hirsutum
  misc_feature (624)..(624): n is a, c, g, or t
cctctctctgctagtacatggttggcgctgagctcctcctgcggggttccctttcggaacctggcggcggcatcggcgtcacgtgccttgggtgagttctcgtcgcggtatttgctgtggaggaacggaacactaaatagaatgtacttgaggagccactgggaggacgctccttcgaaggccactgggagctggtggaggtctgaacggattgtccacttggaaaacgctgattccgttgagtaggttggcaatgagtcggcccaaggggttggttggccttggaggatggcggagacggtctgagaatagtgggtgttttcttgtgctagtccatccatcggcagtagccctacaaaataactcaaaaacaagtttcaactgataatttttatcacattaaacaaaacgaaaagcactccaaaatcttttggctgataaccgggaagcctttcaattttccccataaaaatgccgacgaaaacattgacagttaatataataaacattattattaatataataaacattgaacactacggggcgggtgaaataaacaagggtagttgaaatttcgatttgtgtagtcatttggcagcttgtaataaataactatgaagaagncatttg

SEQ ID NO: 8098 - DNA, 679 bp, Gossypium hirsutum
caagcctgatggttttcatggattacagagactatgctaaacaagaagttcaatctttagaagcacaatatccaacatttctttatgccatgcccatgtcttcaacaagagttttttttgaggtttgcaccatgcaattaatttgtttattgtttatgttgtatgccatgattaaatgcaaaatgatttagaaagttgcattgcaggaaacttgtttggcctcaaaagatgccatgccttttgatttattaaagaagaagctcatgtcaaggttagagagcatgggaatccggattttaaaagtttatgaagaggtaaactgcatggtctaattaagataccagattcattccgctataatgtatggattactttttatcattactcagcaccaaaatagggctgcatgtcagtcatctccttgccattttataaattggtgttgatggtcaaaagatgactttctccacaagtcatttttctttactattcctcattcacgaacagcccctcaaatttgttagtagaaaatcagagaaaacagctcgtcacaaacaatgccacatcaaattcaggattcacctttctatcatagtagcacataatttgctatcgacttggtttttattcattattctggtcaatgatggagtgcagagcccaatgctcttaatcctgg

SEQ ID NO: 8099 - DNA, 412 bp, Gossypium hirsutum
  misc_feature (398)..(401): n is a, c, g, or t
  misc_feature (404)..(409): n is a, c, g, or t
attttgaagccaaaatcccccagaatttaaaacgtcaaaaaactatttcaaagaaaaatgagaaaagcaacctcaaatagaaagtcaacagagttcaactgagcatatttccacttcaaaagaccttcatgagtgcgaggtacataaggatcatcccaaccctgacaaaaagaaccattattaaccactaatgcctaaaaacataatgcctttcctaagagagcatgcatatgaggcaacacataagggacacgaagagaggaaaaatgagaagagaataaacgggggattatatatggagcgaatgaaataccttcatgcataacctttagacaaacagttaagaaaaaacaaaagatttgacatcaagaatcatatacccctcttcattcacctgnnnnatnnnnnnatc

SEQ ID NO: 8100 - DNA, 599 bp, Gossypium hirsutum
gtgtttttgagaagtaattgagataaatgcaaattcttgagccatttcttattagtttaagcagcaaggaaagtgttggtttatcctaaaataaacaccttaattttcttcaggtgatttgagcttaaagaacccgtttttggttggtatttgcactatgggaagttaaactactaaataattctttgttggcatcccaagaatcagaattcgatcctcgtaattgtcattcctttcccccaaaaatatggctgctttgttggaacataaaattgaataattaatagaaacttgtattttgcttccttgatatatgtatatatatacccacactaccattattatctttcattttcatggagtcaagccatcttaatcccttgtccatcaacagcattatagaaagtctgattaaattattggtttgaaacctgctgcaacagtgcaactttaagagcccttcaaaaaacctgccatatgactaggacaaaggtagggtctttgaaaaagaaatggagtgggagggaattgcattcttttacctatttgttttagaatactatgaaatgagttttagggcatttttttaactttcttgg

SEQ ID NO: 8101 - DNA, 571 bp, Gossypium hirsutum
gacataagccaagcattgtaacacacaataagaccaacaacagcagtagcatgcggtctcctcaaacagtaactgatcttgtctaatatgaaccacaatcaaatttcattggtttgtcaaaactttcctaattgagcctttctacaatagtattaatcttgtagggataagccattgcatgtgacttagtctctcttgtctgatggttcggagactatttgatcctaaaccagtcctattgaatcacaatgtctaccaacttttgagactacctaaataaaacctttccatcaatttaaatgaagcactatgaacgatggtgaatgctgaccttcattacaaacagaaattcttcactttaacagtaatacttatcttcattacaaatagagtatcttctaggtaaccaaacaattatgatgagatatttaatgccaagttgtgaggaagcaaaagcaaacaatcagcagacaaataagtctaacatgttcttcaatgtagtaggttttgaatcagaagttaggaaaatgttacaggttaaatgttgcaactttggataaacagaaactat

SEQ ID NO: 8102 - DNA, 621 bp, Gossypium hirsutum
  misc_feature (439)..(439): n is a, c, g, or t
  misc_feature (587)..(588): n is a, c, g, or t
aaggacaaatgaaaagttcaaaaacaaaaacgcttagaatctttctattttttgaagtatcaatctctttattttgggaccaaaaagaagaagaaaatctctttattttctaaccacaaattaaccctaaggtccgtttttctctttatatctccaaaactttaagaatggaaacaaaaattaaaaaaaaaaaacctctcaaatcccaaataaaaaataaattaaattgtgatcaaaagagattcaaaagactgggtcggggcattattttgtttttggtaaaactaaggaagaaaagaggaaagattgaaaggagtatagtagcaaaataagtataatactaatgatttaatttttaaatatatgaaagaaacatcatcgtacaatgacgtgaggtttggagcaatggtgtgccaaccccccaacatgttggtagcanacatgtcacgtgtcttgtcttgtatggagagttcagccataacttttactatgttttacatattttttagggggggggggggtttgctttaattggacttccaaatgtttttttttatatattttttttgttgagtaaaaaaagtatnntttgctttaaagaaaaaaaaacaaagggggggg

SEQ ID NO: 8103 - DNA, 598 bp, Gossypium hirsutum
agtctttataccaacaaacttatctattaagaatgcacaagagaaggtttgatgagtctttcatttgattctattataatcaccttctttttacagatattctatcttctcatatgattatcctctggaacagatcaagcttccagttttgttaagaaagtcatcctattcaaaattatggtacaagcctgatacagtgttctttattccaaaggcatatttaagataaactttgactgcccccatgctagcaactctcccgaaactgaggttcttacagatctttttacaccgtttttgatggattacttgaatgaatatggaatgataaatgctgatgatttttctttagtgttttactgtgatgtttctccacagtggtttaaatgtccaaaggcatagtttgtgatatgcaaagcctttaataatgacagtatattgttcttatcatttgagtaggattatcttctttactaattccgagttttgtcttccatgcttcagcttattatgcccgagttgctggtcttcgttatcatgtaaggtgcacagatagtggttttcgggtgttctttttatttttattttcgtggcatta

SEQ ID NO: 8104 - DNA, 494 bp, Gossypium hirsutum
  misc_feature (479)..(479): n is a, c, g, or t
atttaaactccacacatgctggagtcaagtgaaattcgacggtacttgagtttatagacatatatcaaagacctccaatgttaacaacatcaaatgcatgcagggtttttcacagggacatttaatctgccaaggccctcatcatacatatttctcacaccagatgctacaataaaatatatacgtaaatactaagttttatgagaaagacaaaataaaccacaaaaaaaaaaaaaaaataaaccaaaaaaaatgtaaaacaatgtgtgtttaaaagcaaatcaaaaaaacttaaacattttccctgcccaaaaggttgccgggtggtaaaatcctggtttaacctgcacaaaaccatgcaaaaccaaacaaaaccaaccccactttaacagaattttaatgaccattcggcccttaacccaccaccaaaacctaaaataaaaaaaaaaaaaaaaaaaaaacaaaaaaccctttttttnccttgaaaaaaggcc

SEQ ID NO: 8105 - DNA, 630 bp, Gossypium hirsutum
gttttctttgtttctttctctcttgcatttgctcttaattctttctttctttcgttcttttaaggaatcaaatgaggttagttcattcatgttgccttccagagcttatgcttaaacctgttttctcttttacctggtttgtattcttttcttcctgaacacacacaactcttcctacctagcctagagttgggctgtcaccttcccatttgacctacgtcataaaataaaacatggggtacaattccattttgttggttttagtgaagccttttgatttccaaaataaactaatcgattgattacgtaactattaaaaagggatgtgttaaagaacattggtacttgtctttgatacatgctaataaattcatgtttacttttgtaaggctgctaatgtgttttaattcttagttaatgcaggagaacaagtctagatgaagttagtgaagctggtatggcctgtgatccaaatttcgtttatcagttgatcagttggcattgggcgatggaatggatgatgggatctttgttttgtactatagttggcaatcaaccaactttccccctcttctttttgatgaattattcttttaccatatgcttctgtcaagttcctttcctctagat

SEQ ID NO: 8106 - DNA, 653 bp, Gossypium hirsutum
  misc_feature (642)..(642): n is a, c, g, or t
agctatacgttagctttctaacttcggttccattattagtcttgaattatttgtcaattgtgcattaagttgcaaccaaatgaacaacttaaaaagaaaaaaatacgaaatggatgtatttttatgtagtttggatccctttcctatgtctatggggcgtttctcaaaagtaatccactaccaatcaataatacaatatatgatttaagtttaactcattcaccgaattataacttcactcctatgcattatctaagatcactctctctactaaaacttcccccttgaaagcttaggtacaaatttaacataaacaatttgtttacaatgtaattgcactaaaacaagttcctttaatgaacaacataagagctctatgtagctcgtgtctaatgcaataaaacaaatatgttttaaataggtattgtagacttgtaattaacttggtaatgtgatcaaaatataccacttaaaatgtgctcaaattgatctttagataagtaagaataagaagagatcttctaaaattgatatttatggaaacaagatctctttaaatatgataattgaaccacattaggaccattggaaagtatctttgctagatatgttatccttacaaatcataatatcgtttagtgntgtttagcatg

SEQ ID NO: 8107 - DNA, 605 bp, Gossypium hirsutum
gtactgtttggaatcccccacaaatgcattgcatgtgctgcacttatgttgctttgcctccccttcagcattcccatttcctgaatagatggtatgcttttgtattttctcacttagttggataactgaatcagaagattctgggggtaaacgtgatgatgctgacttggccgaatccttgggcagctgtgatgatatatcctcatcatcgtaattatccacttgcgtatccccctcggcatgtacagacactgaaagtatttccaatctaccctgtaaattcctcacaagggagtcacattctcggaaaagccctggttctatttcacaaatctgaaaaaccagcaaacaagagcttaagtacttgaaaaagaaaaccctaagataaaaggaaaagcacacagttaaatagatatcaacagccagctcagtcacttggataaactaatttaatcccaaaagtattaagtaatgataaaaacagaagtgacagacatgtaaacataatggtgctaattagaaagttccagatatgcttctcaaatgtactgatgcacatataactttagtgtctatgaccactcgagtgaaggtcaatcagaaat

SEQ ID NO: 8108 - DNA, 634 bp, Gossypium hirsutum
ttatattattttgagactttcttgagatggggttggattaaggccgaaattgatttcggcttattaatattaatctttgtattagataattttcttttgctgaactttgacacatccattttgggtcatataattatatataaatataattcttttactatcttttattatattctattaagatagaaataaaatacagtgcaaaaatattcattaaaaattaataattgagtggccaaaataaaattaaatcaataatttaatgatatttttatcttttaccttttcaaatattacaatatttcaaaggtaaactacacatatggtcaccaaactataaaaggaatttcattttagggattcaaaataaaaaacttacagtttaagtatccacattacgtaattcagttatttaatattaatataaatttatttttattttttaaaatttatttatgtatttttatttttattttttgaatttttaaaaattaagatcaaattttttgagaaatgattttttaaaattatgactaaattgatataatatgtaaaaattaagagttaaatttatataccgattttttgaactgtcacgtcaatttactatttataattttaatgagaatgatcc

SEQ ID NO: 8109 - DNA, 584 bp, Gossypium hirsutum
agtggaaatgaaggcaaaggctgaaatggatatatgatgggattttgataggttgaatgtgaaaatgaagggtgatgtcagagacgaaaaggaggggctgttttaggttaggctgatgcttctaggcttttaatttttaggatttataagacggatttgggttaggttttaggatatggatgttagcttatttgggttatgttgcccggttcatgcttgcaaaattatgtccaaaactcaatccattttaaaacggtttttttaagcctatatttcaggtctcatattttaagtaaatatttaaatatttagtttgatttgattgttatcaataagtttattaatttggttgggtttttgtacttttggaattttgacttctatcacttcgagaattatgtcattaacatcttgtgtaaaagctattgcttatacatattttcataattacaaggcacttagaattggattgatcaatatattgatctgaacaaatgattgaattgattttagattgtatttgagtgaattacgttatgacttaatcattttaagaaaaaaatgagggtatgtaaactgattgg

SEQ ID NO: 8110 - DNA, 567 bp, Gossypium hirsutum
ttatttctgcataatgtttgatacaaactaacatatgtcctaaggggctagtatgatgaaactttctttaaaagcttattggattaagctcatgtcagctaattgtcaattaaaatgagcattcagattgtatggtgttctaacatgcactagtgctttcatctcaataagtcttcatctatggtttgcgttcccttatcacatctgtggtggctagcatcatattctatgataggatttcacatgtgaggtagtgaattcaaaaggtttaattatgttttagcccctttactatgctggaatttgggatttttcactctaatttggcataatttggtctttctacttttataatattattagtacctccaatttgataaagctattcactgttgcagttaaagtagtgacagggaatttccatgagtctgttaacattatcaacactgttatatcaattaacagttatgaacacaattatattgttatgatccgtatggaactaatcgattggagctcataaccttaaattcttcgaagggagttcccaaagttcccgaactcata

SEQ ID NO: 8111 - DNA, 542 bp, Gossypium hirsutum
  misc_feature (537)..(537): n is a, c, g, or t
tgcattcacatttggataaatgtagctcactctatctcgagcggtggtcataaacaagaaggcagcatggccaagacccgccagttttgtcgacaaaaccatgtcatagtacctattctgcaatttcacaatctacattcaatttaatccaatatggagctacatgaaaacattgaataccattgttaaatacccaaactttcatccatgaaaagccaataaccttaagaagtccaatcatgtctgtgtattcagcaggatcaggccagtcatcgtcagggtcataagcattagcccatctcacattcttgttcagttcaaatgtctgctttcctctttctgatgccaatatatccacttgaacaccagggtatctgatcaaaatatattaacaattaaagatggaaatttcatacccaaaatcagagcttcaacattttggttgctgttattgttatacctgtctttgatcaattgaatcacagggaaaaacaacaagttttcatagacaccaccagaaatgacacagcaacatcncctga

SEQ ID NO: 8112 - DNA, 601 bp, Gossypium hirsutum
cacagtaactctctgttgtatcagtttaactttgataatttgtagctatggttcttacactcaaaactcttactgataaacagaccactcagattaattacaagctatgtatcgtttaaatgacgcacttatcttgctcgagtagttctacatcgagtcagtaaccagttcagccaaataggtgaaaacaaaaatgaaagtctattcaagcaaaaggaaatggaaatgtgaatgagggtacctttacatcattaaggaagatgaatttctaaccattgagatgtgcacgaatggctatgtccatatcctcaacggttgtcctttcaagccagcctccagattcctcaagagctttaattctccaaacaccagccgttccattaaatccaaagaaatttaaaaacacaccattaacttgctgctcaacttcaaagtggaaacacaaattaatgttctgtagtcgtgtcaacaaattctcatccttgttcacaaaagcccatctagcctgaactaaacctaactcggggttgtcctgcaagacaaaggagagacacaatgtataaagcccgataagctgatgtaggcaagtaactaaaccaaa

SEQ ID NO: 8113 - DNA, 582 bp, Gossypium hirsutum
tgcccttgactatgaactctcctctgccagtttatggttccgcagctctatctggtcttttgacttagctagtccacaactttgtgcttcagtccctcaatcttggtcacctggttgagcaaaacaaggaaattagctataccatttactgtgatgaaagtgaaatcagtaaaaagtaaacccataataaaaaaactgatgctaggctaatcgtaaatgctaatgtcgctgtaaataagtgacaggcataagtccagtttcatcttgatggactctaaaggcctcaaagagaaaaaaaagtagccatatatgaaaaaagacaaaaagggtcaaacgaaggttaaaggagatgtaatgacgaacctcacgtgtttaatatctatctcctttctcgatttcatgcgactcataacatgtttcactttttttattaagctcacaaatatcacaggtttttagttatcataatcttaatttctatgtccaatagcattgataaagttattatttttcattcaaacaaatttggtattatctttagtcactttgaaatgtctaatagggggaaaccatgatcgtgaa

SEQ ID NO: 8114 - DNA, 660 bp, Gossypium hirsutum
gagttatcaaacatcaacatatgtaagtgaccaatcaagggaagacttggagggcctgggggaagatgattgcaatagccatggttgctaacgctacgtttcagcagagttatgaagaggaagaaagggagagctagaagaaagatgagtattgccattctaattatctgctcaaatttgtttgaaacttgagagtaagaggttactttatcctactctttttcaatcaccttattttgttttattattacttgtcatttagatgagcaaacaaggaaagactgaatgaagtatcattatcagtgctattgggttagatgtatctatatactattaattgaaaaaaaaatctcctttatgtggctttcgttagatatggttggagtttgtggcttatgtctccaaaattttttgaaatgaaatgtgggtagtatgcacccaatattttttttttattgttttgtttctaaaatttagattttaatttaaatgttaatttttttacaaccataattagaattcgggttattcaatataggataatttgggattaaaatttaaaatttatttttgaagatatatatttttaaataactatatatttatttttaatcaaattttaaagagataaatgtcaaatttatacatgcactttgattt

SEQ ID NO: 8115 - DNA, 661 bp, Gossypium hirsutum
tgatcaccaaaatttccgattgaggagaatacaatgcagattttgaatgctgttaagtaacaagaccatgaagagttcagggtaaatgaagcaagagggtacaacaagcttgaaagggtacctcaaagtctatggaattcgagccagtagcacatatggtatacgagcataaatgtaaaagctgcacatatcctagaggaagcaaaaatgccgggtaaactgctaaaaatagccatagttgaaatcatttgtctcaagaaataccagcttaagtatcaacagctatagatgagcagaggaaattaagaagcttctaccctacgcattatatgcttgtttaggacctttattccagttcttccataaacacattcctcaaccatatactatcataacagaatctaattcacagatgaggcagataaatggtcataaactcacatatttgaagcaatttatgtccaacctaggtatcatccctaagagtattttataacaatgaagcaaaaggggcataaaagccaaaattttccttttttttttcttctgttggaagagttaacatgcggaagaggaactaaaaagcaactaaaaacaaagcataagaataaataaagagaaaaaaaaaaaaaaaaactccctgcgaaaaagaaataaaaaa

SEQ ID NO: 8116 - DNA, 613 bp, Gossypium hirsutum
attggatggttctcatctgctgatgttaatcttgacacgttttggacttctgttgtcaacaatgtggatcaaaccaatccatcatcccctaaatttgtcaggttggttgattctgtagatgaaatttctaaattaagtcatagcaagcctgatcaaagtgaagagagccagtgcagagcaactagttcttcaggattaggtgttagtgatatgtctgagggctcaaatgctgaggcttctagattttcttctgatttttggggcagaactttggaatcagttccatctacaagtgttgatgacaatgagtcgtttaactcttatcataaagaaggcggtaaaagggccttacttgattctggatcatccttacatttttcatttactttggctggaaatgcttcttcctcatatccgcaagtctccaaggtgaaagatgccaaattggatgatgctactcaatgtgctactactttggggcattccaagctttcagatggagtagttttgtccgaaaatgctggtttagattctccgaatgaaggaaactctaagtccttaaattctgaatgcaccaaccagggggagtgcggatctaacaatattcagcatg

SEQ ID NO: 8117 - DNA, 642 bp, Gossypium hirsutum
  misc_feature (601)..(601): n is a, c, g, or t
  misc_feature (624)..(624): n is a, c, g, or t
  misc_feature (626)..(626): n is a, c, g, or t
gtttccacctgggacttgtttgttgcagttagcgagggattatgggacaatggcgccgcttgtgggaggcgttaccgattaagatgcctgagcggacctaagcgaccatgtaagcggagaaccattgatgtcaaagtggtggatttctgccctttcactccatgcccctctaccatcatgctgtccagggatgcttttgctgctattgcacataaacatggaaggaaaatcaatatagaatatatacagtaaatccttctctctttatcttcatctccttatttggcagacaaatcaatatggaatttatgtttctgaatttaaccataatgattgatgacatattgcaggatttgaggaagaagctactattaatacaatcatatcgaagtaccagtttcagcctgtgttagaaagaaaatacacgcaaggaagacgctagaaatgtgatcaagatgttaatatcaagtctgtaaatctttaaccgaaagaaggaaatatcagtaacttttgcgataaccatttttaaggattttacataaaaagacaggaatcacataccagatttatatgcaattatttctgttaaataaatctacantctttatgtttactactgatggnanaagtactatatgctct

SEQ ID NO: 8118 - DNA, 619 bp, Gossypium hirsutum
tgcgcttgttaaagcttgaaggaggttagccttttgtttcaattggagagcagcttcaaagtattcacgttggtcaagttcagattctgagcaagtcccatgtttgagccattcatgagtccagaacttaactccatcgttgctaggacatgaaagagtgggccattccttttccagactcccaatcaggcttgaaatctatttacaggagaagccattatgttaatcccttggaatctgttggtaaatgatatttgcgtatttctgtgattaaacaatatcaataataatttggattttagcagcaattagtattcttttaagccacgaaagacatttgactaaatcgagacataaacaggctgttgggtggtctgctttggtttcctcaactctcactcccaccaacatgtaaggtgacaaattcggaagttagaggtgttatcatgtgaataaagtattctaatcaaagaagaaagttaattgcaccaatatccttaaattatgaccctcattttaaattagtcctaaatttgaaaatattctaattacatccctaaactattaaggttataccaatcagatactttcgttattaaaactattaaatgacacacca

SEQ ID NO: 8119 - DNA, 539 bp, Gossypium hirsutum
  misc_feature (526)..(528): n is a, c, g, or t
  misc_feature (532)..(535): n is a, c, g, or t
ttgatatctttctcagtgcacatatgtgcttttctttgggtgttcaatatgacttgtgaatgcatagcttactttggttccattttcttacgaaaaaagtaaaaaggttattggtttttattttcagaacttttcctccccagtggatcttacagcatatgatggttttgagttgcgcttaaagggtgatggttgtcggtataaactaattgttcgcactagcactgattgggatacagtgggttatacagcaagctttgacaccattggaggccaatggcagtctgtgtgtaacaccatgaccattttatacatcagcattatcaaacaaattaccttctcctttcaacttgtaacttcctgtttctttacagattcgtttgccattctcttcactgaggcctgtatttcgagcacagactgtatctgatgctctacccttcaatccaagtaatgtcgtatcatttcaggtttgccacttggtctgtgcttttttatctttctgaattttgagtttttaccaaannngttnnnnagaa

SEQ ID NO: 8120 - DNA, 205 bp, Gossypium hirsutum
  misc_feature (70)..(70): n is a, c, g, or t
ttactagatggcttcttttagtgatccccaacctttcttttatttaggaagattatcatcaccgagattngtatattgatcagagtaaaagttgaagatcgaaaggtcctcgctgaaacttatggtaattgttgcccttccactcacctaacaacttctgacttgatgatactcttgagcccaactgaacatttcaaagagaaaa

SEQ ID NO: 8121 - DNA, 599 bp, Gossypium hirsutum
  misc_feature (531)..(533): n is a, c, g, or t
  misc_feature (548)..(551): n is a, c, g, or t
  misc_feature (569)..(573): n is a, c, g, or t
  misc_feature (583)..(584): n is a, c, g, or t
  misc_feature (586)..(587): n is a, c, g, or t
  misc_feature (589)..(590): n is a, c, g, or t
atgatttctagctttatcttcagggtcaatgcttattaccgcatttatccaagatcttcaagacagcttttttttaatcagagatagaagtagaccgaactgtattttgtataatttctagtcttcttgcttttagcatacgtagaccaagtccaatggttttataatagatttaataaatgacatctataattttatgttgcactccctgcactctccattcttgtcaatttatcatattggtttagaaagatattctagagtagattcatggtaaaagtatcatgaaggtctccatagtaggaattagattatattttctcttttactaaaaactaacaaattagtctctatatagggttttttacaaaattattacaaaaaaaataaaaaataactaaaatgttatttttttatttatcaaaatattataatttttttatttaccaaaatatatcaaaaaataaaaataaaagcttgcaaaaaaaaaacttgtggcggcaccaaaggtgccaaagagattggcggcannnagactaaaatgtaannnnctgtagtttcaaggaccnnnnntgcaaatttnncnntnncaatttgaa

SEQ ID NO: 8122 - DNA, 658 bp, Gossypium hirsutum
ttagcaggccacactgtctcaaaacttcagtgtgttggtgttggagagaggaggggttcccttctcaaacgtcaatgtctccttcctcagcaacttccacatcgccttggcagacacgtcccccacctctgcttcccaacctttcgtttcaaccgatggtgtcatcaatgcaagggctagggttctaggtggtggcacttgcatcaatgctggcttttacaccagagctaactcagggtatgttgtcgacttctatactcttcagttcttttttctttttacatatattaaaaaagaagaagaaataatattatatataacatgtacaattgggtcctgcaatattaaaatttgtcaaaagtagttcacagtctataataagtttcaagaaagtctaaattaccatgtcctcacaaattcaacaaagaattaatggacaacaattatagttccgttatcccagctcccatgttcttccttcaaaataaatagttttcgctttaaaaaaaattatgatcgtatcaaccttttttaggcaattaaatgttttcatttgaagttttagagaattattattattttaaaaatatgtatacaaatacaatattttaaatatatataaactaaacataagcatgttatacgcataaccttattt

SEQ ID NO: 8123 - DNA, 620 bp, Gossypium hirsutum
  misc_feature (23)..(23): n is a, c, g, or t
tttttcgagattgcaccactgtnaaagacatgtggcaactgttagagataacatggaatcaagaagtattacatattagatttagagactggttaatgggtatcgtgtctaccatttcagcgcgcaagtgtagaaaggtgttttgtactctttgggtcatctagatagcaaggaataaagatgtgcatgagaagattaaaaatttttcctatgaatcaacctttttcgtacaggcatatctcaaggaaatagactatatagatagacactcacctggtcaagagattatggtggaaaggtggcgcccaccaaatccagattttattgaaataaaatttgatgcagctttcaagaatcacacaaaagaatcatgttcggatttggtatataggaattcagatgggcaagtgttgggttcaagaatcattcttaatagatatataccttctccttttacggctaaagcattggcctgtcttcaagcagtacaaataggattcaatttgggatttcgaaaagtgataattggaggggatgcccattcgattatcaggaaactgcaaatcgaacaatatgacaaatctgttataagtgcctacatcaaggactcgaaggagcac

SEQ ID NO: 8124 - DNA, 586 bp, Gossypium hirsutum
  misc_feature (508)..(508): n is a, c, g, or t
  misc_feature (519)..(519): n is a, c, g, or t
atacataacaaaaagggatctatgggggtgagagggtgagggccgtacggatcatatcgcacaagttgagtccgtatagaactatacttctactatttgactatgattagaatagagtttttcgacctttaaatagatgtagttgaaactccttttgtatcgtctgtttttcaacattagtgaattaatttcttctcatctgcccgtagctttttctcgaaaggatttccacgttaaatctgtgtgttcttatttttcttttcttattgctttacgattgttttaccgccattataacagtaatgaaaatgaattttaacagaaaaagaaagttaacaaagttaattgttgggcatgaattcaaaaataaaaaagtaaagggataaaattcaaatttttagagagtaaagggacttacatacaatgaaagtgtattacattcaacatttaaaaagaaacaccaaaaaaagaaaaggaaatcattcaaatgcttttttttttccccacnacacacactantcataaatcaatggaaacttaacttccatgggaagtggattttcagcttcttttcagagcaaaagct

SEQ ID NO: 8125 - DNA, 586 bp, Gossypium hirsutum
  misc_feature (579)..(581): n is a, c, g, or t
tttattgctaacaacaacaaaaaaagaaaaatgatccatgtttgattgatttgcagtatttatgttttcgatattacatgtttgtttgtcaggttattttccagtttggaaatgttttttttcccgtatatgtaattattgaatattgtttcaattgtgtaatttttcacttttcagcctttcatcattattgttaaactcagctctcctaggttttgttatatgaaaataataattttagtttttatattttttttgttaatttaatatttattctttatttttttagatcagtttgaggtttaatttttttaaaaataattaaattattattttaaataaaaatattgattaaaagataaaatttttaagatattggtgaggtaacccatgataatatgtgtatttcatgttttttttaattataaactttatataatttttggggttaaatcacaattgaggcttaaacttagcaataaccctcacattgagatttgaattctttttattcaagttagcctctaaacttaaatattgttcctatattagggtccgagctaggcaattgttctcatnnngagcc

SEQ ID NO: 8126 - DNA, 640 bp, Gossypium hirsutum
gtttgtgctgatgaatatgtgagatgtctccacataaaccaaagatgcaggtgaatgcctacaacactaataattgcacacattcacatataacttacataaaatccaagagtaaaggtgatgacaaatgcctgaataagacatcactgccaaacaatccaccggatgctccattatacatcatgcacattatcctctaacccccatctaccatcgatgtcaacctctaagaactgaaaagggacatgatgacataaaatcaatatgtatgcatgtacgacaaatgtcatcttcaaacaaaatacaaagctacatacaaacacatgtttcaattttctttttttatatgtattgaaggagtaatattggcttttaagttggtaattttggtttaataatttttttaatttaaattagactctgaatttaataattattccgtattgagattaaacttttttttattcaagttagactctaaacttaacaattgttctcacattgagacataaactttttttgtccaagttagtccttggaaaccctaaaaattcaagtcccaatgtgaaaataattgccaagtttaaaggctaactttgataacaataaaaaattcaaaccccaatgtgggaacagttgc

SEQ ID NO: 8127 - DNA, 578 bp, Gossypium hirsutum
cgatgctagtaagaatgaaagcaaacccggtgatcatggcaaatttttggtggaatactaagaatgtaaataaccttgcagaacagatggggcatcttactcctgcggagagaacgtgatatcggttgactattctttttacaccttttggtgcctcagtatttcagatgtattaagtttaggtatgattggtttgataactaaagcatgtcattaatattcacttgttcattttatttttaggtgctgtatacatggctgttttttttactgcttcaatatagttcagattcacatatttttttagaataactctgattttaatgtatttgcaaaattgtcatgttactgtattttatggcatatttgatgattatattgttgcctgcatcatgtgagggtctgctaaaggttgcaataggcatgcttcattaacgtcttgaaaatgtattccgacaggtgattaacaacatgctgtgtttatgtcgagttgggaaatgcagatgtacctgattgaagtagacggtgttgttacgtagttgtgaaattactgaaaaaatcaatccatttgctgaaaa

SEQ ID NO: 8128 - DNA, 579 bp, Gossypium hirsutum
acaaggccttgatctggtgtgacagttcggtagcagtagcagtagctggcaacccagttatgcattcaaaattcaaacacgtagagctagacgtattttttgtcagagaaaaggtagccgcaggggtccttcaggttggacatgttccaggatcccatcagatagcagacatcctaacgaaaccactgcctttgtctgtcttaaataagtttcgagggcagcttcgggttgtgaatatcacgtgaaatgagttgtttttggtagcaagctgttaaataagtatggggaatattagggtttaatatagttatacgttagtttctgttatagcgactgttatagttagttacagtagtagttaaggaacggttttctcttagctttaaatatgtgtaacacactcaagttaagaaatatatatacagcattccatttcttgaatactcagaatcttaacacatctgatacctggaactcaaaagatgcaatgtggaaaatcgtaaggactttcaaatcaccaccaacgtgtgagacattgtcgtgacagctttgcggatgtagccagaaagagtatcatcc

SEQ ID NO: 8129 - DNA, 644 bp, Gossypium hirsutum
atcaagaggcaatactcgtttatttagtattggaccggctatagcagtcatatcaattttactaagtttttcagtaattccttttagctctcgccttattttagccgatctcaatatcggtatttttttatggattgccatttcaagtattgctcccgttggacttcttatgtcaggatacggatcaaataataaatattcctttttaggtggtctgcgagctgctgctcaatcgattagttatgaaataccattaactctatgtgttttatcaatatctctacgtgcgattcgttgaactagaaacttttattttacctattcctttcgttctagaaaataagttgagttgataaactaaattagatagttatatatgagtgaaagaaagcagcttataaattcgcagtaaattaaacaaaaaaatagaatctcatttcctatgtacaaaagttaagtggaagaaaacgtaagcggaagaagtctttaccccaagacgggttgattagtcaatctagcttgaagcgggctcaaaagatcaaccgtatagagttttcgctatcctttgtatggattcccatacatgtattgctaaacaaacgggggattgaacaaaaaacgagtggatggataggaacaccaaa

SEQ ID NO: 8130 - DNA, 648 bp, Gossypium hirsutum
gtaaaggagaagtgaaatgaaataaggatgaagtactatttagtcgataatatttttcagcttaatttctgacttcttttattgacattaattttaaagtttagtatttttttaatttatatttaaatttggattttattaaaatgtgatggtgtgacattttaatattataatattttattttttaaaaaatatataaaatctaaaaatgcaaaaaattttaaagaaaattttatcacataatgtactttaatgcaatccaaattcaaggacaaaattgaaaaaactgtcaagttttaaataatatgaaccaaaaaaaattcgaatatcaaatatgagaaaaattatagaatttagggactaaatactactttatcttgtgaaataaagaaaaaaaataacatttcaaaatattcttcctaaatgtaataaatcgataatattagtaattgtattgtaattttttaaaatttggcgagcaaaacgtaatttaaaccataaagaagtgactaaatttgtaatttaccctgttttctaaactggaaacacataatactgtttattgttcaaacagaacaataactcacgtgctttgggtgtagggactaggggaacaaatgagaaaaagacatcataccagcttcacca

SEQ ID NO: 8131 - DNA, 639 bp, Gossypium hirsutum
atttttatccggatcaaaatattaatttttttttgtaatatttgattgtcttggtaatatttaaatatgactgcataattcttttaaattttaatttatttattatttacatttaatttcaatattgttattttaattttaatttgaattaaataaattcttatcaaattagtaaaaatggataacttattaagttttaaagattctgcctcatcatttaaaattgatatcctctatatagaaacggttagactttttttaagaagttttcaaaaaatatcattcataatattattctcagatcagactgaagctgtctccccgctttaacattctctagtgcctaaaatgggattttacaggataaaaatatattgttggattagaccgtgcacgaccacctactaaaagatttgaatgcttacctcttaaacattttaagacaacttcagacaaatgaaccttggaaatcttttctagaaaaaatcaacgttccttcaacctccacaacaacaaaacataaactttccagaaaggtaaaagaaaattacttgctgcaatgcaatttccttcttcatgccttaaaataaaagtacaataggtcgcaaacagaaaaccttatatatatacatctctctc

SEQ ID NO: 8132 - DNA, 596 bp, Gossypium hirsutum
  misc_feature (27)..(27): n is a, c, g, or t
  misc_feature (62)..(65): n is a, c, g, or t
  misc_feature (552)..(554): n is a, c, g, or t
cgctgactagtaggtcacttctacttncttctgcatgtttgttgcatgatgcttggctgaannnnaacaaattttgcttccctattaacatgaactcttttgtgttttcttggtttcacactgtttctgatcaagatatttgaaaatttgaaaatgaccataacaatgatcattgcacatataccattattaggaagaaacagattaggaagtcttgatttagactatgccttaatcaaataaggagtggatttaaatacttctctctgtattactagatgaagaacttggttcctagctctttctttttcacttttctaacaatattttccatgtagtttgaattccattgatcttgaactcgctttcttttgttttcttcctttttccctcttttctttttgtaaaatatgaaccccatgatatttctgccatctttcctgtagtagtgcttttatctccaatttcaaggcgtcttttttagcagacatgaccctttttcttttcttcttttctttacctgttgtactgtcaacacaaggtttctttatnnnatatttttggacaattccctcatatatctctctggttgtatg

SEQ ID NO: 8133 - DNA, 590 bp, Gossypium hirsutum
agtttcctgatttatttaaattttaaacactgttatgtgccaatgaatattataagagtggtttttgataattcacgtatcccagttcccaaaattttatttctctgatcttcattagtaatttatgacattttttcgagttggttcatattattatttttaatagctgattaatgacatgtatttttagcgtcatgcacatgtcatacatcatgatccataaactatactcaaggtcattaaactattagtaatttatattttggtcaatcaacttcaaaacaattatgaaatgattattgaattatttaaaagtttttatttaagtcattgggctattaaaattgttgctatatgggcttctctattcgcatcgtctgtactaatttaaggcacttcttcctcttctcttgtacaatcaagtttttttttatgaaacagctttgtacgtcacgaatttgcaaattaacatctgaacaactttcttcttcgatttccgacattgattgtcagatcggttctaaggtatattcttctacttattaataggtgttgattcactatactaattgtcgaatcatcgcttggag

SEQ ID NO: 8134 - DNA, 602 bp, Gossypium hirsutum
  misc_feature (557)..(558): n is a, c, g, or t
  misc_feature (592)..(594): n is a, c, g, or t
gtgatagaggtatatagaacagaacaaggctttgccatagtgtgtcaatcattgtgatccagaagagttgtagattatacgcctcatgtctatgccccacgccatacagtttaggatactctaggagtgttttatgacttaaatccttgtcaagaatgccaacaacaatagtagggacagaggtatatatgacagaataaaatacactactccagtctgttaatgcagaagttgttgaaaaggctgtgcataatatgtacctacaacatacaaaataatgtaacgtgaaacccaaatccattaactacaaaattgcaggaaaagagagaacagcttaatatttcggttaatttggttggttttcgttgacgaaacaaaattaaccttcaacattttttcaatggataattctacatatccaaccaaaatatcagaacaaatcaaaatctagaagcacgatacaatggagatattaatcaccatcagatgttaaattaacacatactaaaagttgaaaacaaataaaatgaaggtataaaaacttaacaggactaatnntaactgacaaccaaaataacattcaaatatcaannntcttaaaa

SEQ ID NO: 8135 - DNA, 623 bp, Gossypium hirsutum
ggggtatgaacatgagcttagatttattcaggagacttataatttgtcttctagatctatggcaaaagaaatttggagacccccagaagctagagttattaagattaattttgatgcggcttttaaaagttcaaataaacgtgcaataacagcagccctagccagaaattcatcaggtgatatgataggagcagagacttatctctttgaggatgttgttgatgcctttgtggctgaagcaaggacatgtgaaagagtgttaatttttgcaggaataatggggctccgacatttgattgtggaaggcgattccctgacagtaatcaaaagtgtcaagaagcaagagaatgataaatcgattgttcggccgattataaaccatattactcttttggaaactcagtttgataatgtcacataccgttttgctccccggttggctaatgaagcggcgcacatattggcaatggaaggaagaaggtttcaacgatttgggttctgggttgaggaagtgaccgatgctgtgaagaagaaggcgatgaaggaccgcttggactggttccagagctcctacagtacattttgatctgctttgaaaactggagaaggttcacttgaatctc

SEQ ID NO: 8136 - DNA, 660 bp, Gossypium hirsutum
ttctatgccaaacaacattggcagtcaggggtctttgttacaggttagtcattgacttccccttaatcagtcttttcctaaacctacatgcaagtaaacctgaatgttttcttcaaataaggtgaaaggctatttgtgctcctcttggtgattattttcatctaaatgaatatctgattctgaaagagctacattcatatcaaagtctgtatgagctcaactttggactctcttagagcacactatctactctttgttacttaggtgattgcagcctccatatgttctcatcattctctttaaatggtgctaggagtaggataacgtaattatgagtaaaattcaaccattatagcctcaatattgcgatcattggcctagtgcaaaggccacatcaggatcctgttcttgataaattcttcatcctctccttttttaagtcattcatgggagacacattctattttaatcattttaattggattatacttatcagttgattctgatcctatgaaaagcattctgtatcatttctggttatgtttcttattttctgaagatcaaagtttatatgcaatagctttactcttctagtcttcttatgccaggctactggagcacaacttatcggtagatcagctgcatctccttctgctgcta

SEQ ID NO: 8137 - DNA, 672 bp, Gossypium hirsutum
tctcacctttttcatttttaccagaatccattaccttattagaatttctctcccccaaacttcagaaagagctctgctgctgtttgtcccagaatatgcactacatccaaaacagtgtaataacttcagctctgcactcatcatgtgatcccaagggtaaaaaactaactagaaactcaagttcaaaataaaggtggaccaaaatgcaaatctagttcatcccaaccaaacaatttaacgaccagaaaagcacattgttaagaagcagctaccgaaaacaacttcctgcaactatataaaataaaatgtaaatgaaactaagtagtaaactcacattattaaatatcgctttatcatttcaattgaggatggatgttttgcttggcaactgaaaaaaccatcatcatacaactttactgtggaaatacctaatatataccagcagtcgtaggtttcattaacctgaaagaggggactgattagatagatttacataaaattgcacttaaaaaatctggtctgcacatgatcataaggaacaaccggaacttgaaaaagctaccttaaacttatctttggtcaaccaagcagcaccaaagttaggtctgcaactaagcggaagagcttcattcggtgcctctgtaaaggcaagttgcgtctgacccaaagagt

SEQ ID NO: 8138 - DNA, 684 bp, Gossypium hirsutum
cggtatttcattgatatcctctagataatctcggataatatttgttttctgtagttcggttggatccaaaatacatagttttagaatcgagtcttcaaacattaaaatcgaagcatgaaacacgttggttcatttgtatatcacagagcaaatacctgaagaaacaaccccattgaattggagagcgattccggagccaaatcttctgatccataggcatggaagagcttggacaaacctaatccaacaagtccggctacatagtgacaatattcatcatagtcatcaactgtttcgacctgcgaaataaaaagacgagttcctgagttcaagtactggagaatacaaatacattcataagttttatcacgtatcgagcaaacttagtgtctaagttggataaatcagttcttttatatggtatgagacaatctagcagagatcaaccagtaataatacggaatatgaatagtcagcaccaagtaaatcatgattagaatatgaaaatatccacatcagtaaaacttattctggtttttagatagtttttgtcgaagggaaaacagcaaaatttgtcaaccaaaatataactgagtctttcgttccaacccctcaacgggatgacaaggataatacgtaacaaacctccttgcaaatatattttgccatccctgctcccattct

SEQ ID NO: 8139 - DNA, 673 bp, Gossypium hirsutum
tgctacctatcacaatataatcaaaatttctactcttgtcccgaaaatgacttaaatatgtgctgttcttatcaagcagctacctaatgtcctgagtatttgtctaattaagagtgcaggttacaggatttacattttggtgaaaaagtactttttgacctagctaaacaaattctcgtatcagagattctaaattcagaatctacttaatgtccagataaatttggctgattaaaaatgtacgttacaggattgatattttggtgaaatagtactttttgacctagctgttagcatcaaaagattttgtgaaaacaaattgttgtttcaaattctaaattgactgtctcatattatgttttgtgtcttcaaggtttcagtttcactgaaaaacctttttttccccagtgcctccgagcgaaggctacattttaacaaaaacatcaaaagcaacaatcacagaagggatgtttaagattcttatagaagggggttttcttgaactcaaaacaatttttttactgtcatgaagggaagttctttatgaataaggtaaggtagcaactgccaccgaacctctttagaaaagtgaaaagacagaagtaaagggaaactttaaagttggtgatctgcccccacatgaagaggtgagcacccaagaggtggagtaata

SEQ ID NO: 8140 - DNA, 625 bp, Gossypium hirsutum
tgaatattagaatgacataaaaaggttggaatgggaggtttgggtctaggaatcaccgatgggattccatttgcatttgcggaaatggtgggtaggtcatagaatttgcatggagatgaagaacatgaataacagagatgtcaattgagatgaaacatcaatcaccaacgtaattgaaatttccaatttggaatcacgttttcataaacgtcacttctccctttagagggaatgaatgaatattcaatccaatggcgtatggatgagagtatacatgatgtggtgtgtttttaaggaatcgaagctaataaacctccttgaaatgacattttctttttcttttttgtgatatcaaattgttgacctctcttcccaattaggcaatgaatcgattttgtttgtcaaattcactaaatatatcctccgtattcaatttttttttttaaatatttggatttattaaattaactcttctaaaattaaacagtggatataaatgactgaattcaaataagtccaatagtgattttgaatataaattcatatttgaatccaatataataaacaactatagccagtaccgcttcaactctttctttttttaaatacccattagttatgccgg

SEQ ID NO: 8141 - DNA, 630 bp, Gossypium hirsutum
caagaatcaaaccatcttcaggacaacaattcaagttgaaggatgcttctttgtaatatcaaagaaacattcataacaagaactttaaaagcattatatatgataccgtactttgtctagggagaaaactttcaagcaaaatgataacagggtaaaggaattggtgaccaaccaaattgaccaaagaattcttgatacgaaaagttgactatgatctttcattaagctggtaaagatttcttacaataactaggaggtgacaaccttgagcaatgtcaactcattaacaatttcttcttgtcaacactccattcactgctcaacaatatacagagaattgaagtagcagttttcgattttgttttccttttccaagtgaaggcttattccagataaaaaagaaaatgtaatgtgctatattttacagatgattttacaatactttgggaatagaggaaaaatgttcgatatcaaggcacaactataattgcaacaaccaagaattacaatgtcattatactagacatggtcaaaacagaaatagctcatcaacgaagttaagtgcctaatctatgtaataacacaaactaaccaagctaaatctttctggtaaatcagaaatgacgactc

SEQ ID NO: 8142 - DNA, 584 bp, Gossypium hirsutum
tcaaatcttgatgaggaattcaagctctgttgagaaacatgattcttgcatataaaggtcaggaaaattcatggaatcgtcatgcttcttcttcttcctcctctgatattaatgttaatttaggtttttcctcctccttttaatctttgttttagtagttattatcttcttcttaattttcggatgtatgggatctaagatttcttgaaatagttcttcattgttcatggtggtacaagtaatttctttttctatttaatactttaatgttgtataaaccttttgttgatgatatcaatcagggactggatctcagtgttactaacagatcaactagggttttcctctgtccacttttttagtctattaattttacatgaaattaaaacaaagccgtgcacagatacaaggaaaaggcttttaaagtaaacctttgcaggatatggaaacatggaattgtgttttcattgcattgttttcaggtgataatgaagaagtaaaaaaagcataattaagaggcaagggtctcctaaaaatttcatcaccgagggattcttgtcgttgggatggtgtctgtcataaaa

SEQ ID NO: 8143 - DNA, 582 bp, Gossypium hirsutum
  misc_feature (555)..(555): n is a, c, g, or t
aaaaaggctagcctcccaatgcatttcaaatattttattcgcattgattatgatatagctatcaaccagtatttgacatgtgtcttcatctatcactgaagaacagctttgatctctggaattgttgttaaagagtataaattagaggttatggtcaagcctttcatctgaccctttaactcattgcattatgtatatttgttttcttgaaaattgaaacttcggaatcagatttctggtttttacttcctatatacattttctcagattgatttggcttcagcttattgtctgctgctaatggaacttggtcgtggattattattcatttggattttggcaattctttcctttcatcattgttcaagcaatgcaaatgcaagatatcattaccacaagaagcataaacccaaaggctcccatgggaagtcacctgttcatgtccctgctcctcccaaaaaccctgaccctccatctattccttcagacccttatcccaatgatcccggggatacaacaggcagcatcttcgacgtcacttcttacggtgcggtnggggacggtgttcagagacacgcagca

SEQ ID NO: 8144 - DNA, 521 bp, Gossypium hirsutum
tgtgcctttgcttcagctttcctttgagactttgccttcatctgaggataaaagtaatagtaacgtgtaagcatttgttttactatgagtttaactcataccctttactgaatggttgcatgtatatgttgtgtcatccggactagaatatgacggatataaacagtaaaagtaccatggagacccttgtataaaaagcctgattgcattttgcccctttcactaaaaaaaaatgggcaaattaatccatttacattaaatcaaagagcaaattagtcctttcaattaaaaattccatccgtttctagtgctaaaaactgtcattgctgatagaataatcaaacaattacatgcggcatgccacgtgtgcctcattctgacatatagtgaccaagttttaatagttgagatggatgaattttttaacagaaagaccagtttgctctttgatcaaatgtatattgattaatttgcccattttttgagtagtagaggtaaactgcaatctgactcttagtaca

SEQ ID NO: 8145 - DNA, 632 bp, Gossypium hirsutum
  misc_feature (592)..(594): n is a, c, g, or t
  misc_feature (599)..(600): n is a, c, g, or t
  misc_feature (618)..(628): n is a, c, g, or t
atcttagactaatttgtttagtaagggtactgttataagttactgttgtctttatcaattgtgtttctgattgctacatacaatgcagccactttttcctggtgaaagtggggtcgaccaacttgttgaaatcattaaggtgattgcatctatcattctttgtatatttttttggagcactaacttttactgcatgattaatatatcagttacttttgacaattgctgtgctggaaaaatcagttgaagcttatgatatctcgacaataaaccataggttgataatttattaggcttacttgtgcttcaactcggttatattaagaatgaaattaaatgtactcttgggatgctttgataaacacggtagataacttgacgttttctgacttacaaatgagtttatatgtgtcccttaattcttccttatcatgaatagaagataatttgggccaaaagtttaggatttgagtatctcaagttctgctgaatgaagtctgcaacaaaacaatttctttggtgccttatgctggccctctctccattgtttttgacacaatgttcggaaacatgtacatcaaagtttccctannnatgtnnttatattgtgtgtgtgannnnnnnnnnngaca

SEQ ID NO: 8146 - DNA, 421 bp, Gossypium hirsutum
  misc_feature (53)..(54): n is a, c, g, or t
cgctgtgattatatcttcaagatcatgaaagaatctgaaatgggcagataggnnagagacaaacagctcatattagataccacaagggcctttataactatggactattgttgccatgagcatttcttaccttaagtaacaaaagcaaaataacagaggcagaaatcatgtagatctcagagggctcaagtctagaactctaatcagcaccatctaattgcaattagcttgaaaaattcttccaaatgattccataacaaaaagtggttcaaaagccaagctttgccaatcgcacatacctctttcaggtgctgaaaaatctgttggactgaaggcttctctaaatccttctctaaagcatctaacaatctagcaacttggaatctccaagagaatctagctaatgcccgctcaagatcac

SEQ ID NO: 8147 - DNA, 633 bp, Gossypium hirsutum
ggtgtgaatcatacaaatggttagtgaatgcttatccctttaatcaagatgagattaaaattttggagtgtcaaacatataatactgtttgaaaagttcagaattggaacagactgctgctttaaagtatctgtatggatggttacgtcatcacccaaagtgttacttgatccatctttgtaaccttaggctgctaaaaagattctccaaataacatgttgcacctagttggaccttagaagacaaactagctcttctattaagctccatgtaattagttatttgatttgttgaagctatttgttaatttacatatacccttgatcatctctttcaaaatgccttttttaatgcattcagatcttgcatatgcagtttgatttgtttagcctctgttactgagattgtccatttaaaattatttgatgataaacttccctttgcctgtggtggccatattttcagcactattgaatttagtcatttggtctatgtctggatctttaggcactagctttgaagccaaactatatgcgtgcttgaccaaacatgggtatcatttacgctatgtctggatctttaggcactagctttgaagccaaactatgtgcgtgcttgagcaaacatgggtat

SEQ ID NO: 8148 - DNA, 670 bp, Gossypium hirsutum
  misc_feature (583)..(583): n is a, c, g, or t
  misc_feature (667)..(667): n is a, c, g, or t
gttcattcagaaagtaagggtaaaaagtgtagacaaatctaacaacgccagcatctaaaagatatcataagaactgacctttgcaactacatagagacaacaaaggatgatctggtcaatatgatggttaaaaaacagagaagtccgctggctaagtatttgttgaaaaagaaaatatacactctccctaatctcttgagacagttgtagcctctcaaccataccattaatccagacagcagccaacttattaatctagacagtgcaaaagcaactgacatgttagtgacggagcagagtgataactgaatctaaatcaatagcaaaagttggtgcatattggcaatctggcaccaaaatatatcaagggatatttacatttgcaatgggtgctaataggccaactttttgtgatgatacacgtaaccgtaaggcacaacatagtgatgcaggacttaaacaaatagatgaaacttgaaagcctaattcatctatattttgataccttactaaagaatatattaattcctgtttcggcacatgtttctcctccaccaacagggttagggcgtgttggactgcnaaacaagtacacgaaaataaaatccataagcaagtgctaatagtgtaggtttttctacttccctttgaacttgcaccatacaanata

SEQ ID NO: 8149 - DNA, 587 bp, Gossypium hirsutum
gttcagcaggtctacaatctgcttagcttcgacactcatcaattgcatcatatcatttccgacttaatctttgtgtagtcattatatatttaacaagcagtgaatgaaaatttgatgaattaggattttgaaagttctcacatagcccaaagtttatagcatgatttgtttgtgtgacaatttaatagcagcatacagcctttatggttggagcctacttcctccattcttaagcttgcgatgagacgagattttatgtaatgttggtccttcatctctgcgagataggactctgtaaaaacagttcaacatgaagttcacagttggagaagcagatgatttcttggaggtttcctcacagctgttatgggtctagcacactgagtcaatgtcggagaatagcattgaactggttagactaggaatcggtatgaacgggttgaattggaattttttttaatattttttaattaaattagctggaccattgatttaattggcttaatcatcaattcggttttaaaaatatttatattttatattttaaattatatgttagtatgcaattgaaaattcctagatccgga

SEQ ID NO: 8150 - DNA, 601 bp, Gossypium hirsutum
  misc_feature (596)..(598): n is a, c, g, or t
atctttctgtaggccagctgctctggcaaagtacactgcctcgatctctttgccgttctttactagttcatcaataatatctaaaagttcagaaacaattcaatcaatgaggtgctatttacttcagttcccagaaaatgatgataagcataatccacattcatctttaagtgatatcaatcacataatccacaaaattcgggtttttcttgaaagtgtttgtgatttgcttaagaaataagaaaaagaaccacttcaaaactaccaaatcagaagattgtgcctcatcttacaaaattctaggcaaagatttgatgtcttacattccaaatatattggcctaaaataaattacaagagtgctgaagccagtcctagtgtgcatgagttgtcactatatcagcacataaatcgaggcactgcatggctgacatacatttttggtttttgacacacgcattcttattatagagaaatgcagggcaatcacttattccaaaatccatcagcgcaaacacaagcatgcatatatatatatatgctacctagtaatacaagtggaatgtgctgaaattcaatttctgacactcttctacnnntac

SEQ ID NO: 8151 - DNA, 397 bp, Gossypium hirsutum
atgaggccccatctaaggaattactccaaaacaactcctcctactcatctgtaaatagtgacatgtatcatgtgtagctcatcttaatacgcagagatcattttttaataataaaaataattaaaattaacatataaaaattaatttagaaaaaacaaaatccaaaccaacttttaatacaacaaaaaacttccgtcatatttttacctcaatcattccctcatagctgcctttccctttaagccacttcatctcttccaatatttccttaaattttctcttttcagtaaccgttgacttgttacactctgtgtcaccgtataaaaagagaccgttttccgatgggggttttactgtgttaaagtataatgatgcaaaagaacgttgactttttttt

SEQ ID NO: 8152 - DNA, 591 bp, Gossypium hirsutum
  misc_feature (405)..(405): n is a, c, g, or t
  misc_feature (424)..(425): n is a, c, g, or t
  misc_feature (456)..(459): n is a, c, g, or t
  misc_feature (464)..(466): n is a, c, g, or t
  misc_feature (469)..(471): n is a, c, g, or t
  misc_feature (474)..(477): n is a, c, g, or t
  misc_feature (482)..(485): n is a, c, g, or t
  misc_feature (487)..(491): n is a, c, g, or t
  misc_feature (508)..(510): n is a, c, g, or t
  misc_feature (512)..(514): n is a, c, g, or t
  misc_feature (516)..(516): n is a, c, g, or t
  misc_feature (523)..(523): n is a, c, g, or t
  misc_feature (525)..(526): n is a, c, g, or t
  misc_feature (533)..(537): n is a, c, g, or t
  misc_feature (541)..(550): n is a, c, g, or t
  misc_feature (554)..(558): n is a, c, g, or t
  misc_feature (564)..(566): n is a, c, g, or t
  misc_feature (569)..(572): n is a, c, g, or t
  misc_feature (576)..(576): n is a, c, g, or t
  misc_feature (581)..(585): n is a, c, g, or t
attgcctaattgcattcaccaatagtagattcaacaaagacattagtctcaatgcaattgcttttctacgtttctgtgccacaaagcttgcagaaggggatcttggctcctcgtcaaaaaataaggacaacgagtttgggaagatttctccatcttcatctaacaagggaaaagatggaacacaagataatggagtgctagtggataaggatgaccatctctatttctggttcccgttgttggctggtacggaataatgaactagttgtttttatatcacaatgcatttgaaattgcttgagtttttgaagttgcttatatccttatattttacatgtgctctgtgctctaattgtgtctcatttttctatccacgtgtttctcaaatctcctttttgatccggngacaaattttaagaagagnnttttacgtgtggtgtgtgactttttacagannnntgctnnnctnnnctnnnnatttnnnngnnnnngggtgtgagactgtgtnnntnnntntatatgngnntatgcgnnnnntgcnnnnnnnnnntcgnnnnnagtctnnngtnnnngggnttgtnnnnntgattt

SEQ ID NO: 8153 - DNA, 517 bp, Gossypium hirsutum
  misc_feature (13)..(13): n is a, c, g, or t
gctttacagaganaaaataaataaaaacaaactttttatgattattgatgcctaataatagatatccatttaagaaaaaacaaatttctagaaatggcaataaaagctaaaatgcagattggtttcctttttttctttctttttggatgaatttaaattaaatagataaatatctcgaattaaaaaaaaatttgcaggggtttgaaagaaccgaaaagaaatcaaataaagagagaataatggggaagaataacagcctttttttgcttgtctcaattgattgttattcctttttttttaaatatggaatttaattgtgggaataaacaattatttaataatattaatctaaatatcaaagtaatcttcttctttttttttgaatgaaaatatcaaagtatttgataaatataaattcaagtatttaattatggaaccgtttatccctaactttttttttctttagcagttatccgtgaatcccttttcctggccctttccctggacaaaaaaaacc

SEQ ID NO: 8154 - DNA, 640 bp, Gossypium hirsutum
  misc_feature (627)..(630): n is a, c, g, or t
caaaggattaggcctatcgggctctattagttgttgggccattgagtattgggctaggattaattcggttttgagttttaaatttgagtttgggtttgaaattgggatatgtaatttgaacttgtggacatttaatttggtttaatttttatttattttttaaattttggtttttagttgttgggcccgggcagatttggcccattacaaagtcataaatgtaacataggcttacatattgatcggtgtttaattaactgttaactcaggttgatttctgaaaaatatcaatagcacaaaaccaaaaatctaaagcaataggtttatctctctgaatattatcagtctgtaaagaataaatatcagtatcaaaaataggcaaaagaaacgtgggagagacatcgagataaggtcactcttacgagctcgtgagccgtcttaaccattcgtttagtccaccgaaaggagtcaaacagtcttgaagaacaagcctaaattcagataagtcatgccgtgaagagttatacgctctataacatccccacaatccgattcgaaaattacctttctaaaatttagtgttctcaaccaagagagagtctctcgtatggtcaccaattcagccannnngtaccaccca

SEQ ID NO: 8155 - DNA, 653 bp, Gossypium hirsutum
aagctgattataatgagaatagggaaattatgctgatattgttagtttagttgatttgagtacttatccaatagcacgtggtaagcaccaaataccctgacctgtattgggtaactcctataaccaactttagtgaccaaaaaagtaaaactatggacaaggaaatctattgtcaattattagatatctgtctcgctagaatttgcatgtctgggattccagttccttactccctcactagccgcttttaacgttttaccatgttagctactaatatcattagacagacaacgtattcagtattcactcataaataactcagaaactacaatagcttgctcaagtatcattataatagaacttttaaataagaattacagtagtgataaattccgcctaattattcgattggaaactgctctcttctgccatgtatagatgataaaagaaagaaaaggaaaccagtaaattttatacattgatttctgagtgtttggtgtcttcactcttagtcccttaattaattctatgcgtaattgctattttccagtatttatattttctttacgaaaacattgttgtcaacatgaaattccagaatcgtaattcctatcctttaaagttttttggataatttttaaaccataaagcct

SEQ ID NO: 8156 - DNA, 363 bp, Gossypium hirsutum
ttcggtagctttatcaactatagtcgtgtcagttggtcacaaaataagaaaatgtacaaatacagaaactaattttgaaaggtagaattgataactagattgtaagccaaaaagtactatagataacttttaattcgcttattaaagtgaaaaggtcgttgtagtatagtggtaagtattcccgcctgtcacgcgggtgacccgggttcgatccccggcaacggcgtaaaagttttcattttgttttttaaaaatgaaacgaactttattctatatgaatggcttcgcccggactcgaaccgtagacattcagtgtgttagactcacgtgataaccaactacaccacgaaaccactttgagaa

SEQ ID NO: 8157 - DNA, 530 bp, Gossypium hirsutum
  misc_feature (477)..(479): n is a, c, g, or t
ctattctgtttgtatttatggcaggctaactggacgtatgtttttactttttaggggctctaggtgatcatgttgggtagggagctgtggtgttgcaattgggaagtatttaatcttctcttacccctcaaggtccctggttttaatattattattattttttggggagggtgtggaattagaaaaagttaagaaccctagtgacgctacaaggttgaaatcttgagattcctagttgtagtaggagttgtgtattttatttatgttagtgtaattttattttgttttgttttttttttcttctggattcacaaacgaaacaactcagtctctgtttcagaaatcatcatactttttaagttgagacatccaaggggttttatactcttatcttgtctttgtctccaaggattactgtttgtttattgcctactttagctagtctctggatgggatcgcatgggagagcgttgcaannncaactttccaccgactctatatgcatagacatagcccattctaagggatgg

SEQ ID NO: 8158 - DNA, 627 bp, Gossypium hirsutum
gatgcatttgacataaagcaacaagaattaaatgaaagtctattatttcacttactgtgtgtctagaatgcaataatataatttattatattctactaataatcacaagaatagcattctcctatattcagttcaaatgtcggtagaagatttattactttctgatcccttttaaatatttgattctttctgtttaacctttgatgcgtgcatagataaaactaacagcgaagtgagagatgcaactgtaaattttctgcttcaagggttagcattatggtttctctacatggagttttccttcagggtttccaattcccctttctgttgtaaatgtttcttttagtgtaccaacattaactttgtcttcagctccatattaagtgaattgctgttttaaatatataatttgtttgtatttgtaggttacggacataaagcgcctgaataacatgatgagtgaccatgggatttattccagagagaggctattgatccctgtaagcaatccagacattcttataaatggaacatgttatatagagttggacacctacgcaaagcgtgaagtggcagtgctgtatcttgatggcaagcctgagagtaagcctggaacattgttgaata

SEQ ID NO: 8159 - DNA, 676 bp, Gossypium hirsutum
agattggtgattctctgtgctcataattcttctctaaactatgacgtccaaacacattgttttcgtctctgccttcaaatgtaaccagctgatgctctacttcgttttcatgatgccttttttctcccctcaagataattctctcctccttttgatttgcaatgaattcaaacaaacaagctgttagaaattaatttggtctttttacttgaaaatttttaaaattcttgtaaggacgcctccaaaatttttgaaaattctttaaaaattttagttaggcccccaaaatttataaatttctcattaaacctttcaaaacttttaattagatgtctccatttttttttctgtcaattctcattaactttttaaaaattttgaaagttttaattagaactaccaaaatttttaagcatcttaattaaactttcaaattatttgaaaattctagttaggcccccaaaatcttaacgccaaaatcctttagtgagctcaattgtgaattctattaaatttattggtgtgacattttaaaataaaaaatacacacttgataattgtaataggccaatttagctcgggctcacaaaaaataataaacctaaaataataaaacaaagtccaagtccagtctaaaattgtatcatttggcccgatcggaatgacccattacttg

SEQ ID NO: 8160 - DNA, 573 bp, Gossypium hirsutum
  misc_feature (54)..(54): n is a, c, g, or t
  misc_feature (475)..(476): n is a, c, g, or t
  misc_feature (519)..(520): n is a, c, g, or t
  misc_feature (547)..(549): n is a, c, g, or t
agcttttcctgtgggatatatttggaaccacaaacaattaattagaagaaccangtataaaaagaacaaatcaaagtcaatttaagaatgggagaaaccaaaagaacagccttgataccaaaaaatgaaaaaaaatgttgataattgaaatttattggccatcaccccagaaggcgtgtccatatatgaaatttaagacaaatctaaattttaatgaaaagaaggcctacacaacgcattctagtagtaaatgacagaatattcaaaactcagtgcataaggaaaaatgtacattagccatgaaggattccatactaaaggaacgagaacaataagcaaaagagtaacaataacatatacagtcattcattcagcaacctggagtaaaccctgggtagtacatggagcatatgagagtgattcaacagtccattcccgaacatttttttggtataaagaacggacagctgcttcnncaagcaggatcattgacaacagaagttgtctcattttcaaaannaaaaagcaaggaatccaaacaagatgnnnccacaaaacctgcacatatcaatc

SEQ ID NO: 8161 - DNA, 641 bp, Gossypium hirsutum
actgtaattgtacttttaaatccttacatgaaaacagctagtttttttatttgcattataatgttcataaaaatatgcattaaactctcgttgttaagtataacagtagctaccaatagaacgtttcctctcaatttatcactttatcctagtgattctctctcaaaatgttacttattgcctgtctaattattaataatcatcatcttcgtcttctctgggtcctaggaatctccttgctatagctgcaacagcaccaagaaacagaaagataacgaatgtgttgaatccactttcaacaccaattgcaacactaggaccaggaacaaagaaggaaaatggagaccaactccatccccagccaccgaaatcaaatccataacctccaactagaggtgggcgcctggtggatttatatatttattggtcctggataaacattagctcaagctcaagcattagcaaactcggatcctagtttgatgacgaagctaaagctaaaatgaaattaacacttttcacatttcatttagaacatttgggttcatgaacattgatatgaagctaaaatgaaatcctactggtgaatgaattacctggaattgctattggttcttggggctaagagcggagctgatgac

SEQ ID NO: 8162 - DNA, 632 bp, Gossypium hirsutum
gataaaccgaatgtgttattagttcaacttattatattgtatgattcaaatataactttaaatccaattcatttacaagcatagaatcaaaattatatatataaaaaaaaacaacaaaaatgaaataaatattggggtaacaaaataaagaaaataactatcactcatcgatgcgaagttgaagctcttctagttttactgattaagtgtcaaatgcattagtcttattcgacttattcaagtttggaacccattccagaacacgagatgatttggaaaaagttacgagacccaaaaatctaaattaaagtaaaaaatcaaacttagttgaaatctaagtaaacttaagctctatcaaacccgactcaacttgccttctaccttcttatttttatatatattaactcataacaaataaaattaaatatataattctataatatagaaattaaaaataacataatttgagataaattataagatacttgatatgtcagaaaaatttaagatacaaattttaagtaaaacagagtttgataaaatataaaatattctaatataatatatataaactctgacgtaagaataattttagtgtgcatcggctagaaaactatgcagtatgaacggca

SEQ ID NO: 8163 - DNA, 628 bp, Gossypium hirsutum
gataaacttatctctatttttccgttcagtttctccatattaattttaagcatttctttttgaagtcaagtagattttgttttgactccaatatctaactaatatgtgtgcatatacttttatatgtatacatacacatgctctcatatgtatatattagttcaattgatttgttgcttttttaggttattctcttgatattctggctcgaattcctttgtggaggtatggtcttgattatcgacatggtactggtcatggaattgggtcttacctaaatgttcatgaaggttagcaatgaactacaattgcttggtgaagttagggttccattaatggaacttttcacttaactttggtttttccttgttgaactacttggaacagggccacatcaaattagtttcagaccacaggctcgtaatgtgccacttcaagtttccatgacagtaacagatggttagtattgtttatcctatctcaactctcagctccgttaactgtcattctacttgacaatcgacttgactcttgacttatatcgtgtcaactcttcactacacgcttcacttcccgtacttaatgctttactgcctggtttactgcaagcttaacttaaaacttaaaa

SEQ ID NO: 8164 - DNA, 627 bp, Gossypium hirsutum
  misc_feature (621)..(624): n is a, c, g, or t
tatgcatccatatattaaatacatctgccatgtgaatttgaatgtctagacatttctttctctccaggtagttatatatatatataagacctcaaccctacttaacaaagtaacccattttcatatgtagagataaaataatgcctgaacccaaggcttgcgtagagcttcctgtatttgacgtctcccagcccttgagtccatcctccctttcctccctctatctagcctgtactcaatggggattcttccgcataaccaatcatggagtccccaaacatcttttcaccaatctctattccctctcaaatcatatcttcagtctccccattggctccaaactcaaggtcggtccagcttcctccttaaaaacctacacccctcctttcatcgcttcccctttctacgagagtcttcttgtgtccggacccgacttcttttcttctgcacaaagttcagtggatgttcttttcgaccacccaaagtccgacttcaggtagtatttatagtcaccatatatatatgtgcttctcgttttatcaaaatgcatgggaaggggtcatgtgtgtgtttttttgcttgtttttgctagagaggtattgtataaatatgggaacatannnncac

SEQ ID NO: 8165 - DNA, 630 bp, Gossypium hirsutum
ttgatttattgaggataaataggaaggaaatttttttaggggagagacaagagaaacaaagttttactgtcagctaaggtactttcaaacttaacaaatatcatgataataagttaataaatatgtattaattgctaatttttccccaacaaagggtcaagattatttgaaccacaagttaaatgatataaaaatgtatattcaagtcttcaattaataattgtttcgagtttaatccttaaacaatttcaaatcttcgactcattttaaaaaaacttttcatacctataatttacatctcctagggctagagctttctttccttaaaatcactaacaaaattattacatgttaagctcaacttctaaattttcttaagcaagaattagaattatgttattctcaagtgtgctatttgttcaccgaaattgtttttcaaataaaaatatataacaaaaatatgttactgttttattttcacttccgcacgaattacatcccttaatctttgtcaaaaaaaattttaaaatatttacttattaaaatagattcaatcaaatctttaaccaataaaaatcacatatcaaaattaaaattcgaatcaaaatgatggatgaatggcacaggctg

SEQ ID NO: 8166 - DNA, 648 bp, Gossypium hirsutum
tgtttaagaagtcccactccactctgtcaaatcctttactcatatcaagtttaacagccatgtacctttttttccccaatctcttctgtttcaacttgtgcaatatttcataggctaatagcacattatctgaaatcagccgacctggcacaaaggcactttgcgtctcatcaatacattttccaataacttcactcaatctatttgcaatagcctttgcaatgattttatagagaatattacataggctaattggcctgaattgtgacatattagatggatgaggaatttttgggataagtactatatttgtagaattaattgaacttacctccctaccgccgtttaatatctgtaagcaaaaagtggtaacatcatcttcgattgtttgccaacacttttgataaaagagggctgggaagccatcttttcctggtgcctttgttggtcccgtggcaaaaattgcttccataatttcctctttggtatatactgttgccaactttcgattgtcttcctcatgaatacaccgttcaatcccttttaatatgcgatcatactcccccttccttctgttgaaaatagcttcttgaagtaagaccgtgttataccttccatgtcttgcaagtcccccatctctcttccata

SEQ ID NO: 8167 - DNA, 658 bp, Gossypium hirsutum
tctctcctcttttcccccttgttagttttaatttattcgcttaataatttttctcaatagagtttagtttatcattctgttaatacaatcaatgttcatagaattcaggaattcttttatggtttatttggctctaaagaaatccttagagtaagacggttttgtagttcgggattagttgattacagttttgtgattcaagacttcgacgacaaaatactcccagaagatattttactttttattttgctttatgcttgcatatcccagggattcttcaatgaaaatataaaattagtcatccaaaattttattattgagttggtaaatgacttgctatgtatagtacattggcttttggcttttacttgactttctttttagagctagttttgattttatttcttggcacctcagctggcagattttgtgagaattccactggagagagcaggtggaatgatcaaccttatagatgcctattgtctcttcaatcgtgctcgtggcacaggtttggtttaacgctaacttcatctcttgtggtcattgtatttaggtttgtttagttacgttgtgaacttgaaatttcttaatctaatttttgttgttgaaaatattatgacctacaaaataagtgttttggccaacgtagttctcc

SEQ ID NO: 8168 - DNA, 622 bp, Gossypium hirsutum
atttactgtcagagcattattgactcggtattgtgtttgctattatacattttattctttctttcatttttaagtctgcatgattattcaagaaggcttctcttttagtttgtgctttggatatcatcgcatatagctctaaataatggatgaattttagaagaagttttcaaacaatttcagcaatttgagattcaactcattttcaaaaatactttagctcaagtaataaactatatcattttggctttgccatgattaaattagctcttccacccttgaagggctttccccttagatatctagtcttgcatctttaattatcttgctcctgaactactaaaaaggaatttcagtttttcatatacatgtttcttgaaaacaagggatttgctttaatctaaacaactattggaaaaagatttttagctgcatccccctttctaaacatgatatatatattgacgtctaaacatgatagcttagcaaattggtttggttataagttaaatgataacgacttagttgagtaaattacataaagatttaataaaatagtaaaataacataagaatgagttacttgttgtttcccttcatatgtattagggttttgccacatg

SEQ ID NO: 8169 - DNA, 625 bp, Gossypium hirsutum
attcgtaacagcagttgaatctcttcattcaatcatcaattacaaccaaaggaagctcctcttataccttcatttccttccttatgtttcagaggacctagacatgcaatttttatctgcctctttctcatttttgcagtaaaaactttaaatcttttgaatgctcctcttatcataacctttgattccctttaaatttatttcttctaagattcgttttccacactttcccctttcttatgtttatgtttgaatcctttctaggtacatacatggtcaatggatgctaatcaatttgtagctgatgaggatgatgtcacttatagctgccgtgtgtctggtaagtagcttgtacgttggtaacttgtgatcggatatttctattggcacccagactaattggaattccttagtgctgttatatatggatgttgtgtttctcttgaagcatgtattccatgcatctatgtgtttactaggacattcttttggtcatggtggaaaccgatagtttgtcctttttccatattaagtgaaaatggttcaaatgatgatagcacctttagaatatctgttgcaaagaacctgactccaggaaattcatcatgtaaactatgtgatagga

SEQ ID NO: 8170 - DNA, 607 bp, Gossypium hirsutum
  misc_feature (588)..(588): n is a, c, g, or t
cctgcaacccgacctgaatcccaccgacccagctctgtttgtgattataaaaaatcaacaatttaaactcatacaacccaaacctaaagctgaaatgaacttgaaatgactcaaaatgacgtgaacctgaaatgattagaatccaaaatgacttgaacctgcaatgattcgatcagaaaaactcgaccctcaaatctaaatgaaccaaacccaaaataagttttgctcaaaatgactttgtctaaattgatgagacccaaaatcaactcaacccgctcaattgataagtccagttgtgtgtgattttagtaagaggtaagttgattggattgttcgtagtggtataaagtatgaccaacaattctttacgactagaaataaacctaaatatatgattggattgtctatagtggtgaaaagctggttgagctttatcttagttagtatagttgctattgcagcaatcaagaaaatgtgggttcaaatacacttaagctcgtttttcctcccattgaagagttgcaaggggttattcatgttttatttttaaagataaatttattaatattcaagctatgatgtttcaangggtaccatatcctggttt

SEQ ID NO: 8171 - DNA, 600 bp, Gossypium hirsutum
ataagctacgtttaggttagggccaacaccatgtgctggcactattaaataagctttgaaatagtttaatcaaatttatgacctcaagtgaatgaaaataactcattggaatctcttttccatggaaatggttatcccaagtggcattgattaaccacaactccacacttattcataagattagatttctaatcattagggggttctaaatttggaggggggaagggtggaattgatgacagctgcttaagtgcctccatgctcatctcaaaccaaataacatattcttttttgttcataaatttgccttctatatatatatatataaattaatgggttggatttataaaaagaaaagcattcatgaaccaggatttcctcatcggaaaacataattttggaacaagtcttgtttcaattcaaagttagatgttaatattgacaatgaaaccgtggaaatgactaattaatggcataactaaggattatgtaatacaaggacattaaataacagttatgaattaggttaacctaattctatcaatccgtatagactatatgtgtaagatgcagtgattcaaatagcagttataatattgt

SEQ ID NO: 8172 - DNA, 580 bp, Gossypium hirsutum
ttccacatctcaataagcattgtatctctcactagcatcttcacgagctaatacgcgtgttgagtcgagcaatggggtggcaccttaccatggaaactgaaagttggtgaagggtctgacccttaaacccactcggacttgtctctaacaggtgaaggcttgaagagagatgcatataccatttttagtgtttttttttaaatataattctttaccattgaacctcataattaggtctactttagtatctgtacttttttatctactttggtcttggaacttaacaattaaattcattttggtccctaaacttgaaaactgccaaaaattgagggtatgaccagtgctactggaacatggaccaaaatgaatttagttgtcaagttcagggaccaaagtaaacaaaaaaaagtacatgtaccaaagttaacctagttgccaagttagaaggccaagaattatattattcattttttttataactaaggtaaatttcatgcctgttttacgattcaaagagactaattcttttagggttcgtagctacctctctgaacaacatcgcctccaaagttaaagt

SEQ ID NO: 8173 - DNA, 700 bp, Gossypium hirsutum
  misc_feature (495)..(496): n is a, c, g, or t
  misc_feature (509)..(509): n is a, c, g, or t
  misc_feature (511)..(516): n is a, c, g, or t
  misc_feature (519)..(530): n is a, c, g, or t
  misc_feature (532)..(540): n is a, c, g, or t
  misc_feature (548)..(550): n is a, c, g, or t
  misc_feature (552)..(554): n is a, c, g, or t
  misc_feature (559)..(560): n is a, c, g, or t
  misc_feature (566)..(574): n is a, c, g, or t
  misc_feature (584)..(587): n is a, c, g, or t
  misc_feature (589)..(589): n is a, c, g, or t
  misc_feature (591)..(593): n is a, c, g, or t
  misc_feature (595)..(605): n is a, c, g, or t
  misc_feature (607)..(611): n is a, c, g, or t
  misc_feature (613)..(614): n is a, c, g, or t
  misc_feature (616)..(619): n is a, c, g, or t
  misc_feature (621)..(621): n is a, c, g, or t
  misc_feature (623)..(631): n is a, c, g, or t
  misc_feature (633)..(634): n is a, c, g, or t
  misc_feature (641)..(641): n is a, c, g, or t
  misc_feature (643)..(647): n is a, c, g, or t
  misc_feature (649)..(654): n is a, c, g, or t
  misc_feature (656)..(656): n is a, c, g, or t
  misc_feature (664)..(678): n is a, c, g, or t
  misc_feature (687)..(697): n is a, c, g, or t
atggttttgaaatcttatgctgccttcaagtttcttttgatgatgcttttcactaatttttggtgttgatcaggacatgttcagggaatgtcctgtatggaacttaagcagttaaccgtgtttaatgctttcctatctcacttttctatgtggccaaaccctctggatctgaaatcgttgtttaattctgagacattccacaaagttatataaaatagaggatgatagggttcttgaaaagatttaagtctaatggttaacactataatgtcctggcaatgtatggaataatcagaaatattttgaaggaagtatttttcataattacaaagcaattgaggaagaaataaacaaattttcttgttagttcaagaagctatgaatctgttagataattaatgattattcgaatagctttagttgtttcatggttattgcttaaattttatttttacatatatataagtgttttttttttttttttttttttttttnnaaaattggaattncnnnnnnggnnnnnnnnnnnngnnnnnnnnnagaaagtnnntnnnttaannaaaaannnnnnnnnatgcgccgannnngngnnntnnnnnnnnnnntnnnnngnnannnnangnnnnnnnnnanngcaaaantnnnnnannnnnntngtgagttnnnnnnnnnnnnnnngaaaatcannnnnnnnnnngat

SEQ ID NO: 8174 - DNA, 632 bp, Gossypium hirsutum
ttcctaatcaaggggggttaccccagcaaaatgggaacctgcttcagccttcccagatgcagaatttaggggttgctggaggtgtttctggtgttcttggcagtagtggtcctccacataatatgttgaatatggatcctgacctgatgagaacacgtgattacatgcggggagaaatgtaagattttgtataccaatagttttggtttctttttctgtgttgtattaaatgctggtatatgttatctgattcgttttgaattaaggagaaatttgaaatataatctgccttgggcattgaatgagtggtgtctgagtgctgtttaataccaatatttgtatgcttttcattgttttctttttgtgtgtctgcatatacaattgtacatgtttggggtttgcttttgctgctgaatgcttggttgccttttagtaacattcttttgttatgaatggtggcatttttgttttttttagttccataccagtgtaatttgcaccatttagttgagacttgagataatgtttgtatttgattttctgctactactaaatatgcttaaaatttaccatacaaaataactcaattgcatgaaggctgtaggatttagatgttgacatttcacataaat

SEQ ID NO: 8175 - DNA, 558 bp, Gossypium hirsutum
  misc_feature (428)..(428): n is a, c, g, or t
  misc_feature (462)..(468): n is a, c, g, or t
  misc_feature (486)..(487): n is a, c, g, or t
  misc_feature (489)..(491): n is a, c, g, or t
  misc_feature (494)..(497): n is a, c, g, or t
  misc_feature (499)..(502): n is a, c, g, or t
  misc_feature (506)..(510): n is a, c, g, or t
  misc_feature (512)..(513): n is a, c, g, or t
  misc_feature (515)..(518): n is a, c, g, or t
  misc_feature (521)..(523): n is a, c, g, or t
  misc_feature (536)..(537): n is a, c, g, or t
tataatggaagtccatatattaaaagctggattgaaatttgacctttatattaaaaaataacaaattattttttatacgttagattaaaaagtaaattggttcttctattaaaaatttaatctatttttattattaaaaatttacccatgtatgttagcatgagatacacatgacatgtcacatgttattgcctgattattttgttaaccgtgatagcttttaacagtataaagtaatgaaaatattaaaagaaaggaccaatttgctttttgacctaatgtacaagaaaactggtccttgtatgccaacatgaggtacacgtggcataccatgtgtcactgtcaagttattctgtcaggcacaccaatttttaacaatacaaagtgatgaaatttttaaaagaaaagttcaatatgctctttacctnaacatacatatattacttttgcataattaatgcnnnnnnntgcatgttacttttaccnnannntannnntnnnntatnnnnntnnannnncannnctatctcacactnnatatgtcttaaatttttcaaa

SEQ ID NO: 8176 - DNA, 600 bp, Gossypium hirsutum
gtggagcaatgcaaacattacaagaaaaagttcagattatgatttttggaactccgcggattataattgtacctttctccgaaggaggttgaacaacaacgtgcatcgtcgtcaacccaccgggaatatcacaaagagggctctggcactcccccagtgttttgttgttctccaatatttttcctgcactaattaacttgacatctttcactgtccttggaccattctccttctctgcacaaaactaaactagtacgattacatgcttggaacaactttaacacgattgaagcaaaataaagagcagagaaggctcgtcatataccagaatttgaaaagagaataaatagaaatttcaatggcattcaatcagaaaaaaaaaattctaagacttcccacatgctatcttgtatgacattggataagcgaaatgcaaggtaaaagaagagctagatgatagaatttagctcaaactacgctgtcagttggaccaagtaactgtagctcaataagccgacaatgtacaaaagttgcaaagcacctaagagtaagaatcgagaaagagagagagtgcaggatggaaaagcaggatcaacgaac

SEQ ID NO: 8177 - DNA, 471 bp, Gossypium hirsutum
ttgcttttttactcaaaattgggcaaattagtctttgtccgttagatcaaagggcagagtggttctttttgtgaaaaaattcattcgtttttattgttaaaatttagcgtggttgatgaattaaccaaacagttacacgtgtcacatgtaccatattctgacatacaagaaccagtttttaatagtggattggatgaaatttttaacagaaggattcgtttgatcttttatctaacgtgtaggtactaatttgccctttttttttagtagaaggggcaaaatgtaatctgactcctaatacaagggcttctatagtactttgaccgatatttttagatttaaggatatgaattgagctgtgttatgtttgattgttgccttgttgaacttttgtacggatcaatcacttttgctgaaatcttactttgactatagcatttgttatttcttttcgaatcgtatctgttaatc

SEQ ID NO: 8178 - DNA, 625 bp, Gossypium hirsutum
gattgtatggctatgccttacattgaaccaaacagggtggaagagtgtgggggcttgacatttacgtgattgatggggatttggatctttagctctttccaggctgcctttacttgaacactattgacttactcttattcaaccggccacatatcatacttatccacataaattaatacaaattactggcaaattacattaacggccactcaattttgatatagttaacaaaaagtcactctgattttaactcggttacttgacttttaaaaaataacaaatcagtcactaacattatcaaaaatcaatcataaattttctatcacaggcttaataggatctctaacgtgaccagttaattagctaatgtggccatgtagcttgccacgttggatgaggcaaagttgagtattttttttgtcatttatttttttaataaatgacctaatatttttaatgtttgcgtaaatgacctaatatgtttatactttttctccatcctaacactctattttcaaatatagtgatatgcttcactctaccatcaatatcttttgtctccttctttactttccaatatctctctatctagatttggtcatgccaaaacctaaaccacaacttt

SEQ ID NO: 8179 - DNA, 605 bp, Gossypium hirsutum
ttatctcttcgtcctgacatctttctctgctatattctcacaccttatgtcatcaacttcaagatcggaactgtcaaccaacaaatcaacaaccattaaaacacgattcattaactcaaacaacaataaaatcttgctttgtttgatgaataagacaaatagaagacaaaaccaaattctgaaagctttatctttgctccttttggatctacaataaacaaaaaccctcacctacactggtctacataaaatgtatttcgcatgaaactagaatctttttgttttaaactcagttcttaattacaattattctcctaccatagcaacgtcaataaaatttgagaaattctaatagtttagagggtctaccacaaaatcccttttacactatttactgatttcaaccacacccaatgttaaatcaaatcaaaccaaatcaatccaattaaggaaaaattaggtccaatttcttattcataaagaactcgcttccaaagttacaaacaatttaacttgctctaaacagatttacccattaatatttccttagatattacatgcataaagaaatcaaacaaaaccccaaaatccaatactccctaact

SEQ ID NO: 8180 - DNA, 430 bp, Gossypium hirsutum
ctactctcatggcagatttttctccgatacttgtatcatgtccatctgcgatacctgaagttggtgatttgggaaggcgagctaaaattgaaggacataatgaatctggttttacgagattagttgctatcgatacaaatagtactagccaaagaatggaggaaggtgccacggaatggcagttaaaaggaaagagaaaagtgagacaaataagtaaaattcataagcgcggcttgagaaaatatgtggacatggatgatgaatcaaaacactcgtatggtttttctcggggttctgatcagaaagttgaagaccagctcgatgggttccgggactgtaagtctatgtctcaggagcctcgagtgaaggggccgatagtggaggcaaaaatactacctggtcgttctatgactcctcgaaggtcacttct

SEQ ID NO: 8181 - DNA, 652 bp, Gossypium hirsutum
  misc_feature (644)..(644): n is a, c, g, or t
tgtttcaacagatatttaaacacttgtttggggatagtcttggtgtttttgttatgttaacgttttttacttggattttttaatgtgcgtgaatatcacaagcaaatgggcttagaggacatgttataacttgccacaaagtcatgatggatattgaaaccttttaaaaaaaattgtggatgagacttgtatttatcttttgtccttgtctttcacagatttatatgctgattttaagagattaatatagaagattatttaaatagattctcatgataaagttatgtttgtcttggactatgctgatcggctaaaattgtcatagacagatgattcccatgcatcaattgaaagactgttgtgctagttttgttattttcatttgtaacaaggcaggattcggtattgagggtaagttgaaatttaaccaatggatcagccatgtgcaaatccctatgtactttctttgtgacaaactgatttgttttctcaaataataataaagctcaggagaaagattgtatgttttttccccttatctttggtaacattaggtcacaagttgattgccacaccatgtaaattggtgaaaactagttaaaatatttaggcgatccccaccctttagttttaacccttgtacnaaaccact

SEQ ID NO: 8182 - DNA, 387 bp, Gossypium hirsutum
agtataaatcttcagtctcgactctaaactgcatttggatatcaacaacaaagaagcctttcaagtttcaaatggtagctccatatatcaaactgatcaagtcattaccggacttataatcactgcagttgcggagtgcaacgcaggaaaatgctacaccctgaatattaataagctaaagctgttcattgttccaggcgactagcaatatgcagagatttatcttacagagaacaaaaaggaactagaacaccaggtagtttgacaaagagaatagctcaatcctaacaattatgttcattactttttttatgcttttctacaaaggaaaacaattcaaacataaagatataaaggaaaacgaaaaccacaagaatttattcctca

SEQ ID NO: 8183 - DNA, 624 bp, Gossypium hirsutum
tggcatctttttttaatgaaagaatttctagatatttgttccaggccaagtgttgttctactgataggggggttagcttgatgccagcctgtttgttttttattacaggaatctcgtgtgccaacttgtaggtccatggaaagcaacgaaagggttttggggttattgttatcattggagagaaaacaagaaggaaggctgaacagaaggcgactcaaaatgagcgtagcagaagcgaaaaccctgcttgaaatttgtgaacgataaccacattatttagaagcagagaggccgctgacattatctctcactcacacacgtacgtgttccgtagcttgacatcgacaagttacaggatcatcatggattcatgttgaagcaatgaaccatttcctaagcaatctagttgattttatctaaataccaagaacacttcttaattctccttcattttctctgaattagctttttttaggtcatcatcattaaatttagattattgaaatatatggaatattataatattttaaatctaaattaaactaattatataattttaaaaatttgtatttgtacattcaatgtgacttggactgtatgccatgacttttttctcttcttctg

SEQ ID NO: 8184 - DNA, 601 bp, Gossypium hirsutum
cgtatatttcctttgctaagcacggaagtaatacgtgagagaaagaggagaaaggcgtgctcttgtgtataattcggagttgtttgttctgagaatggaaacattttgagctataaagtccattgaagtaagagtggtatcccagaaaagcccagtgctactagtttcccaagtctctttgagtggaacatattttgctcgacctcctaagtcttcatctgcctcatagtcgactccattaatagttgttgctcctccaccacaatttatatttactgaataccaatctataaagaatgaaaaaagaaaatacatttcgtgttgagtatgagaaaaccttactgtggaacatgtttctagagtctacagatttgcattaaaatgcaaaggaattacctttcgaacaaggcaagttcttcaggcagttatctggtcctctacatcacagtagtatgacaaagaagcatcagtcttgttgaagggtgatcaaaaggaaataaaatgagattttaaaaaaaaagcgtcgtagttttttttttcaataaaaaaaaaacttactagtttttgcctcctgaaaagctttgtatgaaatttctgatga

SEQ ID NO: 8185 - DNA, 602 bp, Gossypium hirsutum
aattaaaataaagataaaagacaaagacacgataaaaataataataactactcctatatgcaaatcctctttgaataagataaggttgctcgactttattgatgcaaagtttccaaagtacacttatctttttgtctttcttagcatacaattcaaaatataaattatatttaatatatttataaatatataaatatttctcattaattatttgaccatgaaatcattaaaaatataagcttttatatatttttaaaattttaattatatgaaaaaataatttagtaaaactcaatgtacagttaaaagtgacgtgggaattgcaatttcatgttacactttaatgttgataattaataatagactaaagttataaaataaaagaaaataaaaagtatataataaactaaaaagtaatgaaagaaaactcaaccatgtgtaagaggatgattaaaaattaaaaaataaaaaaacagaacaaataaagatattattacacgtagaatgacaatacctgaattactttttcattaccgtgttaatctcgtcgatgatagacaaagcatcaaatatagtaaatcatgaataaatggaccgaaaag

SEQ ID NO: 8186 - DNA, 610 bp, Gossypium hirsutum
attattgcgttttatctttctgtatcaaacaatgcatggagggtgtattaaacaagccttcagcaatgtttgcaacttgcgcttggctctagtgttaagagtggagtcaggttgtggtagagccacaaagatcctaggtttgagatgtagtgtgcacaaaaatttctacatttaacattatacatttctcagagaagcgaacttgtaaccaagaggagttatttaacataacacacagcattcttacataaactattaggtgcttgaaattgagttattgggttctcttagggggatataggacctactggttcaaaggggaaaaatatattcaattttgaccttcccatttattactaattggttgtaggttggattcttaaaatgttattagagctgaggttgtttgttgcttagtttgttatgcttgtactattgttttttgttaccgtgtttttactatctatgtggaaggctcatctagttgagtttgttatagttgggcttttgactttggtgcttttagagaaactagtcttctaattattggatggatgaaacagtaatctatgttactcggactcaagtttgagtatcagtcacggataag

SEQ ID NO: 8187 - DNA, 572 bp, Gossypium hirsutum
cactctcacgctttgaagataacatgattagtgtgtttttgattgcttaaaatttccaattttttatatgggaagagataaaacagaatcaaatgtttccaattttttgtagagggagatagtgagatatcttgggaatttgagttgttttacatcttttgagagccatgcttgtctcttgagagttgaaaagttggctgggaagcatgaggagaccgatgatgaattgatggatgaattggaggtgcaaccacgagacgatgtggatgatgaagagttcgagtcagattttgataatttgcttgattgatgaagagatcgaaaatttgtatagtgccagggatatagtcgtgaaaagaatgatcaaggatgagtactttaacatggataatcagaagtgggatgaaatgattaaggaagctgttcagcatggatatcttaaagacacaaatgagtgcgaggaaattctagaggacatgcttagttgggacaaactcctcccaggtttttcttgattttaatatcatatatgctcttttctatgtgaggctttctggctctattatactgga

SEQ ID NO: 8188 - DNA, 610 bp, Gossypium hirsutum
aaacttatcctatttttttaatttcaactttcatatgttcatattgggctcctccaaaatctgaagtcaaaatataaaagtgatcacttataatcattcccctatagaaaaataatactaataataatgatgattatagtatgttttaaagtaaaagtttctttttatttttacaatttctaatttttaagttgttgaaatgaagttctggttctgaaactgggggccatccctcggaaattttgatctgtttgtagcattattttgttgaaattgtggggggtgggggaccttataaattgtaggacaaagtgacgacttttcatcagaaatttggagatacgcaccattttttttgttagattcatgaaaatagcctttcactgtaccttatggccatgacagatatttggtacaccaaacctaaaataccttacaatggatccgattgaccaacttcttgatttacacattcattaccacctaaaacaaaataaagaaacatgttttgttgcatttcagaaacccgtgttgatttttcaaaacttccaactatcaaatttcttgaagtagaaatgctttgttaatgaaagatgatctttcaaaccca

SEQ ID NO: 8189 - DNA, 652 bp, Gossypium hirsutum
  misc_feature (649)..(649): n is a, c, g, or t
atcttgctgtgaatttgaaagaattggttgaaattctattaagaaaaaatctttgacagctagttaaaggttattcagaataaagagtatcaggagtacttcatatcactgattacatgtgtggtttctttagaattgacataattatagttgcattagtctatgttgcttcaatgctttattcttcttgaagtatgcatgtcgtaccacttatattccatgcttatttggacatggatgttgccctccctcaaaaaacatgaaaacacttcgaaatttgaacatacccgtgttcaacacatatttgtattagagactcataccttactccaagtaagataagcgctaggtattttggacccaaaagtattgggggattgtcaaccagtacaagatttgggaaactcacataacactgttagggcatcatactttcaaacaaggtgagtgtttcaaaactagagaaagctttggtgcttacttgatagcctcatatgccattgctgtgggctgagaaacagaaaggtttggaacatgatattgttatcgttcaatctattgtgactgcctatttgattccatatgaaggtagatcaatgaaattgttggtctaaaccttaaattccacattcatttgtttactgactgnctc

SEQ ID NO: 8190 - DNA, 432 bp, Gossypium hirsutum
  misc_feature (379)..(379): n is a, c, g, or t
  misc_feature (384)..(384): n is a, c, g, or t
  misc_feature (420)..(420): n is a, c, g, or t
aaaaaatttttatataaaaaaatcaaaaagaaaagaaaaagaagaaaagagaactcatcaaaatagggttttttacccttataatattaaaaaaatacctaaatggcatgttgattcaaatgggtggagggtgataattttttaattactaggtgtaccacttgattcagacacaatctcattaaaaaaaaaaggtataaggacattatgcctatttgatgggcggcaccagtgacccctatttgataggtggcattagtggtgcctatttgataggtggcacaactagtatccccccacactctcccatccggctcattttaaatatttattaaaatacctaaattttacatattgcttttaattacaaaaaaaaatnaaaangttttatccacatcatattttttgctatactacatnaacaaaataaat

SEQ ID NO: 8191 - DNA, 684 bp, Gossypium hirsutum
accgaacagtatgatatagaattaagagtacaaaaaactgagattgttacctcatcaaccccagggctcctatcaagcttgatttttctgtctggcccactccccatcaaggctgtacccaggaccgaaggctccatagccaattttaatattccttggtgaaatccactcacctttagaataaacagtcgactgtcactttcaacagttatccttagtaatacttagaaaataagctagaaaacttatgcaaatatatgcaaaatgacacattgactggtaccatcccattgaaaccacttgcttctgcccccttcaaaacagagtcagatatttcggtaacagcagcaaaaattacattagagcctgctgtttttagctgcagagttggcacagaaataacataggtaagtgcaaaggaagtagaaagaaaatcacattccttattgaaggtttatagaacttacagttttacccagatcaccaaagtagcgttttgttcccgagaaacctttaccatcaatacatctactgatgaatttaaaggtacctgtgcaaaatgaacaaagcagaaataaaatatctcaacttacaaacagccataatcaattatgataaaataaatatatctgaatctagaacctgaacttaatcacagaataagcatctacacataatcaggtg

SEQ ID NO: 8192 - DNA, 617 bp, Gossypium hirsutum
ttatttattttgaaacggtttgaattttgttttatgtttgaaaaaatttcggactggatattaaaataataaataagcagtatgtacataaaactgaataaaacccaaacccagtaatccaaaacttaagcggtcgacagccccaaccactaaaactaaagcccaaaaatatcagcccaaccgtaaaccctaaacccaagccccaagcctcacacccctggacccgaacccagatataccccgaatgggataaacatggccgggatatccttacgccggatatcccgaagcgggatatacctggaataggatatccctgcttggaataagaacgacaggtaatccggttcagacacgaaaaaaatctgaaccggctaccaaaacaactgaaccgtagactaaaaatatagaaccgggacaggatatgctgtgaatattttgggaatagcttattccgaatcgggatatgaggggaatatccgtcagtcagagaaagaacgaaaattaactagaagaagaaaaaaaatagatttttttaattaatttcctcgatagtcatccagttccagtcagtttcctaatgccccgagcttctctttgacgaaacgataccttct

SEQ ID NO: 8193 - DNA, 577 bp, Gossypium hirsutum
gcattgtgctctaaatttctcatagaaaaggaaagaaacaaaagagttcaatcaatttcactccccaactcccccatattgaaaagacgcaaattagaccatgtgtttaaacttatattattcggatttaagtgactatgaatattcaacataattattgaaaaatatcagggtacacgttttggaatcatatgttttcagagatctgttccaatagttttaaaaaagaaaagaattatgtaataattggaggatatgagagaataataataaaagagagaaaggagggtgtgtagtgtgatgccaatggcctagaaaatcaggtgacatgatatctcaagtttcaagaaaaaaaagatgaaatggaactattatgagtgatgaccaacatttcatgtgcaaaagcaaaagggaaagggacaatgagctgaggacaatattcacagtgaaatggctgagcagtgggtctcaccgcccatgcaaatctgtacctctccatatattgaaatgcagatcttgtctaacaaaggagagactaatgagtctgatccctttaggtcatggttggtaattacaa

SEQ ID NO: 8194 - DNA, 639 bp, Gossypium hirsutum
aacaaagctcgtcaacgagttgtttaagctgcctgtggataacgatacgaaaacaccaggaactcctgacccatttgatcaaaggctaagaacctcattcttgctatctgttttagtcttgttgattgtggttgtgagtcgagctaaaattacttgaattcgacgacatgacggattgtgtttagcttaatatgttttaagataatatatatggatattaggacatatttaagcattatgttattgtttcaaaggcattttattatagttcgtgattgttaagatgttgatgttctatctacaccgagtttaacatgctaccctgtcagcatcaccgagtgagctctgttaaaaatagctgacaggaaaatcgaggtgtaatttgacctctgtgagctttaaatttttaatagcctataagcttgcaccatttagtttagctgtcaacgttttgatctcaattatttaacaacagtatttaattgtccttgcaaagcattgcatgttcacagaaataattgctaatggaagcaccataaacctcacctcaaaacggtttacattaagaggggattgtatcttgcctcttttatttaaaagataggttaattagttcttacatgtggcataaagtatacg

SEQ ID NO: 8195 - DNA, 647 bp, Gossypium hirsutum
cctacacctttccctcacctgccataccaaattcagaacttttaatactcttgtctaatgttttcataaacaatagaggaaatgaaagaaacatcagtgattcattcgcgaaagatgagcatgatacggagaaataactaaaacgaataaatgcatgtgaaaagggcaaaaatggaggaacatttagtgcataccccttgccatgatgcctttccgcccaccggttgcccctgtcaaatgaagaaagaagctcttttgacatatactgtgcatatgaaatagtaacttatgttgctctaactcatcacttttctgtaagtatcagtgtccgatattcatgcctgacacatatccagtctatgatccttaaaaggaccttttgaaaacatggaaatcttagaaaaatttgaaaaatactcttgttgacactcacaactgagtctgagtaacataaatgtgtaacgattttttgtatacctggttcccgagagacggtacaccttgatgaacaatccactgagcatcaacaacacctattttctcatgagacggctgcttcggacaaagttgcagaatcaatgaaaggccttgagttaaaagcaatgccggaatgataaagacagtaactaacctctatgcatttccaa

SEQ ID NO: 8196 - DNA, 574 bp, Gossypium hirsutum
gcttgagttggcatcaaaatgtttctgttcatatcatgtattgcatttccagatattgtatgggaaagtccaacacaaaattttgctgtcccttgataaaacttggttaagattatgtattagtttctcatacgatacttgcaattggaggctataaatttacaaccgtgaaggggtcatatctcacgtctttgtttatatatattataatggcacggcggctggtcgaagataatgtggtttacaaagtctcagcaaatgtaaggcattgttagccaactctaacttagttggcttaatccctttggaccacattgatctttacattggatttaaaaaaaaaagattgaaaaaaataagagatttggtggatgttgtttttgcattgtaaatctcgattcatcaagagattggattttgattttggttaaaccatccatggaaaattagaaaataaaagttaaaaatttgtaatatttaaaccctaataccctatccaacaattagcgggtgtcaaaagcgacgacgacaacagccatattagggatattttggtcattaatcaattgacgca

SEQ ID NO: 8197 - DNA, 658 bp, Gossypium hirsutum
agtgtcctctaatccattaagagtatatagcctttataagaaggattctatgatgtgtataacagattttataacttttatggtacaattttcatatacgtcttcatacaaaaataataaacttaatttgctattacatcaaaatttaattgaaatatttggcttgacgtgtttcatagagaattttttaattcaataatagatatataactatatttttaatataacatatattactattgtataaattttttttttacaaaaatttaaataaaaataatttcttaaatttaaattatatgtgtatttggaaaattataaagtaattggtaattgtttataattacctacttaattattttaattttcaaccctcctctaagaattgaaaagtgtaattaaagtgttccaattacaatcaattcaataaagtctactaattataatataattacaagtaattactaccaaatctaattattaggtgactttctaaagactatctaatcatcgaggataaatcttccttgaatagaaatagatgctacgatagcatatgttttctagtcaatcaaactacgaactttcttggaggggtcaaaagtttcaacctcatccatcatggatacgtatctactcagagactcccaatttcacg

SEQ ID NO: 8198 - DNA, 588 bp, Gossypium hirsutum
  misc_feature (580)..(582): n is a, c, g, or t
attcctatggttacaaatgactggtggaactggttcatgtaaaaaattacttcctttcgaataattaaaacatttataaattataatttttttttgactttgatgctctttcgagatttgccagatcgttatatggcacccgaagtttaccgtcgagaatcctacggaaagagcgttgatgtcttctcctttgctttaatactgcacgaggtaacttgtgttgcaagcaaggattgtttataactttgttggtattccatctggccttgctttatattttcatacagatgttccaaggtggaccgtcgaatagggcagaaacagccgagcaaatcgcagacaaaagggcatatgaagattcgaggccaccgctctcttcatttttataccccgaaccaatcaaaatgtgagtttttcttggttcataaaccaaattgaaatcaattcagtcttatggtttatgttattgttgttgccgttgtcgtctgaattcaggcttcttaaagaatgttggcataagaaccaagattgtcgaccaacattcgaagagataatattacagcttgaggtaatcgaacannnattcaa

SEQ ID NO: 8199 - DNA, 664 bp, Gossypium hirsutum
ccatgaggctataatacaaagcaaggtagtcaataccacactagtggacacactatttttctacaggaattagtacatactgatatcagtctgtttcgatgtactgctttcgttttatcaatattctcgaaaatatttaatttatgcatataaaaatatatttacaaatatggaatgaatggtaactaaatttcaaatataaaatattcatcaattatataaaatgctcataaataaatttcacaaataaaaacccatcattcaaaaataaacaaggaaaaaaaatcatcccatgtattaaacaagattatccaatacattaaacaagattatctcatatatgtatttttacatttctttcaacttcagtcatgcaccagctgatacacattattccgtggtatgaccagaattgggcggaaagagctggtgtaaccggtacaggccggaattttcaccagtgcaaaaaaagagaattggctgttccgatttacggttgaaatggtgcgcaccaaccagtatggacagaacggtgcaaaattggctaccttgccacaaaatctacattgttaatgaatatagagcccaaccaccaaaaaaaacaggatttttaatcagcaagatataataaatgctactaaatggtccacatcatatgcatgac

SEQ ID NO: 8200 - DNA, 642 bp, Gossypium hirsutum
tgaagcctattgttgatatagctgcactaaagacggtattggaggcatatcttcctcagcttgcactcatcatatttttggcattattgcccaagttcctcttgttcctctctaaaaccgaaggaatccctagtgggagccatgtcataagggctgcatctgggaaatacttttatttcatcgtgtttaatgttttcattggtgttactattggtgggactttgttcgcttcaattaagaccattgaggagaaacctaactccgttttcgacatgctggcaaaaagtctgcctggcaatgcaactttcttccttacattcgtggctctaaagtaagctttcatccttttgttatcgcaattgctttaaatgtttgatttttagtttgattgggttattggtttgacaggttctttgttggttatgggcttgagctttctcgaatagtccctttaatcatatatcatttgaagaggaaatatctttgcaagaacgaagccgagttaagagaagcttggtttcccggagatattaactatgcaactagagttcctagtgacatgcttatcgtcacaatcgttctttgctactcggttatagctcctgtgatcatcccatttggagtactttactttgccttggg

SEQ ID NO: 8201 - DNA, 445 bp, Gossypium hirsutum
gccaggaggcaaaagaaatggggccggtccacttaaattaggtccaggacgtccacttctactattgccttcgaaaggaagcggaccaccctgctctctgaacacctgcattgcgagttcaggtggagctggaacaaaaggtcccaatggactgcaaatacagaagtataagctctcaaggaaataataaacaaactatagctacttgcagaacagcattaagacctacccagcaccgggaacaggcatcaatactggtggaggtgccatatctgaagaaaatggagttgcaacatgcatcccttgtccaccaaatgactcaaacattagatcatcacggttccccccttcgggaccctcgttgttggatggcaaatcacttgattgagggttctcagacctatcatatctatcacttccatttgctcgattattacgttctcta

SEQ ID NO: 8202 - DNA, 569 bp, Gossypium hirsutum
  misc_feature (25)..(25): n is a, c, g, or t
  misc_feature (28)..(28): n is a, c, g, or t
  misc_feature (561)..(561): n is a, c, g, or t
  misc_feature (563)..(565): n is a, c, g, or t
ctgagcagaacacaaataaatgagnttnaatacaacaatttttttaaacaaacactgaagcatttaggaaccactgcaggtcatttgaaatataccgctagaggaaacccaagaagagcaaatacaaccaaagcggcaatcttgattgctccacctcctccaaatacatgttcaatccctacagaaaattccgtgacagataccaaactaatgatagctgtgacacccatacaggcaaaaactgtatagttgctcatggcccaaacaagtcttgacccaatccgttgacacattggttgaataaagaaagaactaataccaagaacaacctgctccagaaattaacagatatataacgacagaaataaataagaaagacaactactcacctacagccaccaacaataatatcaatatatcatctttaaacaatcaagagagaaatatataagagaaatttgcgatttttgctcaattttgagttcttacagaatttaatagcaaaccaaatgcaccttctctgacaccttgatcatacaatttttttcagaagcatccctncnnnctcc

SEQ ID NO: 8203 - DNA, 617 bp, Gossypium hirsutum
gatctaaatattcaatacaaaaatagaattattaaaattatgtataatttaatattcacaatatttactaaaatataatttttttaaacacttgtccataaatttccaacatgtcactttattattaaataaaataaagatagtagataaataaatattaataattttatttcaatataattaaataataattcattataaataaatgttaaaatgctaaactctaaatccaagacctaaagtctaagaattattaatatttatttgtaatagttataaaaatgtttaattatatttaaataaaattattagtatttatttttaggtcttttatattttgtgtttaatttattgacaatatgtcgtactattatttactgatgatgcataaaaatttatgcataacatattattccttccaataattatatctttatttaaaaaagtaaaaaaaaacactatcaattcaaaaattaaaaaatatcatatattcaaataattaatagatacaaaatttaaataaaaatttcagcacataataataataagcacaaatataataatttaatttatgtatatgataagtttcattcgttaacttattaaactacaaaaaa

SEQ ID NO: 8204 - DNA, 642 bp, Gossypium hirsutum
ttctgatgaagagcgacacgtggaaatctagaggcgtgtagagacacgtcggacagtgagatgggattccccgtaagctgcttttttgtcgataacgtttgcaatttggatttttcttttcttgtttttttttctttctttcaagtaaagataaagatggatttgtcatctttgacttgaatcaatatctttccactgtataaataagaataatatatatcgattttgccaactaatattttaaatatacttttgttgaataaaatataatttttaatatcatataatatgaagaatgttggtattaaataataataaataaagttgtgagctaaaataattagtaaaatattatatttatgaaaccatataattttaatattatttgttagtatgaatatgaatgaaatgagcttgaaggattatatttttatttatgtttattaatttatttgtatttgttaaaaatttcatgtctttttttttgaaaaaaagcttcagtaacaagacttatttaacatggatgttcagcatctataaaagcacctacatccttacaaataattacccgaatgctatccaaggcagtatcacagaaatttaatccatattgacctccattccccacactagccgtatgat

SEQ ID NO: 8205 - DNA, 592 bp, Gossypium hirsutum
ttaaaaacatgcataaaaacatatttataggctgtaggaattaatatgacttaataacatgtaagaagaagaaaaaaaaacatatttaactggcttatttaaattcgcccaaatttaaaaccaattaaacaacaaaatttaattaagctgtaataaactaattaaatgatgcaaataattagttcagctactataataaaggccttaaagatatggagctgaaattgagcgggttcgagctcattgaacttgaaggagctggaaatgagctaaatgaagttccccaaaaaaaaaattgagctacgtccagcttgcaaacacgacgagcctcgcttgtaggctgatgcaatggccgttcccaagggcgggtcgtatcatcccctccctctttagagcgatttgtccccaaatcgggccacttgctcgcaaagaaactttcattaacaaagaccccttggttgttgaatttgataaacttgcgcccagcaaccagaaattcatgaggagattgaaaataacaccgattagttacttgccctccctctttagggcaaagccacttcaaagtgtcacctacacaatagagaaaata

SEQ ID NO: 8206 - DNA, 601 bp, Gossypium hirsutum
gaccaggtacgagtctttagaagccacttgtatgttctgctttcatgatatctctcgaaaccttactagaactccttatattgtagcttcatccaggtgctctttaccttctaggtgctgtatacttgacgggggactgtgtgaagaaagacatttcttcagcattatggtgtttccaccgggcatcggagaaagtaaggtttctctttgttcttataatttgtggttttgtttattgcatgtgaatcttctatggttattgcatgattgtcaaattgttagtcagtaatgtttaaggaggactttttcagattgaacattataactgagtgctgatgctgtgggaactgggaattgtgaaccttgttaattgacctcattagctaaattgaacaaaatcatatagttaaacttgaaaatccatgatctaaattatgaagtagacgtctggttatccctcattattttaagcaactgctgtagtataaaactaaaaaggtataatctttgcattatttttggccactttatttctatagtatacaaatttaccttctatccttgtaaatatacgcagggacatgctggagcagctatagca

SEQ ID NO: 8207 - DNA, 628 bp, Gossypium hirsutum
atttgggcagatttgttcctacaaatatagaaatgtttccccaacgattgatctcttgtccttttgccaattatttttctggcattggattaccctcaaattctaaggatccacctggggaagtagaacataagttatggcatgaacaagacaggggccccaatggtggttttgatcttgataatggaagttttgaaatacttcagtcagatgataagcaactttctacttcacctagagtaggcagctcagataattctactaaagtacaacacaagttttctgaagatattcaaggatcaactagggaagatcatatagatgtttgccaatatcaagataatagagggggagatgtttactttgaagaaaaaattgtaagttctagacacttagctgtttcacatgctagttcatacagaagtaaaacctcatcagaaagctctttggaagggttatcagctaagatccctaagccatctaaggagaaacggggtaggaaaacagctgcttctgtgcttccttctgctgctggtaggaaaggtaagattgtatctgagcattcctctcaggcagatgatggcagagactggaattcaccatcaatacctggaactgaaatggctga

SEQ ID NO: 8208 - DNA, 548 bp, Gossypium hirsutum
cctcatcttactcaaaacatcaacctaagacacaaccaaaagatatcattcaatgcacaaaaaactcataaccagatacagtttcaatattttaattgtgctgttctttgccacttgcaaaacgtaaaatattatgtcattaaccaaatacaaaattgatgacactatcaaagtagaaagcaatgaagtgtagggctctttgttcttacagtcagggaattcaaatgtttttttattgtgcatatagcagtctcttttcttttcatttcaattcttactagaactatatatatatatattttacacgtacaacatgatactactgttaacaaatagataattttaagcttatttttgaggatgcagaattgctagagagggaagaacatagacagtctgaggcacaaaatacagttccaggatgggggccaattaactttgagatatgtacaaggaatgctgcaaacacaataaccaaataacagaatctataattaactccttgggctttttctggatatatcataggctctgagtttactacccaa

SEQ ID NO: 8209 - DNA, 571 bp, Gossypium hirsutum
attttagggcatgcctttactaccttttggctaagatgaacacagggtctataaatttctacatcacgttaataccatagttgttaacaatatataagaactaggtgtatacgatgatactgaccacaaaaacattactaagagtctaggccaacatttgaaagcaatatgggggtagttgaagaggaaacttgtgcaaaacagggccattgatgaaaataacaacaaaaaaggacaattatggccaattgaaataattgggtcaatgcttgatagtcttgaaaagaatgacaggtcaggaaaatgaaccaaagaaacaagacattgttcacagattgtaaagacctgggcaagttgacaaagactcaacacatatctaacaagacaaggccaataagcacaactggagtttttaatatatcagagagaaatttagggcagagaacaaaatccaaacatataaatacagaaagattaaacaatgataaaaagtcatctttattgtggcttgctttttagggcaatgtgttcaaatccaaccagattttaataaatacctataaaaaaaaaa

SEQ ID NO: 8210 - DNA, 642 bp, Gossypium hirsutum
acccagaaatacacaataaaataaagaattgttgaaggtgaaatcaggaaaaactcctatgcattttttcttgatcatgtcaccccaacaagaagaaagaaaaaagcaagagataaaagctggtagtacagatctaaactcgatttttctttttcaaagtttccaacaattttcttatttttgggtgggtgtttagcatagacaaaaaggagagagacaagaccgaccttttaaaatttgtcgtattttggcaatacaaggtgagaagagagtgattgggacaaggtagggggggagagaagagacttgggaaagagaaaggaagatggggaaactagaaagagaagaaagatgggaggtgggaaggagagataagaaatgtgaagggaaaggaagatggagaaatgagaaataaaagaaagatggggaagttgtcaaaggaaataattttctcaggctgtgtacatttgatagaggacaatgttaaggactattgttgaaccaaaaactagagacttgaccggttcgatttccggtctccttttaaacattcttatgagtacctcccaaacaccaaatgtgcattccaggcatgaccacaaagaaaaggtaaagatgagtcaagctatgtcacagggattc

SEQ ID NO: 8211 - DNA, 642 bp, Gossypium hirsutum
gagtgcaatattttgaatctcaaatcttctagatgtatgttatgcagcaatgatagcgacttaatagctgataaaatatgactttctaaaacattatccgtttgctgttgcaagccaacatttatatatgtatatatatggggtaaaaacgtcttttccatcttccaaaattttaatattgagtaggtaaggcattaatatgttctgtcaattataattgtggtttacatatatgtaaattttgagagtaaaatttattatacccattaaaatatacaatgttatgattaattattcacttttaaaaatgatataaattatttttttacaaatataaaaatatatatttagggtatactcacgagatcaaacttctcaaataattgatttccattctaattcaatttctaatccttggaaaaatcgtgtcactttcagctctcttcaacattaatctatctatatattttatataaaacaaaatgcaaaaatgggcacgccgctagcaaaggatgactcttttggcggtttaagtttttaactttttgactgttaaagcttcaaactttctagtttctggcttaatcatacttatattagtcttgttgcttacctttaaactcactcaaggtcaagccttta

SEQ ID NO: 8212 - DNA, 688 bp, Gossypium hirsutum
tgatattgcgggtgagtttgatgttatttgactcaacgatactaacttagcattgaaatgacaaaaaatgttaaaatttgattataattagtcagcgaatgatttatgaggatgtctttttaatgtgagtttttctttttcaaaatataaataaataatatgtttgttattttaaaatttattgtttttcaccgacgtagaaatttcaccgacattgaatttaaaaaatttctcgggcttggaataatttaattgaataggcgacttaggcctttgaatttgaccgaattgaacataagaaagacgatgctcccatatgtattgttcgaacttagaagtttgaacatccaaattccaattccaaaattgggtaaactactcccatagtcttaattacctcgtattatattttagttatttatatttgaaatgttatgttttagtcacttatattatcgtgttgtaatattttaaattgatgtggcaggttaaatcatttttttaaacaaaattttaggttaaattatacaatcggttctcatattttttttattttgagcaatttaaacttttttatattcttttaactttttttttcttttttgtttctctctctgttttcctaccttctccatttcttttatcacattaagagtcgaattagtagtgaacaaagaacatggtatgg

SEQ ID NO: 8213 - DNA, 649 bp, Gossypium hirsutum
cgtgaatgtgtttcatcatatcgtttgtttactaaagtctaagcgtcttgaagtactcattttaatgtttcgcacatattcgaatatggtacataatataatcctctaaatatataaaaaaaaatttaaattcagcagttttatgttgaacacgtacaaatatctgactctcatcttgaatcctattaacataggctttattctatactcgtcttagttttattcatactgaattataatatttcattaattttccaaaacatcttcaaattatatattttatatgaccatattttacatcttcaaagatatatttcatgataatacggtttgtttcatggattcaacaagattttgccccctggatttatcttttctgtatgctttatagcatcttttaataagagagacatttgcagcttgcaaagcttgcaggaaataaggttgttgcgacgtgcggaggaaaagaaaaggcaaggcttttgaaagaattgggggttgatcgagtcatagactataaagctgaagatgtcaaaactgtacgtatctgaaattcttttcaattgttctgctttttttgggacacctacctacattgaaactcacaaccgaattcgagtaaacatagattggaagttggaactctcaa

SEQ ID NO: 8214 - DNA, 650 bp, Gossypium hirsutum
ggactagttctgcaatacaatcgatttagtgtcatgggttataatgatcgatttgagtgtgttttaattaggatcttagtatggtcagacggatactacaatggagcaatcaagacacggaagacagtgcaaccaatggaggtcagtgcggaagaggcgtctttgcaaaggagccaacaacttagagagctgtatgactcattatccgccggcgagtcgaaccagacagtccggcgaccatctgcaccgttgtcaccggaggacttaaccgagtccgaatggttctatttgatgtgcgtctccttctcttttcctcctggagtagggtaagttaagttctttcctatatagtagcttactagcttatagttgcctcttagcacattgactttttgtgctcagtgctctcgttttcttaccatccgttccatttttttcccctcaacgtgagttacttatttctagtgaaacccagtgctggaatctgccaataaaaatgggaaaaaaaaattacgggtgggaaggaggatcttttttgttttaaactcttcgtcatgattcatagtttttcattccaagatattaggaccatttatcatatagagaaagaaaagaaaacaatgaataaaattaatggagtagctcatgtc

SEQ ID NO: 8215 - DNA, 648 bp, Gossypium hirsutum
aagctttctaatctctgagagagcatatggagcattggggtttgtatagtctccaggaaccccagtccaaagtgtgtcctctacaaaattatttaacgatagtcattttctactagtttcattgataatttgtagacaccacatgtaatgtatattcattttaatggtcttattattcactcattcagaaacgtaacacaagttattaaagagaatttgataagatttgacaagaaagcgaaaggaaaatgtagcattagttcaccgttgagctggataagttcggaagcgacgccaccccaaatcatggcaccaagacgaccattcccaacggggagggcgtcggtccagtacttggcgggttcgttgaagatgactttcagtggccttgaagttgaatccgaggagcatgggttccagagatcggccactgtgggtctccgcaccataatccactcttcatctctcattaccgcaaaatcagaagtagagattgtacgatataccaactaattgtagccactgctttaaaacataatttccaaaagttcctttacactggaattttctcaaaaatcgtttatcaataaaattcatgaaaataaataattacaaattgaattaaggataatacaaacactccaatac

SEQ ID NO: 8216 - DNA, 644 bp, Gossypium hirsutum
ctcaggaaaggtatttggtgatctacccatggggacaagcttagagaaggatgtatttgaaagacagaactcacttttggcggaacaaggtaaatatattttgggttaagataaacagattgatatctgttcttgttgttatactcattttatgaagggtgaaatccttgaagtgagccctcggtctcaaggctcaagatcaagtggtgggacattttctgctgccgatagtaaaggaggcggagaggaaggtacaaaaagaagaagaacatcatcagcaaaacattctgctgaaagctcatcgtccggtgatgaaactctatcggcactgccatgtctagtaactttgaatccgggagtgaggattgcgactgtagctaccggtgggcgccatactctagcattatcaggtactttgtccagctcttggactaccagtgaaatgcggatggtatcctctagcattacctttcaagctgtaaatggtttcttttcgtgaagctagataccggatgtatcctaattttccttaagtttcagatactgggcaggtctggggttggggctatggaggtgagggacagcttggtttgggttccaggatacgtatggtatcctcacctcatcccctaccttggattgag

SEQ ID NO: 8217 - DNA, 638 bp, Gossypium hirsutum
  misc_feature (581)..(582): n is a, c, g, or t
  misc_feature (604)..(607): n is a, c, g, or t
  misc_feature (609)..(612): n is a, c, g, or t
  misc_feature (615)..(624): n is a, c, g, or t
  misc_feature (626)..(628): n is a, c, g, or t
attactatatgattttcttttgatgatcatcgtcttaatttgtttactgcataaaatttgttcataaattttatcatatattaagattctcctgtatgctttaaaacaatgaacttaacgtgcaggatcttttccatctttctgttgtatgcatcataagaatttgagtgaaacataggaaaataattcagaatctacgaagtcttttgtctgttaccataatactctgtatagttacattattcttgttgttttttactcattgccttgtctattgtgggtcagtgttggtgctgggtgctctcgactactctctgacatgcaggctttcaaggtgatttttagcacaaagaaaaatcctccatctttactactgttgtagatatatatggatgcaacagaaaactcttcctagtttcaatgcataatcttttttttctctttaacactcgtgttaggctgcaaatcctggctgtgttttagaagattttgttagatggcactctcctcctgattggattgaagatgagccaagcgataaggttccgggtgctagaggtcaactaagtagtagaatgcannaaggaggttttttttttttttnnnntnnnnccnnnnnnnnnnannnttcttttttt

SEQ ID NO: 8218 - DNA, 671 bp, Gossypium hirsutum
caccacgtctatggtaagttggattttgaaagtctaacaaatcatttgaaggaagaaatgctactaaagagagattatatagatatgatatttggttaggtatcatacacttgagatttaatgtttaccaagctttctgcctatgttcctgtaagtcaagctagaaagtattagatgtgatgaaaaagtagaaatcatatgcaagataggttggacataaaaaagttacttcaattaaaatttccaacttaatttctctgttttcttgcttgttcatctgctgttttctgtttttggcttaattgaggtgttttgacatggaggatggtggatgagaagtaacttggagaaaaatttcaaacccgcttgattgcccctcttaggcttcctccatctccttttataggggaaattttgaactctgtttaatttcatttgaatcccgcactgtttcttgataaggatgatgtctcatctttgatttgatgatattttttgttctgatgtggttgcttccatgttgcttccttttttggtttttttctttgttggtttttcctaagtagcttcctctttcttttcttttatccttcttggatattatctagattcatttcttcaatttcatctaggtttaatggatcaattgacaatctttgtgagttccactt

SEQ ID NO: 8219 - DNA, 681 bp, Gossypium hirsutum
  misc_feature (678)..(678): n is a, c, g, or t
aagagatcataccctcgataattctgctgcaaactctggtccaagtaaattccttgctatatcgggtgaaagcattctaccaaaccaaataacaaagcgtaagccatcatcatacaaataaaggccccttgaatctaggctttctgcgagcaaaggcaatctcttcatgatgtttttgaaatcatcagcttgagcagatggctgcaaatatgaaacataagttatgttcagtttgcaaaatctacatctttattgaaatatatttaaaggtttcaaatatttcaccttcaaaagatattcatcaattcgaatcaagctaggatataaaagcttcaacaactttttaacgggtaatgccatcatggtgaaacctgctgcgcagcgttcatcaagctgagcgtctgcatatcctccttttagaggtactgatttagacagtgctaatccgtacaaacacaagaactttagagactctggatagatcatcctagctcccaaccgatgccgcacagcataaagattgcggtattctctgagcgcttttacaatcctttgttgcaaagaatttctagcatcttcaagtttacttgtcaatgttttctcgattgctgcaaaacataagtcaattagaaaacataagaataagatcaaccaaaacaaatagcactcttgcagagnaac

SEQ ID NO: 8220 - DNA, 714 bp, Gossypium hirsutum
  misc_feature (644)..(649): n is a, c, g, or t
  misc_feature (651)..(656): n is a, c, g, or t
  misc_feature (665)..(666): n is a, c, g, or t
  misc_feature (669)..(673): n is a, c, g, or t
  misc_feature (686)..(686): n is a, c, g, or t
  misc_feature (690)..(693): n is a, c, g, or t
agtgcaaggctcttaaaacaacaaaggtatgacgaacttggggtgttgttgaagccatttggaccagagaaagtgtcccccagggaaactgcaatctggttggctaaaagcttcaaggagacccaagtctaagcttggaaaaactaatgcttcgtcagtgatgccacttgtacataattgacgttgccctgcccctttccctttccctagtttcaaaagttgtaaaattaggatgtcttcttactcgaagacagctggtggattcctgatacggatttggatcttttgcattaacccgtctaatggttgcaaatatgcaattcctgcaaaagcggtaattctctataactgagccccttggtcaccctgaaaaaggaaacaaaaaaccggcacctagtaaaaagatcaaataaattttacacgtggcaattggataaggtgaaattcaaacttaaatacctgcatatctaagactttccttttaactaacaaatcaagacgtcgttaacatgattatcggaatgatataaaaactatagcgagaaagagagttgcagatgatataggcaactttaccccaaatttcacacccaatgcgactccctttgatttttctaaggtgtgaaacttgcgggtaaagttannnnnntnnnnnncaactctcnntcnnnnnatagtttttatancatnnnnataataatgttaccgacgtct

SEQ ID NO: 8221 - DNA, 582 bp, Gossypium hirsutum
  misc_feature (24)..(26): n is a, c, g, or t
  misc_feature (523)..(524): n is a, c, g, or t
  misc_feature (576)..(576): n is a, c, g, or t
tattgtagtctgtttgatattatnnnaggagtcaaaagaagaaatagcaccaatagaagtgaaagaagatcatgtccctagttcctcagttgagcttggggagtccaaaaacgatactgaagaagaaaactcagcatcatgtacagcagaaaccgaagaaacaaatataaaggaagctgacgctgaactagaaaaggaaaagaaccaaaaatgtaatgttgttgtcatcgaagagaacagctcagcaagaacagaacatgaacagattggtgtaagcagtgctgaaattgatgtgaaatcaggggactcatacgtaacacatgagaaggacatggagattcccaaagaagaagatgcaatgcaggataaagttcacaatgaaggaaatgaagatcaattggagatgaccaccaaggagattcccttgaaagaaatactaggagatgaagtgaaagaatatgaggccacactcattgaagaaaggaaaataactgatgaaacttcagaaaaagatcatgatttnnatgagcactcagaaactccagtgccacaagtaacggatgagaaattaatctnaagaag

SEQ ID NO: 8222 - DNA, 578 bp, Gossypium hirsutum
  misc_feature (567)..(567): n is a, c, g, or t
tgggcagtagtagtggagtggggctccaattccagctgtgtaaacccaaacagccatttccgatgtgtttgttgtttgtaccttttattttctcttccttttttttttcattgaattggccattatattaaaaagaggactgactacgtgggggtagaattggaaggccattgattcttttattccttgcacattccatgatataaatttgttccttgttttatcctcattcttatgcctaatttctttattgcccttattttatgaaaccaattcaaactcctattttcttcatacttgtaacacttatggtattctctgtatataagctcaaaataaacaatactaaataaatatcatcttgataagtttctttaaagaacgcgaaattatataattatttgaaatacataaaacttccaatacaacaatatcagatgcatccttctgtctccctctcttccatcccagctctttatcaagaagtgctaattttctgtaaaacattgtgcatcttaaaaagaaagtgtaaaatgttgggcagggtgcaaaagagacaaaagatgnagagagagaga

SEQ ID NO: 8223 - DNA, 611 bp, Gossypium hirsutum
gcataatcctggaaaaggacattggcaagctgtgaaatggattctacggtatattcataagaccatggatattggattactgttcaagcaggatactacacttggtaaaggtgttgttgggtacgttgattctgattatgccggtgatttggacaaacgaagatcaaccactggttatgtgtttactcttgctggaggaccaataagttggaagtctacactgcagtctacagttgcgttgtcaaccacagaagctgaatacatggctgtaacagaggctgtaaaggaagctatttggttacaaggtatggttaaaaccttgggattggtccaggagcatattaatgtgtattgtgatagtcaaagtgctattcatttagcaaagaatcaagtctatcatgcacgtacaaagcatatcgatgtacgtttccactttgtgcgggaaattattgatgaggggaaaattcaccttcagaagattaagactgcagataatcccgcagatatgatgaccaaggtggtaacaacaatcaagttcgaacattgtttgaacttgatcaatattctgcatgtttaacagttgaagaaggcactatcaagtgttgttgaca

SEQ ID NO: 8224 - DNA, 587 bp, Gossypium hirsutum
tccctatcagtcgtgaatccgattccagtggaccaaggttcccaccagcaaacatcaagtcctcagccctatgactcagaaacctaagagaaactgcaacgtttggaagagtagtttactcaacaagagtgcctctttaaagagcaacaaaagcaataacgtatcctagaacaaaggaattcctaaaataaacaactcattattgagcaaagggctacacgaaaggttccagatgagagagttcggtttgccaaaaagatgaagttcagtccaccctccgcggggagcaagagcacaacaatctggaagacctttgtaggaataacactggcctcctgaaaatatcccagcattcccaaggtaatcacaatatcttcatgaaagaacaactcaaaacaaaaaatattttgaaggaagaaatattttttaaataattttaataattattttataattttctatatttttgaaattttttatttttatttttgaatttttttacaatttttaagtaatcttaatattttttttataattttataattttataaaattaaaaaaaaataaagttaattgcaacatggcat

SEQ ID NO: 8225 - DNA, 631 bp, Gossypium hirsutum
ttactcataaaatattatgatatttcaaaaataaaaaaatatatataagccgcaccgccacccgccccggccctagaagtaaaagatgttcaaactttcacttgcattagttcctaagataacgtgaaaaatctgccataatttacatttttctggatttcattttcagcttcaagcactagcactagcactagcaaaaacaatacatttaagtatatagtgttaatatataatgacattccctgaaaagtttatggctaccgaaacacgaagaaagagggtcgaattgacttttccggttgaaaaaaaagggaaaattcagaatccttgataataatgtgatagatctaagcggtatggacctttgatcgaagaatccttgttttacacagactgctgaactgcggtatcagcacggttgcttctggcaattccagcttgttccgtagcggtggaatggctcaacggtcgaggctgatctagtccagacactgttggaggagttgcctgtattgaatggtcaaatttacaggctggcccaaatttgcaaatgccgtatcgactatagtatgagcagatgctttgatcctggattccaaaaatatgaaaccgagaaagcattaaacgttaa

SEQ ID NO: 8226 - DNA, 606 bp, Gossypium hirsutum
aataaacaaaaaaatttaatgattataacatcattgttatgcaaaaaaaggttggggggcggggggaatggaggattaaagaaggatccaaggttcataatatacagcagatggggggctgggcataggtcccttagccaaccatcaaaaccgtgtggaccaaaatcatcacccctcataattcaagtactgcctttccttagtaagtgtgatattgccagtacttgcagctgcagtaccatgaacaattttaaacaagggtaaactacattattagtcactaaattttaggtaagttttggttttggtcatttaattataaaaagttataatttggaaactgaattattcaaaaattttcgtcaggagagaagtcagaacaattttttagaggaggccggatgaaattttaattttttatagtttatatctttataatttgtaaaggattaaattgaatttttataattttaaggggccaaagtgcaattttacctttactaatttaaaatttttaaaaaaatttaagggcctaaatagtaattttatattttaggggggctgggctcatgtcagccagcctagcttcgcccctgatcttcgcta

SEQ ID NO: 8227 - DNA, 642 bp, Gossypium hirsutum
aacgagagcccaagaatattattagttccatttttaaaataataataaagaacaacttctaagatgatattttataatagcgagatcttgcgagatatttttaaaattaacggttgcgattaaaagtaaaaagcaaagagattatagtcatatgatcaaatcgcgttaaaaattagaaaattgtatcggtgacctagaacctattgcatcagttattgaatacgttgattttttaaaagaattaatttctctcctttaatgttgattaaaaagtaaactcacattttctaatgtaaatcatacatggcatgatcaactctttttttttcatttttatttcaattgttggtttaaaatgatcttacgagatctctagtataatgtgatatttaaatagatgccctaaataaagttttctcaaatatcaatttattattattgttatctattcaatatgatttgattttgaccaacaaatgttgatatgttgattgtagtgataacgtagatttgaacattgaagacaatgttattaagaggaataaccataaacctcgaacataaataataaaccaacaatgagaaataaaaaaatgatttagtaagatgatttgattttggattgatttggtgtcccaaact

SEQ ID NO: 8228 - DNA, 663 bp, Gossypium hirsutum
ataccttgacatttccagttgtaacacaagatataaaagcttgcaccattctctctagccaatgcaaatccttcaatgatgcaggataggatgaaggtatcacacctccatcaaaagcattcagatcatttctcgctggcaacatagtaacctggttgcaagtggacgaaaatcctaattttgccactggctttttatccaaacatgaactcgtgtatctgacaaatcttgaaagatttccgagagctcttacagcatttgatttaacctaatagaaggaaacatgaagagatataaaagctaaaagagtttctaattgatgtgctaagatgatagattccatctcttctacatatgaaagcctataaactatcacttggctgaacatcaaccgaatatgttgctgcaacttctcagttttctttaagtgcccatttccgaatgtcttaacacattggtatagatatgaccttcaaggatgctccaatatatggaaaaacttagaaaaatctaaccataccagcataagatacatactcgtatccaacactcacccccgagtccaattaacataataaactaataattacccaaacaaagtaaaatgcagccaggatactgggatcaaatgtagaaaatatatacaaaataacaaacaaggtt

SEQ ID NO: 8229 - DNA, 658 bp, Gossypium hirsutum
gagagcttgagaggactcgcatcaatacagcatgttttgtggaatcactccccatggaatctgctccagactcggtaaaagctgcatatgcatcttttagaggtccaatggactctcccagcaaaaattacagaggcacacaagcaacgggatcccctagtttcactcagcgtaggcgcagataaattagagccaccccagcagcagccatattcttcgtaaaaagtaaaaatttcttcattttgattttgattttggttttcatttgcattgttgtgtttcacttgttgatgatacatatgattttggaagacatgcatttgtctgttgtaagtcatgggtcatgaacttcaattgctttgataggtgggctaaattgttaacttgtattattttccatgtttgtatcaatgagcacgcattcttttctaaaaaccttttgattaacttaaatatatatactactttagttaggatcatgataaaaaatgaaaaaattgtgtgaaatattttccatattcgaatctttttcttgttttttgagtgatgtaataattacgttttgaagtatttttatttatataaaatttgacttgttgatatcttgtgttatataggttttaacgcgtttgagttattcttaaaggtgaagcaagag

SEQ ID NO: 8230 - DNA, 711 bp, Gossypium hirsutum
  misc_feature (688)..(688): n is a, c, g, or t
acaacggaagttcgttgcgtttaacaccttcctttcaaaactcatccttctaaataccgacgattttatcttcggtcgggtcctgttaacccctttttaacctcctactatttttggataactacacatttaatcacttaattaaaaaaagttacaatttcatcgttaaagtttttgaaattatttttttagtcactagactgttaagtgacacttctttaattggtatgataataatttaagtcatcatcttttatactttcagtcaatttgacattgattatatataaaatgattaaaatgattttttttaaaatttagaaaattcttaaaaataaaattagataaagtgagagaaaatgagggaattttatttttaaaccctccaaattttctctttgtattatttatatagaaatattcaatacccatttttttaaaaaaaaatagaagaaaaaccaaaacattaagcaagattattggttctctattttttatatcttcagtttcttgatataatttttttgttataagaaaaaaaaattctatttttaaataattttgagttattttatcattttataaataaacaggtcaaattgacaaaaagtataaaaattgagaattaaaattgttattataccagttaaaaaagtgccacttaacaatcgagtgaaaaaaaaaaaantttaaaaactttaacggtggaat

SEQ ID NO: 8231 - DNA, 665 bp, Gossypium hirsutum
ggataggagcagaaacagcccaaagcaacaagaaaagatactcggcaagggagaatgagaggaagacaaatcaaggaaatcaaatagagtaaatcatgatcagagaccaaatcaaatataatttttaatataagatcaaagaatttaaaaaaaaatactccaaaaacataaaaaggctgcatttttatctaactaattatgatttacaaatactatagagcattatgatttatatacaaaaagttaagaaatttatttaaatgatccgagatagattcttttgaaatatccttttatttacaaaacatacttaaatatatcatattataaattaacgtcacatcatttaattaattactcgttttctatcatacggccgggatctttgtcagtgtccaacatgcactcttcacacttgtataagacatccacctttcattgtcgtataaaattacaaagagatgcaggtgaagaccattgggttccttgatgctgtacaaaaagtggaaaatggtcccaataatgttcaaaaatgctgtaaaatttgttactaatttagatttgacaattggcttattagctaggccatattcatttaacaatctatagctgttttaacaacgcctatatttatttatacgtacacatgatatcaagtaccatca

SEQ ID NO: 8232 - DNA, 504 bp, Gossypium hirsutum
  misc_feature (490)..(492): n is a, c, g, or t
acttagtagcatctcattcctatacttcactaagatcactcttctattaagattttctccttaaaaatttttacaatatattttcactaaaacaatttcctctctctataaataaaataagtgctccttaaactatacataaataaaataaataaaccttctttaaataagaaatcatagacttgtagatcaccatttagtataattgaatcatgacattgaacttatgccaaatagctttttgataaggcatgaaaatgacaagaaatcttcattatttagtcttcgataggaaccgaatctcttcgaaaatcgtcaaatctagttgtttgttattcaaaatctttaaattctttaaatattgtccttacctgattgatattttcaatatgatttaatttaattatttgttactcactcaaaatcttcacaaaaatggaaaaaaaaaacaatcacaatatttaagtcagaacatgtcaatgtataagannnagttatacaata

SEQ ID NO: 8233 - DNA, 576 bp, Gossypium hirsutum
  misc_feature (505)..(505): n is a, c, g, or t
  misc_feature (546)..(553): n is a, c, g, or t
  misc_feature (555)..(566): n is a, c, g, or t
ttgttacaagttacaaaataataataataaaataataataataaaacatcaagtttattttactaatcaaatgttagattttgttacaacaattaatacaaaataataataaaacatcaagtttattttactaatcaaatgttagattttgttacaacaattaatacaattaattcaattaacaattaatacaattaataatttgataattttactaatcaaatgttagattttgttacaacaattaatacaattaacaattaataatttgataattttactaacaattagttttaattttattaaaaaaataattttaattttaattaaaaacgagtcgagctcgggtcccatattttttcccgggatgaacctggacaaaatctcaagcccatattttgagccaggctgggcccgggcctaggaggtgggctaaagttttttctggacccggcccaaacccggcccgacccatgtacacctctaaatctaaattaatgtattntacagttggaaaaatctaaaaaaaaaaaatcaccccatttnnnnnnnncnnnnnnnnnnnnatttaaaaaa

SEQ ID NO: 8234 - DNA, 677 bp, Gossypium hirsutum
ttcctcgattgatggatgcacgatctcgaagccaaacaatgtggcgccggccaacagaaaggctccttccaaggatagtttcttctccagctactgagaacagggctgagctttctggcattgaaacccaggttaagaagttggtagaggacttgaagagtacatcagtcgatactcaaagggaggctgcatctcaactcaggttacttgccaagcacaatatggataatcgaattataatagcaaactgtggggcaattagcttgttagttgatttacttcattcaccagatgcaaagactcaagaaaacgctgtcacggcacttcttaacttatctattaatgataacaacaaaacagctattgctaatgcaaatgctattgagcctctgattcatgtgctcaagacaggaagtcctgaagctaaagaaaactcggctgccactctcttcagtctttcagtcattgaggataacaaagtcaggatcggaaggtctggggcaatcaggcctattgttgatttgttggggaatggtactcctcgaggaaagaaagatgcagcgacagccttgtttaatctatcaatattccatgaaaacaaggcccaaattgtagaagccgatgctgtaagataccttgtcgatttgatggacccagcagctggaatggttgataag

SEQ ID NO: 8235 - DNA, 545 bp, Gossypium hirsutum
gagcattccttgaaaagtcactagaaacctcagcaaagcaatgttctgagtactcattaaaatgagataagaccgcgttgctgtcttgtagccttcccaagctgcaaattgtggcaccaaaaaggaaaagctataataatgcaggaacaaagattgttactcaaatcgaagctgtattttgcaatcaaagcaggggaaaaaacagaatagtttgaacgacattccattgtaaatttataatcattttggcaacacattggagaagtcctgttctctttcaggacaaatgtttctgcataaaacaaggacaaatgactctcttaagtcacgttctggatacatgtcaggagcaataccccttttcaccctagtcctgtagacaagggcattgaagtaaagtgtggacataggcatctggtgtctgacatagcatctctaaagatacaagataaataatcatgtttatgtggacattaatttttgtttgcaatagctaaatgaacaaatccttatgtttgattccagggaacacctgattcctacat

SEQ ID NO: 8236 - DNA, 561 bp, Gossypium hirsutum
gcaaaccacacggaacccttggaagtagataacaattagaaaaatcaagactgtagcaagcaaatttgtcacgtttggtagattctgtcgataaaaggcttctcggagagcacgaatcttgttttctcgagttaaaagattatggacaaatgcaataacagctccttcaaactcagcacctctgccactgttaattgttgtggggctaaatgccttccagattatgttttcactgcaagtcaatcaaacctctttttagtgctagcaattgtaattctaccaatgattacgtcatggaaccacaaactctgctatataatattagtggtaagacaataagaatccttagcaacttctttagtagatgaagaaagcacagataaaaataaaaagctacaaatgctcaccagatatttgttgctatgaagagggaaattccagaaccgagaccatatcctttctgaagaagttcatccagacatatgacgatgataccagcaaagcaaagatgaaggatgatgagaatggcatttcctactccaagctggccgacgctaccat

SEQ ID NO: 8237 - DNA, 682 bp, Gossypium hirsutum
gttcgcttccacttttgaatttcacttgaaataattttgacctactccttttttctttttttttacatttatattattctcaaataaacttttttatttattataagtttatcaccacttatctaatcttttacccgcattcttttagtgttaattgcaccaaacacccttaaattatgactttcattttaaattggtcattaaactttaaattattctaattacatcctcaaactattaaggttaaattatttaagtcctttcattactaaaatcgttaatttaactattaaaaatccatatgtagtataatttgaaatgaaaattttatgaaaaaaactaatattgtaaaaacaaatgttttaaaaatattagttttaaggtttttaaaacttttacaaaaactttattcttcacctttttttagctttactttatttttatttttattttttacttttaaaaatgataccataatattctagttttatttaatttttttattttaaatttagctacatatcatttaaaagttaaatgaatggttttaataacaaaaggacctgattgatataacgttaataatttaggaacttaattagaaaatatttatgcaattaactcttttttttaactactcataagtccttgaagttttgcacgcctgccgaaattcaactcc

SEQ ID NO: 8238 - DNA, 671 bp, Gossypium hirsutum
tgggaaagaagaattgtcattgatcttcttttttgcattagaggaagaaaatgagcctgtcgctgattttgaaactcgtggtggtcttggaggtggtggtcttgaagggggtggggcactagtacgtagggtaaagagaggaacctctgacacagtgagccacacatcttcagatgtgtcaaagttctcttcagatcttggagttgcatttacctgggagctagtgtcgttagaaccaaaatttgagtaaggaggagggctagcagtgtgatgaacagagctatgaaaatcagttgacatactaggcatgtcaaacacaggttgctgagattcaggaaaattttctgtagaaggcatccttttcttagtatagtgctcaaaatcttcatcatttggctctttactagcaggagtttgcaatccactcgctgttcttaaagggttcctatccattcctctcttattgatctcagttgacagaggcacagattttccaagaccttcaagaggatctatatcatcaaatagtccctcatttacagatgacactccagacttccctgatccattcagcttagttatttcttccaaagggtccacaaacagccctgaggatgaatctactgtgtctgatgttgattcaaagacatgaaaaggattctccatgacat

SEQ ID NO: 8239 - DNA, 646 bp, Gossypium hirsutum
gggggttggctgcctcttttgatcatctattagttgtcctgtttggttgtttaaatggtttagaaacattcatgaggtgctctttctttggttcagcgcacttgagggggctgaatcgaccctgatcatggcatctggtatgtgtgctagcatagtcatgctgatgacattagttcctgctgggggacatatggtgtcaacaacagattgctaccggaaaactaggatgttcattgagaactttctgcctaaaatgggaatctcggtatggcttccagatttgttctcgttactcttctgtgtcattctattgttttctaagaatcttggtgactgtaatgcccagggtttttgcgcattcttgttccacagggcgcagcgatgttgaaatagctactattaagatattgatacaccaaagtaatgtatagagtaaaagtttgtacctgcaaccattcctttatcgggtttgttgttatatataagaagtgcagttgcagtaagaacgtaatgttgtatgcggcaaactggcaattttaatagccacttgctgaaatggctgtattaatttggactaatatattgacgtgtttctaattgagttctggctatcattcaatatacaggttactgttattgacccctg

SEQ ID NO: 8240 - DNA, 663 bp, Gossypium hirsutum
  misc_feature (122)..(122): n is a, c, g, or t
  misc_feature (518)..(519): n is a, c, g, or t
caaagtgcgagcctgatgaagacacctgttgaagacaatatgcaaagatgtgagtctgtcaaaggtgtgagctcagcaacatgtggaagctcaatgcgtgttgtatagttgcaagcctcttntagacagtaagcaaagtgtgagcctgtcgaattgcaagccaaaatggcagaatgaaggcaagcaactatactcacgaactgtttgtgcaagaagaaaatgaattggtcagcttgaatcaaagcatctaagagctgccaagttcaaaaaacttgatgaatgactggtatttgcagcatggagtccaaggaggagtattggaaattggccaaccatgctgctgttacattttgtggttgaagtgcatgcagcttgatgacatgctgcagcacatatgcttgctgtaacagcaaggtttctctttagtttcattctaattaatctagtttaaaatggacaagttgatgacaacttgatgcattaggtgttgaatgactagtttaggtggcttgtttatnngtacaagcagcttgctgtaacagcaaggtttctctttagtttcattctaattaatctagtttaaaatggacaagttgatgacaacttgatgcattaggtgttgaatgactagtttaggtggcttgtttatgtgtacaagcaaaa

SEQ ID NO: 8241 - DNA, 615 bp, Gossypium hirsutum
gttgaatactacaagcaattacaacaactacaactgctgagaaaaaacaaaaagcaaggatcttacttcactaagtagccttaactttatcatccccaacagctgaaagtataggcaagctactcaaaaactcatcaagaccctcaaagaacccattcccttcaatgttatcctcctccccatagccggggtgattcccctcattcctcctcggtgccggctcttcaacttcattactaaactccacattcaaatccaacttccccaaattctttgtgcccctcgccatctgcttcctcccactattaacaactcctcttctactcgattcagcagtcaccacaccttctggcacagtggacgcaccactcaaattcccactaccatcaacattagctgcctcattacccgccttcttcactctctcactctgtggtttcttagcagttttccccacagatcctttccctttgacattttttgccttcttcctcttctcattctgccaatcatcatcgtcgtcgtcatcctctgaagtcccaatcgagtcagaaaaatcaacatatgcgtcatcatcatcataatacactcttgtagcaggcttttggcagtact

SEQ ID NO: 8242 - DNA, 626 bp, Gossypium hirsutum
ccactatagtttcttcttttcttgaatttcattttcgctttcttcaattccagtcagagatctcagaagctttgcatgcttagttgcttgttgactacagagtggggctggaatagctcgtgatgcagcacaatgaaataaagaccgtgctgccatacgtacatgttcactttcatcttgccaaaaactcaccaaaagctgtgaagaaaattaaaacagactgaataaacacagtgttgcctaagacagcaaaccaatgaatgaactaaaaacctgatcaacaatatcaccaacataaccaacaaccttctgctctcaaggaaagaattaaaggcactcaccataattattaaaagctcagaaaataaaagtaaaaggtggataaacaatgaaagttttgacaattattattggatttatacttgatgcaccaacatcagtgaacagtaggttgccacatcattaatgagaaaattagaagttagaagcccctctaatggggtagaccaatttgtaagattactcagtaatcacaccatcttttccctctctttctagctttttcttatttatttcttcctaatatctgtcaaatactatgacactctaatccaatcccaatttcc

SEQ ID NO: 8243 - DNA, 630 bp, Gossypium hirsutum
gttgcctatcataaagagaattatttaatataacataaaatattttatataattttagttgaggcaattatcaaacaataacaattgctagaaactactaagccaaaaaaacaaaaaaggaaaaaggtgggctctttggaaatcttttgcttagacaggaatctgtttctcaagacaaaataaggagaggagacgaagaaaaaaagaagcaaaaatgaaaggtgtggagaaaggaggcaaggcaacagcggcagcaacatggttagcattttcacttaagtttggtctaggttaacaacaaatataattaccaagtctaatatttcagctctataaggaagcaactcgatttcgtaaataaaatttaatacaaagcaactgattcacttcaaaactatcactataaacactcagatacttagatcatgcatggcatttttgcataaataggaactgtgacacaagacaatcgatttgcgacagagacataagtcatcaagtaaagaacgaacttacaccttcccagaaaatgctataaactaggaagcatagaaacagacaataaatatgaatacgacataatacgggcatgatgacaaaaaaacctttttaagaaaatcatgatactaa

SEQ ID NO: 8244 - DNA, 659 bp, Gossypium hirsutum
tagacctcgcttcaatatacatatttgagagggtaacatacacggttgcatcatttgggtccatagctagtatgtgctttgcagcaaattctgcaattcgtagattgttgtggcaccggcaagcagcaagtagaggtctccatattgaagctgtaggcttgatgggagtgttgtttatgaaatctagtgccttctctatttgtccagatctacccagtaagtccaccatgcaactataatgtgcttcttctggtgagacaccaaattcatttatcattgattggaaaatttcttggccatcttggattttgccagagtggctacatgctgaaagaacagcaaggaaagtagaacctgttggtctaaatcctttgataatcatcctcctaaatagtgatatagcccttcttggattgccattctgcgagtaagctttgatcactgagttccatgatacaacatctggtgctgaaatacgactgaatactttctccgcatcttctacactcccacatctggtataagcttctattaatgagcttccgacgtgtgtgttcttgtcaaagttagctttgactacctgagcatgtatctgctggcaactcatgaatgatggcaaggaagcacaagctttcagaatgggggagaaggtaaactca

SEQ ID NO: 8245 - DNA, 731 bp, Gossypium hirsutum
  misc_feature (23)..(23): n is a, c, g, or t
  misc_feature (654)..(654): n is a, c, g, or t
  misc_feature (656)..(662): n is a, c, g, or t
  misc_feature (676)..(681): n is a, c, g, or t
  misc_feature (705)..(707): n is a, c, g, or t
acctcaattctgatttatctatngactcagtgagtcatgaacaacatagaaacccccacttttttaattttttgttttcctttagatacacatttctccttttcttttaataatcgacaatgaggaataaaagggcaagggggagtgtggacaaggcggtggttgatgtttggcaacgggaagtcggggaaatctcaaccaggaatttcgtccaccggcttgctgcttccgaggtctaattcttcattttatcttgtataatcaatcttattccttaaaattgatctttatgtatatatatatatgtattttcatggtgacttccgattttttcaatgggtgaatgattagaatttatttgattatgaaattgagactgggtaacgacatatattgttgtgatttaattaatctttgatcgatggaatgtggcttctagttgatttgttaatttgtaattgccattgctctgggattccaaaaacaaagtgatgggtgacaaatcgtaagtagtagtaacgataaatatgcctttttttacaaggattgtatcaacaccttctgatattttgcttggtttccgtgttttcttgaaactgaatgaataaatatgtattttgggaactaatattcaactgagaaattcaaatgccngnnnnnnntttccgtgttttcnnnnnnctgaatgaataaatatatattttnnnaactaatattcaacagagaaattc

SEQ ID NO: 8246 - DNA, 562 bp, Gossypium hirsutum
  misc_feature (55)..(56): n is a, c, g, or t
  misc_feature (487)..(487): n is a, c, g, or t
  misc_feature (522)..(522): n is a, c, g, or t
  misc_feature (524)..(532): n is a, c, g, or t
atcatttgtgtcatgtattttggagcggcgtatttagcttggttatcagagtatnnagggaggtaggttattaaaaactcaaacatcatttactgtcactttggttccacagcatcacaaacttgtggcttctttgattttggcaaagcagggaaaggagcctgcaattcatctttcatggttatatttctggaccaaaaaatgtacatctcgaagaaacgtgtccggagtggctaaagtttgagcaaattttggcccgttatgaacgcacaaaaaggtacgtgccatatcttgcacgcattaacaaaatgcagttgtatatgttccctggagtgactaatcattcattgatcttgcttcttcagccgtgaagggagctgcaacatcatttaacctgatagatatcagtggatcaccatcttttagatggttctcccatgaagttgtgctgaatgcatacaatggaaaccattttttaatgataaantcactgtaagatttgaagaaaaaggggcgtcttcncnnnnnnnnngttaggttcttattaagatatctgtgtaaa

SEQ ID NO: 8247 - DNA, 587 bp, Gossypium hirsutum
  misc_feature (535)..(536): n is a, c, g, or t
  misc_feature (539)..(539): n is a, c, g, or t
tgcattatagtaagtggggcttggttagagtgagatatttggtctttgtccagctgtctatctcttatggtaaatgccatcttttacagtgatgttatactgcacattaaaggtgtggatagcattatgtgaaatgggatgatgtttcttttggtgtgctcccatttttcgaccaactttgttttatctgctggattgtggtaattaagaaggaaatgtagataaaaaaccatgttatgtcttgagtcgcttgaaatataagaaaggaggtggacaatcctagccattagatcaaacaaatttccttctgcccctctttggttcctaccaaatatagtgtaaaggattttactgatgttcatacattttccattgaagtatagaaattgcacaaggcatgagccttctctttgagtactgaagagggaaaatgagctgttcgatgcagaattaagtgttgattcaagattttccttctcttaaaccatttcaccactatatctgagttgttacatgcatctagttacaacaatgnnagnattagtttctttattttttttaatatgtttggattttctagatcaaaa

SEQ ID NO: 8248 - DNA, 582 bp, Gossypium hirsutum
cggccacgcccaacattatatattactttgtttgggctagcccaggagagacataataaacaaggttaaattctaaggatagcccattatttatcgttttgcgtaaatttaatacctcctctatgctttgttagttgacttttattttgaagggtgaactcaactccttgccctccttgccctccttgccctccttgcatttaccccctaatgatgttttttttttgtacatctaataagattaaactataagcctttgggaattgaaaaacccatgttatgctcctctaatatctactaaagctcaccagggagactattgaaacgatgaagacccatatgcgaagtttgccatcttatccaccgctcagtttcctcccaattccattgtatccttctgcttcatcgcttggtataggttccggttatctaacgataagcccaatggtgcattgttgtttggtgcttttctgagatgctatggttgttttgatttgagctttggtctggccctcttttctttcctacatgattttggatgttagcttggaatcacttttcaatcatattgacgagaatgat

SEQ ID NO: 8249 - DNA, 657 bp, Gossypium hirsutum
acgggaacacacccattgaaaggaatctgaactctgagcttggtcccaaataaaaccttgttgttacttgtcttgggaggaaccttgttgtctttagttggcttatcattgagagtatcgactatggcaagaccaacaccttttggttccgatgtttgggttgtgtggtggcgcttgttattgagtgagatgaatgttttgggggatttgggttggtttaaatcgaaaccaaagaggttgccaaagggaaacaatggcttgttgttgtcgaggattgaagtagggctcttgagtacaacaggttcagtgtcggggagacattttgtagtgaaaactttgaatcttggagaaccaaagaaagatgggattggtgtggtgtgattgtgtgagggggacgacgattgagaactgtgatcagccattaatggttgctgcttgctggtcactgccctggacctattcctcaacataactttgtctgtcttgtcagaaatgtaacttgaaaaacaactgcaaaaaacccagaaaaacaaagggaagaatggtgaaaatctattgcaaatccttgcaattttcttatataaaaaaaccaaaacaaaacacatactgtggtgggaaattgaaatggatccctaaatctccataggctccatgaca

SEQ ID NO: 8250 - DNA, 631 bp, Gossypium hirsutum
taacacacttaattattaaaccatcgcatagaatttttaaatataaaaaattattgtgcaaaacaaatatgaaatgatggcttcttttaatgatcacaaaatgagttaatttgtaatgaaagaaatgttttaaaaggggaaaaattgattccgtaattattgcataatcaaaaacatgaaactttttattttatttttctgataaatatacagttgaagttgagataataattaacaacagtaacaagaaataataatgtaacaataaaatttcccatgcttttgtgatcattaaagatagatataaagcaaataaaaagataaaaaaggccacaactttaaactgtaacacacacacgcacaatctctgtttgtcaacaagtttgacgcccgtgttctttctctgtagttttgcttttcattacaaccagagtttcccacttcttcttgttggacaaaatcaggaaaaaaaagcgctcagttcttagcaaaaaataaaaaataaaacacctctattttggggattgggttgtgtccaaatcttgaattacagccgtagattccaacgaaaatatcaaattttcttcttttatttcttgattttggagaaaaaaaagccagagccgaaggt

SEQ ID NO: 8251 - DNA, 650 bp, Gossypium hirsutum
tggagtatgatggtgccaacatgggaaagggatatataaattttttaagtgttggaatccaattgaatgtaaagtctcctttaaaaaggaagaagcagattatgttctatgggaataaatcatatatcagattcaaatatgaaagactaacgcctttttgtttctattgtggttgtttgggacatagcgattctttttgtgaggcaaaaatgcgttaggtgtggagattactgaaatgggatgggatctttctttaagagcgcaatctaggaaagcacgggtacaaagtagcatctggttacgcgaagaagggggaataagggatggatatttcggttgtaataggacatctgaagggagaatatggagtgcgctaaatagttctggaaaaaaggcgcagattgatcccgttttgggattttgcttggaaggaatcacatcctctgaaagggatggaaagaaaccaatagaagaacaacaattctcaatggaccacgatgctgaagaagggattcttataggtgaagagggggaaaagaggtaaagaggagaaactgatgattatattgttagtactgataatctgatgatgaaagacagcaaaatggtgaacaactttttaagatcagcggctccaaaaggcaagccga

SEQ ID NO: 8252 - DNA, 676 bp, Gossypium hirsutum
  misc_feature (30)..(30): n is a, c, g, or t
gagtcgagaagaaagagatgatgatgaacnaaatttgaaaagaaagtaaatttcaaatctaacttcaaatgatcatacaagttcttatttcttcaatattaaatgtaattttgagggtgttgtgcttttgactgtaggaatactgcgccggaagctgcagtagtgttgtcacacaagacggtcacagaaccaaaaattatcgtgcaaacaagaagtgaagttgaccttttggatgatggctatagatggcgcaaatatggacagaaagtggtgaaagggaaccctcatccaaggtacaatggtctatatatatgtttatgtatggttctaataatggtgttctagcaattgtgcaaagttttgagtgatttacagtggcaaatagactgcttgatgtatatacgataatcatcaagagcactctatgatctaaatttcttggagcatttcagtactaggcttacaccactagggctctaataattgtgacttgtctttctcgtgtcgtatctaaaacttaatctatgttgccccagcttggagtaccctgtatccaacacccttgtccaaaacgtatttgggtggggataaagataaaccctccaaatactgagaaacttgaaaaggttaaagcatactaatgtttagtgcatacttgtatggaacacgcatatct

SEQ ID NO: 8253 - DNA, 479 bp, Gossypium hirsutum
gtatgagtagcagaaacagttaatcttcccggcaaaaaatacttgaatatgacaatttcatcataactactcgtgtagttgttgtattaatgataattagatgcattacactctattagtaattcaagtctcgattgagctatatttttataggtaaaattttattaaattaatagtaaatttacattttaatcactcatttaaaatgattattcaaaatttttttaagttattggactgttaaaattgttattgtatgatcttttctagatgcatcgcctccaccatttgaaagctctccatctctttttctaccgttcagtttttttttcttcataaaacagttttgaacgtcatgaatctgtgaaccaaaagacaaactactttcttcttcaacctttgacattgattgtcagatcgacttagatctaagatatgttctttttctcatcgatgggtactgatccaccatatcgatc

SEQ ID NO: 8254 - DNA, 477 bp, Gossypium hirsutum
attgtgtcgccaaatcaagctgatattgcagttaaagatttggtgccttatggaggatcaactactagcttagtggagttgcaagatggtattggcattgtcaagttccttagagggaaggagtttttcattactggttctacaggatttcttgccaaaggtacgtacctgtttttcttccccgaccgggccgggccaaacatagacttagataagaaaaataacatgttttcaatgtttgttttcttatattaattatacgcagttcttattgagaagattttacgaactgtgcctgatgttgggaagatatttgtgttggtgaaggctaaaagcaaagaagcagcaatggaaagattgaaaactgaagtatgttatgtagagttctgtcttgcttgcgttatataacatgtttgaaccaatattctttttcctgctattgaatcaaactttagtctttggttttggttttggttt

SEQ ID NO: 8255 - DNA, 594 bp, Gossypium hirsutum
ctcagttaagtgagtggaaaaaaaatcaccatgaaaattgttattgtttaacttcaaaacccccaaaacagtgcagttttttaccaattcgtttggaagtttccctgataaattattgaaggataaatccaacaacaacaacttcctcatggcacccactgaggatgggagatcgcctttaaagaagttacaagataaattaagatattgtaaatttggaagtacgattccgagatccttaggaagatggccatcaatatgattgtatgatgcatccatatgaaccatactactcaaaggatgttgtggaaaagggtcaagtttcccagtaaaagaattattccgaagattcagaaactttagatccgtgttgttttgaagcaaccaggaagggatggctccgctcaacttattatgtgagatatcaacccatatcaatcggtgctggtttagcaaaaaaagtggagcactcttcatgctacaattggaaatttgcaatacctttagttgaaacaacggaatcccattcccagcttggttgtcattatcaatctgtagcttgtttttcgtgcccccaagtacgattacctcaag

SEQ ID NO: 8256 - DNA, 614 bp, Gossypium hirsutum
  misc_feature (560)..(561): n is a, c, g, or t
  misc_feature (565)..(566): n is a, c, g, or t
  misc_feature (574)..(578): n is a, c, g, or t
  misc_feature (606)..(610): n is a, c, g, or t
aaacttggctttgccacctctataacgacatcgaatgggccattgtctcccatctggaagctgaagtttaataaatcccgaaaccccacttagatacttctcagcaaagcatgatggtaagtactgcaacgacacatcgaaaagtacagtgaggtatgctatagggttaatcggaaaagacatgtatggtcaatactcaccataatacatccccggtatagatatgatggtcgtaagacaactctgcagaaagggttcatcggctcaaacgatttggctgcgttaattgctctctctctttcttccgttgtcacagttctctttctggctgaagcactttcatataatctaaagtttgtatacacatcatattcgtgtccaacagatgaatctggttcagctacatttcgttcaaacaataatgagaaattccgattccttatgcactgcaaaaaaaaaaaaaaaaaaattttcaaaaattttccggggaaaaattttttttttttcccccccgggttttttggttttgggaccccccccccccaaaaaaattggttttnncccnncttttacnnnnnaaaatttttttcccccccccccttttgnnnnnaaaa

SEQ ID NO: 8257 - DNA, 660 bp, Gossypium hirsutum
tcatatcaaactgacataactactttttttgggataaaaacaatgatgccgaaattaaggagtattgggtaggtcttcatcgattgatggagattgactctttgttagatgttagaaatggaaaatctcatctgtctaatcaagaatatagtgataggtggacgaggtcatgatttcaagcaaatttctgaaacctcaaatcttctctcagcttctaatttcaatttatataaatttatttttaattgtttatatgataattatatgaatataaggattagccataattataattatatatgtccgtgggtcgggttgagtcgagccttaacagaattttaggtctgggttcggctcgaaaaataggcctaaacttttgtctaagtctgacttggattatagatgttaaatctgggctcggtccgtattaattttttattttatttttatataaaaatgtttgaaaaatataacacatcaaaaacactaatagtgaaattatagcaaaaacagtagcaaaacagttagaaaataatagcaaaacaatgattttttttttacaaattcaagccgagctaggtctggatcaaaaaacattattcgagatctatatttttgtccaatctcattttttaaacggacaacctggtcagcccatga

SEQ ID NO: 8258 - DNA, 603 bp, Gossypium hirsutum
  misc_feature (45)..(45): n is a, c, g, or t
gacagaatctctaatgatgcaaatggattcaattgattttctccnaagaactcaacaccaatcttctgtacttgatcgaaaccaataattgaaagatcttttaacaatggcaaccttccaactgatggtagtgatttgcagtttttacaattgcgaagcttcaaagacgacaaattcttgaaggaagaatctgctatccaagatgagaattttacacccccgtaattctcaatgatgagttgctcaagctttttctgaggacgaagaaagtccaacacccgctcttcaacttcttctttccttgtactattctccaagtctgtaccccattgtagttctaacccatcaatccctagcttctcatttaacttagcttccctcgcatcttgaccattaacattctccaatccagaaagacaaaaattacctctaaggtttgacaaatttttcaattctctaataagacgtccatcaccttcccctataacaaaattagataacgtttgaagcttggtgagctgatcaaatccggagggcatcctttttattgaacccgcacctctaatatcaagaaaatacaagttgacaaggtttccgatattc

SEQ ID NO: 8259 - DNA, 532 bp, Gossypium hirsutum
  misc_feature (497)..(499): n is a, c, g, or t
aaagtcttaaaaattatttttttcattgcagttcaattccaaataaaagattccatttataaaattataaaaactttaaaattattaattctgttaaacaataaatgatattttttaaacataaaatgttaacttcattctgatttgactttatttagttcttttgaataatacaaagactaattgattcatttagtagtaaaaaggttaatttaattagtttcctataatacaaggatctttcacatacatttgccgtattattagttacaaccgttatttttaaataatatatctccatgaaatgaaaaacaaccatgaatcctttatgtgaggttaatctatcttttacgtatatagcttatttatactagaaattccatcacacgtatatttgtgtggaaaccatagatttaaagtataaagatatgtttaaaaataatacacaatcaacaatgaaatatattgtttgaaatatgtacggtattaaaataaannntagattaaactgtgggtaaaacaaaatttaaac

SEQ ID NO: 8260 - DNA, 641 bp, Gossypium hirsutum
  misc_feature (609)..(609): n is a, c, g, or t
aaaaaagaagctgttttgaaaaaaatgaaattttaaataagattaacaacagtatgttttgactttagtacatgggttgtaattttccttgtttcagctgatactatatagttttggtgagtcctggctttcgttaaacagacatatcgcattgcaagattcttcctcttttttaagttttcgtattcaaattcagctcatgcatgagcaacaaaccatcttaaatatatatttttttcaatttgaggtgaatcattactatcgtagcaacgaggaaaaagtggaatcatactattaaaaatttgtaaagaattatgagtagaaatggattttgtaaaagaatattttaaaaaaatatattaatacacaaaaaatatgtggacatctatatagacacttttatttcgttaatcatgtatatactcagctttattctagaacttttatttcattcctatacctttcctttgctaccttattgatttaaggattgaaaactgtttcgatggtaaaactccgacgtctttttaataaatttcctatattacaaatcaccaatcattcatttctatttacttcaagctcaaccgagacataaataataaaaanatacatcaatcattacctttttaactcttcca

SEQ ID NO: 8261 - DNA, 626 bp, Gossypium hirsutum
ctcaaggagagtaggcaagagattccaatgcaaagaattgaatccattatacgtgagcaaaggttagaaactgcctggttacaggctgctgagaaaggcactcctggatcattgagtcggttgaagcctgaaaagaatcaggttctgcctcaagaggtctatcgtcaaagtaatttgggatcaatggattcatcagcattctcctctcagcaatgggatgacgaactaaacagggagcttaaaattttgaaaacaaatgatggacaagagattcagaaggaccagctaggtagaagggctgatcattatcccatgtctcccagtttgctgcacaatagcaatttaagcaaagaaaacctgtaagtctgcctgataccattaccggttttgcctattatttttaccaaattctttcttcaaatattaattgttgattcaaagacatttatctagttagttttgtcagtgcaataactgaatagtgataccatcataaaaaaggtcataaaaagtcttcatgctggggaacattcctgaaaccatttagtattgtagtgatttattacttttcactagaactagaagctaatactattgggggtgtttggttcaggaaagtaaaaaaa

SEQ ID NO: 8262 - DNA, 649 bp, Gossypium hirsutum
agacacacaggttgttggcagttgactctggtaatttacatttgagtttgtatgtaaatacacggattctggaggggtctggtcgtttgatgaaaccattgtttgagttgtgttctaggtgatgtaaaatttaggacatttgagttgaggttttcgaggttgctataactcaaacactttggcattagatggtaaattagaaaaagtggaaagatgtataacatatatatcatctttttttttattggtgtgtttgattggtaataatctatgaaattttttctttttataacaaattactttcagtggaattttggtatatatatattatatctcttgaaaagggtatgtatagtacatacactcaactcaaggatctacttcatcgaaaatcaaataattatttgttgctaccaaggttcaatcctaatattacagagtaaaaaagaaacaatatgatcggtataaaatgaaggattatggatcaatgtaatcttgccatgctatagtacgaatggtattgtttcctaggtgatgatgatagtggattgaaatggagggagacggtcaaagtgaaaggtggatatgcaatgcaagaagacacaaagcttccgttgctgaaaccaagttaactgctatctcgatgtgg

SEQ ID NO: 8263 - DNA, 613 bp, Gossypium hirsutum
ccctttcagtcctttctggtatgtttcagtgtcacttttctttttgatattttacagtgcaaaatgtgttttgtggatgaaaatattttagggaacggaattaatacaatgcttaatttaaacatgtaaaggaagtgaaaattgttcatgttctttcagagcctcctgatatcagaaaatggtgttcaagctatgtgtacgagtctcctttgttggacaccaatgatggtttcaaaagagatgtttctagtaaaaatgaatgtggggaagatgaacttgtcaatgaagaatgcatcaatgattttgcggattcagataaatttcaacaaaatacctctgacaagatttgctcaattaaagtgatcaaatgcagtagttcattggtagaaaggaagaatgaatcacaccctttcttttctggtcagtataaacttctagtattcttcaattttcagaaagttattgttgtttggcttgctggaaaaattttaggaaaagaaagaacatatgaaataagttatgtgataatatttgtttgtgtttcttgtgtcagaacctctagatattggaaattggttcccggactatgtgtatgagtcacctgtatggatac

SEQ ID NO: 8264 - DNA, 464 bp, Gossypium hirsutum
attttgcaggagaaagtcaaactgaaaagcacacctcccaaacacaaaaccctactcattgctcttcgttttccataatccatgaggccccatctaagtaattaccccaaaacaactcctcctactcatctgtaaaaatatgaaagaaagagttagattttatacttaaaaattacataataattaaatagtggcatagtgtgtcatgtgtacctcagtttaatatgcagagattatttttaataataaaaataaataaaattaacatataaaaattaatttacttacttttaatagaagaaacaaaattcaaaccaacttttaatgtaacaaaaatttccgtgatatttttacgtcaatcgttccctcatagctgcctctccctttaagccacttcgtctctttcaatatttccttaaattttatcttttcagtaaccgttgacttgctacactgtgtgtcac

SEQ ID NO: 8265 - DNA, 637 bp, Gossypium hirsutum
  misc_feature (530)..(530): n is a, c, g, or t
aggctgagaaatcccaacttttgtccggtttttcacaattgcaatgtccccaacagctgcatcaaacacctggtaccacaattttacaaattgattacgatgtacaagctctatctataaacaaacatacctctgcacagtgcaagacctttagatttgtgtggaaccatgctatttatcacttattggactaaggtttaaccatgcaactgattagttgtccctcgtcttttgtcataaaagaaacatctagagcacgtgatataaaaaaaaaaaaaaaaaaaaattttggcccctaggattttaaaatttttggggggaaaaaattaagaaaaacaagggcaaaatttacttcttcggaaccccttggaaaaagggggccaaattaaaaatggaatgaccccccccaaaaaacccaaattttgaaggaaaatttaacgggaaaaattttcggggtttcaggaaaccctccaaaacaaaccccggaatttttagggcacccttccttttttgaaaaaaaaccaaaaaantgggttttaaggggcccccaatttccaaaggaattttcttctttggaaaccccccccccggggggggtttggtttttccccccggccaaaaaatttttccaaatttt

SEQ ID NO: 8266 - DNA, 707 bp, Gossypium hirsutum
  misc_feature (663)..(663): n is a, c, g, or t
  misc_feature (671)..(689): n is a, c, g, or t
  misc_feature (691)..(692): n is a, c, g, or t
  misc_feature (698)..(700): n is a, c, g, or t
  misc_feature (703)..(704): n is a, c, g, or t
gaatttggagtatttggttgatgaaaaagaagacaataagagtatgaatagtaccctctgtgtttttgaggacttgaatatctatcactgtcgatctctaatgtctttgtcatcgaaggggcacaaaaatatttgcaatcagcttcaacttctccgaacttgtgactgctcgaagctgagttgcctgttttcagacaccaagttacccacaacgcttaagtctctgcaaattgatagatgtccagagttggaatgcatagcccaagagtttgacgaaaccgcttgtcttgaatctattctaattgaatgttctggaattaaatctctaccacaagggctagacaagctcatccatctccaggagattcgattgagagagtgttcaaattggtttctattgaagaacgtgagttgcttacagttaccaccaacctcagagctttctcagttgatggttgtggaaattttggagcccttccaaagtgcatggtcagcatcacctcccttcgaaaattatgcaaccaaaatttataggttgcttgtggaatggggattacatagactcacctctcttcaagaattgaccatcagaggtggaggatgctcaaacgtggtgtcgttcccagaagaagggattggaatgatgctgcctccttctctcanctctatcnnnnnnnnnnnnnnnnnnntnnagcgtnnngannaaa

SEQ ID NO: 8267 - DNA, 326 bp, Gossypium hirsutum
aaggattttctgtttgtgttgaaataatctcttagtccttatcgagcctagtttattttctggtcccacacgagaatgattagttaacaaaacaggtacaaagaaatgttcagaactttcatcagattgactgtcctgtgataactctgaattgcaggatggcactgacattgcagcttgcctaacagatctctttagattctgaacataagaattatcactatctgcacacaaaatcaagaatcaaattcttcagctaaaggaattaaattacttctctttcaactcgtaaaaacaaaggcattaaaccaataacatgtaggggg

SEQ ID NO: 8268 - DNA, 599 bp, Gossypium hirsutum
tggttttatatagacaaaacagaagcattccagaagcaaaaactcataacatttattttcttctttttgggtgttttctttgaatcgaaatattctttgttctcttgattttgttttctggctaagggttttaatatgctttggcatcgaatagttggtcacctcatgcaaaaggcaaagtcccaggttctttgctgcttcacaaagctgaaagctctgtcttttccctttttgtttgaaaacaaatatatatatttttgtatgaaatataattttgtatttagagatgtgagttgtaggtcacttagagggattaaacaatagaaaggaagataagaggaatatttgatagactaatagctttattagccatatgtttcttcaatggcaaggaaagaagatacattaacaaagaaagcacaaagaaagaaatagaagacatattggataggttactttggacaactttcaagctgtggcggtcctggtacccgaacttatttcaccaacatgacagggccaagtaatgataaatttattgaacctattgaatttgttgattgaaacccttacaaattcaatctctattttggtttcag

SEQ ID NO: 8269 - DNA, 618 bp, Gossypium hirsutum
  misc_feature (607)..(614): n is a, c, g, or t
cagtcgctgttagccgaactttgtgtttctcacgacggcaaagcacttctatggagtggcatctccgcagccgtggccgtagcaggtaacccagttcaacattttaaattcaaacacgtcgaattggatctcttctttgtacgggaaaaaagttgcacaaggcctgtttcaagttggacacattccaagtcaagaacaggtggttgacattttaaccaagcccctatcagtagttcgaaaaatttagaagtcaacttcgggtttcagtcaatgaagctaatgccaggaagaggaagcagacaagctcggggcatgataggagaaaggtttaacagtcagttagttagctagttactaatagtttattagtacgtccttccatgttgtattaaatacctgcatgattcactaatgaaagcaagtcagtttattgaggttttcactcccatatgttaatatcttaacagctactgtagaaactccaaattagattcctgtaagagatttgggattgataattctatccacactgacactgaaacaggacattcacggaagaggtgattcatagtttctgctccttttccacaatggggacaaatacaannnnnnnncctc

SEQ ID NO: 8270 - DNA, 669 bp, Gossypium hirsutum
cacttgtagtctgggagaaaaatgccttgatggtgtcaatgtgttcctgttttctgtcatgggaacaacttctgagaatatggtggctgagaacgaaaaagaaaaacatggaatatcaatacaatggatctttgttttcctatttcgactgtacatgtcttgccgaagcttgtacaggcaagtcattagccttacacctcccagcacatcacggaaattgtcattggcaatgggggatgcattcacagcgtatactggtagggattggatggagaaatcagattggactgatgacggctacttttcttggattattaatccttcactgtctcttcttgatcttatacaccacataacagacacatacattaaagacaacattgaagattgctgtccactgatttatgtactgcatattatggctctccaaaggctagtggatttaagcaggcatagatgctctcttgagtatttattagagcagaatgagaagctgatgcaggttcaaaagtttgatgatgctgatttgtcatattatagcaaaaaagacagaaagttgaaaagacgcatcttagttttggagcaagaggcagtgcagcttgctgattttgtgctgggatacctttcattagtagctaataatcactcatcaatcctctcctctgatga

SEQ ID NO: 8271 - DNA, 609 bp, Gossypium hirsutum
tctggcgtgacttgttattaaactgtagaaggagattacattttgagtaaaaccaatgatttaaaagagtaaactacacggttggtcacccaactttcagaaattttcattttaagcaccgaaataaagaagtttgaatatgggcattgccattacttttatcattgtaaaaaaataaaatgagtcaccaaaatgaagccttactaaacttgggtgactagatcgagtgtaggtaatgacaaattaattgtggatgactaaaatgataaaaaatatataacagtgcccatattgcaaactttttattttcaatgcccaataagaaattttatgaaagttggatgaccaaccgtatggtttaccaattaaaaaagagtagaggtaaataagatgaacaggaaattgcaaacctgcatgaggaagatcgcagcaaaagcaacagctaagagtagtgaaatatggccttgtcttttcgagtacgagaaggacttccttaaaaacttgcttaaaaaagatgcaatcgatgaagcattactcaaagttccttgcaaaagatcggcaattcgttggttaacatccataaaagtagacatctgcaatgtccttact

SEQ ID NO: 8272 - DNA, 544 bp, Gossypium hirsutum
  misc_feature (438)..(438): n is a, c, g, or t
  misc_feature (440)..(446): n is a, c, g, or t
  misc_feature (482)..(485): n is a, c, g, or t
  misc_feature (499)..(505): n is a, c, g, or t
  misc_feature (507)..(507): n is a, c, g, or t
  misc_feature (509)..(514): n is a, c, g, or t
  misc_feature (521)..(527): n is a, c, g, or t
  misc_feature (530)..(537): n is a, c, g, or t
  misc_feature (539)..(539): n is a, c, g, or t
catgagacatcaaagaactattagcatgcaatatctaagcatttggtaaaataaaaatgtcaaaccaaaccacaatatgcctttagctcgaatttatgactagcgacatcaaatttcacacctcattgctctctttcattcttcattcctactcttcttcctccatattatatattcagagccagacaattttctagattgggatgtttgctccagatattagtattcaggacaagggtgattaccttactgacattgttgttcgtatcttttttcaatatttttttcctgaaaattgaaagaaaaaaggaccgggatatctttttgaattttggcctccctgggtttggccccatgggtattgggatttccatcattccatatccaaaaaattggggttggtttggttaaaattgcatttgattaatgaagttcggncnnnnnnnataaagttcccaaaagcacctattcttcctagcatnnnncattccaactttcnnnnnnnantnnnnnnaaaaatnnnnnnntcnnnnnnnnancttta

SEQ ID NO: 8273 - DNA, 679 bp, Gossypium hirsutum
gaaagcttccttacacaatttattctttttatttttattttaaatacaaatgactgtttgagaaaaacaaaagcaaattttgttctaattatgtttattatttgatacattggatagtgggcgaaattaaaaaatcattatttaaatttgtattaaataattatcattaatatatatgagatattatcccttaaatgttttgtttgaattagttgattcctaaactctatatggatcactataccgattactgaataaaaatagttgtgaagtttagttatatatgtttagatgtatatattgcattcttaaaatggagaccacatgttcgaatctcaaagatatattgttaaaagagacaatttcaaacctcgaacatgcatcataaaataaatatggaagatacagttaacatttcaacaaaaccaactttgtatgatgggcagatcatatgtgatcctcttaaatcaagattccttggttcagccagccaccagggcaatctttaataaattacatgtttaattcagaaaaccaggttagcaagcaggctctttttcttcttttttttctagaagtaaaagccaacaagcaaacaacaatcttagtaaaatactgaattaagaaggaaaatgtttttttggaaatgtgtagctgtgcctgcctagtgaaattatgt

SEQ ID NO: 8274 - DNA, 654 bp, Gossypium hirsutum
gccacaagtcagaaatattgcttaataattgatcaaacatgcttatgcttcattttcaaagtgactcatatcttttatcaaaggagtaaagcatggttgttttaacatttcaagccttctttatgtactttggctccctctatgcttattctacccatccagctcaaaaatataggaaagagagaaaaggcaaagtatgactatcagcaacattgggaaaattctaaaacgagctcctcaatatgagctttccatcagctccaatattaccaaaacattacaaaagctgtaataatttgtgtaattggataatgttttgtataattacacaaaacattacgaaagttgtaataatttgtgtaattgggtaatgctttgtgggattgcataattacacaatacattacaaatgttgtaataatttgtataattgggtaattgttttgtgtagtagaagcttatggaaagcttattttagaagctcaccctaaaagttctcacaacattgtgcaagggatgttgcatcctccatacatataataatgtccagaaaatatatccatacactgtgaacatagataaatctcccaaaaagataaactaaaaaactaaaaccatgaggtagatctacaacaccaaggataataccgtgct

SEQ ID NO: 8275 - DNA, 587 bp, Gossypium hirsutum
cgtaactagcacgcacttttaaccttttcgttttcacccaaaacaacccattagttgttttttagactctggactgtgtatttcttcagataatcttggattatggctgtctgggaaattggtttgtcatccgcacagcctattatcttggtgtaggctgactgtgaatcatagcattgcagcttcttctatgcatgtatgtggaagagaagacgataataaccggtgttcaattcccttttcgattatttgcgagaaaattcttaaacaaaaatttttgggataatggcaaatttgtttatgtactttacgtcaaatctttgcctttatattttaattccaattcactttacttttgattgtttgtttgaattttattattaaaatttatatttagggcaaattaaacctaaattatggataaatttttaagttgcaatttgatcattaaactattcaaaagttattatttaattcattaggttgttaaagtttttttttttaaagctttgtcagcgagctataagtgacaattagaccatcaatatggtggatcagtatttatcgatgagtagaagaacatacct

SEQ ID NO: 8276 - DNA, 614 bp, Gossypium hirsutum
  misc_feature (56)..(56): n is a, c, g, or t
  misc_feature (60)..(60): n is a, c, g, or t
gtacttgagagttgagactatgtattcatgagtttaattttttcactaaaaagcancttnttcctcattttcctaaacagtgcgtgtgaacaagggaaagaagggttgagggtagtttggttcagtttggtcaagtctttttttgaaattttttattctagataactcaattcagttttggttagttttttttttcatattaagtttgggttttagattttattttgatagaatgggttttgttttatggtttttacaattatttgctaaagtttaaatctttagaaaaaaattaaagtaaatgaaaaataatatgtattttaaagttattttcaatataaaatgtttattattacattataaaaattaaaaataacattagatactattcaagtaatcattcaaataacatgatctggaatgatgttttgctttttctatttaggaatttgtttttcaatcctatatgaaagtaattgatgcaagacactgcgcaagtaaaacactttttttatcattaaaaaaagattcaaatcagagttgaatacgaagtcaagtaaaactttacaaatatcatccttaaaatcaaagttaaaagtaggtaaattctactc

SEQ ID NO: 8277 - DNA, 628 bp, Gossypium hirsutum
tgtgtgcttgtgtaatgaatctctctatatgttatagtaattgtctactgctacatctttctttcatttccaaaattgatggtttaaccagtcagtgttggatttaacattatattcatacctgtcatgcatgtaaaatttaaatcaatatgatatctgtatcttatctattgtgtacacttatggtttagcataatattcatactattactttacattctatcaacttgtcatgcatgtaaattgtaagtcaatgttggatttaacattatattcatgctgtcacatctttagagcatatgaaatgcttgaaacccttatgtcaaaagcaactatgtatttttaatttactcaattttggtcagcatgattacatgaatagagcatgaaatttaatggattaaagtatatgtaatattacattgacataacttaatccctccttatattcaagactacatacatacatgcatactctcagatgctgagaaagtattctgttaattcttcaatgagttcagttggaggaaattgaaaaaaggttttatgctatcatcagtttggtaaatcagctttttctttcttttaaggaaaataaaaatgtccccccaatgcatttaaaaaaggt

SEQ ID NO: 8278 - DNA, 652 bp, Gossypium hirsutum
tatggcgagtcccatcgctgcattctttgaccggctttggtcgagcaaccgctacatttcttgaacggccacagcctacataacttttctccctcttttcaaggaagttagtctcagaccctatgtagttctctgtccctttttatacagttcctgacaggtgctcttgtggctcttcactccagccctgaagtattctgtgagcccaatctctttcacatgggccctccccctccctccggaccgacaagaccccagacctaacgagagatctctctctctccctccctttctttttgggccgctttctttgaaacgaaacggattcttttgcccttagcctgtcggtcggcccgggcgcccatgaggtgtggtccgaactcccccaataatcacggtctacccgctttcctttcgatcagctgcccctcaaccgcgtcagaggtatttattaataacccaaagaaggaagaatcgaaacagaccaactctatactataggaactttcagttcccaagagggccttgaaatcgtccatctctcaagaaggaatcccgcactctattcagctggtgatatatgaacgagttggtgggattttccccaaataaagagtccaatttcgattgtaagacatgaattcgaatactc

SEQ ID NO: 8279 - DNA, 623 bp, Gossypium hirsutum
ccattaacagttttactagtatagttttgacttttgacttaaaaaattcttcctcatttacttttccgagtattttgaggaagctctcccagttggttcctccttttatcaagccttttaaggatactctctttctctatggccaaacaagataagcaacacaagattttcattttttctttgaagggcatttcgtcttgttaaacttgcattttttgggtcgatcatctcattttgacttctgggtttgtgtcagtttaagcattggatgttctgtctagtgtttttaagacaaccccattcatattctacttgcgactcaggaaactatcttcattttgttgttttagtggcattgatatatatatatatgtacatcatgaatatgtgattgaatgttagtagttgggtcatggatggccaaaattattgttttcttggtgaacaatgaaggaaaaagcaagttttgagggaattgttctttttaagtatctttccaagtgtacaagtatgggaggaaaacttcaattttcttgatatgtcaaaaaaaattattatttcttggtgattagttattagattggtgcctttttcctttcatttgatgactacacctcatgtca

SEQ ID NO: 8280 - DNA, 645 bp, Gossypium hirsutum
atttcttcacatgcactgcacgtctcacccataagattggtaaggaacattacacatatgaataggaatgcacacatacacgcacaaaagaaagaaacattaagaatagacagatagcttaccattcttcgatcaatcatagagcatccatcagcacagatcatagtcatctgttaactatttaaggttcacaatcatcacattgattacatacaatatcaactctcaaatagttataatcaccatactcaattaacgcattcattcaacaatgactcaacctagtctagtctcatcagatcattatcaaagatattcttttcacatttgcacaaaaagagatcatcttgaattcaatgcaaaacaatgatacattttcaaatagatatatttttattatcctcctcatcgagtggtaacaaaagttgattaaaattccaaaatcaaacattataaaataagacaaccaaccaaatactaaaattaatgacagagtcaatcagataataccataaaatagaaaacaactctttatataacaaaattcgcataaatagagaaagaactgaataaacaatcaagcaacaacctttttcttagatttgtagaaaataaaaaattcttgaagagggagaagaacactga

SEQ ID NO: 8281 - DNA, 602 bp, Gossypium hirsutum
tgctcaacaagcgcctatgtagatcctctctaaaatacttcatcatatcattctggaataaaagtgtgaagaccaaaactcttagaaatcaatattaatttgacaaaacaaataattttaataagcaaacattttggaaaacaaacctcaagatcttggatctgttcaattcgcggctcttcaaacttcgaccttcgaaccattctctccctttcctcctgtgataaaggccaaatgaacatttatgcacagaatacgtgtgcatggttgtattcatatgctccaagtaagtctcaaattaataaatcacccaatcataccttatttgaatccttgacattcaacaaagcttgaggctgaacagatataccttgaacaggcaacatggtatctggtttcaatcccttcgctgggatggctctcttcaaagccatattaaaagaaaaaaatatatattattaattagcagtcttccaattgaaagagtatctaactagagcaataaaaacctaccgaagttacagttctattgccatgtttagtgacaccattggaagtagcttttgcaaccttcgtgttggtttttgatgccagtccaatag

SEQ ID NO: 8282 - DNA, 663 bp, Gossypium hirsutum
tgcagcctgtgcgagaaaaaatgtactgttttcttgtttttgtttttctcaactcttgaagtttcaagtttctgcatggcttactcgatttcttttcagtaatgttttgatcatttgcactattgcagaccacaaatcatgcatggaattgacagaggagcatcatattgattccaacagtttagttcttcctttttgtggacagacatgcagagaggtaatgtgcttttcttctattggcattgtgatgctgaatattttgtttacaagttaaaccaaaagttaggggaaatctatcggagaagtgaacatgccctttagaaaccatctttaaaagatgttaaacctgttttatatcttgcattatgttgtagagaaggcagaatgtttgtcagaaagtattttggttttattcatgacatgatgatattgacacattgttgatatgcttgtggctaaccaaaaatattattatgaactctattgaggatgaaatgttctttgcatgttatgttcacttttttggtaatattttttaacagaaaacggttcgtctagggttgtaatgtgttttctggtattgtatattatggcatttgacatttgacgttggaatttgtttttctattttgccccttaatcttttcatgcctctgaatccct

SEQ ID NO: 8283 - DNA, 587 bp, Gossypium hirsutum
  misc_feature (581)..(582): n is a, c, g, or t
actgtaaagtgtttattgtagcacgcccatggaataaatagctgtctacttacaccctcaaatcacccactctcatgaaacttagtatatcactgattctaatagttaactactctttgaaatataaacttgaatcttgcgacactgaccttatatcgaatacatgactaactgttttaagttcaccttgtaaatcaaattgtgaaatcattagacacatgtaaactaacttcactggagtctaattttcggaccaaacttcttgatcaattaagtgtcccagtccctccatgcatagcacaaataacataggggtaatgggttcccctaatggatgccatgaattggccgaaatgatttcatagtctcgccattgtacagtacctgaaaaggatgctgtaagaatacaacacacgaccgaaacacagtgaaaagcatacatcaaccaaggtgttttctagaaagtcccatcctacgtttttaccaaatccattttaataaccatgtattgacatcctgccagctataaaactgggtagatttggttgcactaatttcgacatagaggccgcaatggcaannataac

SEQ ID NO: 8284 - DNA, 598 bp, Gossypium hirsutum
ccagcatttgttgcagatttgaagttacatgtggcacagatttagcctggacttgtaatctgatgttgttttaaatgtttgacctagactagtaaccttatatgtatatatatagccctggatacactttcgttgtgtcaataaatgtttagctcagacgggtaacctgacacctctgcatgtgattagctcgaatgagcctctgatatgaagcatacaatgtgttttgagttcttttacaatgtttattgagtaatataaatcatgtgaaatatgaaatttgcaaattaagaaatgagggaatatgaaagaattaatttctacaatggaagtctaggtttgagattgaatttggataagaagaaagtcattgtatcgtattgcttatttagtatactatgtataattaatgaaatacatgttctcacctcgttggcgaattatgctggcgaataggaaagttgtatttgtgtattaaattatcataatattattatgccaggtaagtaaccatcgaatttgtatgagcttattaagtattctaaatacttacacccaaattgcttttgtcttgtagattttggaacgcttagagcta

SEQ ID NO: 8285 - DNA, 641 bp, Gossypium hirsutum
  misc_feature (559)..(559): n is a, c, g, or t
aatgaggaaaaatatgtcaatcatctccatagtccatattaataaaaaaaatagattcaagcaatctcaagtaaacttacctgttatcttctgtaacaccttcacttttccatattcttgccaaggctgcaagtgacaaagcacatttcaaagtctccacctgtttcccaaaataaaagttgaacgatcccctgatgatcatgatgagtggagaaaacacatgaccattcttctcctcacaaaaatggttgtggtaacactatagtcctccttcttccctctcctctaccacaaaacaataattgttggttgacatgttgtaaaaaaaaatgatgctgctgcaactgctgtactactcaaaaaaaaaaaaacatcataaaaaatattttctgctgattagttgtttcttgttggaagataatattattaaaaaaaaaaaaaaacataaaaacatatcatatttgcttctcctcgtgctgtgctcttgtagaagaacattatttacaaactgtgcatctcagtggataacataacaaaaaaaaaaaaacaaagcaggaanaaattcctaaaaattaaatttgcccaccatccaatttgcattttaacaaaaactacccaccccccaaaaacctattccttca

SEQ ID NO: 8286 - DNA, 633 bp, Gossypium hirsutum
  misc_feature (57)..(58): n is a, c, g, or t
ggagcttacgtatgttcccttgattcttttctcaacccgttgttaatttattctttnnatggagagatcctatcggagtttattttttatttttcttagattttggcttaaaatggccttcccttggtttttcaggaaatttgtagaacatctttcttaaaaaaaattttggctcattttcagtcttttgaaaatctctaatttatagttcttgctctaaccatattgcacgtatagatgatttttgctccaaattggtcccctccctttcattttcttgttacatattaaaatgaatactctgaaactggatcagcatcaacattatatgacttcaaattaaagtgccttgatgactaatatatatagatatatattcttttttgttgtgtggcgtgcaggtgttgaataattttgacattccggacccatgctccttcttggaacttgatatagagagcttcttataggacatgttccattgacagctgaaagtatgttacatctatatcccttttgtcctcctttacatgcctattatgattaaaaaatttctagtttattattttctgtctgaatgaattctttcttttatcattttatttacgggtaattattttatacacggcctat

SEQ ID NO: 8287 - DNA, 606 bp, Gossypium hirsutum
tcaactgaatgctaccgtaattgaattatgaacctggaatcatgagctctctttggctttcttactattcgtgtcctctttatgcaaacgtttccatatgtatgccagcatagttttcctcgtaacgacttaccgctcaccaacctttgcattgtgaaatgttttgaggactcgaattaaataaattatgatcatactgtaagaagcgatagctaaatgaaccgtgactttatagcatttaatgattaattgagctgtaagtaacagacatttaacagatgtcgcattccttggttaatttttacttttgccttggtgacatttataaactaaaactcaattattttaaaacacgaacttttcttctttccctttctgtctgaaatatatataaatgaggattagaaagagatttccctcatatccaatcgtgccaacttcagtcgcttcttcaacagaagaagaaatgaagccatcctctcttccaaaatctactgaaggaacagctagagaagcatcacaagaggtggtactcactgattggccctctattgtggcacaagcacacaaactgctaggttgttcatcatctacctgtaggtatca

SEQ ID NO: 8288 - DNA, 605 bp, Gossypium hirsutum
ctactgaactttgattaatatcttaatgtagcaatggaattagttgtgatatgtgagatcttatggcatctacgctatttattctgtggaaaaaaggtgcgaagatgaagatgactgcataaaccttgtacttctattaagttaggagttaagttctttcattaggttatagtttgagcattgatgaaacaatcattcttccttccaagttttcaccattagtataaatacctgatgcactgcgttatcacttatcacatattttctgatgtgataaaactttcttctcatgtcacaattcaggagtgattgaacgtactgttcttggataattctgacttattgtcaagtttcataatcttacccactaccttgatgattataagttgtattcctcgtcttgtagttatctttattgttttagaatgatttctcaagtccataaaccaagtggtcccattttttaagatgatttttatcatgacaactggtatgtcttttctaaatctagtattccttgtttgtttcaccttaacattttgtaacttacagctgggatgtggaaaaaatggatgtgccatggctatggaggatcaacaatacat

SEQ ID NO: 8289 - DNA, 589 bp, Gossypium hirsutum
  misc_feature (540)..(540): n is a, c, g, or t
  misc_feature (545)..(545): n is a, c, g, or t
acccactggcatttcgacccatgaatttacctctggatcatatacctcccctccaacatcaacaaaaaacggccagcaatataaactttgtggcacaaacaacctgcccctatatgatgtcagtcctgtggcaatgggtttgagtagatcagccaaaaaggcagtgggtagaacctgagcttttgaaaatggcatgcttggtatttgagaccatatacctgtatgagaatcaaatacttcagcagactgaagtggggttaatccaccaggacccctggtaacccctccgacaacataaagcttattatttagtatgccagtcttacagtaggccctagcagttaacattggacatacttcactccaggaatttagaactggattatactgccaaacacatctaagggctgaagctctagacaatcctcctaacacatagaggcatccgttaacagcaccaattgcacacccacataatggactgtccaatgcatccttcctgacaagccatccccttatgacatcagcaatttttatgcnagagnccaccacattccacattcgaaggccatttaaacctttcctggat

SEQ ID NO: 8290 - DNA, 483 bp, Gossypium hirsutum
  misc_feature (400)..(400): n is a, c, g, or t
  misc_feature (419)..(420): n is a, c, g, or t
  misc_feature (426)..(429): n is a, c, g, or t
  misc_feature (445)..(446): n is a, c, g, or t
  misc_feature (462)..(464): n is a, c, g, or t
  misc_feature (468)..(470): n is a, c, g, or t
actctcttagaagcagaaatggagttggatcataggctcttggaaatgctatctaccattgattccctcaaagacgagcaaaagaccatggagtctgaactggtggataaacaaaaccagatcaaactcctccgacattccggaaaccaaaatcctcagctcccagctttaataacaactttgaagcaaaaggaggatgaaatccaggacttgaatcaccgcctcaactcctcctctctcactactcatcacccaaatcatcctctaaatataacaattatggaggcaaagacggtgatgactgttggtgaggatgatggaggaggtgatgattcttctccaagaggtgaggacaaaactaagttgagttatcctcatcatcaagaagacaaaaaatgangggatgaagaaggagatgnnaaagannnngagactactgtgaaanngaaatgaattctaaannntacnnnatgtatgtggaaa

SEQ ID NO: 8291 - DNA, 610 bp, Gossypium hirsutum
  misc_feature (603)..(603): n is a, c, g, or t
  misc_feature (605)..(606): n is a, c, g, or t
agtccagatgttgatatgttggacaaaataggcaagatatgtgttgtggcaaggggtgatggtgttattgatgtgattaatacggaatcagaacttacagccacaaaacctaaaagttccacgaaatctcgaaaaggaactcagtccaaaggaagtgacggtggagttcccgatgaaaatggaagaaaatggttgcatttagattactctttaggtggtcatactgctgccgtgtcttgcgtgacattttcgttgtttggagagaaggggaagttccttgtatcgggtggaaacgataagttagtcaaagtctgggattgctctaggtgtctcgattcatggcagacaggagataccaacgagctgctacatttgaatatcaatttaaccaaaaaggtgaatctcattgcttcatgtactgtatatgttcaatttctcttagaagcttctcgtttttaaccacttctgttgtcaggttaattggctctgtacaactccagctgaatcggacaacctcgttgtctgtgacacaactaaacttgtgaaggtgtacagtgtttcctaaaccaaagctgcagaatcatcacgtgaggttgtcattananntttt

SEQ ID NO: 8292 - DNA, 485 bp, Gossypium hirsutum
ctgaatcttattctgatcatttagacgacaagaagaagaaccagtttcaacatctgtcgcaacattatgaatgtcctgctgctgtggtatcactgtcgtcggttgcactaggaatttgctgccttcttgcggctgttcatcttctggtttctcaactttgacatcattcattaacagtgacatcaattcatcagagtctggtaatccaccaagtaaactagcccaatccaacttactatcccccatttttctcccttaatcaccgaagttgtagacaaaacccctttttttttccagataatttcaggcagatttcagctgtaaagtcctatacagagggacagaaggttaagaatctcaaattatctcaatgattaagttcagataattttattgccaaataattcataaaccatgcacacacatatatatattgtgatcaagtcatagttcctgagaaattataagaacaattaagcatgaac

SEQ ID NO: 8293 - DNA, 453 bp, Gossypium hirsutum
gctctgagttattctttgttcgcaaaggcatcgttcttgcaggtttcattgacaccaacaatactctctttgagtccttaatcaatgaaggagatgtgttcttgtttcccaggggcctgctccatttttgcatgaacgctggttatgagccggccattgcgttctctgtgatgaatagccagaaccctggtgtggtgagcattggtggcgccgtctttgagactgacaaactactgatagataagattgtaagaagattgatctccgttcggggaacaaatatggctaacttttcaaaaattcatatccagtaaaagccttggaaacatggtgttttaagtacatggtttttctactgcatgaggtgaaaaattgcaacctgtgatttaaaaagtgcttaattatttgagtgatttcatgtttcactttgtagaaaagaaagttatttcttgg

SEQ ID NO: 8294 - DNA, 586 bp, Gossypium hirsutum
ataatttatgttcgggttgacgtcaatttctttttttaatggaaaccttaaacatttcattagagctgattcttcatggttgatcttttgtcccggttgatgggttgaggtcaaatctattatttaaattataaataaacaaagtttttattcatttcaacatatttaaattaatactacgtacctcatctttggtgtaagggatggcgtaagatcttccttccttttgaaccaggtactctgcttcaccaatgacatgtagaagtgtgtcgtataattttttttggtttgcagtaggcagctcatccatggaactaatatcaaatctgaatatgaaggcaaatgttttacgaaaactttcatttaaaaagaaaaaaaatcaataaacgattcaaatttttatgtttttatattttaaatatcgattaagtatcttaatagtgcaattaaaaacctccatccacgtccatgcaatcaatttacttgtgtgtatatcttttccactagaaaaagaaagcaaagaaattaataacgcaaacctttcgatagcatctgtgaaataccgaagttcttcatataaaccgta

SEQ ID NO: 8295 - DNA, 599 bp, Gossypium hirsutum
ttgtgaaggaaatcctagcttttggttaagtgccgacggatcctaccaggaagagggtcagaataatataaaggggccgatatggaacaaggtatatttgcatattacgtaggcataactactttttgttatatcctgtaccagtattaacacggatgtaacttattttcagatgggaatcaagatcttttgcgctctcttgtctttgccggttcctcctaataccatgaatcctgccggagaggatgtcaaccagccaactctagagcagcaactacttcccaaaattcttctagttggctatcaaaaatctggcacaagtacaatatataagcaggtaatataccacttgaggcaatgtatttcaatcaatcttttccctgcgttcggttttatgaaactggaaatgcggaataggctgtcttacggattgctgaatttgttacttccttattccaggccaagattctgtataatattcctttcaccgaaaatgaatgccaaagtatcaaattgattatccaaagaaaattgtatggttatcttgctatattgctcgagggacgggaacgatttgaagaagaaatatactgagaatg

SEQ ID NO: 8296 - DNA, 670 bp, Gossypium hirsutum
ctaccatacgatgcaaaacagatagcttctcctcaagctgtagatgcaactgcttactctcacagcaaaattgatcaatagattcaacagcatcaaggatcattttcctttttttaataccacgtttaactcctccaagaagaccaacaggaagagaatttctcatattattttcatcaaccacagcaagattttcattgcccctagtttttgcaactcctccagacatacttgaaatagttggttgtaaatttaagttttcttcactcagttttgctgatgtggtaacagaaaaagcacccctttcctgtgagcccaccaactgtctatcagaaaaagatgctgtactggaacttattgcagaactctgtaacatttttcgattagagcctccaagcagagactccaatttagaagtaatacctgttaaggtttcagtaccgtcccctccttgcatatgatgcaaatgtgtatcatgttgaactgtttccagaagaggattgaatggaggtgtatccatgcacctagacttcagcagttggtgttcagtttgaagacatttttgacgtaagtttaggctgcataaagtctttttcaactttgtccgttgcatactgccaaaatctccaccctgcaaagcatatcaaacaatcccacgtacaaacatgat

SEQ ID NO: 8297 - DNA, 662 bp, Gossypium hirsutum
agggatggaaaacctttaaagagtgcagtgattctattaggaattcatgaagcaaagatttatgctttggactgaattccataataaaattgcagctaggaagattgatgaaatgaaaaggcaggcagacagccttttacacaaaacaatacctgcatcatttttccccacatcttccttgctgttataaaacttccttcagtaagaccaaaacaaggtagaattgttacattgacattctgtgtttcagatgcagcaaccgcaaaagtgacaggagggttccccttagcagtcctgtgaaatggccaaaattcttagaaacgcttgaaatcaagtcataaagtaagcaatatatacaatttttatatgcgcatatatcatgaatcaaagaaaaacacaaacaaagataacaggagacaatatgagggatggttaatgtcttcaatggcccctgaacaaagttatttgtccaatgtgatacctatagtttaaatatgtacaatgttgcactattggttcgtttaacaatataacccactcctccaaacattgttaactctcaatgaaggtcattgaccaatcatatgatagcacatggcaaaataccatcccatcaagcataattagtttcatgatcctacttggcattgacatgttagact

SEQ ID NO: 8298 - DNA, 654 bp, Gossypium hirsutum
ctctgacaaagactttgcaggaaaggttaaataaatttgctgctaacttaaagcaagctggcgaaagtgatgttcgaattgagcgttcagtgagagagcatgcttcactgatgtcaatccttaaccacagaccggtatgttgaattgttatttgttgtttctgtatttatgcactacaagttaagtataagttattttgcctggtctttgaggatgcaattgatattagtttgcttcctttaaattggctggtactgctttttgcatactgttttgattgtgaatatatgtgtgtgaaaaccttgttgcttattcttttcaataacataactgaagtgatggattgactattcttttttatgggtatccttttgcttatatgttcatattctgttatcagatagaagctgccctaccaagtctttcaaggccaataatgtctttggatgccaatgaagatgctatagttggggccctgaagcagagcttggtaatttctacttttctaatccaaaatttcttgagtatttagcctatgcttcagttttcccctcaaggaccccataccccgaggataaaaagaaaaaaggatagggcacaaagtgaaaagtgttattttatcttatgttacttttgcacccttaagctacaaag

SEQ ID NO: 8299 - DNA, 652 bp, Gossypium hirsutum
tggaaagacaatgttagcaaaggccattgctaaagaagctggtgcaagcttcattaatgtatccatgtctactattacttctaaatggttcggggaagatgagaagaatgtccgagctttgtttacattggcagccaaagtctcaccaactattatattcgttgatgaggtagatagcatgctagggcagaggactagagtcggagaacatgaagccatgcgaaaaataaaaaatgagtttatggctcactgggatggcctcttgacgaggcaaaatgaacgtatcctagttcttgctgcaaccaatcggccatttgacctcgatgaagccataattaggcgttttgagagaaggtagataaggatcaagttctatgcatctctaacaagattggaacacttaattgtggtgttatttactaacccttgagtcattctaacagaatcatggtgggacttccgggtgcagagaaccgggaaaagatttttcgaactcttttgggaaaagaaaaagtagaagatggtctagacttcactgagctggcattaatgacggaaggatataccggaagtgaccttaaggttagcattttgagaggatgatagtttttagatgaatagtgtaaaggtataatcaccgccatttccagtt

SEQ ID NO: 8300 - DNA, 651 bp, Gossypium hirsutum
aactcatgtaggttgctagcattactaacagtcagatgctaacaagttgttggaattaaacttcaaacaaacttaaacagaacgcagtcaataaacaaaagaaataactttacctggaccaatgcatcataaactaactaaaaatttggctaagttaaatgcatctatcaaggatatcttgaaaactaaaagtactaataattattatatttctattatttaactgataaattcaagtgatacattaaaaactaaattcaactaaattaattaactagcgaaaaaggtaaagaacaaaacaggaaaataatcgattaacaattaagaagcaaaataatatccaagaaaaaattcacctagatttcatctatcactattaatctaaattatgcaatttatttacttagtaatttgatccgtagaaatctttaaattatccaaatatctcttttgagcatcagagcaactgactctaggttaattaatttaaattttttttctaattaaaatccctattatcacattaattcgtactataaatccccctattagatttgtctctaattcactagatttatgtcgtcttatttctaggattatatgcaactctactcaattacgtaaaatctactcttaaacaggatctattca

SEQ ID NO: 8301 - DNA, 519 bp, Gossypium hirsutum
tacccctcattcacaaaaggaaagatcaagaaatggtgagtaaaaatcagggagaaatagcttgatatgaataggtgataaatatggtcatttcacttgaatatgaaaagcagcagggtaaaagtacaatggctacttttgtatacaatggctacttttgtatcagtagtcagattacatttattcgtttctactattaaaaactgatttttgtgcgttaaaatgaagtacacgtggcataatgcattaaatcaaaagaccaggtaactttttgatctgatgtataaaaactaatttacttgtttttttgaataaaaggacgaaatgtaatctaactcctcaattgtacctatagaagttgaaaaccaaaaacatgcagaacaaaacatttaaaaagaattattagatcattcatcaaataaaaaataagtaaaagcttacccttgggaatatacacttgagatgctaattgttccaccttcaactgtcaactcttgttctttcagctttttaatagga

SEQ ID NO: 8302 - DNA, 649 bp, Gossypium hirsutum
  misc_feature (29)..(29): n is a, c, g, or t
  misc_feature (642)..(644): n is a, c, g, or t
attccctcttgctgaagttttcacaaatnggagaaaagaaaatcaatttgataaaacatatgccagcaattgtacgaggggccaatcataacaaaaaaagccaccactcaatgaaaattttaagacctcataggacctaaaatgaatgtagggatgaaaacccaaattggtattgactcaaagaatcagcacaactgaagttgttgggtagcaaaaatatttttcaactgtgtagccattcaaatagaacgatgagtgagaacttaaatgaagatgctgtaatttttataaggtagatgataaattgagagaggatggtctagccatcaaaacatagaccaaggaatgctcatacaaagcattgtttttagtcaagcaggaaagctagcaatagataaaaatacattggtttaggcgataaaaacatatcagggtttcttagatgtttcagaaactaaaagccttttaactgatcttaaagagaaaataaattcacatagcaaataccaattagtttcagattatggctttggacgagctgagcagtacacaacatttcagtgtcactgttggagaacctcataaatgacaaacaccaattttctagctcaaaattgttctcatcctaacagaaatgatacnnntgctc

SEQ ID NO: 8303 - DNA, 627 bp, Gossypium hirsutum
gtaagagctttgtaattgtgggttgatctcgtggaagcttaggttagggttttctaaggatctgttcaagagatcgatcgattttcgcgaaatcgatcgatcatgttatcgaatcattttgaaaatggaatggatatggcgaggcttgcttggtcccggcttccacattcagaagacggtgagcttgacggagtcggattattgagtacttcaagcaataggaacggcgtcgagagccttgattacgaagttattgaaaattacgcctatcgagaagaacaggtactactttttttaaaaaaattcgtaaaagaatatgaaaagtacagctgatttttatgttttatgttattgaaaatatgtatttattttaatttaatttaggctcaaagaggaaagttttttgttggatataacgtggccgttaagtggttcttcgctttgctcatcggcatcggtaagttatttgtttcttgatttcgattccgcttagttattttggtttttaagggggaaaaaaaagataattcagttatttttgtttttttagttttatttatttactgaattttttaaagtactgctagcttaatcttagaaagaataaaaacgccagaactatattgg

SEQ ID NO: 8304 - DNA, 635 bp, Gossypium hirsutum
tcagctttagtatcgggctccttaggcagactcttagcagcatgttcaatgccatctttgccactggcaatgacttcaaagatgagtgcattcacttcccggaacctctcatcagagagagaaacctcagccaggagcctccaagcattttcatcagacgcctcatcatagtccttcctcctttttaacaccatatgcccactaatttcccacacagctgggttcacctgggtatccagaagctctggactcacttccccgagagcttgtttctcagcataacactgttagttaagttgaaattttgcaaaatcaattgtaagaactagcagcatcatggagatagccaagaagcataaattacacttaagcttattacctgtggaacgagaaagatccgctttccacaatcggagatgaggacattatatggtatgttgttctcttgaaggcaaatgcaggcatcagagacagtgtcagacaaggcctgaagagtgttaccaccctcaaagacaagacccctgaccggatagcttaaaagctctgagattatcacttcatcatacaaagtggttatcttcttcgttggagctttctctatgggaaagggcacagccaagtagtaagcctgcaac

SEQ ID NO: 8305 - DNA, 501 bp, Gossypium hirsutum
ggtattgggaaatcagttggattatgtttttgatcatagaacaagtttgatatatcttgttggcattggacaagcagatagattatgggtattttggacaaagattatgttttatataacaagacaagagaaaagttaattgtctgcttcttgatcgtttgcaggtgttaaagacaatttgattagtttttcttttacttaaaaaaatataaattgcttttaatttttttttaaaaaattcaggtttgttacattctcatcattttattatataattatttattatataattattaaatgaatattttttttaaaattttaaaatgatgcatcaataaatttaaggatagacttctaacagaattaacaattagagttaaattttaaattaaataaattaaatttcacatgtatcaaaaataaaaaaaaattaaaacatattttaacttctcaatatagattgaacttgttcaaggggtgagattatttattcaactcaag

SEQ ID NO: 8306 - DNA, 599 bp, Gossypium hirsutum
  misc_feature (588)..(588): n is a, c, g, or t
gctgcccgtgcacctctcattgtggcgactctccaggccatttgttgtttgggagaaaccttgtttgagaagaacttacctcaattcttccctcttatttcgaacttggtaagtactgagcatggttcaactgaggtccaggtagctctcagtgatatgcttagttcctcggttggtcccgttctgctgcgatcatgtttgtcctggtgagatttgattgtattttggatgtgtacgataaacatgtgtcccccccccccttttcttatctagctccatagttttatttcctcctataggtaataactattaacgaatacagtgttagtgtatgaaaagagtgtttagagttagttttgaatcggttaatacttcccatcttgctgtgtagttattacgtgggagaatagccactctattcagattatatagatatgatatttttttttctattgttgtatctctcttttctttttttgcctttaacaaagtttcagatcattaattttcatgtaaaaagggacattattaattactagaaattaaagacatcttattgtatatacacccttcctttatgaagttggngcctcataatg

SEQ ID NO: 8307 - DNA, 659 bp, Gossypium hirsutum
gagccaacatctttttctgagcccggctttagagggtcagtattaccttgttcatagtccattctggtttcctcgccgcgagctttagggagcccactatcatctatattttccagaacctggaatctagagtttcttgctgttttggttgcgccgtcgccctcatgtttccatcctgttcttctagttttctttgccttcctttcaacaagcatccatggaccatataattctctatttgagttttctgctttgttttcctccaatggatgtctttgtctcgtctgatcttctgggatatcctcacctattccttccaatcccatctcttctttagggcaaatttcttttgtgtaaccatagtgcccacactggaagcaaaccatcggaaggtgctcgtattctaatcgttgtgtaactccattaataagtgcctgtgaaatcaaggcctttcctaggttaacaaatactgccattctcgcaaatctccctcttactccattatcggtgttaaaatctaatttttctacttttcctattgtttctccgatttcccgcaagatttttcgcttgtacatgtgcccaggtaacccaggaagacgaatccaggccataactatattagggtacggttgagcaggattaaattccatagtcac

SEQ ID NO: 8308 - DNA, 649 bp, Gossypium hirsutum
atttctaggctaatacttaggttataattaggttaatttgggccctttttttgatgtgtaaatggacttggactgttttattatttggattttttttagctttattatttattttaatttttgtttttcttcgggcccgggcaaatttgggtccttacatgtatgatgtttaaacatgaagtggaacaagagaagtagtcaaagttccaacaatctcccctttgatattttgacaaaactaacaacaaataattagcttttaatccagacaagtcaagtatgaactatgaaaggaacaagaatatgtttttacctaagaggtagaaccatgatcgaacatacactcctcatatcaacaaccaagtttatttgttcatcaggtaatcaaccaagaaagtgccaaagtcatcaaagataaattcaagatgtagagcatgacatataagctaaacaaaacaaatatcataaccaacataaattaggatgatcaaattagaaaatactcttaccaagagattttcattttttgaaacaaatctttcatccaaagtctctacattgtatttgattttcaatattaattgaattcatttaagctttcaagaactccaaacacttaagtgttttgggtgtctcttcaatatcatga

SEQ ID NO: 8309 - DNA, 627 bp, Gossypium hirsutum
ctccaacaaaattataaatcacatgttaaaaagaagatatttatgattcattgagatattttaacaaaattataaatcacattttaaggaatgtgatagcatttccatccgtaaagctatcttctaggacaaatggaaagtgcacgtgggattttaagtttgctaattacattctattttatggttaaagagtattttggtagttttgcatttatgaaaagggtcccatttatatatcaagccccatatattattatcaatcatgttttgattgatggttgttggtgccataaaactttgttaatgaagattttgtcactagctttcaaacatgttcttataatgtgcataaaacatgtacattcattatctgacatgatttctcaaggataatgtaattgattgagacaatgaggtgtgatatgtgataagctaaggataaccatgtgaagtcttctggtgaatgctgaagacaaatctcaaggtgttctagacaatttcaagaatatgttttccaggctccttagtctgtcaaggtaatagtacaacaggtaaattagccagcgttgacattgcatgatcagttaatcatgtcaactttttacacgaatacgatgtgtgtattac

SEQ ID NO: 8310 - DNA, 655 bp, Gossypium hirsutum
caatgactcgtaaagtgtagacagtgatggatttgaagaaaaattccaaaaataagatatggtaaaattgtaaatttcatccattacttatgaaaacttagaagttagtctctttatttttttaatttattgcaattcaatcctcgtattttatggaagttgagaaattagtccatttcttggtaaataaatgaacttgaacagattatttctgctgattccatgtattataaattgataaacggtttattcttaactcagtgatctaagtcatggtttagtagtgttacttgattggaccgatttctcaattttcaatagatggcaatggattatgtcgattcattatccaaatcgactttatttttgcggtaatggatatctaaatccgttttgccctttctggtaataaattctaattagaatatctgaatccattattcactttttctttttctttttaaaaaaattatttaaacaagtttgcagattcaaattttacaagaaccattgatatttgatcagctagttttagtacgagatcaaattttaataaattaaaataaaagtgattaaatttttaattttataaaatagagggattgaatttaaaattagaccaaaacaaaattctccttttgggtgggaatccact

SEQ ID NO: 8311 - DNA, 590 bp, Gossypium hirsutum
  misc_feature (582)..(582): n is a, c, g, or t
ttaccactaccttttcttgttggagatgtctcctctcattcatgtctccctcacttgccaaaccgtttgctttcaaacttttctgtaactcctttagtgattgaaccaaaaaaaactcctcatttacttttaatattcaaggctaagagtaattcaataaatatttgatgcatgtattctaataaaaaaataaatacttaattaagataaaaagaaatttaagtacctaattgaatgttgaatcttgatttaaatattaattgagataaaaaaaactttaagtatcaaattaaaaaggttcaaatactaaagtgaacattaaaattaaaattaaaaattaaaataaataaataaaaaatttaaatgtcaaactcaacattaaaactaaatttaaaccccagcatctatccgcacaacttttaatatgatgataatagtaaaaagttttatggattgagtttaaagtaatgaaaataaccacatacagaaaactagtgatgatgtagtaacaaaggcaagttttgagtcaaagctttcacacacatgtacacaacacgtatacttttgcaattaattatagcntatgtcgg

SEQ ID NO: 8312 - DNA, 668 bp, Gossypium hirsutum
tcttctcctcctaccattagagtaatagatgttataatttgcctttgttcactattgaatggattaagttgttattatctgcaggtgattcaggggtaggttattctactaagcgatccgctgaggaaacagagatgcaaatgcttgcatcggcaggtgatcccatgttgccataaagtaactgaagggaaaacctgttacagtgatatatggatatttctgcttgttttaaagtaggcaatcctccaagatcttcagttcttgtgcagtggctgccatctgatttatggaaccactttgttaagtgtacagaagtatttaaagaaaaatctaaaaacccagttcctagttgactggtagaacaagctgagacccttttttttcagccaaataggctgtgtattagaagttagatcagggttctgaaacttgctgatgcactggcactggctgcccaggttggctttagtaaatttgccttctctagtggcagtttctggtcaaaatttttaagtgatatcaaactcctgagaaactctattaagccattttgggaacagtgattcccccctattgttgtgtgtaaacttattagcaaaaaactagaaattagctgcgaggaaataacattttgctgataaaatttcatctcagtaacttgtccattg

SEQ ID NO: 8313 - DNA, 609 bp, Gossypium hirsutum
  misc_feature (532)..(535): n is a, c, g, or t
  misc_feature (585)..(585): n is a, c, g, or t
  misc_feature (587)..(587): n is a, c, g, or t
  misc_feature (604)..(604): n is a, c, g, or t
gctttcatttgtattgtacgtgccatttgttatgccatcttttccacctccatagttttccattaccgggtcgtcctatggcgactaactttttcattggtaattgactgagtggtaccatctacgcaagcagagagaatccaaccatggatgaaagttgattgcaagttgcaacactatgatcaaggttagataatggcattacctttcgtgtttgatctatgaacgacaccaactctctgactgggacgtttactataccagggctatatttcagctgtttctgtactggcacagacattggagacaacaagccgttcatgtcatcactgatgtgcttcaatgaattcggtgatgtagccaatgcaatggcgacagcttgctctcttaattttagctcattctctacatcttctcgttgtaactcgctttgtcgcaacagacttacaagttctttaagctgttctttcatttccttgatttccatgtctttttcccataattggcatctgttcatagcatataagtaccnnnnaaagatccttattaaccactaatttgtttgttctagagaaagtacctgcntnaccaagagaataaaccnttttt

SEQ ID NO: 8314 - DNA, 655 bp, Gossypium hirsutum
gggcttgaaaggagttgtgatactaaaaggttaaaagtttaggattagcagtacgagaaaaataaattatagtaccagcaaggaacgacgcgattgtgttcacaaactacaagattacgaccatcggtagcttcaacaatcgtctctaccttcgagttaagatacattacacctgactcgatacacctagggaaaatcaatacaaattaagatcgggaacatagaagaagcaataaccaagagaaaaatgaccacaaatatcattgacaaggagctgttgttacctcctcaacaactcctcatggagcaagtatcgactaacacgtccataagcacgaccaatcataataggcttatcatcatcaaggtatactatggtgtcccgccaaacatgctcaatacatctttcaaggccaagatctgaaaacgaacattagattaacttggtgtttatttgattgcttcgaaataaatcttacataaattgcttagaaaatgaagtgaatacctttaaactcatcttcccatactccataattattggtaaaaggaagatcagggccaattagtccaacatttaaacccaacttagcagactctgcagcaagagcaagaccagccggaccacaaccaataaccaccaggtccaatacgt

SEQ ID NO: 8315 - DNA, 648 bp, Gossypium hirsutum
gttccacgtaccggaaagtagaggattcttacaaagagaatgtgaattcttcgaatcttttatctgacaacacggtgcagtatccatgtcaggttgctggaactcttttagataagaaatttgaaatggcgaaggcattgaagaaaggaatcctccattgatggaggaatccggaccgtgaatatttcctggctccccaactagatcaactacatattccctgcgagacaaccgattcgtctctgagcaacaacgtatcaaaacagaactagaaaaatttgaagatcaaagaatagctaatattctcaatgcaagaaattttttaaacaatgaatattctcaatgcaagaaattttttaaacaatggcacaaaattattcctaattattttatcaactttcaacatttcattagcaaatatatgaactaaaagttgtggatcttaccttggtgattgccggtcatcttcgattttgacgaggcatgaagaacgatgatcggcagcacaatatttgcatcctcgagcaatcctgcatggtaaaccgatatagtccgccaatttctgtgtatttaaacaatacactatgttcagtaagatcatcatatattacatctaaattcaaaggctgatctgtcctaaagaatgca

SEQ ID NO: 8316 - DNA, 625 bp, Gossypium hirsutum
tgtctcgatgggtctactgctgaactcgatctcatgaagttgacattccgatttccaatgcattcaatgaagaaggttaccacataaatggggaaaaaaatggtgatcaaatcatgaattcaggattagactacaattcagcattatctttggagccatataatccggcaattctctctgggttgtcgtctatttctgcttctctgaagaaagttataggaaataatttccctcttgcatccactgccccttatcggtcattgtctgcatattttgggttaaatgggatgcaatccaagctaatagaagcagttccgacagtgaaatattttgaggtcacagatcaattttatgtggaatataaaggtgatcctgatgaaaagaaacctcttgaggacagacaaccccaattttctcatgctttctttgaagccccacttgacttgaaagttaatggacatgataacgaagaacttaaaaataaggacatcaacacaatgttgaattcacagagtattttggttcttattgcaagccggaatgccttacgggagactatatgtaagcaaagccattttagccatataatgttctacaggaattttgatgttcctcttggaaagtt

SEQ ID NO: 8317 - DNA, 661 bp, Gossypium hirsutum
tattatcttctatatctattataatatttttataaatttttgtataccaatttagttttttaaaagtattgttataaaattaattatattttgttctttattcagaaaataagtaaattaattcttatatattaaattaaaaaattaatttttttaaatttttatctattttgacaaaaaattaataccatgtgtatcacatgttgacatatataaaccgatttttagtagtaaaaatttatgaaatttttaatataataatcaatttactttttaatctaacctatgtgaattaatttattatttaatacaatctgaatccttgtataaatatctcaatagtacttttacttattttttaggtctgttttatcattcttgaaaactaacccttggtgtcattttttgggtccattttaatacttaaataattaaatttttaaataatggcttgatacaattgttagaccaacaataactgaataaataattaaaaattcataaaattattaaaacataaaaaattattaaatcggttcaaaaaattcaactactaatttttatcctaatttaaaagccatttctaattcaattgattcaaccactttgttcaactaatataccaacaattgatgttcaatctaattaatccgacagacca

SEQ ID NO: 8318 - DNA, 213 bp, Gossypium hirsutum
  misc_feature (57)..(57): n is a, c, g, or t
attttctctaactggggtctccagaaaatcttctttcttgtcatgtgataccactgngatcatttcagacttcttttcttcattaccaccagtaatatcaactgttcttgaacgcagtaaacttgtcaaaagatcaatttcggatctgaaacagattaataatattcatcatctatagcatcaagctgaagcaatgaaggaaaatcataaagc

SEQ ID NO: 8319 - DNA, 494 bp, Gossypium hirsutum
  misc_feature (440)..(443): n is a, c, g, or t
  misc_feature (476)..(478): n is a, c, g, or t
  misc_feature (480)..(486): n is a, c, g, or t
tgtgttctgtgtataagcatttgttcaggtaatctggtagtgttatcttgctttgcaagccggtgatgttctgaattcaaatgtctgtttttagtttaacatgcttaccttggctttaatgaaaagaatgttctggtctaatgttaatctcttttcattccctttcctgtgttctgtaaattaactttagaattaaaagtcaaattgttgacaaattttagtgctatctttgaactgtagatctagctatagatcagatggtgcatcaacatctgaagctcgtagaataaggagaagaagcattagcatgactccagagatcagtgatgatatcgtaaggttgattatttttcctgttaagagttacttcttcttatgcttgactgatctagctttctttctctcactcattttcctagcatttctgtttttcttctggnnnnagtattaagataactcatttctatttccaaggnnncnnnnnnnatttcttt

SEQ ID NO: 8320 - DNA, 614 bp, Gossypium hirsutum
  misc_feature (567)..(569): n is a, c, g, or t
  misc_feature (601)..(602): n is a, c, g, or t
ttcatttcctccttttcttgtgcaaattgtatgttggttcagttattttaatagtttaggtagcttcttgttgggattaaggttttatttgtttgtgtttagtttgtcactatgctccttaccaccatcaaggattacccagttcctttaaatcttagccttcattggtgtcattagacgttgaactctggtattattgggcttaaatatgtagggaatttttgccaccaactatcctctattgcatgtgtgtgtaatggataaataaatatttgtatgcttatgttcctatgcataatatatattatatatatgacactgcttaactctacacaaattattggcaattttttcctaaacaaaaagaataaataaatttttttaagaattattggatatttcaattgtgtgtatgtctgtatgtgcgacaaaaactaaaatgagtaagaaagtacataaaaaatttctacaaaacaaattttttattccttgtaagaaaagcttataagaaatatctaatgttcaagtgtgaaaaaatatgcaatagagaagagaagttttgcttcnnntagcttttctcttcaattctggtcaattcttnngatagtatgaac

SEQ ID NO: 8321 - DNA, 506 bp, Gossypium hirsutum
  misc_feature (489)..(492): n is a, c, g, or t
  misc_feature (497)..(502): n is a, c, g, or t
cccttgctttttttctattagaaacgtatacctcaatggcgaacagtgccaactttttccagcataaatattctccatcaatcactctaaaatttgcaccactagcctctttcacaacagcatcaaacaaataattctaatgatgatgatgatgagcaacaagccctcctttaagaaaaccaattcatttcccttaaaaacccaacaagcaccaaactcccaggatcaaccaaccagctactggagatctccccatcatcatcatcataggattgaattccctacatcccctgaggttcccgagcagggagaccaaatcttccatgccgctcacccgcaacatcccatctcccaaacgtacctccccgacctcttcacctgcgcttcctgcaaggaattcggttccggcctccgattcacctgcactgactgcgactatcagctgcacaatttttgcgccttagcccctcctgctcttaagagacacgnnnnccacnnnnnnaaaa

SEQ ID NO: 8322 - DNA, 531 bp, Gossypium hirsutum
gtcttccttttcataacgaaatctctgccacaactatcacaccagtgatacatttttgtcccatcacaactaaacaaatgtttgcacatgcctcgtttctatgcaatgatgccctatatgccgtgatattatttttgttggatcccgaatatgattacaaaaaaatagctggttaattatttgtttctcctgataaatttctttcttcctactcaagttattaattacttttaacaagccctaacgaacatggaaactgcatatgctgtaaaatcatgcatgcctctatactgctgctgtgcttccgagcattgcagtttttctctcaactatttctatttacgtgtgagtaaaattagatttaattcgaaaaaaattaaattttgagtcactcgaattgattttttcaaataaactcgaataagtaattcaagtttcgagttaagttaaatttagaataactcaaataaaatattagtgtaaatacccttttgacccctattaattttgaaaatgaactaatcaggctct

SEQ ID NO: 8323 - DNA, 605 bp, Gossypium hirsutum
gaatacattttttttttcttgtggatattgttctgtaattattacaagttcatgaaagttttaattttgtctatgaaatttgagttcgttttcttaaaggtgcttgcttgtgtctaactcatggcagtggctggaataagttagggttgattgaaatttgtgttttctgttttcaacataaaacatatttggtaaataatgttgttatgtatttaaaaaaataaaaactttaactgtatcaaaataacatttttttttaaaaataaataaaaagttattatctaagtagtgttgcatgtctcagttgaactctttaatggtaatgtgaatgttaaattttcatcctgaatttagtatgagaagatataattgaaaacaataattcaatgatttttttaatagttaatttaataatatgatacttatatcaaaaataaaatcaagttgaaaattctaacttgatttaatagataaggttagaaaatttatttattttattaatgtaataagcgatttaaaattgttcatcgcctccttccacgccccttaggccctcactcacaattcacaactactttttttcttctctgcggactaaacacttc

SEQ ID NO: 8324 - DNA, 590 bp, Gossypium hirsutum
  misc_feature (535)..(537): n is a, c, g, or t
gagtgcatctaaaagcttacccttgtctagccataagcagcgtgtagtgattcttatcttcccttttaagctattctcaattatgccatcaatcttttgggggcgtaaaatttccatgctgcacaagggataatattaacacacatgagacaaatacaaaacatatcaacctcatttcagcataaaaaatttacctacctgaccactataatgccatcagatgcaattcttagtctctcatcaatacaaagttcagttgatgtgccaaatgccttatcaccatcactgtacattaactgcaatttaagattaaattcatgaatatccttcccaagggaactaaagccattagacagaactaaagccaaccagtaaattctccttcccaagggaactaaagccattagacagaacttttctattcctcaaatgagaaaccccaagcatctctccattctttataacctgataaaacaataaggatttattacaattttcaccagaaaacatttgaattataataatccttaactannnaatagtataaaaataaatagtgacttacagtggtgtgtcgaaccgcccggttg

SEQ ID NO: 8325 - DNA, 582 bp, Gossypium hirsutum
  misc_feature (367)..(367): n is a, c, g, or t
  misc_feature (413)..(414): n is a, c, g, or t
  misc_feature (463)..(464): n is a, c, g, or t
  misc_feature (489)..(491): n is a, c, g, or t
  misc_feature (499)..(500): n is a, c, g, or t
  misc_feature (503)..(504): n is a, c, g, or t
  misc_feature (507)..(510): n is a, c, g, or t
  misc_feature (516)..(519): n is a, c, g, or t
  misc_feature (538)..(538): n is a, c, g, or t
  misc_feature (567)..(576): n is a, c, g, or t
  misc_feature (578)..(579): n is a, c, g, or t
tttgatccagcactccctgttcccatttgaatcattgcagttaagtgtgaattgaggtgggatagattggctcttgtagcgccgcattttctttgagagggctctttgaggaaatatcattatgtcgtcatctgtaagcatatgacctccatcctcatgacctccatcatagaagatgttttctttgttctcattcttttgaggcttgccatgcttatatgtggctgttgagctttcaggatgaacttttctgtggaacatgtgcaagatctacacaccacatttcagcgaattaaacaactctacctttttcctccatcaaaatcctaccccaccggtttaaatctcaaaacttcttgaaataaanaaaaaaaaaaaaagaaaaaggaaaaaaaaaagcgaaaaaagaaggnnttattgttaacccattcttgaaatgcaaaccattcaaattggtccagtnntcttggccaaaatttgtcaatgttnnnacttaggnncanntgnnnncagcannnnttttattggattctttacntacaaagtttcctttttaccccccttggnnnnnnnnnntnnaaa

SEQ ID NO: 8326 - DNA, 581 bp, Gossypium hirsutum
  misc_feature (101)..(101): n is a, c, g, or t
  misc_feature (105)..(105): n is a, c, g, or t
  misc_feature (115)..(115): n is a, c, g, or t
  misc_feature (120)..(120): n is a, c, g, or t
  misc_feature (122)..(122): n is a, c, g, or t
  misc_feature (125)..(125): n is a, c, g, or t
  misc_feature (138)..(138): n is a, c, g, or t
  misc_feature (141)..(142): n is a, c, g, or t
  misc_feature (146)..(146): n is a, c, g, or t
  misc_feature (204)..(204): n is a, c, g, or t
  misc_feature (222)..(222): n is a, c, g, or t
  misc_feature (235)..(235): n is a, c, g, or t
  misc_feature (238)..(238): n is a, c, g, or t
  misc_feature (241)..(241): n is a, c, g, or t
  misc_feature (243)..(243): n is a, c, g, or t
  misc_feature (246)..(246): n is a, c, g, or t
  misc_feature (249)..(249): n is a, c, g, or t
  misc_feature (301)..(301): n is a, c, g, or t
  misc_feature (309)..(309): n is a, c, g, or t
  misc_feature (312)..(312): n is a, c, g, or t
  misc_feature (323)..(323): n is a, c, g, or t
  misc_feature (328)..(328): n is a, c, g, or t
  misc_feature (338)..(339): n is a, c, g, or t
  misc_feature (341)..(341): n is a, c, g, or t
  misc_feature (355)..(356): n is a, c, g, or t
  misc_feature (358)..(358): n is a, c, g, or t
  misc_feature (361)..(361): n is a, c, g, or t
  misc_feature (363)..(364): n is a, c, g, or t
acaatatggtaacttccaaagctaggacagcctaaagctgggataagtgacaaacccaaagatatacatacaaagctagggtcaaaattgggaaccccaanggtnaccccttttncgtcncntcncgtttatcctgantgnntacntaaaaaaaggcatccccacccttttaaccataaccaaaaggaattttttcccccaagncccacttaccggataacntaataattataantanaancntanacntttccttttaaaggttttaaaggggattaagaaaccgcgaatatatttaaanaattattnatnattctttcttntatantaaaaaaatnntnttgagaaaaggaanntnttntnnttttttttattcaaaaaaaacattcttatatttatgaatttctaggaatattaattcagcaaaccaaacatgttgattgccaagtgttcatgtttaataatatttcaaacataatattatgatgtccattaagaatagtatctccaaaactataaaaatacatcttagtaacatttcagcatggcgcaccatttctagttttatgagaaatatgctc

SEQ ID NO: 8327 - DNA, 453 bp, Gossypium hirsutum
atcctatgcagacacggtcaaagaatggtattttcaagccacgagtgttttcttctatcttagacgagaatgagccttccattatagctgaagcttttcaaagttttgcttggactgctactgcaaaggctgaatatagtgctttaatattgaatcgcatgtggaatttggtgcctctacctgctggtcatcgtgctgttggttgcaagtggatttttaagattaagcgacatgctgatggttcgattgctagatacaaaggttgtttagccgtcaaaggttatcttcaggaggctggagtcaatttttatgaaaccttcagtcctgttgtcaagccaacaacggttagagtgatgttggctcttgctgtttctcgaggctggtcccttcagcaagtggacatcaacaatgccttcctgaatggcgatcttcatgaagaaatatacatgacac

SEQ ID NO: 8328 - DNA, 615 bp, Gossypium hirsutum
gtggtgttaccgaaatagaggatcgtctacaggtgaaattgagctattaaatccaactttcatgtgtaaaacttttttcatctatttttaagtcaaatatacgtcatttccatggaatactttggatgttaacatgttgcccttttaatctttttaattattttaggatggtgtacctgaaacaattgagacactcaggaaagctggaattaatttttggatgctgaccggagacaagcagaatactgccatacagattgctctttcttgcaattttatttccccaggtggattaaatcatttacataaatctcaactctttgtgttaatcacatgtcctgctgtttatattattgtttcaaatatcttggtcaatgaggacttttcttggttcctaaatttttggaactaagctacttgtatgatttgttgcttggattgaacaactacatttctttcaagttttcatccttgcatctctccacataccaaaaaatgcttcatgcattcttattttttctaataaagataaaaaaaaagtgttagattcaaatataaataaacataaaaaattagagtttagctttatcttcaaaattttagtacctgaaatcg

SEQ ID NO: 8329 - DNA, 569 bp, Gossypium hirsutum
tttttcctggtcttcaccatagagtattctctaatatgcaaaatttcagattataataagcttaatagagaattttctatattgggtatagtttttagtaatagtatgtatttagtatttaaagataaagatatacattgattctatacgcaaaagtaggtttatcaacttcccaatgaaaaagaggcagtttatgaagcattggacaaaagggtagcttgggagactgagtttccattgattgcagctgcaaaagctttacaaattttcaagaagaggagccaatggttgcgtgttattcaagtatattcagtctattcgtattcttgctttgtattttccagcttctaaaatagattcataaatgcaaaaaagctttatatgttcaatgattttcatttaatatatattatattaaaatagccttgtattatcatatttgattctataaaatactctcggtcagtattttaaaggaaccttaatgctattttttgtgaatagatactttcaatcagtattctttgtgaagtttggcacatataaaaatgaagttgcaagagagtttg

SEQ ID NO: 8330 - DNA, 547 bp, Gossypium hirsutum
ttttataaaggaccacctgatagggaatttgaacaattaaaaaaaatatcctatagctggtaatagctaagtagaaatcagcagcaaagctgaaaagggcttgcttcaagtgatagtttgcgaatatcaattaattgagataggaatcttaagtccataatgctaatctttaggtaccagatccaaaagggacacatataaggagtgaagttaacagttgaaacagaatatattacagaacaaaagcagtggactcgagtcattatcgaccggctctacttgtcaaaatgcataaccgctatttcacatcacacattaagctttttagtagtaatccacactgcaacatttcacttcctggttatccaagaaggatggaaaagaacttgccttcaggaatgttaatatagctttacaacctgtcttcccttatgaaaatgtgagagtgctgtgggcctatacctgagtcatatggaccatctaccaataaatattgagcctctactgtccttgttctaagtcccctcttaagtgatgataggtctat

SEQ ID NO: 8331 - DNA, 638 bp, Gossypium hirsutum
gctctgcacgttatctcaatataacgctcaacaatgtcgtcaaggtaactgtctaattagccacttcaaagtgaatatttactctcagtactaagattagaacatttgactttatcctatgattcccacatttttcttgctactttctattgattgagaaaaaactgctctacaaggtttcgtaatacttgaaatttaatgtgccgagattgttgtgaaccataattccagctctaatgcaaaaatataaactgataagaattcatataagaatttatggccttcagcaagtgctgaatatgggtgctttaagtagtccttgtcacaacatgcttatgaattttcgtgcttgtatctatactagctggttttagaacatagttcatactctgtggttatgttaagaaatcgtgtcatttatgatgcaatatatttgtgcaacacttgatcaaataatacatgtgtgcagcacttaatcatggttccttgtaacattttagtttcaaagttatgtgaggatgattaaatcatctgaactttaactagtataaattattcaatggttacactgcattattgatgaacttgaaccatcatattatcagatatatctaattggcttgatttctgggtgtatg

SEQ ID NO: 8332 - DNA, 653 bp, Gossypium hirsutum
  misc_feature (193)..(193): n is a, c, g, or t
  misc_feature (195)..(199): n is a, c, g, or t
  misc_feature (475)..(475): n is a, c, g, or t
  misc_feature (566)..(566): n is a, c, g, or t
  misc_feature (590)..(590): n is a, c, g, or t
  misc_feature (612)..(613): n is a, c, g, or t
  misc_feature (619)..(621): n is a, c, g, or t
  misc_feature (634)..(637): n is a, c, g, or t
  misc_feature (639)..(639): n is a, c, g, or t
  misc_feature (641)..(643): n is a, c, g, or t
  misc_feature (645)..(645): n is a, c, g, or t
atgcatattagggtgcaataataaaacacattgtactcataaggaaagaacacagttttgagtgttagagacaacattgttaagaagagatagtcacaaactttaaacataaaccatgaaccataaaacaaacatgaaaggtaaaaagaaaataaaagtttttcacatatatggtttcttcaattgtatttangnnnnngtacttatgcgatatttaatgttactaacaattataatcgaaatgaaaaaatagaaatgaaaaaaatactaagaaaaagtacaacttactttatttttaaatccaaattaatttggtgaataactcaatcgagcaaagcaattgaaatggaaaaacatttttttcttcgaatcctaactcggtttaagttgttaatttaagttattaagttagatcattgttcactattgattttcattcaccgttttaccttaaatcctgaaattctttttgtcnaattatttcaaattatcatcgatctatcgctgatctcaaacaccatcgatcttctgaattggaaccctccatcaaccagaactcccctgcngtatgctattgtatttgtggattnttcgtggtaatatatgattgtnnatcatnnncatcattttatannnnanannngntccaaata

SEQ ID NO: 8333 - DNA, 581 bp, Gossypium hirsutum
tctctggcagagcagtggccgatgttttgaccaaaccattatcagcagggcagtttgaaaaattcagaaagaaacttcgagtaattcccatggaaagtcgtgatatatagcagcaagaacaaatctcatacaggaacgaaggaagtcaatatgcatgggccatgttaggaataaagaatctgttagttgttaggcagttattattctgttattctgttaataaccactgctagctgatatattactactaacgtactgcctataaatatccttgtatattttcttgttgaagtatggaaatgagtttacactcaacacggacatattatctgcttttgttgttattagaacaaaaatactggatccagactcattagtttatagagtagtttaattatttcattaatgaattctacaaaatgttgttttgattagatggggactaaatttttaatttggtaaaatttaaattcgagttgaatttttttaaaaaatttattttaattagatagcttgatttgaattaatcatttaattattaattttgtactcataatcattaatgttataataataataaa

SEQ ID NO: 8334 - DNA, 643 bp, Gossypium hirsutum
tacactagcaaagcacattttttattaaggaatgaccatttaatgattgactcaagaacatctgcatgattaaaatcatggccaaaaatcaaaagatgaaatgagaatgatgattgttttccctattccctcttccatttattttattattatcatctttttgcttttgtggtttacagtttctatggatgaggcaattagaagggaaacatatgccaaaccaataaacaaattaaagaaacacaaaactgaaatagacttaatagcattctgaatttaacttcacgagtaggaaatatcatatgctcctgttatgcgattattacatttggggaaaaaaggacaagagaaaaagatcattgctgcaagtttgacccttttttcaccctccctgtttctattcaacttataaaagcagtagttagtatttgacaaccaaatacaattttaaaatagtctcaacttctagcaaaaattcaaacataaaaaatgacaaaaataagccaaactcacaaggaaaccatgaaaacttgcagaatcctaagtagactgaattagctttagctcgtgtactaagcataataatgtgatggatcaagacatcacctaaaatagctaacgaattgctcaggtcactttcatc

SEQ ID NO: 8335 - DNA, 627 bp, Gossypium hirsutum
gggtcgactcttctttggtgtcaaggtaatagctatgaatagtcatcgactccccggaaagggtagaagaatgggacctattatgggacatacaatgcattacaggcgtatgatcattacgcttcaaccgggttattctattccacctcttagaacgaaaagaacttaaatcaaaatacttaatagcatggcgatacatttatacaaaacttctaccccgggcacacgcaatggagccgtagacagtcaagtgaaatccaatccacgaaataatttgatctatggacagcatcgttgtggtaaaggtcgtaatgccagaggaatcattaccgcaaggcatagagggggaggtcataagcgtctataccgtaaaattgattttcgacgaaatgaaaaagacatatatggtagaatcgtaaccatagaatacgaccctaatcgaaatgcatacatttgtctcatacactatggggatggtgagaagagatatattttacatcccagaggggctataattggagataccattgtttctggtacagaagttcctataaaaatgggaaatgccctacctttgagtgcggtttgaactattgatttacgtaattggaaggaaccaattaaggt

SEQ ID NO: 8336 - DNA, 636 bp, Gossypium hirsutum
aattaagctgataaataaatttggtcttactttggataactagagcccgagctgatgttggagtagtgaaaataacaagagtggacagcaaaagaatgcaagctttattatatatttattaaatttattaatatatttatatttattatgtatgtaaatttcgaatcaatatggtatctttattatatcaatttaatatactattttttaatatatatttaattatcaacaattttttaaaataaaataatatattttaaatgaaattgaaataggctgaaaaaatgatacattattaaaatattattccataactcacttccaaattctataaaacttaaaaaagagatagtgtccaattaaagcctcacttgtaagtcaaagaacatacttacatttattgcaatacaatttaatcaatcacaattaatgaaggtactcaatcaactaactaaaccaatttcgcaagttattcacaattacatgtaaacaaattgccaatctcctagttttccatgctcatgttcgtgcagtaagatgataattatcatgatttatcatttacatatatccataaaaaaatcaagctaaagtaacaacaaaggaatcacagtcaatcatagtcaatcagccaat

SEQ ID NO: 8337 - DNA, 582 bp, Gossypium hirsutum
gagtaatgtttgttttttttcatgcaagtacaagataatttgtatcttgaaatattctatttctactccagttatacactttctctgtacccttttatagcttttgaagaagacttcagcttgtcaaatatcaaaaattgcttccccagtggaacagtttcgtgatgcattacagcaggttagttacgataaaacacgttttttttatcctacttttctaatcaaccaaaattttgcttttttggattatatagggtattttatattatttgcattatttatactagttagtatttacttcctgcccgagtaataggatttacgatcattgagatcttagatggatccagattgggtcatcgggttagacccaaaaaggtcccgttttggcgtctgaaagttaagcccaaaacaacaccatttcaaaggctatataaaccaaaaaataaaaaaaatcttttgtgacaagtttttttttttaaaaaaaaaatccttttacccttttttctctcaaactccccctcttgcccacccagggaacggggaatctccgttggggcccccattcattacaactgatat

SEQ ID NO: 8338 - DNA, 595 bp, Gossypium hirsutum
ttgaatagggaatgcggttgctaagttccagttcatccaaactccctttaatacatttcatcaccaatgttttagtaatatggaattcaagaatcttacacagagacgccaatctagcaagacgatttttaatttgtaatactttctttctaggtgatgatttcatgttgatcgagccaccatggactccttgtatcacttacaaacttcattagattccaggtgccaattggtcatttcaaatttcagaagtagcataaaatgtgttaatttacttattaaaatgaaaaaataaaattgagtaaaaacacaaaaaagacatttaaattggtcgagaacaagctcgttaaatgtaatagagagtctaatttgacatatcaacttacgacaaatcaattgatatttagaattgtgtaaatcaatttaggataaatcaatttttaaaaaaaatgtactaatttagtaattaatcaagaacctgtattaaaatgttgctaattaaaagttaattcgattcacttcattactgttgcaataaattatattcccttttataattaagagttatgtaatttaaagggtaaatttcacagat

SEQ ID NO: 8339 - DNA, 745 bp, Gossypium hirsutum
  misc_feature (598)..(598): n is a, c, g, or t
  misc_feature (600)..(602): n is a, c, g, or t
  misc_feature (604)..(613): n is a, c, g, or t
  misc_feature (615)..(626): n is a, c, g, or t
  misc_feature (631)..(632): n is a, c, g, or t
  misc_feature (635)..(635): n is a, c, g, or t
  misc_feature (637)..(640): n is a, c, g, or t
  misc_feature (642)..(643): n is a, c, g, or t
  misc_feature (646)..(652): n is a, c, g, or t
  misc_feature (672)..(678): n is a, c, g, or t
  misc_feature (684)..(688): n is a, c, g, or t
  misc_feature (692)..(692): n is a, c, g, or t
  misc_feature (694)..(695): n is a, c, g, or t
  misc_feature (702)..(704): n is a, c, g, or t
  misc_feature (706)..(713): n is a, c, g, or t
  misc_feature (715)..(722): n is a, c, g, or t
  misc_feature (726)..(727): n is a, c, g, or t
agcccctaccagctgcctcgggtgatgccgggagtcctaagaaaattttgctatctggaacatttgtagtccattgcttccatgcattttcaaggtttgtaatatcaccatctatgtattcgcattgagggttgttatagaattgtacccagacatagtcaaaaaggcccgttttaagggcacccccaacccaagcatcagggaatggacactgtggggctgccgtcaagtatactttcttgctgcgttggctatacccggagagatacttcgcaagatcatcccagtgttggtttgttccaccttcgatatcaaaatcaattccgtccaaaatggcatcaccgaaaggtcgagaggccgattctccgcccaagaaattgttccacaagtaggtcgcaacttgtctcgcgtcgtcagatgaggcaaggtaatagctccctgcacctcctcctagtgaaagtattactttaatcccttgtgcttgacatgatttgatgtctgagcttaaattagtgcatccattgctatacggatcacaatgaccagcaaggttgatcattggagtctggccattgccaaacgttggaaggatgctaancnnnannnnnnnnnnannnnnnnnnnnnggggnnggntnnnngnnttnnnnnnngggggggggggggggggggnnnnnnnttactnnnnntcantnnaggacgnnngnnnnnnnngnnnnnnnntggnngaaaattttttggggggg
